United States Patent Application Publication US 2026/0227408 A1, published August 6, 2026 (application 18/869,053).

The application's sequence listing, which the Patent Office published only in electronic form, follows.

SEQUENCE LISTING (38393 sequences)

SEQ ID NO: 1 - protein, 509 aa, Homo sapiens
MAAAAGMLLLGLLQAGGSVLGQAMEKVTGGNLLSMLLIACAFTLSLVYLIRLAAGHLVQLPAGVKSPPYIFSPIPFLGHAIAFGKSPIEFLENAYEKYGPVFSFTMVGKTFTYLLGSDAAALLFNSKNEDLNAEDVYSRLTTPVFGKGVAYDVPNPVFLEQKKMLKSGLNIAHFKQHVSIIEKETKEYFESWGESGEKNVFEALSELIILTASHCLHGKEIRSQLNEKVAQLYADLDGGFSHAAWLLPGWLPLPSFRRRDRAHREIKDIFYKAIQKRRQSQEKIDDILQTLLDATYKDGRPLTDDEVAGMLIGLLLAGQHTSSTTSAWMGFFLARDKTLQKKCYLEQKTVCGENLPPLTYDQLKDLNLLDRCIKETLRLRPPIMIMMRMARTPQTVAGYTIPPGHQVCVSPTVNQRLKDSWVERLDFNPDRYLQDNPASGEKFAYVPFGAGRHRCIGENFAYVQIKTIWSTMLRLYEFDLIDGYFPTVNYTTMIHTPENPVIRYKRRSK

SEQ ID NO: 2 - protein, 228 aa, Homo sapiens
MPVKGGTKCIKYLLFGFNFIFWLAGIAVLAIGLWLRFDSQTKSIFEQETNNNNSSFYTGVYILIGAGALMMLVGFLGCCGAVQESQCMLGLFFGFLLVIFAIEIAAAIWGYSHKDEVIKEVQEFYKDTYNKLKTKDEPQRETLKAIHYALNCCGLAGGVEQFISDICPKKDVLETFTVKSCPDAIKEVFDNKFHIIGAVGIGIAVVMIFGMIFSMILCCAIRRNREMV

SEQ ID NO: 3 - protein, 458 aa, Homo sapiens
MNRGVPFRHLLLVLQLALLPAATQGKKVVLGKKGDTVELTCTASQKKSIQFHWKNSNQIKILGNQGSFLTKGPSKLNDRADSRRSLWDQGNFPLIIKNLKIEDSDTYICEVEDQKEEVQLLVFGLTANSDTHLLQGQSLTLTLESPPGSSPSVQCRSPRGKNIQGGKTLSVSQLELQDSGTWTCTVLQNQKKVEFKIDIVVLAFQKASSIVYKKEGEQVEFSFPLAFTVEKLTGSGELWWQAERASSSKSWITFDLKNKEVSVKRVTQDPKLQMGKKLPLHLTLPQALPQYAGSGNLTLALEAKTGKLHQEVNLVVMRATQLQKNLTCEVWGPTSPKLMLSLKLENKEAKVSKREKAVWVLNPEAGMWQCLLSDSGQVLLESNIKVLPTWSTPVQPMALIVLGGVAGLLLFIGLGIFFCVRCRHRRRQAERMSQIKRLLSEKKTCQCPHRFQKTCSPI

SEQ ID NO: 4 - protein, 184 aa, Homo sapiens
MLQMAGQCSQNEYFDSLLHACIPCQLRCSSNTPPLTCQRYCNASVTNSVKGTNAILWTCLGLSLIISLAVFVLMFLLRKINSEPLKDEFKNTGSGLLGMANIDLEKSRTGDEIILPRGLEYTVEECTCEDCIKSKPKVDSDHCFPLPAMEEGATILVTTKTNDYCKSLPAALSATEIEKSISAR

SEQ ID NO: 5 - protein, 422 aa, Homo sapiens
MGMTRMLLECSLSDKLCVIQEKQYEVIIVPTLLVTIFLILLGVILWLFIREQRTQQQRSGPQGIAPVPPPRDLSWEAGHGGNVALPLKETSVENFLGATTPALAKLQVPREQLSEVLEQICSGSCGPIFRANMNTGDPSKPKSVILKALKEPAGLHEVQDFLGRIQFHQYLGKHKNLVQLEGCCTEKLPLYMVLEDVAQGDLLSFLWTCRRDVMTMDGLLYDLTEKQVYHIGKQVLLALEFLQEKHLFHGDVAARNILMQSDLTAKLCGLGLAYEVYTRGAISSTQTIPLKWLAPERLLLRPASIRADVWSFGILLYEMVTLGAPPYPEVPPTSILEHLQRRKIMKRPSSCTHTMYSIMKSCWRWREADRPSPRELRLRLEAAIKTADDEAVLQVPELVVPELYAAVAGIRVESLFYNYSML

SEQ ID NO: 6 - protein, 676 aa, Homo sapiens [sequence omitted]

SEQ ID NO: 7 - protein, 320 aa, Homo sapiens
MGPWSRVRVAKCQMLVTCFFILLLGLSVATMVTLTYFGAHFAVIRRASLEKNPYQAVHQWAFSAGLSLVGLLTLGAVLSAAATVREAQGLMAGGFLCFSLAFCAQVQVVFWRLHSPTQVEDAMLDTYDLVYEQAMKGTSHVRRQELAAIQDVFLCCGKKSPFSRLGSTEADLCQGEEAAREDCLQGIRSFLRTHQQVASSLTSIGLALTVSALLFSSFLWFAIRCGCSLDRKGKYTLTPRACGRQPQEPSLLRCSQGGPTHCLHSEAVAIGPRGCSGSLRWLQESDAAPLPLSCHLAAHRALQGRSRGGLSGCPERGLSD

SEQ ID NO: 8 - protein, 370 aa, Homo sapiens
MAFRRRTKSYPLFSQEFVIHNHADIGFCLVLCVLIGLMFEVTAKTAFLFILPQYNISVPTADSETVHYHYGPKDLVTILFYIFITIILHAVVQEYILDKISKRLHLSKVKHSKFNESGQLVVFHFTSVIWCFYVVVTEGYLTNPRSLWEDYPHVHLPFQVKFFYLCQLAYWLHALPELYFQKVRKEEIPRQLQYICLYLVHIAGAYLLNLSRLGLILLLLQYSTEFLFHTARLFYFADENNEKLFSAWAAVFGVTRLFILTLAVLAIGFGLARMENQAFDPEKGNFNTLFCRLCVLLLVCAAQAWLMWRFIHSQLRHWREYWNEQSAKRRVPATPRLPARLIKRESGYHENGVVKAENGTSPRTKKLKSP

SEQ ID NO: 9 - protein, 525 aa, Homo sapiens
MWEAQFLGLLFLQPLWVAPVKPLQPGAEVPVVWAQEGAPAQLPCSPTIPLQDLSLLRRAGVTWQHQPDSGPPAAAPGHPLAPGPHPAAPSSWGPRPRRYTVLSVGPGGLRSGRLPLQPRVQLDERGRQRGDFSLWLRPARRADAGEYRAAVHLRDRALSCRLRLRLGQASMTASPPGSLRASDWVILNCSFSRPDRPASVHWFRNRGQGRVPVRESPHHHLAESFLFLPQVSPMDSGPWGCILTYRDGFNVSIMYNLTVLGLEPPTPLTVYAGAGSRVGLPCRLPAGVGTRSFLTAKWTPPGGGPDLLVTGDNGDFTLRLEDVSQAQAGTYTCHIHLQEQQLNATVTLAIITVTPKSFGSPGSLGKLLCEVTPVSGQERFVWSSLDTPSQRSFSGPWLEAQEAQLLSQPWQCQLYQGERLLGAAVYFTELSSPGAQRSGRAPGALPAGHLLLFLILGVLSLLLLVTGAFGFHLWRRQWRPRRFSALEQGIHPPQAQSKIEELEQEPEPEPEPEPEPEPEPEPEQL

SEQ ID NO: 10 - protein, 263 aa, Homo sapiens
MLLAWVQAFLVSNMLLAEAYGSGGCFWDNGHLYREDQTSPAPGLRCLNWLDAQSGLASAPVSGAGNHSYCRNPDEDPRGPWCYVSGEAGVPEKRPCEDLRCPETTSQALPAFTTEIQEASEGPGADEVQVFAPANALPARSEAAAVQPVIGISQRVRMNSKEKKDLGTLGYVLGITMMVIIIAIGAGIILGYSYKRGKDLKEQHDQKVCEREMQRITLPLSAFTNPTCEIVDEKTVVVHTSQTPVDPQEGTTPLMGQAGTPGA

SEQ ID NO: 11 - protein, 142 aa, Homo sapiens
MAAAVAAAGAGEPQSPDELLPKGDAEKPEEELEEDDDEELDETLSERLWGLTEMFPERVRSAAGATFDLSLFVAQKMYRFSRAALWIGTTSFMILVLPVVFETEKLQMEQQQQLQQRQILLGPNTGLSGGMPGALPSLPGKI

SEQ ID NO: 12 - protein, 288 aa, Homo sapiens
MERPQPDSMPQDLSEALKEATKEVHTQAENAEFMRNFQKGQVTRDGFKLVMASLYHIYVALEEEIERNKESPVFAPVYFPEELHRKAALEQDLAFWYGPRWQEVIPYTPAMQRYVKRLHEVGRTEPELLVAHAYTRYLGDLSGGQVLKKIAQKALDLPSSGEGLAFFTFPNIASATKFKQLYRSRMNSLEMTPAVRQRVIEEAKTAFLLNIQLFEELQELLTHDTKDQSPSRAPGLRQRASNKVQDSAPVETPRGKPPLNTRSQAPLLRWVLTLSFLVATVAVGLYAM

SEQ ID NO: 13 - protein, 722 aa, Homo sapiens
MPLHQLGDKPLTFPSPNSAMENGLDHTPPSRRASPGTPLSPGSLRSAAHSPLDTSKQPLCQLWAEKHGARGTHEVRYVSAGQSVACGWWAFAPPCLQVLNTPKGILFFLCAAAFLQGMTVNGFINTVITSLERRYDLHSYQSGLIASSYDIAACLCLTFVSYFGGSGHKPRWLGWGVLLMGTGSLVFALPHFTAGRYEVELDAGVRTCPANPGAVCADSTSGLSRYQLVFMLGQFLHGVGATPLYTLGVTYLDENVKSSCSPVYIAIFYTAAILGPAAGYLIGGALLNIYTEMGRRTELTTESPLWVGAWWVGFLGSGAAAFFTAVPILGYPRQLPGSQRYAVMRAAEMHQLKDSSRGEASNPDFGKTIRDLPLSIWLLLKNPTFILLCLAGATEATLITGMSTFSPKFLESQFSLSASEAATLFGYLVVPAGGGGTFLGGFFVNKLRLRGSAVIKFCLFCTVVSLLGILVFSLHCPSVPMAGVTASYGGSLLPEGHLNLTAPCNAACSCQPEHYSPVCGSDGLMYFSLCHAGCPAATETNVDGQKVYRDCSCIPQNLSSGFGHATAGKCTSTCQRKPLLLVFIFVVIFFTFLSSIPALTATLRCVRDPQRSFALGIQWIVVRILGGIPGPIAFGWVIDKACLLWQDQCGQQGSCLVYQNSAMSRYILIMGLLYKVLGVLFFAIACFLYKPLSESSDGLETCLPSQSSAPDSATDSQLQSSV

SEQ ID NO: 14 - protein, 387 aa, Homo sapiens
MVFAFWKVFLILSCLAGQVSVVQVTIPDGFVNVTVGSNVTLICIYTTTVASREQLSIQWSFFHKKEMEPISIYFSQGGQAVAIGQFKDRITGSNDPGNASITISHMQPADSGIYICDVNNPPDFLGQNQGILNVSVLVKPSKPLCSVQGRPETGHTISLSCLSALGTPSPVYYWHKLEGRDIVPVKENFNPTTGILVIGNLTNFEQGYYQCTAINRLGNSSCEIDLTSSHPEVGIIVGALIGSLVGAAIIISVVCFARNKAKAKAKERNSKTIAELEPMTKINPRGESEAMPREDATQLEVTLPSSIHETGPDTIQEPDYEPKPTQEPAPEPAPGSEPMAVPDLDIELELEPETQSELEPEPEPEPESEPGVVVEPLSEDEKGVVKA

SEQ ID NO: 15 - protein, 336 aa, Homo sapiens
MARRRSQRVCASGPSMLNSARGAPELLRGTATNAEVSAAAAGATGSEELPPGDRGCRNGGGRGPAATTSSTGVAVGAEHGEDSLSRKPDPEPGRMDHHQPGTGRYQVLLNEEDNSESSAIEQPPTSNPAPQIVQAASSAPALETDSSPPPYSSITVEVPTTSDTEVYGEFYPVPPPYSVATSLPTYDEAEKAKAAAMAAAAAETSQRIQEEECPPRDDFSDADQLRVGNDGIFMLAFFMAFIFNWLGFCLSFCITNTIAGRYGAICGFGLSLIKWILIVRFSDYFTGYFNGQYWLWWIFLVLGLLLFFRGFVNYLKVRNMSESMAAAHRTRYFFLL

SEQ ID NO: 16 - protein, 655 aa, Homo sapiens
MVLYTTPFPNSCLSALHCVSWALIFPCYWLVDRLAASFIPTTYEKRQRADDPCCLQLLCTALFTPIYLALLVASLPFAFLGFLFWSPLQSARRPYIYSRLEDKGLAGGAALLSEWKGTGPGKSFCFATANVCLLPDSLARVNNLFNTQARAKEIGQRIRNGAARPQIKIYIDSPTNTSISAASFSSLVSPQGGDGVARAVPGSIKRTASVEYKGDGGRHPGDEAANGPASGDPVDSSSPEDACIVRIGGEEGGRPPEADDPVPGGQARNGAGGGPRGQTPNHNQQDGDSGSLGSPSASRESLVKGRAGPDTSASGEPGANSKLLYKASVVKKAAARRRRHPDEAFDHEVSAFFPANLDFLCLQEVFDKRAATKLKEQLHGYFEYILYDVGVYGCQGCCSFKCLNSGLLFASRYPIMDVAYHCYPNKCNDDALASKGALFLKVQVGSTPQDQRIVGYIACTHLHAPQEDSAIRCGQLDLLQDWLADFRKSTSSSSAANPEELVAFDVVCGDFNFDNCSSDDKLEQQHSLFTHYRDPCRLGPGEEKPWAIGTLLDTNGLYDEDVCTPDNLQKVLESEEGRREYLAFPTSKSSGQKGRKELLKGNGRRIDYMLHAEEGLCPDWKAEVEEFSFITQLSGLTDHLPVAMRLMVSSGEEEA

SEQ ID NO: 17 - protein, 417 aa, Homo sapiens
MEFVKCLGHPEEFYNLVRFRIGGKRKVMPKMDQDSLSSSLKTCYKYLNQTSRSFAAVIQALDGEMRNAVCIFYLVLRALDTLEDDMTISVEKKVPLLHNFHSFLYQPDWRFMESKEKDRQVLEDFPTISLEFRNLAEKYQTVIADICRRMGIGMAEFLDKHVTSEQEWDKYCHYVAGLVGIGLSRLFSASEFEDPLVGEDTERANSMGLFLQKTNIIRDYLEDQQGGREFWPQEVWSRYVKKLGDFAKPENIDLAVQCLNELITNALHHIPDVITYLSRLRNQSVFNFCAIPQVMAIATLAACYNNQQVFKGAVKIRKGQAVTLMMDATNMPAVKAIIYQYMEEIYHRIPDSDPSSSKTRQIISTIRTQNLPNCQLISRSHYSPIYLSFVMLLAALSWQYLTTLSQVTEDYVQTGEH

SEQ ID NO: 18 - protein, 226 aa, Homo sapiens
MPGGPGVLQALPATIFLLFLLSAVYLGPGCQALWMHKVPASLMVSLGEDAHFQCPHNSSNNANVTWWRVLHGNYTWPPEFLGPGEDPNGTLIIQNVNKSHGGIYVCRVQEGNESYQQSCGTYLRVRQPPPRPFLDMGEGTKNRIITAEGIILLFCAVVPGTLLLFRKRWQNEKLGLDAGDEYEDENLYEGLNLDDCSMYEDISRGLQGTYQDVGSLNIGDVQLEKP

SEQ ID NO: 19 - protein, 335 aa, Homo sapiens
MVRRDRLRRMREWWVQVGLLAVPLLAAYLHIPPPQLSPALHSWKSSGKFFTYKGLRIFYQDSVGVVGSPEIVVLLHGFPTSSYDWYKIWEGLTLRFHRVIALDFLGFGFSDKPRPHHYSIFEQASIVEALLRHLGLQNRRINLLSHDYGDIVAQELLYRYKQNRSGRLTIKSLCLSNGGIFPETHRPLLLQKLLKDGGVLSPILTRLMNFFVFSRGLTPVFGPYTRPSESELWDMWAGIRNNDGNLVIDSLLQYINQRKKFRRRWVGALASVTIPIHFIYGPLDPVNPYPEFLELYRKTLPRSTVSILDDHISHYPQLEDPMGFLNAYMGFINSF

SEQ ID NO: 20 - protein, 234 aa, Homo sapiens
MDPGLQQALNGMAPPGDTAMHVPAGSVASHLGTTSRSYFYLTTATLALCLVFTVATIMVLVVQRTDSIPNSPDNVPLKGGNCSEDLLCILKRAPFKKSWAYLQVAKHLNKTKLSWNKDGILHGVRYQDGNLVIQFPGLYFIICQLQFLVQCPNNSVDLKLELLINKHIKKQALVTVCESGMQTKHVYQNLSQFLLDYLQVNTTISVNVDTFQYIDTSTFPLENVLSIFLYSNSD

SEQ ID NO: 21 - protein, 3354 aa, Homo sapiens
MGRHVATSCHVAWLLVLISGCWGQVNRLPFFTNHFFDTYLLISEDTPVGSSVTQLLAQDMDNDPLVFGVSGEEASRFFAVEPDTGVVWLRQPLDRETKSEFTVEFSVSDHQGVITRKVNIQVGDVNDNAPTFHNQPYSVRIPENTPVGTPIFIVNATDPDLGAGGSVLYSFQPPSQFFAIDSARGIVTVIRELDYETTQAYQLTVNATDQDKTRPLSTLANLAIIITDVQDMDPIFINLPYSTNIYEHSPPGTTVRIITAIDQDKGRPRGIGYTIVSGNTNSIFALDYISGVLTLNGLLDRENPLYSHGFILTVKGTELNDDRTPSDATVTTTFNILVIDINDNAPEFNSSEYSVAITELAQVGFALPLFIQVVDKDENLGLNSMFEVYLVGNNSHHFIISPTSVQGKADIRIRVAIPLDYETVDRYDFDLFANESVPDHVGYAKVKITLINENDNRPIFSQPLYNISLYENVTVGTSVLTVLATDNDAGTFGEVSYFFSDDPDRFSLDKDTGLIMLIARLDYELIQRFTLTIIARDGGGEETTGRVRINVLDVNDNVPTFQKDAYVGALRENEPSVTQLVRLRATDEDSPPNNQITYSIVSASAFGSYFDISLYEGYGVISVSRPLDYEQISNGLIYLTVMAMDAGNPPLNSTVPVTIEVFDENDNPPTFSKPAYFVSVVENIMAGATVLFLNATDLDRSREYGQESIIYSLEGSTQFRINARSGEITTTSLLDRETKSEYILIVRAVDGGVGHNQKTGIATVNITLLDINDNHPTWKDAPYYINLVEMTPPDSDVTTVVAVDPDLGENGTLVYSIQPPNKFYSLNSTTGKIRTTHAMLDRENPDPHEAELMRKIVVSVTDCGRPPLKATSSATVFVNLLDLNDNDPTFQNLPFVAEVLEGIPAGVSIYQVVAIDLDEGLNGLVSYRMPVGMPRMDFLINSSSGVVVTTTELDRERIAEYQLRVVASDAGTPTKSSTSTLTIHVLDVNDETPTFFPAVYNVSVSEDVPREFRVVWLNCTDNDVGLNAELSYFITGGNVDGKFSVGYRDAVVRTVVGLDRETTAAYMLILEAIDNGPVGKRHTGTATVFVTVLDVNDNRPIFLQSSYEASVPEDIPEGHSILQLKATDADEGEFGRVWYRILHGNHGNNFRIHVSNGLLMRGPRPLDRERNSSHVLIVEAYNHDLGPMRSSVRVIVYVEDINDEAPVFTQQQYSRLGLRETAGIGTSVIVVQATDRDSGDGGLVNYRILSGAEGKFEIDESTGLIITVNYLDYETKTSYMMNVSATDQAPPFNQGFCSVYITLLNELDEAVQFSNASYEAAILENLALGTEIVRVQAYSIDNLNQITYRFNAYTSTQAKALFKIDAITGVITVQGLVDREKGDFYTLTVVADDGGPKVDSTVKVYITVLDENDNSPRFDFTSDSAVSIPEDCPVGQRVATVKAWDPDAGSNGQVVFSLASGNIAGAFEIVTTNDSIGEVFVARPLDREELDHYILQVVASDRGTPPRKKDHILQVTILDINDNPPVIESPFGYNVSVNENVGGGTAVVQVRATDRDIGINSVLSYYITEGNKDMAFRMDRISGEIATRPAPPDRERQSFYHLVATVEDEGTPTLSATTHVYVTIVDENDNAPMFQQPHYEVLLDEGPDTLNTSLITIQALDLDEGPNGTVTYAIVAGNIVNTFRIDRHMGVITAAKELDYEISHGRYTLIVTATDQCPILSHRLTSTTTVLVNVNDINDNVPTFPRDYEGPFEVTEGQPGPRVWTFLAHDRDSGPNGQVEYSIMDGDPLGEFVISPVEGVLRVRKDVELDRETIAFYNLTICARDRGMPPLSSTMLVGIRVLDINDNDPVLLNLPMNITISENSPVSSFVAHVLASDADSGCNARLTFNITAGNRERAFFINATTGIVTVNRPLDRERIPEYKLTISVKDNPENPRIARRDYDLLLIFLSDENDNHPLFTKSTYQAEVMENSPAGTPLTVLNGPILALDADQDIYAVVTYQLLGAQSGLFDINSSTGVVTVRSGVIIDREAFSPPILELLLLAEDIGLLNSTAHLLITILDDNDNRPTFSPATLTVHLLENCPPGFSVLQVTATDEDSGLNGELVYRIEAGAQDRFLIHLVTGVIRVGNATIDREEQESYRLTVVATDRGTVPLSGTAIVTILIDDINDSRPEFLNPIQTVSVLESAEPGTVIANITAIDHDLNPKLEYHIVGIVAKDDTDRLVPNQEDAFAVNINTGSVMVKSPMNRELVATYEVTLSVIDNASDLPERSVSVPNAKLTVNVLDVNDNTPQFKPFGITYYMERILEGATPGTTLIAVAAVDPDKGLNGLVTYTLLDLVPPGYVQLEDSSAGKVIANRTVDYEEVHWLNFTVRASDNGSPPRAAEIPVYLEIVDINDNNPIFDQPSYQEAVFEDVPVGTIILTVTATDADSGNFALIEYSLGDGESKFAINPTTGDIYVLSSLDREKKDHYILTALAKDNPGDVASNRRENSVQVVIQVLDVNDCRPQFSKPQFSTSVYENEPAGTSVITMMATDQDEGPNGELTYSLEGPGVEAFHVDMDSGLVTTQRPLQSYEKFSLTVVATDGGEPPLWGTTMLLVEVIDVNDNRPVFVRPPNGTILHIREEIPLRSNVYEVYATDKDEGLNGAVRYSFLKTAGNRDWEFFIIDPISGLIQTAQRLDRESQAVYSLILVASDLGQPVPYETMQPLQVALEDIDDNEPLFVRPPKGSPQYQLLTVPEHSPRGTLVGNVTGAVDADEGPNAIVYYFIAAGNEEKNFHLQPDGCLLVLRDLDREREAIFSFIVKASSNRSWTPPRGPSPTLDLVADLTLQEVRVVLEDINDQPPRFTKAEYTAGVATDAKVGSELIQVLALDADIGNNSLVFYSILAIHYFRALANDSEDVGQVFTMGSMDGILRTFDLFMAYSPGYFVVDIVARDLAGHNDTAIIGIYILRDDQRVKIVINEIPDRVRGFEEEFIHLLSNITGAIVNTDNVQFHVDKKGRVNFAQTELLIHVVNRDTNRILDVDRVIQMIDENKEQLRNLFRNYNVLDVQPAISVRLPDDMSALQMAIIVLAILLFLAAMLFVLMNWYYRTVHKRKLKAIVAGSAGNRGFIDIMDMPNTNKYSFDGANPVWLDPFCRNLELAAQAEHEDDLPENLSEIADLWNSPTRTHGTFGREPAAVKPDDDRYLRAAIQEYDNIAKLGQIIREGPIKGSLLKVVLEDYLRLKKLFAQRMVQKASSCHSSISELIQTELDEEPGDHSPGQGSLRFRHKPPVELKGPDGIHVVHGSTGTLLATDLNSLPEEDQKGLGRSLETLTAAEATAFERNARTESAKSTPLHKLRDVIMETPLEITEL

SEQ ID NO: 22 - protein, 307 aa, Homo sapiens
MTKAGSKGGNLRDKLDGNELDLSLSDLNEVPVKELAALPKATILDLSCNKLTTLPSDFCGLTHLVKLDLSKNKLQQLPADFGRLVNLQHLDLLNNKLVTLPVSFAQLKNLKWLDLKDNPLDPVLAKVAGDCLDEKQCKQCANKVLQHMKAVQADQERERQRRLEVEREAEKKREAKQRAKEAQERELRKREKAEEKERRRKEYDALKAAKREQEKKPKKEANQAPKSKSGSRPRKPPPRKHTRSWAVLKLLLLLLLFGVAGGLVACRVTELQQQPLCTSVNTIYDNAVQGLRRHEILQWVLQTDSQQ

SEQ ID NO: 23 - protein, 176 aa, Homo sapiens
MGAPATRRCVEWLLGLYFLSHIPITLFMDLQAVLPRELYPVEFRNLLKWYAKEFKDPLLQEPPAWFKSFLFCELVFQLPFFPIATYAFLKGSCKWIRTPAIIYSVHTMTTLIPILSTFLFEDFSKASGFKGQRPETLHERLTLVSVYAPYLLIPFILLIFMLRSPYYKYEEKRKKK

SEQ ID NO: 24 - protein, 300 aa, Homo sapiens
MANCEFSPVSGDKPCCRLSRRAQLCLGVSILVLILVVVLAVVVPRWRQQWSGPGTTKRFPETVLARCVKYTEIHPEMRHVDCQSVWDAFKGAFISKHPCNITEEDYQPLMKLGTQTVPCNKILLWSRIKDLAHQFTQVQRDMFTLEDTLLGYLADDLTWCGEFNTSKINYQSCPDWRKDCSNNPVSVFWKTVSRRFAEAACDVVHVMLNGSRSKIFDKNSTFGSVEVHNLQPEKVQTLEAWVIHGGREDSRDLCQDPTIKELESIISKRNIQFSCKNIYRPDKFLQCVKNPEDSSCTSEI

SEQ ID NO: 25 - protein, 267 aa, Homo sapiens
MGSACIKVTKYFLFLFNLIFFILGAVILGFGVWILADKSSFISVLQTSSSSLRMGAYVFIGVGAVTMLMGFLGCIGAVNEVRCLLGLYFAFLLLILIAQVTAGALFYFNMGKLKQEMGGIVTELIRDYNSSREDSLQDAWDYVQAQVKCCGWVSFYNWTDNAELMNRPEVTYPCSCEVKGEEDNSLSVRKGFCEAPGNRTQSGNHPEDWPVYQEGCMEKVQAWLQENLGIILGVGVGVAIIELLGMVLSICLCRHVHSEDYSKVPKY

SEQ ID NO: 26 - protein, 393 aa, Homo sapiens
MWWRVLSLLAWFPLQEASLTNHTETITVEEGQTLTLKCVTSLRKNSSLQWLTPSGFTIFLNEYPALKNSKYQLLHHSANQLSITVPNVTLQDEGVYKCLHYSDSVSTKEVKVIVLATPFKPILEASVIRKQNGEEHVVLMCSTMRSKPPPQITWLLGNSMEVSGGTLHEFETDGKKCNTTSTLIIHTYGKNSTVDCIIRHRGLQGRKLVAPFRFEDLVTDEETASDALERNSLSSQDPQQPTSTVSVTEDSSTSEIDKEEKEQTTQDPDLTTEANPQYLGLARKKSGILLLTLVSFLIFILFIIVQLFIMKLRKAHVIWKKENEVSEHTLESYRSRSNNEETSSEEKNGQSSHPMRCMNYITKLYSEAKTKRKENVQHSKLEEKHIQVPESIV

SEQ ID NO: 27 - protein, 578 aa, Homo sapiens
MLPCLVVLLAALLSLRLGSDAHGTELPSPPSVWFEAEFFHHILHWTPIPNQSESTCYEVALLRYGIESWNSISNCSQTLSYDLTAVTLDLYHSNGYRARVRAVDGSRHSNWTVTNTRFSVDEVTLTVGSVNLEIHNGFILGKIQLPRPKMAPANDTYESIFSHFREYEIAIRKVPGNFTFTHKKVKHENFSLLTSGEVGEFCVQVKPSVASRSNKGMWSKEECISLTRQYFTVTNVIIFFAFVLLLSGALAYCLALQLYVRRRKKLPSVLLFKKPSPFIFISQRPSPETQDTIHPLDEEAFLKVSPELKNLDLHGSTDSGFGSTKPSLQTEEPQFLLPDPHPQADRTLGNREPPVLGDSCSSGSSNSTDSGICLQEPSLSPSTGPTWEQQVGSNSRGQDDSGIDLVQNSEGRAGDTQGGSALGHHSPPEPEVPGEEDPAAVAFQGYLRQTRCAEEKATKTGCLEEESPLTDGLGPKFGRCLVDEAGLHPPALAKGYLKQDPLEMTLASSGAPTGQWNQPTEEWSLLALSSCSDLGISDWSFAHDLAPLGCVAAPGGLLGSFNSDLVTLPLISSLQSSE

SEQ ID NO: 28 - protein, 388 aa, Homo sapiens
MKTLIAAYSGVLRGERQAEADRSQRSHGGPALSREGSGRWGTGSSILSALQDLFSVTWLNRSKVEKQLQVISVLQWVLSFLVLGVACSAILMYIFCTDCWLIAVLYFTWLVFDWNTPKKGGRRSQWVRNWAVWRYFRDYFPIQLVKTHNLLTTRNYIFGYHPHGIMGLGAFCNFSTEATEVSKKFPGIRPYLATLAGNFRMPVLREYLMSGGICPVSRDTIDYLLSKNGSGNAIIIVVGGAAESLSSMPGKNAVTLRNRKGFVKLALRHGADLVPIYSFGENEVYKQVIFEEGSWGRWVQKKFQKYIGFAPCIFHGRGLFSSDTWGLVPYSKPITTVVGEPITIPKLEHPTQQDIDLYHTMYMEALVKLFDKHKTKFGLPETEVLEVN

SEQ ID NO: 29 - protein, 199 aa, Homo sapiens
MSSENCFVAENSSLHPESGQENDATSPHFSTRHEGSFQVPVLCAVMNVVFITILIIALIALSVGQYNCPGQYTFSMPSDSHVSSCSEDWVGYQRKCYFISTVKRSWTSAQNACSEHGATLAVIDSEKDMNFLKRYAGREEHWVGLKKEPGHPWKWSNGKEFNNWFNVTGSDKCVFLKNTEVSSMECEKNLYWICNKPYK

SEQ ID NO: 30 - protein, 428 aa, Homo sapiens
MAVGASGLEGDKMAGAMPLQLLLLLILLGPGNSLQLWDTWADEAEKALGPLLARDRRQATEYEYLDYDFLPETEPPEMLRNSTDTTPLTGPGTPESTTVEPAARRSTGLDAGGAVTELTTELANMGNLSTDSAAMEIQTTQPAATEAQTTQPVPTEAQTTPLAATEAQTTRLTATEAQTTPLAATEAQTTPPAATEAQTTQPTGLEAQTTAPAAMEAQTTAPAAMEAQTTPPAAMEAQTTQTTAMEAQTTAPEATEAQTTQPTATEAQTTPLAAMEALSTEPSATEALSMEPTTKRGLFIPFSVSSVTHKGIPMAASNLSVNYPVGAPDHISVKQCLLAILILALVATIFFVCTVVLAVRLSRKGHMYPVRNYSPTEMVCISSLLPDGGEGPSATANGGLSKAKSPGLTPEPREDREGDDLTLHSFLP

SEQ ID NO: 31 - protein, 345 aa, Homo sapiens
MYKDCIESTGDYFLLCDAEGPWGIILESLAILGIVVTILLLLAFLFLMRKIQDCSQWNVLPTQLLFLLSVLGLFGLAFAFIIELNQQTAPVRYFLFGVLFALCFSCLLAHASNLVKLVRGCVSFSWTTILCIAIGCSLLQIIIATEYVTLIMTRGMMFVNMTPCQLNVDFVVLLVYVLFLMALTFFVSKATFCGPCENWKQHGRLIFITVLFSIIIWVVWISMLLRGNPQFQRQPQWDDPVVCIALVTNAWVFLLLYIVPELCILYRSCRQECPLQGNACPVTAYQHSFQVENQELSRARDSDGAEEDVALTSYGTPIQPQTVDPTQECFIPQAKLSPQQDAGGV

SEQ ID NO: 32 - protein, 225 aa, Homo sapiens
MDQQAIYAELNLPTDSGPESSSPSSLPRDVCQGSPWHQFALKLSCAGIILLVLVVTGLSVSVTSLIQKSSIEKCSVDIQQSRNKTTERPGLLNCPIYWQQLREKCLLFSHTVNPWNNSLADCSTKESSLLLIRDKDELIHTQNLIRDKAILFWIGLNFSLSEKNWKWINGSFLNSNDLEIRGDAKENSCISISQTSVYSEYCSTEIRWICQKELTPVRNKVYPDS

SEQ ID NO: 33 - protein, 477 aa, Homo sapiens
MTSKFLLVSFILAALSLSTTFSLQPDQQKVLLVSFDGFRWDYLYKVPTPHFHYIMKYGVHVKQVTNVFITKTYPNHYTLVTGLFAENHGIVANDMFDPIRNKSFSLDHMNIYDSKFWEEATPIWITNQRAGHTSGAAMWPGTDVKIHKRFPTHYMPYNESVSFEDRVAKIIEWFTSKEPINLGLLYWEDPDDMGHHLGPDSPLMGPVISDIDKKLGYLIQMLKKAKLWNTLNLIITSDHGMTQCSEERLIELDQYLDKDHYTLIDQSPVAAILPKEGKFDEVYEALTHAHPNLTVYKKEDVPERWHYKYNSRIQPIIAVADEGWHILQNKSDDFLLGNHGYDNALADMHPIFLAHGPAFRKNFSKEAMNSTDLYPLLCHLLNITAMPHNGSFWNVQDLLNSAMPRVVPYTQSTILLPGSVKPAEYDQEGSYPYFIGVSLGSIIVIVFFVIFIKHLIHSQIPALQDMHAEIAQPLLQA

SEQ ID NO: 34 - protein, 359 aa, Homo sapiens
MAPNGTASSFCLDSTACKITITVVLAVLILITVAGNVVVCLAVGLNRRLRNLTNCFIVSLAITDLLLGLLVLPFSAIYQLSCKWSFGKVFCNIYTSLDVMLCTASILNLFMISLDRYCAVMDPLRYPVLVTPVRVAISLVLIWVISITLSFLSIHLGWNSRNETSKGNHTTSKCKVQVNEVYGLVDGLVTFYLPLLIMCITYYRIFKVARDQAKRINHISSWKAATIREHKATVTLAAVMGAFIICWFPYFTAFVYRGLRGDDAINEVLEAIVLWLGYANSALNPILYAALNRDFRTGYQQLFCCRLANRNSHKTSLRSNASQLSRTQSREPRQQEEKPLKLQVWSGTEVTAPQGATDR

SEQ ID NO: 35 - protein, 532 aa, Homo sapiens
MEKSNETNGYLDSAQAGPAAGPGAPGTAAGRARRCAGFLRRQALVLLTVSGVLAGAGLGAALRGLSLSRTQVTYLAFPGEMLLRMLRMIILPLVVCSLVSGAASLDASCLGRLGGIAVAYFGLTTLSASALAVALAFIIKPGSGAQTLQSSDLGLEDSGPPPVPKETVDSFLDLARNLFPSNLVVAAFRTYATDYKVVTQNSSSGNVTHEKIPIGTEIEGMNILGLVLFALVLGVALKKLGSEGEDLIRFFNSLNEATMVLVSWIMWYVPVGIMFLVGSKIVEMKDIIVLVTSLGKYIFASILGHVIHGGIVLPLIYFVFTRKNPFRFLLGLLAPFATAFATCSSSATLPSMMKCIEENNGVDKRISRFILPIGATVNMDGAAIFQCVAAVFIAQLNNVELNAGQIFTILVTATASSVGAAGVPAGGVLTIAIILEAIGLPTHDLPLILAVDWIVDRTTTVVNVEGDALGAGILHHLNQKATKKGEQELAEVKVEAIPNCKSEEETSPLVTHQNPAGPVASAPELESKESVL

SEQ ID NO: 36 - protein, 372 aa, Homo sapiens [sequence omitted]

SEQ ID NO: 37 - protein, 341 aa, Homo sapiens
MNIVVEFFVVTFKVLWAFVLAAARWLVRPKEKSVAGQVCLITGAGSGLGRLFALEFARRRALLVLWDINTQSNEETAGMVRHIYRDLEAADAAALQAGNGEEEILPHCNLQVFTYTCDVGKRENVYLTAERVRKEVGEVSVLVNNAGVVSGHHLLECPDELIERTMMVNCHAHFWTTKAFLPTMLEINHGHIVTVASSLGLFSTAGVEDYCASKFGVVGFHESLSHELKAAEKDGIKTTLVCPYLVDTGMFRGCRIRKEIEPFLPPLKPDYCVKQAMKAILTDQPMICTPRLMYIVTFMKSILPFEAVVCMYRFLGADKCMYPFIAQRKQATNNNEAKNGI

SEQ ID NO: 38 - protein, 261 aa, Homo sapiens
MDWGTLHTFIGGVNKHSTSIGKVWITVIFIFRVMILVVAAQEVWGDEQEDFVCNTLQPGCKNVCYDHFFPVSHIRLWALQLIFVSTPALLVAMHVAYYRHETTRKFRRGEKRNDFKDIEDIKKQKVRIEGSLWWTYTSSIFFRIIFEAAFMYVFYFLYNGYHLPWVLKCGIDPCPNLVDCFISRPTEKTVFTIFMISASVICMLLNVAELCYLLLKVCFRRSKRAQTQKNHPNHALKESKQNEMNELISDSGQNAITGFPS

SEQ ID NO: 39 - protein, 352 aa, Homo sapiens
MEGISIYTSDNYTEEMGSGDYDSMKEPCFREENANFNKIFLPTIYSIIFLTGIVGNGLVILVMGYQKKLRSMTDKYRLHLSVADLLFVITLPFWAVDAVANWYFGNFLCKAVHVIYTVNLYSSVLILAFISLDRYLAIVHATNSQRPRKLLAEKVVYVGVWIPALLLTIPDFIFANVSEADDRYICDRFYPNDLWVVVFQFQHIMVGLILPGIVILSCYCIIISKLSHSKGHQKRKALKTTVILILAFFACWLPYYIGISIDSFILLEIIKQGCEFENTVHKWISITEALAFFHCCLNPILYAFLGAKFKTSAQHALTSVSRGSSLKILSKGKRGGHSSVSTESESSSFHSS

SEQ ID NO: 40 - protein, 598 aa, Homo sapiens
MPCIQAQYGTPAPSPGPRDHLASDPLTPEFIKPTMDLASPEAAPAAPTALPSFSTFMDGYTGEFDTFLYQLPGTVQPCSSASSSASSTSSSSATSPASASFKFEDFQVYGCYPGPLSGPVDEALSSSGSDYYGSPCSAPSPSTPSFQPPQLSPWDGSFGHFSPSQTYEGLRAWTEQLPKASGPPQPPAFFSFSPPTGPSPSLAQSPLKLFPSQATHQLGEGESYSMPTAFPGLAPTSPHLEGSGILDTPVTSTKARSGAPGGSEGRCAVCGDNASCQHYGVRTCEGCKGFFKRTVQKNAKYICLANKDCPVDKRRRNRCQFCRFQKCLAVGMVKEVVRTDSLKGRRGRLPSKPKQPPDASPANLLTSLVRAHLDSGPSTAKLDYSKFQELVLPHFGKEDAGDVQQFYDLLSGSLEVIRKWAEKIPGFAELSPADQDLLLESAFLELFILRLAYRSKPGEGKLIFCSGLVLHRLQCARGFGDWIDSILAFSRSLHSLLVDVPAFACLSALVLITDRHGLQEPRRVEELQNRIASCLKEHVAAVAGEPQPASCLSRLLGKLPELRTLCTQGLQRIFYLKLEDLVPPPPIIDKIFMDTLPF

SEQ ID NO: 41 - protein, 4544 aa, Homo sapiens
MLTPPLLLLLPLLSALVAAAIDAPKTCSPKQFACRDQITCISKGWRCDGERDCPDGSDEAPEICPQSKAQRCQPNEHNCLGTELCVPMSRLCNGVQDCMDGSDEGPHCRELQGNCSRLGCQHHCVPTLDGPTCYCNSSFQLQADGKTCKDFDECSVYGTCSQLCTNTDGSFICGCVEGYLLQPDNRSCKAKNEPVDRPPVLLIANSQNILATYLSGAQVSTITPTSTRQTTAMDFSYANETVCWVHVGDSAAQTQLKCARMPGLKGFVDEHTINISLSLHHVEQMAIDWLTGNFYFVDDIDDRIFVCNRNGDTCVTLLDLELYNPKGIALDPAMGKVFFTDYGQIPKVERCDMDGQNRTKLVDSKIVFPHGITLDLVSRLVYWADAYLDYIEVVDYEGKGRQTIIQGILIEHLYGLTVFENYLYATNSDNANAQQKTSVIRVNRFNSTEYQVVTRVDKGGALHIYHQRRQPRVRSHACENDQYGKPGGCSDICLLANSHKARTCRCRSGFSLGSDGKSCKKPEHELFLVYGKGRPGIIRGMDMGAKVPDEHMIPIENLMNPRALDFHAETGFIYFADTTSYLIGRQKIDGTERETILKDGIHNVEGVAVDWMGDNLYWTDDGPKKTISVARLEKAAQTRKTLIEGKMTHPRAIVVDPLNGWMYWTDWEEDPKDSRRGRLERAWMDGSHRDIFVTSKTVLWPNGLSLDIPAGRLYWVDAFYDRIETILLNGTDRKIVYEGPELNHAFGLCHHGNYLFWTEYRSGSVYRLERGVGGAPPTVTLLRSERPPIFEIRMYDAQQQQVGTNKCRVNNGGCSSLCLATPGSRQCACAEDQVLDADGVTCLANPSYVPPPQCQPGEFACANSRCIQERWKCDGDNDCLDNSDEAPALCHQHTCPSDRFKCENNRCIPNRWLCDGDNDCGNSEDESNATCSARTCPPNQFSCASGRCIPISWTCDLDDDCGDRSDESASCAYPTCFPLTQFTCNNGRCININWRCDNDNDCGDNSDEAGCSHSCSSTQFKCNSGRCIPEHWTCDGDNDCGDYSDETHANCTNQATRPPGGCHTDEFQCRLDGLCIPLRWRCDGDTDCMDSSDEKSCEGVTHVCDPSVKFGCKDSARCISKAWVCDGDNDCEDNSDEENCESLACRPPSHPCANNTSVCLPPDKLCDGNDDCGDGSDEGELCDQCSLNNGGCSHNCSVAPGEGIVCSCPLGMELGPDNHTCQIQSYCAKHLKCSQKCDQNKFSVKCSCYEGWVLEPDGESCRSLDPFKPFIIFSNRHEIRRIDLHKGDYSVLVPGLRNTIALDFHLSQSALYWTDVVEDKIYRGKLLDNGALTSFEVVIQYGLATPEGLAVDWIAGNIYWVESNLDQIEVAKLDGTLRTTLLAGDIEHPRAIALDPRDGILFWTDWDASLPRIEAASMSGAGRRTVHRETGSGGWPNGLTVDYLEKRILWIDARSDAIYSARYDGSGHMEVLRGHEFLSHPFAVTLYGGEVYWTDWRTNTLAKANKWTGHNVTVVQRTNTQPFDLQVYHPSRQPMAPNPCEANGGQGPCSHLCLINYNRTVSCACPHLMKLHKDNTTCYEFKKFLLYARQMEIRGVDLDAPYYNYIISFTVPDIDNVTVLDYDAREQRVYWSDVRTQAIKRAFINGTGVETVVSADLPNAHGLAVDWVSRNLFWTSYDTNKKQINVARLDGSFKNAVVQGLEQPHGLVVHPLRGKLYWTDGDNISMANMDGSNRTLLFSGQKGPVGLAIDFPESKLYWISSGNHTINRCNLDGSGLEVIDAMRSQLGKATALAIMGDKLWWADQVSEKMGTCSKADGSGSVVLRNSTTLVMHMKVYDESIQLDHKGTNPCSVNNGDCSQLCLPTSETTRSCMCTAGYSLRSGQQACEGVGSFLLYSVHEGIRGIPLDPNDKSDALVPVSGTSLAVGIDFHAENDTIYWVDMGLSTISRAKRDQTWREDVVTNGIGRVEGIAVDWIAGNIYWTDQGFDVIEVARLNGSFRYVVISQGLDKPRAITVHPEKGYLFWTEWGQYPRIERSRLDGTERVVLVNVSISWPNGISVDYQDGKLYWCDARTDKIERIDLETGENREVVLSSNNMDMFSVSVFEDFIYWSDRTHANGSIKRGSKDNATDSVPLRTGIGVQLKDIKVFNRDRQKGTNVCAVANGGCQQLCLYRGRGQRACACAHGMLAEDGASCREYAGYLLYSERTILKSIHLSDERNLNAPVQPFEDPEHMKNVIALAFDYRAGTSPGTPNRIFFSDIHFGNIQQINDDGSRRITIVENVGSVEGLAYHRGWDTLYWTSYTTSTITRHTVDQTRPGAFERETVITMSGDDHPRAFVLDECQNLMFWTNWNEQHPSIMRAALSGANVLTLIEKDIRTPNGLAIDHRAEKLYFSDATLDKIERCEYDGSHRYVILKSEPVHPFGLAVYGEHIFWTDWVRRAVQRANKHVGSNMKLLRVDIPQQPMGIIAVANDTNSCELSPCRINNGGCQDLCLLTHQGHVNCSCRGGRILQDDLTCRAVNSSCRAQDEFECANGECINFSLTCDGVPHCKDKSDEKPSYCNSRRCKKTFRQCSNGRCVSNMLWCNGADDCGDGSDEIPCNKTACGVGEFRCRDGTCIGNSSRCNQFVDCEDASDEMNCSATDCSSYFRLGVKGVLFQPCERTSLCYAPSWVCDGANDCGDYSDERDCPGVKRPRCPLNYFACPSGRCIPMSWTCDKEDDCEHGEDETHCNKFCSEAQFECQNHRCISKQWLCDGSDDCGDGSDEAAHCEGKTCGPSSFSCPGTHVCVPERWLCDGDKDCADGADESIAAGCLYNSTCDDREFMCQNRQCIPKHFVCDHDRDCADGSDESPECEYPTCGPSEFRCANGRCLSSRQWECDGENDCHDQSDEAPKNPHCTSQEHKCNASSQFLCSSGRCVAEALLCNGQDDCGDSSDERGCHINECLSRKLSGCSQDCEDLKIGFKCRCRPGFRLKDDGRTCADVDECSTTFPCSQRCINTHGSYKCLCVEGYAPRGGDPHSCKAVTDEEPFLIFANRYYLRKLNLDGSNYTLLKQGLNNAVALDFDYREQMIYWTDVTTQGSMIRRMHLNGSNVQVLHRTGLSNPDGLAVDWVGGNLYWCDKGRDTIEVSKLNGAYRTVLVSSGLREPRALVVDVQNGYLYWTDWGDHSLIGRIGMDGSSRSVIVDTKITWPNGLTLDYVTERIYWADAREDYIEFASLDGSNRHVVLSQDIPHIFALTLFEDYVYWTDWETKSINRAHKTTGTNKTLLISTLHRPMDLHVFHALRQPDVPNHPCKVNNGGCSNLCLLSPGGGHKCACPTNFYLGSDGRTCVSNCTASQFVCKNDKCIPFWWKCDTEDDCGDHSDEPPDCPEFKCRPGQFQCSTGICTNPAFICDGDNDCQDNSDEANCDIHVCLPSQFKCTNTNRCIPGIFRCNGQDNCGDGEDERDCPEVTCAPNQFQCSITKRCIPRVWVCDRDNDCVDGSDEPANCTQMTCGVDEFRCKDSGRCIPARWKCDGEDDCGDGSDEPKEECDERTCEPYQFRCKNNRCVPGRWQCDYDNDCGDNSDEESCTPRPCSESEFSCANGRCIAGRWKCDGDHDCADGSDEKDCTPRCDMDQFQCKSGHCIPLRWRCDADADCMDGSDEEACGTGVRTCPLDEFQCNNTLCKPLAWKCDGEDDCGDNSDENPEECARFVCPPNRPFRCKNDRVCLWIGRQCDGTDNCGDGTDEEDCEPPTAHTTHCKDKKEFLCRNQRCLSSSLRCNMFDDCGDGSDEEDCSIDPKLTSCATNASICGDEARCVRTEKAAYCACRSGFHTVPGQPGCQDINECLRFGTCSQLCNNTKGGHLCSCARNFMKTHNTCKAEGSEYQVLYIADDNEIRSLFPGHPHSAYEQAFQGDESVRIDAMDVHVKAGRVYWTNWHTGTISYRSLPPAAPPTTSNRHRRQIDRGVTHLNISGLKMPRGIAIDWVAGNVYWTDSGRDVIEVAQMKGENRKTLISGMIDEPHAIVVDPLRGTMYWSDWGNHPKIETAAMDGTLRETLVQDNIQWPTGLAVDYHNERLYWADAKLSVIGSIRLNGTDPIVAADSKRGLSHPFSIDVFEDYIYGVTYINNRVFKIHKFGHSPLVNLTGGLSHASDVVLYHQHKQPEVTNPCDRKKCEWLCLLSPSGPVCTCPNGKRLDNGTCVPVPSPTPPPDAPRPGTCNLQCFNGGSCFLNARRQPKCRCQPRYTGDKCELDQCWEHCRNGGTCAASPSGMPTCRCPTGFTGPKCTQQVCAGYCANNSTCTVNQGNQPQCRCLPGFLGDRCQYRQCSGYCENFGTCQMAADGSRQCRCTAYFEGSRCEVNKCSRCLEGACVVNKQSGDVTCNCTDGRVAPSCLTCVGHCSNGGSCTMNSKMMPECQCPPHMTGPRCEEHVFSQQQPGHIASILIPLLLLLLLVLVAGVVFWYKRRVQGAKGFQHQRMTNGAMNVEIGNPTYKMYEGGEPDDVGGLLDADFALDPDKPTNFTNPVYATLYMGGHGSRHSLASTDEKRELLGRGPEDEIGDPLA

SEQ ID NO: 42 - protein, 500 aa, Homo sapiens
MAWAALLGLLAALLLLLLLSRRRTRRPGEPPLDLGSIPWLGYALDFGKDAASFLTRMKEKHGDIFTILVGGRYVTVLLDPHSYDAVVWEPRTRLDFHAYAIFLMERIFDVQLPHYSPSDEKARMKLTLLHRELQALTEAMYTNLHAVLLGDATEAGSGWHEMGLLDFSYSFLLRAGYLTLYGIEALPRTHESQAQDRVHSADVFHTFRQLDRLLPKLARGSLSVGDKDHMCSVKSRLWKLLSPARLARRAHRSKWLESYLLHLEEMGVSEEMQARALVLQLWATQGNMGPAAFWLLLFLLKNPEALAAVRGELESILWQAEQPVSQTTTLPQKVLDSTPVLDSVLSESLRLTAAPFITREVVVDLAMPMADGREFNLRRGDRLLLFPFLSPQRDPEIYTDPEVFKYNRFLNPDGSEKKDFYKDGKRLKNYNMPWGAGHNHCLGRSYAVNSIKQFVFLVLVHLDLELINADVEIPEFDLSRYGFGLMQPEHDVPVRYRIRP

SEQ ID NO: 43 - protein, 521 aa, Homo sapiens
MGLGRCIWEGWTLESEALRRDMGTWLLACICICTCVCLGVSVTGEGQGPRSRTFTCLTNNILRIDCHWSAPELGQGSSPWLLFTSNQAPGGTHKCILRGSECTVVLPPEAVLVPSDNFTITFHHCMSGREQVSLVDPEYLPRRHVKLDPPSDLQSNISSGHCILTWSISPALEPMTTLLSYELAFKKQEEAWEQAQHRDHIVGVTWLILEAFELDPGFIHEARLRVQMATLEDDVVEEERYTGQWSEWSQPVCFQAPQRQGPLIPPWGWPGNTLVAVSIFLLLTGPTYLLFKLSPRVKRIFYQNVPSPAMFFQPLYSVHNGNFQTWMGAHGAGVLLSQDCAGTPQGALEPCVQEATALLTCGPARPWKSVALEEEQEGPGTRLPGNLSSEDVLPAGCTEWRVQTLAYLPQEDWAPTSLTRPAPPDSEGSRSSSSSSSSNNNNYCALGCYGGWHLSALPGNTQSSGPIPALACGLSCDHQGLETQQGVAWVLAGHCQRPGLHEDLQGMLLPSVLSKARSWTF

SEQ ID NO: 44 - protein, 254 aa, Homo sapiens
MEYASDASLDPEAPWPPAPRARACRVLPWALVAGLLLLLLLAAACAVFLACPWAVSGARASPGSAASPRLREGPELSPDDPAGLLDLRQGMFAQLVAQNVLLIDGPLSWYSDPGLAGVSLTGGLSYKEDTKELVVAKAGVYYVFFQLELRRVVAGEGSGSVSLALHLQPLRSAAGAAALALTVDLPPASSEARNSAFGFQGRLLHLSAGQRLGVHLHTEARARHAWQLTQGATVLGLFRVTPEIPAGLPSPRSE

SEQ ID NO: 45 - protein, 193 aa, Homo sapiens
MPEEGSGCSVRRRPYGCVLRAALVPLVAGLVICLVVCIQRFAQAQQQLPLESLGWDVAELQLNHTGPQQDPRLYWQGGPALGRSFLHGPELDKGQLRIHRDGIYMVHIQVTLAICSSTTASRHHPTTLAVGICSPASRSISLLRLSFHQGCTIASQRLTPLARGDTLCTNLTGTLLPSRNTDETFFGVQWVRP

SEQ ID NO: 46 - protein, 545 aa, Homo sapiens
MGQVLPVFAHCKEAPSTASSTPDSTEGGNDDSDFRELHTAREFSEEDEEETTSQDWGTPRELTFSYIAFDGVVGSGGRRDSTARRPRPQGRSVSEPRDQHPQPSLGDSLESIPSLSQSPEPGRRGDPDTAPPSERPLEDLRLRLDHLGWVARGTGSGEDSSTSSSTPLEDEEPQEPNRLETGEAGEELDLRLRLAQPSSPEVLTPQLSPGSGTPQAGTPSPSRSRDSNSGPEEPLLEEEEKQWGPLEREPVRGQCLDSTDQLEFTVEPRLLGTAMEWLKTSLLLAVYKTVPILELSPPLWTAIGWVQRGPTPPTPVLRVLLKWAKSPRSSGVPSLSLGADMGSKVADLLYWKDTRTSGVVFTGLMVSLLCLLHFSIVSVAAHLALLLLCGTISLRVYRKVLQAVHRGDGANPFQAYLDVDLTLTREQTERLSHQITSRVVSAATQLRHFFLVEDLVDSLKLALLFYILTFVGAIFNGLTLLILGVIGLFTIPLLYRQHQAQIDQYVGLVTNQLSHIKAKIRAKIPGTGALASAAAAVSGSKAKAE

SEQ ID NO: 47 - protein, 349 aa, Homo sapiens
MAGGRCGPQLTALLAAWIAAVAATAGPEEAALPPEQSRVQPMTASNWTLVMEGEWMLKFYAPWCPSCQQTDSEWEAFAKNGEILQISVGKVDVIQEPGLSGRFFVTTLPAFFHAKDGIFRRYRGPGIFEDLQNYILEKKWQSVEPLTGWKSPASLTMSGMAGLFSISGKIWHLHNYFTVTLGIPAWCSYVFFVIATLVFGLFMGLVLVVISECFYVPLPRHLSERSEQNRRSEEAHRAEQLQDAEEEKDDSNEEENKDSLVDDEEEKEDLGDEDEAEEEEEEDNLAAGVDEERSEANDQGPPGEDGVTREEVEPEEAEEGISEQPCPADTEVVEDSLRQRKSQHADKGL

SEQ ID NO: 48 - protein, 354 aa, Homo sapiens
MRLAVLFSGALLGLLAAQGTGNDCPHKKSATLLPSFTVTPTVTESTGTTSHRTTKSHKTTTHRTTTTGTTSHGPTTATHNPTTTSHGNVTVHPTSNSTATSQGPSTATHSPATTSHGNATVHPTSNSTATSPGFTSSAHPEPPPPSPSPSPTSKETIGDYTWTNGSQPCVHLQAQIQIRVMYTTQGGGEAWGISVLNPNKTKVQGSCEGAHPHLLLSFPYGHLSFGFMQDLQQKVVYLSYMAVEYNVSFPHAAQWTFSAQNASLRDLQAPLGQSFSCSNSSIILSPAVHLDLLSLRLQAAQLPHTGVFGQSFSCPSDRSILLPLIIGLILLGLLALVLIAFCIIRRRPSAYQAL

SEQ ID NO: 49 - protein, 845 aa, Homo sapiens
MSGARGEGPEAGAGGAGGRAAPENPGGVLSVELPGLLAQLARSFALLLPVYALGYLGLSFSWVLLALALLAWCRRSRGLKALRLCRALALLEDEERVVRLGVRACDLPAWVHFPDTERAEWLNKTVKHMWPFICQFIEKLFRETIEPAVRGANTHLSTFSFTKVDVGQQPLRINGVKVYTENVDKRQIILDLQISFVGNCEIDLEIKRYFCRAGVKSIQIHGTMRVILEPLIGDMPLVGALSIFFLRKPLLEINWTGLTNLLDVPGLNGLSDTIILDIISNYLVLPNRITVPLVSEVQIAQLRFPVPKGVLRIHFIEAQDLQGKDTYLKGLVKGKSDPYGIIRVGNQIFQSRVIKENLSPKWNEVYEALVYEHPGQELEIELFDEDPDKDDFLGSLMIDLIEVEKERLLDEWFTLDEVPKGKLHLRLEWLTLMPNASNLDKVLTDIKADKDQANDGLSSALLILYLDSARNLPSGKKISSNPNPVVQMSVGHKAQESKIRYKTNEPVWEENFTFFIHNPKRQDLEVEVRDEQHQCSLGNLKVPLSQLLTSEDMTVSQRFQLSNSGPNSTIKMKIALRVLHLEKRERPPDHQHSAQVKRPSVSKEGRKTSIKSHMSGSPGPGGSNTAPSTPVIGGSDKPGMEEKAQPPEAGPQGLHDLGRSSSSLLASPGHISVKEPTPSIASDISLPIATQELRQRLRQLENGTTLGQSPLGQIQLTIRHSSQRNKLIVVVHACRNLIAFSEDGSDPYVRMYLLPDKRRSGRRKTHVSKKTLNPVFDQSFDFSVSLPEVQRRTLDVAVKNSGGFLSKDKGLLGKVLVALASEELAKGWTQWYDLTEDGTRPQAMT

SEQ ID NO: 50 - protein, 1137 aa, Homo sapiens
MKVKEEKAGVGKLDHTNHRRRFPDQKECPPIHIGLPVPTYPQRKTDQKGHLSGLQKVHWGLRPDQPQQELTGPGSGASSQDSSMDLISRTRSPAAEQLQDILGEEDEAPNPTLFTEMDTLQHDGDQMEWKESARWIKFEEKVEEGGERWSKPHVSTLSLHSLFELRTCLQTGTVLLDLDSGSLPQIIDDVIEKQIEDGLLRPELRERVSYVLLRRHRHQTKKPIHRSLADIGKSVSTTNRSPARSPGAGPSLHHSTEDLRMRQSANYGRLCHAQSRSMNDISLTPNTDQRKNKFMKKIPKDSEASNVLVGEVDFLDQPFIAFVRLIQSAMLGGVTEVPVPTRFLFILLGPSGRAKSYNEIGRAIATLMVDDLFSDVAYKARNREDLIAGIDEFLDEVIVLPPGEWDPNIRIEPPKKVPSADKRKSVFSLAELGQMNGSVGGGGGAPGGGNGGGGGGGSGGGAGSGGAGGTSSGDDGEMPAMHEIGEELIWTGRFFGGLCLDIKRKLPWFPSDFYDGFHIQSISAILFIYLGCITNAITFGGLLGDATDNYQGVMESFLGTAMAGSLFCLFSGQPLIILSSTGPILIFEKLLFDFSKGNGLDYMEFRLWIGLHSAVQCLILVATDASFIIKYITRFTEEGFSTLISFIFIYDAIKKMIGAFKYYPINMDFKPNFITTYKCECVAPDTVNTTVFNASAPLAPDTNASLYNLLNLTALDWSLLSKKECLSYGGRLLGNSCKFIPDLALMSFILFFGTYSMTLTLKKFKFSRYFPTKVRALVADFSIVFSILMFCGIDACFGLETPKLHVPSVIKPTRPDRGWFVAPFGKNPWWVYPASILPALLVTILIFMDQQITAVIVNRKENKLKKAAGYHLDLFWVGILMALCSFMGLPWYVAATVISIAHIDSLKMETETSAPGEQPQFLGVREQRVTGIIVFILTGISVFLAPILKCIPLPVLYGVFLYMGVASLNGIQMGTGGSEFKIQKKLTPFWERCKLFLMPAKHQPDHAFLRHVPLRRIHLFTLVQILCLAVLWILKSTVAAIIFPVMILGLIIVRRLLDFIFSQHDLAWIDNILPEKEKKETDKKRKRKKGAHEDCDEEPQFPPPSVIKIPMESVQSDPQNGIHCIARKRSSSWSYSL

SEQ ID NO: 51 - protein, 944 aa, Homo sapiens
GRPGVPPRFLSQRRRQVPGPRSRLRDIHESPSVILGPPGEVPGFRCALWRHLRPHLVLGGALAPPAPIKFTEGPPATLKASVPYEVETLPQNLPAPPWSAAEIFSHVGDRCERNEFQCQDGKCISYKWVCDGSAECQDGSDESQETCLSVTCKSGDFSCGGRVNRCIPQFWRCDGQVDCDNGSDEQGCPPKTCSQDEFRCHDGKCISRQFVCDSDRDCLDGSDEASCPVLTCGPASFQCNSSTCIPQLWACDNDPDCEDGSDEWPQRCRGLYVFQGDSSPCSAFEFHCLSGECIHSSWRCDGGPDCKDKSDEENCAVATCRPDEFQCSDGNCIHGSRQCDREYDCKDMSDEVGCVNVTLCEGPNKFKCHSGECITLDKVCNMARDCRDWSDEPIKECGTNECLDNNGGCSHVCNDLKIGYECLCPDGFQLVAQRRCEDIDECQDPDTCSQLCVNLEGGYKCQCEEGFQLDPHTKACKAVGSIAYLFFTNRHEVRKMTLDRSEYTSLIPNLRNVVALDTEVASNRIYWSDLSQRMICSTQLDRAHGVSSYDTVISRDIQAPDGLAVDWIHSNIYWTDSVLGTVSVADTKGVKRKTLFRENGSKPRAIVVDPVHGFMYWTDWGTPAKIKKGGLNGVDIYSLVTENIQWPNGITLDLLSGRLYWVDSKLHSISSIDVNGGNRKTILEDEKRLAHPFSLAVFEDKVFWTDIINEAIFSANRLTGSDVNLLAENLLSPEDMVLFHNLTQPRGVNWCERTTLSNGGCQYLCLPAPQINPHSPKFTCACPDGMLLARDMRSCLTEAEAAVATQETSTVRLKVSSTAVRTQHTTTRPVPDTSRLPGATPGLTTVEIVTMSHQALGDVAGRGNEKKPSSVRALSIVLPIVLLVFLCLGVFLLWKNWRLKNINSINFDNPVYQKTTEDEVHICHNQDGYSYPSRQMVSLEDDVA

SEQ ID NO: 52 - protein, 266 aa, Homo sapiens
MLLLTRSPTAWHRLSQLKPRVLPGTLGGQALHLRSWLLSRQGPAETGGQGQPQGPGLRTRLLITGLFGAGLGGAWLALRAEKERLQQQKRTEALRQAAVGQGDFHLLDHRGRARCKADFRGQWVLMYFGFTHCPDICPDELEKLVQVVRQLEAEPGLPPVQPVFITVDPERDDVEAMARYVQDFHPRLLGLTGSTKQVAQASHSYRVYYNAGPKDEDQDYIVDHSIAIYLLNPDGLFTDYYGRSRSAEQISDSVRRHMAAFRSVLS

SEQ ID NO: 53 - protein, 714 aa, Homo sapiens
MGLPEERVRSGSGSRGQEEAGAGGRARSWSPPPEVSRSAHVPSLQRYRELHRRSVEEPREFWGDIAKEFYWKTPCPGPFLRYNFDVTKGKIFIEWMKGATTNICYNVLDRNVHEKKLGDKVAFYWEGNEPGETTQITYHQLLVQVCQFSNVLRKQGIQKGDRVAIYMPMIPELVVAMLACARIGALHSIVFAGFSSESLCERILDSSCSLLITTDAFYRGEKLVNLKELADEALQKCQEKGFPVRCCIVVKHLGRAELGMGDSTSQSPPIKRSCPDVQGKLKEKSKRVQPQISWNQGIDLWWHELMQEAGDECEPEWCDAEDPLFILYTSGSTGKPKGVVHTVGGYMLYVATTFKYVFDFHAEDVFWCTADIGWITGHSYVTYGPLANGATSVLFEGIPTYPDVNRLWSIVDKYKVTKFYTAPTAIRLLMKFGDEPVTKHSRASLQVLGTVGEPINPEAWLWYHRVVGAQRCPIVDTFWQTETGGHMLTPLPGATPMKPGSATFPFFGVAPAILNESGEELEGEAEGYLVFKQPWPGIMRTVYGNHERFETTYFKKFPGYYVTGDGCQRDQDGYYWITGRIDDMLNVSGHLLSTAEVESALVEHEAVAEAAVVGHPHPVKGECLYCFVTLCDGHTFSPKLTEELKKQIREKIGPIATPDYIQNAPGLPKTRSGKIMRRVLRKIAQNDHDLGDMSTVADPSVISHLFSHRCLTIQ

SEQ ID NO: 54 - protein, 1218 aa, Homo sapiens
MRSPRTRGRSGRPLSLLLALLCALRAKVCGASGQFELEILSMQNVNGELQNGNCCGGARNPGDRKCTRDECDTYFKVCLKEYQSRVTAGGPCSFGSGSTPVIGGNTFNLKASRGNDRNRIVLPFSFAWPRSYTLLVEAWDSSNDTVQPDSIIEKASHSGMINPSRQWQTLKQNTGVAHFEYQIRVTCDDYYYGFGCNKFCRPRDDFFGHYACDQNGNKTCMEGWMGPECNRAICRQGCSPKHGSCKLPGDCRCQYGWQGLYCDKCIPHPGCVHGICNEPWQCLCETNWGGQLCDKDLNYCGTHQPCLNGGTCSNTGPDKYQCSCPEGYSGPNCEIAEHACLSDPCHNRGSCKETSLGFECECSPGWTGPTCSTNIDDCSPNNCSHGGTCQDLVNGFKCVCPPQWTGKTCQLDANECEAKPCVNAKSCKNLIASYYCDCLPGWMGQNCDININDCLGQCQNDASCRDLVNGYRCICPPGYAGDHCERDIDECASNPCLNGGHCQNEINRFQCLCPTGFSGNLCQLDIDYCEPNPCQNGAQCYNRASDYFCKCPEDYEGKNCSHLKDHCRTTPCEVIDSCTVAMASNDTPEGVRYISSNVCGPHGKCKSQSGGKFTCDCNKGFTGTYCHENINDCESNPCRNGGTCIDGVNSYKCICSDGWEGAYCETNINDCSQNPCHNGGTCRDLVNDFYCDCKNGWKGKTCHSRDSQCDEATCNNGGTCYDEGDAFKCMCPGGWEGTTCNIARNSSCLPNPCHNGGTCVVNGESFTCVCKEGWEGPICAQNTNDCSPHPCYNSGTCVDGDNWYRCECAPGFAGPDCRININECQSSPCAFGATCVDEINGYRCVCPPGHSGAKCQEVSGRPCITMGSVIPDGAKWDDDCNTCQCLNGRIACSKVWCGPRPCLLHKGHSECPSGQSCIPILDDQCFVHPCTGVGECRSSSLQPVKTKCTSDSYYQDNCANITFTFNKEMMSPGLTTEHICSELRNLNILKNVSAEYSIYIACEPSPSANNEIHVAISAEDIRDDGNPIKEITDKIIDLVSKRDGNSSLIAAVAEVRVQRRPLKNRTDFLVPLLSSVLTVAWICCLVTAFYWCLRKRRKPGSHTHSASEDNTTNNVREQLNQIKNPIEKHGANTVPIKDYENKNSKMSKIRTHNSEVEEDDMDKHQQKARFAKQPAYTLVDREEKPPNGTPTKHPNWTNKQDNRDLESAQSLNRMEYIV

SEQ ID NO: 55 - protein, 915 aa, Homo sapiens
MGRPRLTLVCQVSIIISARDLSMNNLTELQPGLFHHLRFLEELRLSGNHLSHIPGQAFSGLYSLKILMLQNNQLGGIPAEALWELPSLQSLRLDANLISLVPERSFEGLSSLRHLWLDDNALTEIPVRALNNLPALQAMTLALNRISHIPDYAFQNLTSLVVLHLHNNRIQHLGTHSFEGLHNLETLDLNYNKLQEFPVAIRTLGRLQELGFHNNNIKAIPEKAFMGNPLLQTIHFYDNPIQFVGRSAFQYLPKLHTLSLNGAMDIQEFPDLKGTTSLEILTLTRAGIRLLPSGMCQQLPRLRVLELSHNQIEELPSLHRCQKLEEIGLQHNRIWEIGADTFSQLSSLQALDLSWNAIRSIHPEAFSTLHSLVKLDLTDNQLTTLPLAGLGGLMHLKLKGNLALSQAFSKDSFPKLRILEVPYAYQCCPYGMCASFFKASGQWEAEDLHLDDEESSKRPLGLLARQAENHYDQDLDELQLEMEDSKPHPSVQCSPTPGPFKPCEYLFESWGIRLAVWAIVLLSVLCNGLVLLTVFAGGPVPLPPVKFVVGAIAGANTLTGISCGLLASVDALTFGQFSEYGARWETGLGCRATGFLAVLGSEASVLLLTLAAVQCSVSVSCVRAYGKSPSLGSVRAGVLGCLALAGLAAALPLASVGEYGASPLCLPYAPPEGQPAALGFTVALVMMNSFCFLVVAGAYIKLYCDLPRGDFEAVWDCAMVRHVAWLIFADGLLYCPVAFLSFASMLGLFPVTPEAVKSVLLVVLPLPACLNPLLYLLFNPHFRDDLRRLRPRAGDSGPLAYAAAGELEKSSCDSTQALVAFSDVDLILEASEAGRPPGLETYGFPSVTLISCQQPGAPRLEGSHCVEPEGNHFGNPQPSMDGELLLRAEGSTPAGGGLSGGGGFQPSGLAFASHV

SEQ ID NO: 56 - protein, 164 aa, Homo sapiens
MASPHQEPKPGDLIEIFRLGYEHWALYIGDGYVIHLAPPSEYPGAGSSSVFSVLSNSAEVKRERLEDVVGGCCYRVNNSLDHEYQPRPVEVIISSAKEMVGQKMKYSIVSRNCEHFVTQLRYGKSRCKQVEKAKVEVGVATALGILVVAGCSFAIRRYQKKATA

SEQ ID NO: 57 - protein, 1226 aa, Homo sapiens
MDREERKTINQGQEDEMEIYGYNLSRWKLAIVSLGVICSGGFLLLLLYWMPEWRVKATCVRAAIKDCEVVLLRTTDEFKMWFCAKIRVLSLETYPVSSPKSMSNKLSNGHAVCLIENPTEENRHRISKYSQTESQQIRYFTHHSVKYFWNDTIHNFDFLKGLDEGVSCTSIYEKHSAGLTKGMHAYRKLLYGVNEIAVKVPSVFKLLIKEVLNPFYIFQLFSVILWSTDEYYYYALAIVVMSIVSIVSSLYSIRKQYVMLHDMVATHSTVRVSVCRVNEEIEEIFSTDLVPGDVMVIPLNGTIMPCDAVLINGTCIVNESMLTGESVPVTKTNLPNPSVDVKGIGDELYNPETHKRHTLFCGTTVIQTRFYTGELVKAIVVRTGFSTSKGQLVRSILYPKPTDFKLYRDAYLFLLCLVAVAGIGFIYTIINSILNEVQVGVIIIESLDIITITVPPALPAAMTAGIVYAQRRLKKIGIFCISPQRINICGQLNLVCFDKTGTLTEDGLDLWGIQRVENARFLSPEENVCNEMLVKSQFVACMATCHSLTKIEGVLSGDPLDLKMFEAIGWILEEATEEETALHNRIMPTVVRPPKQLLPESTPAGNQEMELFELPATYEIGIVRQFPFSSALQRMSVVARVLGDRKMDAYMKGAPEAIAGLCKPETVPVDFQNVLEDFTKQGFRVIALAHRKLESKLTWHKVQNISRDAIENNMDFMGLIIMQNKLKQETPAVLEDLHKANIRTVMVTGDSMLTAVSVARDCGMILPQDKVIIAEALPPKDGKVAKINWHYADSLTQCSHPSAIDPEAIPVKLVHDSLEDLQMTRYHFAMNGKSFSVILEHFQDLVPKLMLHGTVFARMAPDQKTQLIEALQNVDYFVGMCGDGANDCGALKRAHGGISLSELEASVASPFTSKTPSISCVPNLIREGRAALITSFCVFKFMALYSIIQYFSVTLLYSILSNLGDFQFLFIDLAIILVVVFTMSLNPAWKELVAQRPPSGLISGALLFSVLSQIIICIGFQSLGFFWVKQQPWYEVWHPKSDACNTTGSGFWNSSHVDNETELDEHNIQNYENTTVFFISSFQYLIVAIAFSKGKPFRQPCYKNYFFVFSVIFLYIFILFIMLYPVASVDQVLQIVCVPYQWRVTMLIIVLVNAFVSITVEESVDRWGKCCLPWALGCRKKTPKAKYMYLAQELLVDPEWPPKPQTTTEAKALVKENGSCQIITIT

SEQ ID NO: 58 - protein, 140 aa, Homo sapiens
MSRFLNVLRSWLVMVSIIAMGNTLQSFRDHTFLYEKLYTGKPNLVNGLQARTFGIWTLLSSVIRCLCAIDIHNKTLYHITLWTFLLALGHFLSELFVYGTAAPTIGVLAPLMVASFSILGMLVGLRYLEVEPVSRQKKRN

SEQ ID NO: 59 - protein, 661 aa, Homo sapiens
MAFDVSCFFWVVLFSAGCKVITSWDQMCIEKEANKTYNCENLGLSEIPDTLPNTTEFLEFSFNFLPTIHNRTFSRLMNLTFLDLTRCQINWIHEDTFQSHHQLSTLVLTGNPLIFMAETSLNGPKSLKHLFLIQTGISNLEFIPVHNLENLESLYLGSNHISSIKFPKDFPARNLKVLDFQNNAIHYISREDMRSLEQAINLSLNFNGNNVKGIELGAFDSTIFQSLNFGGTPNLSVIFNGLQNSTTQSLWLGTFEDIDDEDISSAMLKGLCEMSVESLNLQEHRFSDISSTTFQCFTQLQELDLTATHLKGLPSGMKGLNLLKKLVLSVNHFDQLCQISAANFPSLTHLYIRGNVKKLHLGVGCLEKLGNLQTLDLSHNDIEASDCCSLQLKNLSHLQTLNLSHNEPLGLQSQAFKECPQLELLDLAFTRLHINAPQSPFQNLHFLQVLNLTYCFLDTSNQHLLAGLPVLRHLNLKGNHFQDGTITKTNLLQTVGSLEVLILSSCGLLSIDQQAFHSLGKMSHVDLSHNSLTCDSIDSLSHLKGIYLNLAANSINIISPRLLPILSQQSTINLSHNPLDCTCSNIHFLTWYKENLHKLEGSEETTCANPPSLRGVKLSDVKLSCGITAIGIFFLIVFLLLLAILLFFAVKYLLRWKYQHI

SEQ ID NO: 60 - protein, 831 aa, Homo sapiens
MERPWGAADGLSRWPHGLGLLLLLQLLPPSTLSQDRLDAPPPPAAPLPRWSGPIGVSWGLRAAAAGGAFPRGGRWRRSAPGEDEECGRVRDFVAKLANNTHQHVFDDLRGSVSLSWVGDSTGVILVLTTFHVPLVIMTFGQSKLYRSEDYGKNFKDITDLINNTFIRTEFGMAIGPENSGKVVLTAEVSGGSRGGRIFRSSDFAKNFVQTDLPFHPLTQMMYSPQNSDYLLALSTENGLWVSKNFGGKWEEIHKAVCLAKWGSDNTIFFTTYANGSCKADLGALELWRTSDLGKSFKTIGVKIYSFGLGGRFLFASVMADKDTTRRIHVSTDQGDTWSMAQLPSVGQEQFYSILAANDDMVFMHVDEPGDTGFGTIFTSDDRGIVYSKSLDRHLYTTTGGETDFTNVTSLRGVYITSVLSEDNSIQTMITFDQGGRWTHLRKPENSECDATAKNKNECSLHIHASYSISQKLNVPMAPLSEPNAVGIVIAHGSVGDAISVMVPDVYISDDGGYSWTKMLEGPHYYTILDSGGIIVAIEHSSRPINVIKFSTDEGQCWQTYTFTRDPIYFTGLASEPGARSMNISIWGFTESFLTSQWVSYTIDFKDILERNCEEKDYTIWLAHSTDPEDYEDGCILGYKEQFLRLRKSSVCQNGRDYVVTKQPSICLCSLEDFLCDFGYYRPENDSKCVEQPELKGHDLEFCLYGREEHLTTNGYRKIPGDKCQGGVNPVREVKDLKKKCTSNFLSPEKQNSKSNSVPIILAIVGLMLVTVVAGVLIVKKYVCGGRFLVHRYSVLQQHAEANGVDGVDALDTASHTNKSGYHDDSDEDLLE

SEQ ID NO: 61 - protein, 1021 aa, Homo sapiens
MAGISYVASFFLLLTKLSIGQREVTVQKGPLFRAEGYPVSIGCNVTGHQGPSEQHFQWSVYLPTNPTQEVQIISTKDAAFSYAVYTQRVRSGDVYVERVQGNSVLLHISKLQMKDAGEYECHTPNTDEKYYGSYSAKTNLIVIPDTLSATMSSQTLGKEEGEPLALTCEASKATAQHTHLSVTWYLTQDGGGSQATEIISLSKDFILVPGPLYTERFAASDVQLNKLGPTTFRLSIERLQSSDQGQLFCEATEWIQDPDETWMFITKKQTDQTTLRIQPAVKDFQVNITADSLFAEGKPLELVCLVVSSGRDPQLQGIWFFNGTEIAHIDAGGVLGLKNDYKERASQGELQVSKLGPKAFSLKIFSLGPEDEGAYRCVVAEVMKTRTGSWQVLQRKQSPDSHVHLRKPAARSVVMSTKNKQQVVWEGETLAFLCKAGGAESPLSVSWWHIPRDQTQPEFVAGMGQDGIVQLGASYGVPSYHGNTRLEKMDWATFQLEITFTAITDSGTYECRVSEKSRNQARDLSWTQKISVTVKSLESSLQVSLMSRQPQVMLTNTFDLSCVVRAGYSDLKVPLTVTWQFQPASSHIFHQLIRITHNGTIEWGNFLSRFQKKTKVSQSLFRSQLLVHDATEEETGVYQCEVEVYDRNSLYNNRPPRASAISHPLRIAVTLPESKLKVNSRSQVQELSINSNTDIECSILSRSNGNLQLAIIWYFSPVSTNASWLKILEMDQTNVIKTGDEFHTPQRKQKFHTEKVSQDLFQLHILNVEDSDRGKYHCAVEEWLLSTNGTWHKLGEKKSGLTELKLKPTGSKVRVSKVYWTENVTEHREVAIRCSLESVGSSATLYSVMWYWNRENSGSKLLVHLQHDGLLEYGEEGLRRHLHCYRSSSTDFVLKLHQVEMEDAGMYWCRVAEWQLHGHPSKWINQASDESQRMVLTVLPSEPTLPSRICSSAPLLYFLFICPFVLLLLLLISLLCLYWKARKLSTLRSNTRKEKALWVDLKEAGGVTTNRREDEEEDEGN

SEQ ID NO: 62 - protein, 263 aa, Homo sapiens
MDSYLLMWGLLTFIMVPGCQAELCDDDPPEIPHATFKAMAYKEGTMLNCECKRGFRRIKSGSLYMLCTGNSSHSSWDNQCQCTSSATRNTTKQVTPQPEEQKERKTTEMQSPMQPVDQASLPGHCREPPPWENEATERIYHFVVGQMVYYQCVQGYRALHRGPAESVCKMTHGKTRWTQPQLICTGEEKPQASPEGRPESETSCLVTTTDFQIQTEMAATMETSIFTTEYQVAVAGCVFLLISVLLLSGLTWQRRQRKSRRTI

SEQ ID NO: 63 - protein, 157 aa, Homo sapiens
MLVLLAGIFVVHIATVIMLFVSTIANVWLVSNTVDASVGLWKNCTNISCSDSLSYASEDALKTVQAFMILSIIFCVIALLVFVFQLFTMEKGNRFFLSGATTLVCWLCILVGVSIYTSHYANRDGTQYHHGYSYILGWICFCFSFIIGVLYLVLRKK

SEQ ID NO: 64 - protein, 215 aa, Homo sapiens
MDNQGVIYSDLNLPPNPKRQQRKPKGNKNSILATEQEITYAELNLQKASQDFQGNDKTYHCKDLPSAPEKLIVGILGIICLILMASVVTIVVIPSRHCGHCPEEWITYSNSCYYIGKERRTWEESLLACTSKNSSLLSIDNEEEMKFLSIISPSSWIGVFRNSSHHPWVTMNGLAFKHEIKDSDNAELNCAVLQVNRLKSAQCGSSIIYHCKHKL

SEQ ID NO: 65 - protein, 840 aa, Homo sapiens
MALASAAPGSIFCKQLLFSLLVLTLLCDACQKVYLRVPSHLQAETLVGKVNLEECLKSASLIRSSDPAFRILEDGSIYTTHDLILSSERKSFSIFLSDGQRREQQEIKVVLSARENKSPKKRHTKDTALKRSKRRWAPIPASLMENSLGPFPQHVQQIQSDAAQNYTIFYSISGPGVDKEPFNLFYIEKDTGDIFCTRSIDREKYEQFALYGYATTADGYAPEYPLPLIIKIEDDNDNAPYFEHRVTIFTVPENCRSGTSVGKVTATDLDEPDTLHTRLKYKILQQIPDHPKHFSIHPDTGVITTTTPFLDREKCDTYQLIMEVRDMGGQPFGLFNTGTITISLEDENDNPPSFTETSYVTEVEENRIDVEILRMKVQDQDLPNTPHSKAVYKILQGNENGNFIISTDPNTNEGVLCVVKPLNYEVNRQVILQVGVINEAQFSKAASSQTPTMCTTTVTVKIIDSDEGPECHPPVKVIQSQDGFPAGQELLGYKALDPEISSGEGLRYQKLGDEDNWFEINQHTGDLRTLKVLDRESKFVKNNQYNISVVAVDAVGRSCTGTLVVHLDDYNDHAPQIDKEVTICQNNEDFAVLKPVDPDGPENGPPFQFFLDNSASKNWNIEEKDGKTAILRQRQNLDYNYYSVPIQIKDRHGLVATHMLTVRVCDCSTPSECRMKDKSTRDVRPNVILGRWAILAMVLGSVLLLCILFTCFCVTAKRTVKKCFPEDIAQQNLIVSNTEGPGEEVTEANIRLPMQTSNICDTSMSVGTVGGQGIKTQQSFEMVKGGYTLDSNKGGGHQTLESVKGVGQGDTGRYAYTDWQSFTQPRLGEESIRGHTLIKN

SEQ ID NO: 66 - protein, 894 aa, Homo sapiens
MALASAAPGSIFCKQLLFSLLVLTLLCDACQKVYLRVPSHLQAETLVGKVNLEECLKSASLIRSSDPAFRILEDGSIYTTHDLILSSERKSFSIFLSDGQRREQQEIKVVLSARENKSPKKRHTKDTALKRSKRRWAPIPASLMENSLGPFPQHVQQIQSDAAQNYTIFYSISGPGVDKEPFNLFYIEKDTGDIFCTRSIDREKYEQFALYGYATTADGYAPEYPLPLIIKIEDDNDNAPYFEHRVTIFTVPENCRSGTSVGKVTATDLDEPDTLHTRLKYKILQQIPDHPKHFSIHPDTGVITTTTPFLDREKCDTYQLIMEVRDMGGQPFGLFNTGTITISLEDENDNPPSFTETSYVTEVEENRIDVEILRMKVQDQDLPNTPHSKAVYKILQGNENGNFIISTDPNTNEGVLCVVKPLNYEVNRQVILQVGVINEAQFSKAASSQTPTMCTTTVTVKIIDSDEGPECHPPVKVIQSQDGFPAGQELLGYKALDPEISSGEGLRYQKLGDEDNWFEINQHTGDLRTLKVLDRESKFVKNNQYNISVVAVDAVGRSCTGTLVVHLDDYNDHAPQIDKEVTICQNNEDFAVLKPVDPDGPENGPPFQFFLDNSASKNWNIEEKDGKTAILRQRQNLDYNYYSVPIQIKDRHGLVATHMLTVRVCDCSTPSECRMKDKSTRDVRPNVILGRWAILAMVLGSVLLLCILFTCFCVTAKRTVKKCFPEDIAQQNLIVSNTEGPGEEVTEANIRLPMQTSNICDTSMSVGTVGGQGIKTQQSFEMVKGGYTLDSNKGGGHQTLESVKGVGQGDTGRYAYTDWQSFTQPRLGEKVYLCGQDEEHKHCEDYVCSYNYEGKGSLAGSVGCCSDRQEEEGLEFLDHLEPKFRTLAKTCIKK

SEQ ID NO: 67 - protein, 422 aa, Homo sapiens
MHGREAGPFVCVCVLLASIPTPQTPLLQASLPPFHPASAGHPITGQQDAFRAFHPDLEFVGKFLKPLLIGELAPEEPSQDHGKNSKITEDFRALRKTAEDMNLFKTNHVFFLLLLAHIIALESIAWFTVFYFGNGWIPTLITAFVLATSQAQAGWLQHDYGHLSVYRKPKWNHLVHKFVIGHLKGASANWWNHRHFQHHAKPNIFHKDPDVNMLHVFVLGEWQPIEYGKKKLKYLPYNHQHEYFFLIGPPLLIPMYFQYQIIMTMIVHKNWVDLAWAVSYYIRFFITYIPFYGILGALLFLNFIRFLESHWFVWVTQMNHIVMEIDQEAYRDWFSSQLTATCNVEQSFFNDWFSGHLNFQIEHHLFPTMPRHNLHKIAPLVKSLCAKHGIEYQEKPLLRALLDIIRSLKKSGKLWLDAYLHK

SEQ ID NO: 68 - protein, 918 aa, Homo sapiens
MPGGAGAARLCLLAFALQPLRPRAAREPGWTRGSEEGSPKLQHELIIPQWKTSESPVREKHPLKAELRVMAEGRELILDLEKNEQLFAPSYTETHYTSSGNPQTTTRKLEDHCFYHGTVRETELSSVTLSTCRGIRGLITVSSNLSYVIEPLPDSKGQHLIYRSEHLKPPPGNCGFEHSKPTTRDWALQFTQQTKKRPRRMKREDLNSMKYVELYLVADYLEFQKNRRDQDATKHKLIEIANYVDKFYRSLNIRIALVGLEVWTHGNMCEVSENPYSTLWSFLSWRRKLLAQKYHDNAQLITGMSFHGTTIGLAPLMAMCSVYQSGGVNMDHSENAIGVAATMAHEMGHNFGMTHDSADCCSASAADGGCIMAAATGHPFPKVFNGCNRRELDRYLQSGGGMCLSNMPDTRMLYGGRRCGNGYLEDGEECDCGEEEECNNPCCNASNCTLRPGAECAHGSCCHQCKLLAPGTLCREQARQCDLPEFCTGKSPHCPTNFYQMDGTPCEGGQAYCYNGMCLTYQEQCQQLWGPGARPAPDLCFEKVNVAGDTFGNCGKDMNGEHRKCNMRDAKCGKIQCQSSEARPLESNAVPIDTTIIMNGRQIQCRGTHVYRGPEEEGDMLDPGLVMTGTKCGYNHICFEGQCRNTSFFETEGCGKKCNGHGVCNNNQNCHCLPGWAPPFCNTPGHGGSIDSGPMPPESVGPVVAGVLVAILVLAVLMLMYYCCRQNNKLGQLKPSALPSKLRQQFSCPFRVSQNSGTGHANPTFKLQTPQGKRKVINTPEILRKPSQPPPRPPPDYLRGGSPPAPLPAHLSRAARNSPGPGSQIERTESSRRPPPSRPIPPAPNCIVSQDFSRPRPPQKALPANPVPGRRSLPRPGGASPLRPPGAGPQQSRPLAALAPKFPEYRSQRAGGMISSKI

SEQ ID NO: 69 - protein, 2080 aa, Homo sapiens
MLRVFILYAENVHTPDTDISDAYCSAVFAGVKKRTKVIKNSVNPVWNEGFEWDLKGIPLDQGSELHVVVKDHETMGRNRFLGEAKVPLREVLATPSLSASFNAPLLDTKKQPTGASLVLQVSYTPLPGAVPLFPPPTPLEPSPTLPDLDVVADTGGEEDTEDQGLTGDEAEPFLDQSGGPGAPTTPRKLPSRPPPHYPGIKRKRSAPTSRKLLSDKPQDFQIRVQVIEGRQLPGVNIKPVVKVTAAGQTKRTRIHKGNSPLFNETLFFNLFDSPGELFDEPIFITVVDSRSLRTDALLGEFRMDVGTIYREPRHAYLRKWLLLSDPDDFSAGARGYLKTSLCVLGPGDEAPLERKDPSEDKEDIESNLLRPTGVALRGAHFCLKVFRAEDLPQMDDAVMDNVKQIFGFESNKKNLVDPFVEVSFAGKMLCSKILEKTANPQWNQNITLPAMFPSMCEKMRIRIIDWDRLTHNDIVATTYLSMSKISAPGGEIEEEPAGAVKPSKASDLDDYLGFLPTFGPCYINLYGSPREFTGFPDPYTELNTGKGEGVAYRGRLLLSLETKLVEHSEQKVEDLPADDILRVEKYLRRRKYSLFAAFYSATMLQDVDDAIQFEVSIGNYGNKFDMTCLPLASTTQYSRAVFDGCHYYYLPWGNVKPVVVLSSYWEDISHRIETQNQLLGIADRLEAGLEQVHLALKAQCSTEDVDSLVAQLTDELIAGCSQPLGDIHETPSATHLDQYLYQLRTHHLSQITEAALALKLGHSELPAALEQAEDWLLRLRALAEEPQNSLPDIVIWMLQGDKRVAYQRVPAHQVLFSRRGANYCGKNCGKLQTIFLKYPMEKVPGARMPVQIRVKLWFGLSVDEKEFNQFAEGKLSVFAETYENETKLALVGNWGTTGLTYPKFSDVTGKIKLPKDSFRPSAGWTWAGDWFVCPEKTLLHDMDAGHLSFVEEVFENQTRLPGGQWIYMSDNYTDVNGEKVLPKDDIECPLGWKWEDEEWSTDLNRAVDEQGWEYSITIPPERKPKHWVPAEKMYYTHRRRRWVRLRRRDLSQMEALKRHRQAEAEGEGWEYASLFGWKFHLEYRKTDAFRRRRWRRRMEPLEKTGPAAVFALEGALGGVMDDKSEDSMSVSTLSFGVNRPTISCIFDYGNRYHLRCYMYQARDLAAMDKDSFSDPYAIVSFLHQSQKTVVVKNTLNPTWDQTLIFYEIEIFGEPATVAEQPPSIVVELYDHDTYGADEFMGRCICQPSLERMPRLAWFPLTRGSQPSGELLASFELIQREKPAIHHIPGFEVQETSRILDESEDTDLPYPPPQREANIYMVPQNIKPALQRTAIEILAWGLRNMKSYQLANISSPSLVVECGGQTVQSCVIRNLRKNPNFDICTLFMEVMLPREELYCPPITVKVIDNRQFGRRPVVGQCTIRSLESFLCDPYSAESPSPQGGPDDVSLLSPGEDVLIDIDDKEPLIPIQEEEFIDWWSKFFASIGEREKCGSYLEKDFDTLKVYDTQLENVEAFEGLSDFCNTFKLYRGKTQEETEDPSVIGEFKGLFKIYPLPEDPAIPMPPRQFHQLAAQGPQECLVRIYIVRAFGLQPKDPNGKCDPYIKISIGKKSVSDQDNYIPCTLEPVFGKMFELTCTLPLEKDLKITLYDYDLLSKDEKIGETVVDLENRLLSKFGARCGLPQTYCVSGPNQWRDQLRPSQLLHLFCQQHRVKAPVYRTDRVMFQDKEYSIEEIEAGRIPNPHLGPVEERLALHVLQQQGLVPEHVESRPLYSPLQPDIEQGKLQMWVDLFPKALGRPGPPFNITPRRARRFFLRCIIWNTRDVILDDLSLTGEKMSDIYVKGWMIGFEEHKQKTDVHYRSLGGEGNFNWRFIFPFDYLPAEQVCTIAKKDAFWRLDKTESKIPARVVFQIWDNDKFSFDDFLGSLQLDLNRMPKPAKTAKKCSLDQLDDAFHPEWFVSLFEQKTVKGWWPCVAEEGEKKILAGKLEMTLEIVAESEHEERPAGQGRDEPNMNPKLEDPRRPDTSFLWFTSPYKTMKFILWRRFRWAIILFIILFILLLFLAIFIYAFPNYAAMKLVKPFS

SEQ ID NO: 70 - protein, 2137 aa, Homo sapiens
MVSQVLQLLRQGVWAALTGGWYHDPEQSKFTNSCHLYLWLFLLLLPLALHLAFPPNAIIVFFYCSAVTIFFTIIKLVSYRLHLMFDKGEVIQQKPSRKEEKPNKDKEAKGEHITNHRNPSNNRQIHNGKKEEASRNLSTPPLRCSSRGQSITSHHSSGPLELSAQETVEDLKGVILLEDHPIAPVSSTSPGIKVESLPASQAHMLETTTKSVIPVKPVATETLINGKGKERGGKGQPPLRHRSEGGLVDKGPLKKLPHLSLSQYDLLETDVSFQPWGSENSVLIPEPVSCPRGSIRERVQSKSPQDSLSSSCPQCDTIVAKPVEEPADTSCQVDTSCQGDLPLHQEVDSSDSEVAVTLIDTSQPGDPLSLHEPIKIVITMSSTPNSMTDLESSLHLRVVGTEKTSVKSDAEPTNPGAAGSPNAEQISIPVITLDLPEGGGGGVPCPEGNGSERTPERLKTRVSTNQCSGYGSGEGGNAIKDHSSSSREPWESVSRLTPDTGSESKVGKEGQTNLDPSSCKSSHEKRHARVLSVDSGTDVFLSKSSAEIVNDTEKTMPTSKSDLEAKEGQMPNESNFLEFVSLLESINTSKMTASSQLNGSAEQNEESGLLRDNCSQEKKEEILENEKPSGHSSKQGKPDLQSQDHTSTGPACTQPAKTTAFFQGNRQRQIIYRVTSQQDSSVLQVISGPETSVQEEISVDAMHVFIDEHGEIRSCYLKSGNQKEGPLQPLPSNNDCLSQAREMQVSSSSTTTSESQDPSSGDPAVSALQQQLLLMVARRTQSETPRHVSQDLEASSCSSTQGKFNREQFYKFIIFPGKWIKVWYDRLTLLALLDRTEDIKENVLAILLIVLVSLLGFLTLSQGFCKDMWVLLFCLVMASCQYSLLKSVQPDPASPIHGHNQIITYSRPIYFCVLCGLILLLDTGAKARHPPSYVVYGLKLFSPVFLQSARDYLIVFLYCFPAISLLGLFPQINTFCTYLLEQIDMLFFGGSAVSGITSAVYSVARSVLAAALLHAVCFSAVKEPWSMQHIPALFSAFCGLLVALSYHLSRQSSDPSVLMSFIQCRLFPKFLHQNLAESAADPLPKKMKDSVTDVLKWDLIVCAVVAVLSFAVSASTVFLSLRPFLSIVLFALAGAVGFVTHYVLPQLRKHHPWMWISHPILKNKEYHQREVRDVAHLMWFERLYVWLQCFEKYILYPALILNALTIDAFLISNHRRLGTHWDIFLMIIAGMKLLRTSFCNPVYQFINLSFTVIFFHFDYKDISESFLLDFFMVSILFSKLGDLLHKLQFVLTYVAPWQMAWGSSFHVFAQLFAIPHSAMLFFQTIATSIFSTPLSPFLGSVIFITSYVRPVKFWEKNYNTRRVDNSNTRLAVQIERDPGNDDNNLNSIFYEHLTRTLQESLCGDLVLGRWGNYSSGDCFILASDDLNAFVHLIEIGNGLVTFQLRGLEFRGTYCQQREVEAIMEGDEEDRGCCCCKPGHLPHLLSCNAAFHLRWLTWEITQTQYILEGYSILDNNAATMLQVFDLRRILIRYYIKSIIYYMVTSPKLLSWIKNESLLKSLQPFAKWHYIERDLAMFNINIDDDYVPCLQGITRASFCNVYLEWIQHCARKRQEPSTTLDSDEDSPLVTLSFALCTLGRRALGTAAHNMAISLDSFLYGLHVLFKGDFRITARDEWVFADMDLLHKVVAPAIRMSLKLHQDQFTCPDEYEDPAVLYEAIQSFEKKVVICHEGDPAWRGAVLSNKEELLTLRHVVDEGADEYKVIMLHRSFLSFKVIKVNKECVRGLWAGQQQELIFLRNRNPERGSIQNNKQVLRNLINSSCDQPLGYPMYVSPLTTSYLGTHRQLKNIWGGPITLDRIRTWFWTKWVRMRKDCNARQHSGGNIEDVDGGGAPTTGGNNAPSGGSQESSAEQPRKGGAQHGVSSCEGTQRTGRRKGRSQSVQAHSALSQRPPMLSSSGPILESRQTFLQTSTSVHELAQRLSGSRLSLHASATSLHSQPPPVTTTGHLSVRERAEALIRSSLGSSTSSTLSFLFGKRSFSSALVISGLSAAEGGNTSDTQSSSSVNIVMGPSARAASQATRHLSEPCEPPDATEQGQLHDRCLAEAVADTLGVVCRRASQEDMGLDDTASQQSVSDEQ

SEQ ID NO: 71 - protein, 481 aa, Homo sapiens
MALSYRVSELQSTIPEHILQSTFVHVISSNWSGLQTESIPEEMKQIVEEQGNKLHWAALLILMVIIPTIGGNTLVILAVSLEKKLQYATNYFLMSLAVADLLVGLFVMPIALLTIMFEAMWPLPLVLCPAWLFLDVLFSTASIMHLCAISVDRYIAIKKPIQANQYNSRATAFIKITVVWLISIGIAIPVPIKGIETDVDNPNNITCVLTKERFGDFMLFGSLAAFFTPLAIMIVTYFLTIHALQKKAYLVKNKPPQRLTWLTVSTVFQRDETPCSSPEKVAMLDGSRKDKALPNSGDETLMRRTSTIGKKSVQTISNEQRASKVLGIVFFLFLLMWCPFFITNITLVLCDSCNQTTLQMLLEIFVWIGYVSSGVNPLVYTLFNKTFRDAFGRYITCNYRATKSVKTLRKRSSKIYFRNPMAENSKFFKKHGIRNGINPAMYQSPMRLRSSTIQSSSIILLDTLLLTENEGDKTEEQVSYV

SEQ ID NO: 72 - protein, 448 aa, Homo sapiens
MAHVGDCTQTPWLPVLVVSLMCSARAEYSNCGENEYYNQTTGLCQECPPCGPGEEPYLSCGYGTKDEDYGCVPCPAEKFSKGGYQICRRHKDCEGFFRATVLTPGDMENDAECGPCLPGYYMLENRPRNIYGMVCYSCLLAPPNTKECVGATSGASANFPGTSGSSTLSPFQHAHKELSGQGHLATALIIAMSTIFIMAIAIVLIIMFYILKTKPSAPACCTSHPGKSVEAQVSKDEEKKEAPDNVVMFSEKDEFEKLTATPAKPTKSENDASSENEQLLSRSVDSDEEPAPDKQGSPELCLLSLVHLAREKSATSNKSAGIQSRRKKILDVYANVCGVVEGLSPTELPFDCLEKTSRMLSSTYNSEKAVVKTWRHLAESFGLKRDEIGGMTDGMQLFDRISTAGYSIPELLTKLVQIERLDAVESLCADILEWAGVVPPASQPHAAS

SEQ ID NO: 73 - protein, 573 aa, Homo sapiens
MTNSKGRSITDKTSGGPSSGGGFVDWTLRLNTIQSDKFLNLLLSMVPVIYQKNQEDRHKKANGIWQDGLSTAVQTFSNRSEQHMEYHSFSEQSFHANNGHASSSCSQKYDDYANYNYCDGRETSETTAMLQDEDISSDGDEDAIVEVTPKLPKESSGIMALQILVPFLLAGFGTVSAGMVLDIVQHWEVFRKVTEVFILVPALLGLKGNLEMTLASRLSTAVNIGKMDSPIEKWNLIIGNLALKQVQATVVGFLAAVAAIILGWIPEGKYYLDHSILLCSSSVATAFIASLLQGIIMVGVIVGSKKTGINPDNVATPIAASFGDLITLAILAWISQGLYSCLETYYYISPLVGVFFLALTPIWIIIAAKHPATRTVLHSGWEPVITAMVISSIGGLILDTTVSDPNLVGIVVYTPVINGIGGNLVAIQASRISTYLHLHSIPGELPDEPKGCYYPFRTFFGPGVNNKSAQVLLLLVIPGHLIFLYTIHLMKSGHTSLTIIFIVVYLFGAVLQVFTLLWIADWMVHHFWRKGKDPDSFSIPYLTALGDLLGTALLALSFHFLWLIGDRDGDVGD

SEQ ID NO: 74 - protein, 414 aa, Homo sapiens
MTKARLFRLWLVLGSVFMILLIIVYWDSAGAAHFYLHTSFSRPHTGPPLPTPGPDRDRELTADSDVDEFLDKFLSAGVKQSDLPRKETEQPPAPGSMEESVRGYDWSPRDARRSPDQGRQQAERRSVLRGFCANSSLAFPTKERAFDDIPNSELSHLIVDDRHGAIYCYVPKVACTNWKRVMIVLSGSLLHRGAPYRDPLRIPREHVHNASAHLTFNKFWRRYGKLSRHLMKVKLKKYTKFLFVRDPFVRLISAFRSKFELENEEFYRKFAVPMLRLYANHTSLPASAREAFRAGLKVSFANFIQYLLDPHTEKLAPFNEHWRQVYRLCHPCQIDYDFVGKLETLDEDAAQLLQLLQVDRQLRFPPSYRNRTASSWEEDWFAKIPLAWRQQLYKLYEADFVLFGYPKPENLLRD

SEQ ID NO: 75 - protein, 523 aa, Homo sapiens
MAGVSYAAPWWVSLLHRLPHFDLSWEATSSQFRPEDTDYQQALLLLGAAALACLALDLLFLLFYSFWLCCRRRKSEEHLDADCCCTAWCVIIATLVCSAGIAVGFYGNGETSDGIHRATYSLRHANRTVAGVQDRVWDTAVGLNHTAEPSLQTLERQLAGRPEPLRAVQRLQGLLETLLGYTAAIPFWRNTAVSLEVLAEQVDLYDWYRWLGYLGLLLLDVIICLLVLVGLIRSSKGILVGVCLLGVLALVISWGALGLELAVSVGSSDFCVDPDAYVTKMVEEYSVLSGDILQYYLACSPRAANPFQQKLSGSHKALVEMQDVVAELLRTVPWEQPATKDPLLRVQEVLNGTEVNLQHLTALVDCRSLHLDYVQALTGFCYDGVEGLIYLALFSFVTALMFSSIVCSVPHTWQQKRGPDEDGEEEAAPGPRQAHDSLYRVHMPSLYSCGSSYGSETSIPAAAHTVSNAPVTEYMSQNANFQNPRCENTPLIGRESPPPSYTSSMRAKYLATSQPRPDSSGSH

SEQ ID NO: 76 - protein, 145 aa, Homo sapiens
MSASAATGVFVLSLSAIPVTYVFNHLAAQHDSWTIVGVAALILFLVALLARVLVKRKPPRDPLFYVYAVFGFTSVVNLIIGLEQDGIIDGFMTHYLREGEPYLNTAYGHMICYWDGSAHYLMYLVMVAAIAWECWHICSILFLTL

SEQ ID NO: 77 - protein, 128 aa, Homo sapiens
MWSTRSPNSTAWPLSLEPDPGMASASTTMHTTTIAEPDPGMSGWPDGRMETSTPTIMDIVVIAGVIAAVAIVLVSLLFVMLRYMYRHKGTYHTNEAKGTEFAESADAALQGDPALQDAGDSSRKEYFI

SEQ ID NO: 78 - protein, 196 aa, Homo sapiens
MNQADPRLRAVCLWTLTSAAMSRGDNCTDLLALGIPSITQAWGLWVLLGAVTLLFLISLAAHLSQWTRGRSRSHPGQGRSGESVEEVPLYGNLHYLQTGRLSQDPEPDQQDPTLGGPARAAEEVMCYTSLQLRPPQGRIPGPGTPVKYSEVVLDSEPKSQASGPEPELYASVCAQTRRARASFPDQAYANSQPAAS

SEQ ID NO: 79 - protein, 260 aa, Homo sapiens
MGPRARPALLLLMLLQTAVLQGRLLQSHTLQVILGCEMQEDNSTEGYWKYGYDGQDHLEFCPDTLDWRAAEPRAWPTKLEWERHKIRARQNRAYLERDCPAQLQQLLELGRGVLDQQVPPLVKVTHHVTSSVTTLRCRALNYYPQNITMKWLKDKQPMDAKEFEPKDVLPNGDGTYQGWITLAVPPGEEQRYTCQVEHPGLDQPLIVIWEPSPSGTLVIGVISGIAVFVVILFIGILFIILRKRQGSRGAMGHYVLAERE

SEQ ID NO: 80 - protein, 156 aa, Homo sapiens
MCHSRSCHPTMTILQAPTPAPSTIPGPRRGSGPEIFTFDPLPEPAAAPAGRPSASRGHRKRSRRVLYPRVVRRQLPVEEPNPAKRLLFLLLTIVFCQILMAEEGVPAPLPPEDAPNAASLAPTPVSAVLEPFNLTSEPSDYALDLSTFLQQHPAAF

SEQ ID NO: 81 - protein, 442 aa, Homo sapiens
MAPRSLLLLLSGALALTDTWAGSHSLRYFSTAVSRPGRGEPRYIAVEYVDDTQFLRFDSDAAIPRMEPREPWVEQEGPQYWEWTTGYAKANAQTDRVALRNLLRRYNQSEAGSHTLQGMNGCDMGPDGRLLRGYHQHAYDGKDYISLNEDLRSWTAADTVAQITQRFYEAEEYAEEFRTYLEGECLELLRRYLENGKETLQRADPPKAHVAHHPISDHEATLRCWALGFYPAEITLTWQRDGEEQTQDTELVETRPAGDGTFQKWAAVVVPPGEEQRYTCHVQHEGLPQPLILRWEQSPQPTIPIVGIVAGLVVLGAVVTGAVVAAVMWRKKSSDRNRGSYSQAAAYSVVSGNLMITWWSSLFLLGVLFQGYLGCLRSHSVLGRRKVGDMWILFFLWLWTSFNTAFLALQSLRFGFGFRRGRSFLLRSWHHLMKRVQIKIFD

SEQ ID NO: 82 - protein, 262 aa, Homo sapiens
MAPALLLIPAALASFILAFGTGVEFVRFTSLRPLLGGIPESGGPDARQGWLAALQDRSILAPLAWDLGLLLLFVGQHSLMAAERVKAWTSRYFGVLQRSLYVACTALALQLVMRYWEPIPKGPVLWEARAEPWATWVPLLCFVLHVISWLLIFSILLVFDYAELMGLKQVYYHVLGLGEPLALKSPRALRLFSHLRHPVCVELLTVLWVVPTLGTDRLLLAFLLTLYLGLAHGLDQQDLRYLRAQLQRKLHLLSRPQDGEAE

SEQ ID NO: 83 - protein, 413 aa, Homo sapiens
MAEGPEEARGHPPGQDDGGGDHEPVPSLRGPPTTAVPCPRDDPQAEPQAPGRPTAPGLAAAAAADKLEPPRELRKRGEAASGSGAELQEQAGCEAPEAAAPRERPARLSAREYSRQVHEWLWQSYCGYLTWHSGLAAFPAYCSPQPSPQSFPSGGAAVPQAAAPPPPQLGYYNPFYFLSPGAAGPDPRTAAGISTPAPVAGLGPRAPHVQASVRATPVTRVGSAAPSRSPSETGRQAGREYVIPSLAHRFMAEMVDFFILFFIKATIVLSIMHLSGIKDISKFAMHYIIEEIDEDTSMEDLQKMMVVALIYRLLVCFYEIICIWGAGGATPGKFLLGLRVVTCDTSVLIAPSRVLVIPSSNVSITTSTIRALIKNFSIASFFPAFITLLFFQHNRTAYDIVAGTIVVKRNGVR

SEQ ID NO: 84 - protein, 784 aa, Homo sapiens
MPHTLWMVWVLGVIISLSKEESSNQASLSCDRNGICKGSSGSLNSIPSGLTEAVKSLDLSNNRITYISNSDLQRCVNLQALVLTSNGINTIEEDSFSSLGSLEHLDLSYNYLSNLSSSWFKPLSSLTFLNLLGNPYKTLGETSLFSHLTKLQILRVGNMDTFTKIQRKDFAGLTFLEELEIDASDLQSYEPKSLKSIQNVSHLILHMKQHILLLEIFVDVTSSVECLELRDTDLDTFHFSELSTGETNSLIKKFTFRNVKITDESLFQVMKLLNQISGLLELEFDDCTLNGVGNFRASDNDRVIDPGKVETLTIRRLHIPRFYLFYDLSTLYSLTERVKRITVENSKVFLVPCLLSQHLKSLEYLDLSENLMVEEYLKNSACEDAWPSLQTLILRQNHLASLEKTGETLLTLKNLTNIDISKNSFHSMPETCQWPEKMKYLNLSSTRIHSVTGCIPKTLEILDVSNNNLNLFSLNLPQLKELYISRNKLMTLPDASLLPMLLVLKISRNAITTFSKEQLDSFHTLKTLEAGGNNFICSCEFLSFTQEQQALAKVLIDWPANYLCDSPSHVRGQQVQDVRLSVSECHRTALVSGMCCALFLLILLTGVLCHRFHGLWYMKMMWAWLQAKRKPRKAPSRNICYDAFVSYSERDAYWVENLMVQELENFNPPFKLCLHKRDFIPGKWIIDNIIDSIEKSHKTVFVLSENFVKSEWCKYELDFSHFRLFDENNDAAILILLEPIEKKAIPQRFCKLRKIMNTKTYLEWPMDEAQREGFWVNLRAAIKS

SEQ ID NO: 85 - protein, 2214 aa, Homo sapiens
MATRSSRRESRLPFLFTLVALLPPGALCEVWTQRLHGGSAPLPQDRGFLVVQGDPRELRLWARGDARGASRADEKPLRRKRSAALQPEPIKVYGQVSLNDSHNQMVVHWAGEKSNVIVALARDSLALARPKSSDVYVSYDYGKSFKKISDKLNFGLGNRSEAVIAQFYHSPADNKRYIFADAYAQYLWITFDFCNTLQGFSIPFRAADLLLHSKASNLLLGFDRSHPNKQLWKSDDFGQTWIMIQEHVKSFSWGIDPYDKPNTIYIERHEPSGYSTVFRSTDFFQSRENQEVILEEVRDFQLRDKYMFATKVVHLLGSEQQSSVQLWVSFGRKPMRAAQFVTRHPINEYYIADASEDQVFVCVSHSNNRTNLYISEAEGLKFSLSLENVLYYSPGGAGSDTLVRYFANEPFADFHRVEGLQGVYIATLINGSMNEENMRSVITFDKGGTWEFLQAPAFTGYGEKINCELSQGCSLHLAQRLSQLLNLQLRRMPILSKESAPGLIIATGSVGKNLASKTNVYISSSAGARWREALPGPHYYTWGDHGGIITAIAQGMETNELKYSTNEGETWKTFIFSEKPVFVYGLLTEPGEKSTVFTIFGSNKENVHSWLILQVNATDALGVPCTENDYKLWSPSDERGNECLLGHKTVFKRRTPHATCFNGEDFDRPVVVSNCSCTREDYECDFGFKMSEDLSLEVCVPDPEFSGKSYSPPVPCPVGSTYRRTRGYRKISGDTCSGGDVEARLEGELVPCPLAEENEFILYAVRKSIYRYDLASGATEQLPLTGLRAAVALDFDYEHNCLYWSDLALDVIQRLCLNGSTGQEVIINSGLETVEALAFEPLSQLLYWVDAGFKKIEVANPDGDFRLTIVNSSVLDRPRALVLVPQEGVMFWTDWGDLKPGIYRSNMDGSAAYHLVSEDVKWPNGISVDDQWIYWTDAYLECIERITFSGQQRSVILDNLPHPYAIAVFKNEIYWDDWSQLSIFRASKYSGSQMEILANQLTGLMDMKIFYKGKNTGSNACVPRPCSLLCLPKANNSRSCRCPEDVSSSVLPSGDLMCDCPQGYQLKNNTCVKQENTCLRNQYRCSNGNCINSIWWCDFDNDCGDMSDERNCPTTICDLDTQFRCQESGTCIPLSYKCDLEDDCGDNSDESHCEMHQCRSDEYNCSSGMCIRSSWVCDGDNDCRDWSDEANCTAIYHTCEASNFQCRNGHCIPQRWACDGDTDCQDGSDEDPVNCEKKCNGFRCPNGTCIPSSKHCDGLRDCSDGSDEQHCEPLCTHFMDFVCKNRQQCLFHSMVCDGIIQCRDGSDEDAAFAGCSQDPEFHKVCDEFGFQCQNGVCISLIWKCDGMDDCGDYSDEANCENPTEAPNCSRYFQFRCENGHCIPNRWKCDRENDCGDWSDEKDCGDSHILPFSTPGPSTCLPNYYRCSSGTCVMDTWVCDGYRDCADGSDEEACPLLANVTAASTPTQLGRCDRFEFECHQPKTCIPNWKRCDGHQDCQDGRDEANCPTHSTLTCMSREFQCEDGEACIVLSERCDGFLDCSDESDEKACSDELTVYKVQNLQWTADFSGDVTLTWMRPKKMPSASCVYNVYYRVVGESIWKTLETHSNKTNTVLKVLKPDTTYQVKVQVQCLSKAHNTNDFVTLRTPEGLPDAPRNLQLSLPREAEGVIVGHWAPPIHTHGLIREYIVEYSRSGSKMWASQRAASNFTEIKNLLVNTLYTVRVAAVTSRGIGNWSDSKSITTIKGKVIPPPDIHIDSYGENYLSFTLTMESDIKVNGYVVNLFWAFDTHKQERRTLNFRGSILSHKVGNLTAHTSYEISAWAKTDLGDSPLAFEHVMTRGVRPPAPSLKAKAINQTAVECTWTGPRNVVYGIFYATSFLDLYRNPKSLTTSLHNKTVIVSKDEQYLFLVRVVVPYQGPSSDYVVVKMIPDSRLPPRHLHVVHTGKTSVVIKWESPYDSPDQDLLYAVAVKDLIRKTDRSYKVKSRNSTVEYTLNKLEPGGKYHIIVQLGNMSKDSSIKITTVSLSAPDALKIITENDHVLLFWKSLALKEKHFNESRGYEIHMFDSAMNITAYLGNTTDNFFKISNLKMGHNYTFTVQARCLFGNQICGEPAILLYDELGSGADASATQAARSTDVAAVVVPILFLILLSLGVGFAILYTKHRRLQSSFTAFANSHYSSRLGSAIFSSGDDLGEDDEDAPMITGFSDDVPMVIA

SEQ ID NO: 86 - protein, 64 aa, Homo sapiens
MDRWYLGGSPKGDVDPFYYDYETVRNGGLIFAGLAFIVGLLILLSRRFRCGGNKKRRQINEDEP

SEQ ID NO: 87 - protein, 397 aa, Homo sapiens
MAGYEYVSPEQLAGFDKYKYSAVDTNPLSLYVMHPFWNTIVKVFPTWLAPNLITFSGFLLVVFNFLLMAYFDPDFYASAPGHKHVPDWVWIVVGILNFVAYTLDGVDGKQARRTNSSTPLGELFDHGLDSWSCVYFVVTVYSIFGRGSTGVSVFVLYLLLWVVLFSFILSHWEKYNTGILFLPWGYDISQVTISFVYIVTAVVGVEAWYEPFLFNFLYRDLFTAMIIGCALCVTLPMSLLNFFRSYKNNTLKLNSVYEAMVPLFSPCLLFILSTAWILWSPSDILELHPRVFYFMVGTAFANSTCQLIVCQMSSTRCPTLNWLLVPLFLVVLVVNLGVASYVESILLYTLTTAFTLAHIHYGVRVVKQLSSHFQIYPFSLRKPNSDULGMEEKNIGL

SEQ ID NO: 88 - protein, 323 aa, Homo sapiens
MAALIAENFRFLSLFFKSKDVMIFNGLVALGTVGSQELFSVVAFHCPCSPARNYLYGLAAIGVPALVLFIIGIILNNHTWNLVAECQHRRTKNCSAAPTFLLLSSILGRAAVAPVTWSVISLLRGEAYVCALSEFVDPSSLTAREEHFPSAHATEILARFPCKENPDNLSDFREEVSRRLRYESQLFGWLLIGVVAILVFLTKCLKHYCSPLSYRQEAYWAQYRANEDQLFQRTAEVHSRVLAANNVRRFFGFVALNKDDEELIANFPVEGTQPRPQWNAITGVYLYRENQGLPLYSRLHKWAQGLAGNGAAPDNVEMALLPS

SEQ ID NO: 89 - protein, 571 aa, Homo sapiens
MTRAGDHNRQRGCCGSLADYLTSAKFLLYLGHSLSTWGDRMWHFAVSVFLVELYGNSLLLTAVYGLVVAGSVLVLGAIIGDWVDKNARLKVAQTSLVVQNVSVILCGIILMMVFLHKHELLTMYHGWVLTSCYILIITIANIANLASTATAITIQRDWIVVVAGEDRSKLANMNATIRRIDQLTNILAPMAVGQIMTFGSPVIGCGFISGWNLVSMCVEYVLLWKVYQKTPALAVKAGLKEEETELKQLNLHKDTEPKPLEGTHLMGVKDSNIHELEHEQEPTCASQMAEPFRTFRDGWVSYYNQPVFLAGMGLAFLYMTVLGFDCITTGYAYTQGLSGSILSILMGASAITGIMGTVAFTWLRRKCGLVRTGLISGLAQLSCLILCVISVFMPGSPLDLSVSPFEDIRSRFIQGESITPTKIPEITTEIYMSNGSNSANIVPETSPESVPIISVSLLFAGVIAARIGLWSFDLTVTQLLQENVIESERGIINGVQNSMNYLLDLLHFIMVILAPNPEAFGLLVLISVSFVAMGHIMYFRFAQNTLGNKLFACGPDAKEVRKENQANTSVV

SEQ ID NO: 90 - protein, 477 aa, Homo sapiens
MPGSDTALTVDRTYSYPGRHHRCKSRVERHDMNTLSLPLNIRRGGSDTNLNFDVPDGILDFHKVKLTADSLKQKILKVTEQIKIEQTSRDGNVAEYLKLVNNADKQQAGRIKQVFEKKNQKSAHSIAQLQKKLEQYHRKLREIEQNGASRSSKDISKDHLKDIHRSLKDAHVKSRTAPHCMESSKSGMPGVSLTPPVFVFNKSREFANLIRNKFGSADNIAHLKNSLEEFRPEASARAYGGSATIVNKPKYGSDDECSSGTSGSADSNGNQSFGAGGASTLDSQGKLAVILEELREIKDTQAQLAEDIEALKVQFKREYGFISQTLQEERYRYERLEDQLHDLTDLHQHETANLKQELASIEEKVAYQAYERSRDIQEALESCQTRISKLELHQQEQQALQTDTVNAKVLLGRCINVILAFMTVILVCVSTIAKFVSPMMKSRCHILGTFFAVTLLAIFCKNWDHILCAIERMIIPR

SEQ ID NO: 91 - protein, 1613 aa, Homo sapiens
MGAVLRSLLACSFCVLLRAAPLLLYANRRDLRLVDATNGKENATIVVGGLEDAAAVDFVFSHGLIYWSDVSEEAIKRTEFNKTESVQNVVVSGLLSPDGLACDWLGEKLYWTDSETNRIEVSNLDGSLRKVLFWQELDQPRAIALDPSSGFMYWTDWGEVPKIERAGMDGSSRFIIINSEIYWPNGLTLDYEEQKLYWADAKLNFIHKSNLDGTNRQAVVKGSLPHPFALTLFEDILYWTDWSTHSILACNKYTGEGLREIHSDIFSPMDIHAFSQQRQPNATNPCGIDNGGCSHLCLMSPVKPFYQCACPTGVKLLENGKTCKDGATELLLLARRTDLRRISLDTPDFTDIVLQLEDIRHAIAIDYDPVEGYIYWTDDEVRAIRRSFIDGSGSQFVVTAQIAHPDGIAVDWVARNLYWTDTGTDRIEVTRLNGTMRKILISEDLEEPRAIVLDPMVGYMYWTDWGEIPKIERAALDGSDRVVLVNTSLGWPNGLALDYDEGKIYWGDAKTDKIEVMNTDGTGRRVLVEDKIPHIFGFTLLGDYVYWTDWQRRSIERVHKRSAEREVIIDQLPDLMGLKATNVHRVIGSNPCAEENGGCSHLCLYRPQGLRCACPIGFELISDMKTCIVPEAFLLFSRRADIRRISLETNNNNVAIPLTGVKEASALDFDVTDNRIYWTDISLKTISRAFMNGSALEHVVEFGLDYPEGMAVDWLGKNLYWADTGTNRIEVSKLDGQHRQVLVWKDLDSPRALALDPAEGFMYWTEWGGKPKIDRAAMDGSERTTLVPNVGRANGLTIDYAKRRLYWTDLDTNLIESSNMLGLNREVIADDLPHPFGLTQYQDYIYWTDWSRRSIERANKTSGQNRTIIQGHLDYVMDILVFHSSRQSGWNECASSNGHCSHLCLAVPVGGFVCGCPAHYSLNADNRTCSAPTTFLLFSQKSAINRMVIDEQQSPDIILPIHSLRNVRAIDYDPLDKQLYWIDSRQNMIRKAQEDGSQGFTVVVSSVPSQNLEIQPYDLSIDIYSRYIYWTCEATNVINVTRLDGRSVGVVLKGEQDRPRAVVVNPEKGYMYFTNLQERSPKIERAALDGTEREVLFFSGLSKPIALALDSRLGKLFWADSDLRRIESSDLSGANRIVLEDSNILQPVGLTVFENWLYWIDKQQQMIEKIDMTGREGRTKVQARIAQLSDIHAVKELNLQEYRQHPCAQDNGGCSHICLVKGDGTTRCSCPMHLVLLQDELSCGEPPTCSPQQFTCFTGEIDCIPVAWRCDGFTECEDHSDELNCPVCSESQFQCASGQCIDGALRCNGDANCQDKSDEKNCEVLCLIDQFRCANGQCIGKHKKCDHNVDCSDKSDELDCYPTEEPAPQATNTVGSVIGVIVTIFVSGTVYFICQRMLCPRMKGDGETMTNDYVVHGPASVPLGYVPHPSSLSGSLPGMSRGKSMISSLSIMGGSSGPPYDRAHVTGASSSSSSSTKGTYFPAILNPPPSPATERSHYTMEFGYSSNSPSTHRSYSYRPYSYRHFAPPTTPCSTDVCDSDYAPSRRMTSVATAKGYTSDLNYDSEPVPPPPTPRSQYLSAEENYESCPPSPYTERSYSHHLYPPPPSPCTDSS

SEQ ID NO: 92 - protein, 293 aa, Homo sapiens
MATNESVSIFSSASLAVEYVDSLLPENPLQEPFKNAWNYMLNNYTKFQIATWGSLIVHEALYFLFCLPGFLFQFIPYMKKYKIQKDKPETWENQWKCFKVLLFNHFCIQLPLICGTYYFTEYFNIPYDWERMPRWYFLLARCFGCAVIEDTWHYFLHRLLHHKRIYKYIHKVHHEFQAPFGMEAEYAHPLETLILGTGFFIGIVLLCDHVILLWAWVTIRLLETIDVHSGYDIPLNPLNLIPFYAGSRHHDFHHMNFIGNYASTFTWWDRIFGTDSQYNAYNEKRKKFEKKTE

SEQ ID NO: 93 - protein, 507 aa, Homo sapiens
MAGAGPKRRALAAPAAEEKEEAREKMLAAKSADGSAPAGEGEGVTLQRNITLLNGVAIIVGTIIGSGIFVTPTGVLKEAGSPGLALVVWAACGVFSIVGALCYAELGTTISKSGGDYAYMLEVYGSLPAFLKLWIELLIIRPSSQYIVALVFATYLLKPLFPTCPVPEEAAKLVACLCVLLLTAVNCYSVKAATRVQDAFAAAKLLALALIILLGFVQIGKGDVSNLDPNFSFEGTKLDVGNIVLALYSGLFAYGGWNYLNFVTEEMINPYRNLPLAIIISLPIVTLVYVLTNLAYFTTLSTEQMLSSEAVAVDFGNYHLGVMSWIIPVFVGLSCFGSVNGSLFTSSRLFFVGSREGHLPSILSMIHPQLLTPVPSLVFTCVMTLLYAFSKDIFSVINFFSFFNWLCVALAIIGMIWLRHRKPELERPIKVNLALPVFFILACLFLIAVSFWKTPVECGIGFTIILSGLPVYFFGVWWKNKPKWLLQGIFSTTVLCQKLMQVVPQET

SEQ ID NO: 94 - protein, 509 aa, Homo sapiens
MGCSAKARWAAGALGVAGLLCAVLGAVMIVMVPSLIKQQVLKNVRIDPSSLSFNMWKEIPIPFYLSVYFFDVMNPSEILKGEKPQVRERGPYVYREFRHKSNITFNNNDTVSFLEYRTFQFQPSKSHGSESDYIVMPNILVLGAAVMMENKPMTLKLIMTLAFTTLGERAFMNRTVGEIMWGYKDPLVNLINKYFPGMFPFKDKFGLFAELNNSDSGLFTVFTGVQNISRIHLVDKWNGLSKVDFWHSDQCNMINGTSGQMWPPFMTPESSLEFYSPEACRSMKLMYKESGVFEGIPTYRFVAPKTLFANGSIYPPNEGFCPCLESGIQNVSTCRFSAPLFLSHPHFLNADPVLAEAVTGLHPNQEAHSLFLDIHPVTGIPMNCSVKLQLSLYMKSVAGIGQTGKIEPVVLPLLWFAESGAMEGETLHTFYTQLVLMPKVMHYAQYVLLALGCVLLLVPVICQIRSQEKCYLFWSSSKKGSKDKEAIQAYSESLMTSAPKGSVLQEAKL

SEQ ID NO: 95 - protein, 1106 aa, Homo sapiens
MRLPGAMPALALKGELLLLSLLLLLEPQISQGLVVTPPGPELVLNVSSTFVLTCSGSAPVVWERMSQEPPQEMAKAQDGTFSSVLTLTNLTGLDTGEYFCTHNDSRGLETDERKRLYIFVPDPTVGFLPNDAEELFIFLTEITEITIPCRVTDPQLVVTLHEKKGDVALPVPYDHQRGFSGIFEDRSYICKTTIGDREVDSDAYYVYRLQVSSINVSVNAVQTVVRQGENITLMCIVIGNEVVNFEWTYPRKESGRLVEPVTDFLLDMPYHIRSILHIPSAELEDSGTYTCNVTESVNDHQDEKAINITVVESGYVRLLGEVGTLQFAELHRSRTLQVVFEAYPPPTVLWFKDNRTLGDSSAGEIALSTRNVSETRYVSELTLVRVKVAEAGHYTMRAFHEDAEVQLSFQLQINVPVRVLELSESHPDSGEQTVRCRGRGMPQPNIIWSACRDLKRCPRELPPTLLGNSSEEESQLETNVTYWEEEQEFEVVSTLRLQHVDRPLSVRCTLRNAVGQDTQEVIVVPHSLPFKVVVISAILALVVLTIISLIILIMLWQKKPRYEIRWKVIESVSSDGHEYIYVDPMQLPYDSTWELPRDQLVLGRTLGSGAFGQVVEATAHGLSHSQATMKVAVKMLKSTARSSEKQALMSELKIMSHLGPHLNVVNLLGACTKGGPIYIITEYCRYGDLVDYLHRNKHTFLQHHSDKRRPPSAELYSNALPVGLPLPSHVSLTGESDGGYMDMSKDESVDYVPMLDMKGDVKYADIESSNYMAPYDNYVPSAPERTCRATLINESPVLSYMDLVGFSYQVANGMEFLASKNCVHRDLAARNVLICEGKLVKICDFGLARDIMRDSNYISKGSTFLPLKWMAPESIFNSLYTTLSDVWSFGILLWEIFTLGGTPYPELPMNEQFYNAIKRGYRMAQPAHASDEIYEIMQKCWEEKFEIRPPFSQLVLLLERLLGEGYKKKYQQVDEEFLRSDHPAILRSQARLPGFHGLRSPLDTSSVLYTAVQPNEGDNDYIIPLPDPKPEVADEGPLEGSPSLASSTLNEVNTSSTISCDSPLEPQDEPEPEPQLELQVEPEPELEQLPDSGCPAPRAEAEDSFL

SEQ ID NO: 96 - protein, 97 aa, Homo sapiens
MNQENPPPYPGPGPTAPYPPYPPQPMGPGPMGGPYPPPQGYPYQGYPQYGWQGGPQEPPKTTVYVVEDQRRDELGPSTCLTACWTALCCCCLWDMLT

SEQ ID NO: 97 - protein, 666 aa, Homo sapiens
MTPPPPGRAAPSAPRARVPGPPARLGLPLRLRLLLLLWAAAASAQGHLRSGPRIFAVWKGHVGQDRVDFGQTEPHTVLFHEPGSSSVWVGGRGKVYLFDFPEGKNASVRTVNIGSTKGSCLDKRDCENYITLLERRSEGLLACGTNARHPSCWNLVNGTVVPLGEMRGYAPFSPDENSLVLFEGDEVYSTIRKQEYNGKIPRFRRIRGESELYTSDTVMQNPQFIKATIVHQDQAYDDKIYYFFREDNPDKNPEAPLNVSRVAQLCRGDQGGESSLSVSKWNTFLKAMLVCSDAATNKNFNRLQDVFLLPDPSGQWRDTRVYGVFSNPWNYSAVCVYSLGDIDKVFRTSSLKGYHSSLPNPRPGKCLPDQQPIPTETFQVADRHPEVAQRVEPMGPLKTPLFHSKYHYQKVAVHRMQASHGETFHVLYLTTDRGTIHKVVEPGEQEHSFAFNIMEIQPFRRAAAIQTMSLDAERRKLYVSSQWEVSQVPLDLCEVYGGGCHGCLMSRDPYCGWDQGRCISIYSSERSVLQSINPAEPHKECPNPKPDKAPLQKVSLAPNSRYYLSCPMESRHATYSWRHKENVEQSCEPGHQSPNCILFIENLTAQQYGHYFCEAQEGSYFREAQHWQLLPEDGIMAEHLLGHACALAASLWLGVLPTLTLGLLVH

SEQ ID NO: 98 - protein, 1363 aa, Homo sapiens
MQRGAALCLRLWLCLGLLDGLVSGYSMTPPTLNITEESHVIDTGDSLSISCRGQHPLEWAWPGAQEAPATGDKDSEDTGVVRDCEGTDARPYCKVLLLHEVHANDTGSYVCYYKYIKARIEGTTAASSYVFVRDFEQPFINKPDTLLVNRKDAMWVPCLVSIPGLNVTLRSQSSVLWPDGQEVVWDDRRGMLVSTPLLHDALYLQCETTWGDQDFLSNPFLVHITGNELYDIQLLPRKSLELLVGEKLVLNCTVWAEFNSGVTFDWDYPGKQAERGKWVPERRSQQTHTELSSILTIHNVSQHDLGSYVCKANNGIQRFRESTEVIVHENPFISVEWLKGPILEATAGDELVKLPVKLAAYPPPEFQWYKDGKALSGRHSPHALVLKEVTEASTGTYTLALWNSAAGLRRNISLELVVNVPPQIHEKEASSPSIYSRHSRQALTCTAYGVPLPLSIQWHWRPWTPCKMFAQRSLRRRQQQDLMPQCRDWRAVTTQDAVNPIESLDTWTEFVEGKNKTVSKLVIQNANVSAMYKCVVSNKVGQDERLIYFYVTTIPDGFTIESKPSEELLEGQPVLLSCQADSYKYEHLRWYRLNLSTLHDAHGNPLLLDCKNVHLFATPLAASLEEVAPGARHATLSLSIPRVAPEHEGHYVCEVQDRRSHDKHCHKKYLSVQALEAPRLTQNLTDLLVNVSDSLEMQCLVAGAHAPSIVWYKDERLLEEKSGVDLADSNQKLSIQRVREEDAGRYLCSVCNAKGCVNSSASVAVEGSEDKGSMEIVILVGTGVIAVFFWVLLLLIFCNMRRPAHADIKTGYLSIIMDPGEVPLEEQCEYLSYDASQWEFPRERLHLGRVLGYGAFGKVVEASAFGIHKGSSCDTVAVKMLKEGATASEHRALMSELKILIHIGNHLNVVNLLGACTKPQGPLMVIVEFCKYGNLSNFLRAKRDAFSPCAEKSPEQRGRFRAMVELARLDRRRPGSSDRVLFARFSKTEGGARRASPDQEAEDLWLSPLTMEDLVCYSFQVARGMEFLASRKCIHRDLAARNILLSESDVVKICDFGLARDIYKDPDYVRKGSARLPLKWMAPESIFDKVYTTQSDVWSFGVLLWEIFSLGASPYPGVQINEEFCQRLRDGTRMRAPELATPAIRRIMLNCWSGDPKARPAFSELVEILGDLLQGRGLQEEEEVCMAPRSSQSSEEGSFSQVSTMALHIAQADAEDSPPSLQRHSLAARYYNWVSFPGCLARGAETRGSSRMKTFEEFPMTPTTYKGSVDNQTDSGMVLASEEFEQIESRHRQESGFSCKGPGQNVAVTRAHPDSQGRRRRPERGARGGQVFYNSEYGELSEPSEEDHCSPSARVTFFTDNSY

SEQ ID NO: 99 - protein, 384 aa, Homo sapiens
MSCAGRAGPARLAALALLTCSLWPARADNASQEYYTALINVTVQEPGRGAPLTFRIDRGRYGLDSPKAEVRGQVLAPLPLHGVADHLGCDPQTRFFVPPNIKQWIALLQRGNCTFKEKISRAAFHNAVAVVIYNNKSKEEPVTMTHPGTGDIIAVMITELRGKDILSYLEKNISVQMTIAVGTRMPPKNFSRGSLVFVSISFIVLMIISSAWLIFYFIQKIRYTNARDRNQRRLGDAAKKAISKLTTRTVKKGDKETDPDFDHCAVCIESYKQNDVVRILPCKHVFHKSCVDPWLSEHCTCPMCKLNILKALGIVPNLPCTDNVAFDMERLTRTQAVNRRSALGDLAGDNSLGLEPLRTSGISPLPQDGELTPRTGEINIAVTR

SEQ ID NO: 100 - protein, 862 aa, Homo sapiens
MAHTFRGCSLAFMFIITWLLIKAKIDACKRGDVTVKPSHVILLGSTVNITCSLKPRQGCFHYSRRNKLILYKFDRRINFHHGHSLNSQVTGLPLGTTLFVCKLACINSDEIQICGAEIFVGVAPEQPQNLSCIQKGEQGTVACTWERGRDTHLYTEYTLQLSGPKNLTWQKQCKDIYCDYLDFGINLTPESPESNFTAKVTAVNSLGSSSSLPSTFTFLDIVRPLPPWDIRIKFQKASVSRCTLYWRDEGLVLLNRLRYRPSNSRLWNMVNVTKAKGRHDLLDLKPFTEYEFQISSKLHLYKGSWSDWSESLRAQTPEEEPTGMLDVWYMKRHIDYSRQQISLFWKNLSVSEARGKILHYQVTLQELTGGKAMTQNITGHTSWTTVIPRTGNWAVAVSAANSKGSSLPTRINIMNLCEAGLLAPRQVSANSEGMDNILVTWQPPRKDPSAVQEYVVEWRELHPGGDTQVPLNWLRSRPYNVSALISENIKSYICYEIRVYALSGDQGGCSSILGNSKHKAPLSGPHINAITEEKGSILISWNSIPVQEQMGCLLHYRIYWKERDSNSQPQLCEIPYRVSQNSHPINSLQPRVTYVLWMTALTAAGESSHGNEREFCLQGKANWMAFVAPSICIAIIMVGIFSTHYFQQKVFVLLAALRPQWCSREIPDPANSTCAKKYPIAEEKTQLPLDRLLIDWPTPEDPEPLVISEVLHQVTPVFRHPPCSNWPQREKGIQGHQASEKDMMHSASSPPPPRALQAESRQLVDLYKVLESRGSDPKPENPACPWTVLPAGDLPTHDGYLPSNIDDLPSHEAPLADSLEELEPQHISLSVFPSSSLHPLTFSCGDKLTLDQLKMRCDSLML

SEQ ID NO: 101 - protein, 1039 aa, Homo sapiens
MARALCPLQALWLLEWVLLLLGPCAAPPAWALNLDPVQLTFYAGPNGSQFGFSLDFHKDSHGRVAIVVGAPRTLGPSQEETGGVFLCPWRAEGGQCPSLLFDLRDETRNVGSQTLQTFKARQGLGASVVSWSDVIVACAPWQHWNVLEKTEEAEKTPVGSCFLAQPESGRRAEYSPCRGNTLSRIYVENDFSWDKRYCEAGFSSVVTQAGELVLGAPGGYYFLGLLAQAPVADIFSSYRPGILLWHVSSQSLSFDSSNPEYFDGYWGYSVAVGEFDGDLNTTEYVVGAPTWSWTLGAVEILDSYYQRLHRLRGEQMASYFGHSVAVTDVNGDGRHDLLVGAPLYMESRADRKLAEVGRVYLFLQPRGPHALGAPSLLLTGTQLYGRFGSAIAPLGDLDRDGYNDIAVAAPYGGPSGRGQVLVFLGQSEGLRSRPSQVLDSPFPTGSAFGFSLRGAVDIDDNGYPDLIVGAYGANQVAVYRAQPVVKASVQLLVQDSLNPAVKSCVLPQTKTPVSCFNIQMCVGATGHNIPQKLSLNAELQLDRQKPRQGRRVLLLGSQQAGTTLNLDLGGKHSPICHTTMAFLRDEADFRDKLSPIVLSLNVSLPPTEAGMAPAVVLHGDTHVQEQTRIVLDCGEDDVCVPQLQLTASVTGSPLLVGADNVLELQMDAANEGEGAYEAELAVHLPQGAHYMRALSNVEGFERLICNQKKENETRVVLCELGNPMKKNAQIGIAMLVSVGNLEEAGESVSFQLQIRSKNSQNPNSKIVLLDVPVRAEAQVELRGNSFPASLVVAAEEGEREQNSLDSWGPKVEHTYELHNNGPGTVNGLHLSIHLPGQSQPSDLLYILDIQPQGGLQCFPQPPVNPLKVDWGLPIPSPSPIHPAHHKRDRRQIFLPEPEQPSRLQDPVLVSCDSAPCTVVQCDLQEMARGQRAMVTVLAFLWLPSLYQRPLDQFVLQSHAWFNVSSLPYAVPPLSLPRGEAQVWTQLLRALEERAIPIWWVLVGVLGGLLLLTILVLAMWKVGFFKRNRPPLEEDDEEGE

SEQ ID NO: 102 - protein, 1375 aa, Homo sapiens
MAGGAWGRLACYLEFLKKEELKEFQLLLANKAHSRSSSGETPAQPEKTSGMEVASYLVAQYGEQRAWDLALHTWEQMGLRSLCAQAQEGAGHSPSFPYSPSEPHLGSPSQPTSTAVLMPWIHELPAGCTQGSERRVLRQLPDTSGRRWREISASLLYQALPSSPDHESPSQESPNAPTSTAVLGSWGSPPQPSLAPREQEAPGTQWPLDETSGIYYTEIREREREKSEKGRPPWAAVVGTPPQAHTSLQPHHHPWEPSVRESLCSTWPWKNEDFNQKFTQLLLLQRPHPRSQDPLVKRSWPDYVEENRGHLIEIRDLFGPGLDTQEPRIVILQGAAGIGKSTLARQVKEAWGRGQLYGDRFQHVFYFSCRELAQSKVVSLAELIGKDGTATPAPIRQILSRPERLLFILDGVDEPGWVLQEPSSELCLHWSQPQPADALLGSLLGKTILPEASFLITARTTALQNLIPSLEQARWVEVLGFSESSRKEYFYRYFTDERQAIRAFRLVKSNKELWALCLVPWVSWLACTCLMQQMKRKEKLTLTSKTTTTLCLHYLAQALQAQPLGPQLRDLCSLAAEGIWQKKTLFSPDDLRKHGLDGAIISTFLKMGILQEHPIPLSYSFIHLCFQEFFAAMSYVLEDEKGRGKHSNCIIDLEKTLEAYGIHGLFGASTTRFLLGLLSDEGEREMENIFHCRLSQGRNLMQWVPSLQLLLQPHSLESLHCLYETRNKTFLTQVMAHFEEMGMCVETDMELLVCTFCIKFSRHVKKLQLIEGRQHRSTWSPTMVVLFRWVPVTDAYWQILFSVLKVTRNLKELDLSGNSLSHSAVKSLCKTLRRPRCLLETLRLAGCGLTAEDCKDLAFGLRANQTLTELDLSFNVLTDAGAKHLCQRLRQPSCKLQRLQLVSCGLTSDCCQDLASVLSASPSLKELDLQQNNLDDVGVRLLCEGLRHPACKLIRLGLDQTTLSDEMRQELRALEQEKPQLLIFSRRKPSVMTPTEGLDTGEMSNSTSSLKRQRLGSERAASHVAQANLKLLDVSKIFPIAEIAGKSHEESSPEVVPVELLCVPSPASQGDLHTKPLGTDDDFWGPTGPVATEVVDKEKNLYRVHFPVAGSYRWPNTGLCFVMREAVTVEIEFCVWDQFLGEINPQHSWMVAGPLLDIKAEPGAVEAVHLPHFVALQGGHVDTSLFQMAHFKEEGMLLEKPARVELHHIVLENPSFSPLGVLLKMIHNALRFIPVTSVVLLYHRVHPEEVTFHLYLIPSDCSIRKAIDDLEMKFQFVRIHKPPPLTPLYMGCRYTVSGSGSGMLEILPKELELCYRSPGEDQLFSEFYVGHLGSGIRLQVKDKKDETLVWEALVKPGRNTSQPWNLRCNRDARRY

SEQ ID NO: 103 - protein, 511 aa, Homo sapiens
MLVDGPSERPALCFLLLAVAMSFFGSALSIDETRAHLLLKEKMMRLGGRLVLNTKEELANERLMTLKIAEMKEAMRTLIFPPSMHFFQAKHLIERSQVFNILRMMPKGAALHLHDIGIVTMDWLVRNVTYRPHCHICFTPRGIMQFRFAHPTPRPSEKCSKWILLEDYRKRVQNVTEFDDSLLRNFTLVTQHPEVIYTNQNVVWSKFETIFFTISGLIHYAPVFRDYVFRSMQEFYEDNVLYMEIRARLLPVYELSGEHHDEEWSVKTYQEVAQKFVETHPEFIGIKIIYSDHRSKDVAVIAESIRMAMGLRIKFPTVVAGFDLVGHEDTGHSLHDYKEALMIPAKDGVKLPYFFHAGETDWQGTSIDRNILDALMLNTTRIGHGFALSKHPAVRTYSWKKDIPIEVCPISNQVLKLVSDLRNHPVATLMATGHPMVISSDDPAMFGAKGLSYDFYEVFMGIGGMKADLRTLKQLAMNSIKYSTLLESEKNTFMEIWKKRWDKFIADVATK

SEQ ID NO: 104 - protein, 889 aa, Homo sapiens
MVLAQGLLSMALLALCWERSLAGAEETIPLQTLRCYNDYTSHITCRWADTQDAQRLVNVTLIRRVNEDLLEPVSCDLSDDMPWSACPHPRCVPRRCVIPCQSFVVTDVDYFSFQPDRPLGTRLTVTLTQHVQPPEPRDLQISTDQDHFLLTWSVALGSPQSHWLSPGDLEFEVVYKRLQDSWEDAAILLSNTSQATLGPEHLMPSSTYVARVRTRLAPGSRLSGRPSKWSPEVCWDSQPGDEAQPQNLECFFDGAAVLSCSWEVRKEVASSVSFGLFYKPSPDAGEEECSPVLREGLGSLHTRHHCQIPVPDPATHGQYIVSVQPRRAEKHIKSSVNIQMAPPSLNVTKDGDSYSLRWETMKMRYEHIDHTFEIQYRKDTATWKDSKTETLQNAHSMALPALEPSTRYWARVRVRTSRTGYNGIWSEWSEARSWDTESVLPMWVLALIVIFLTIAVLLALRFCGIYGYRLRRKWEEKIPNPSKSHLFQNGSAELWPPGSMSAFTSGSPPHQGPWGSRFPELEGVFPVGFGDSEVSPLTIEDPKHVCDPPSGPDTTPAASDLPTEQPPSPQPGPPAASHTPEKQASSFDFNGPYLGPPHSRSLPDILGQPEPPQEGGSQKSPPPGSLEYLCLPAGGQVQLVPLAQAMGPGQAVEVERRPSQGAAGSPSLESGGGPAPPALGPRVGGQDQKDSPVAIPMSSGDTEDPGVASGYVSSADLVFTPNSGASSVSLVPSLGLPSDQTPSLCPGLASGPPGAPGPVKSGFEGYVELPPIEGRSPRSPRNNPVPPEAKSPVLNPGERPADVSPTSPQPEGLLVLQQVGDYCFLPGLGPGPLSLRSKPSSPGPGPEIKNLDQAFQVKKPPGQAVPQVPVIQLFKALVVSVMSVGPPVP

SEQ ID NO: 105 - protein, 1501 aa, Homo sapiens
MAPTWGPGMVSVVGPMGLLVVLLVGGCAAEEPPRFIKEPKDQIGVSGGVASFVCQATGDPKPRVTWNKKGKKVNSQRFETIEFDESAGAVLRIQPLRTPRDENVYECVAQNSVGEITVHAKLTVLREDQLPSGFPNIDMGPQLKVVERTRTATMLCAASGNPDPEITWFKDFLPVDPSASNGRIKQLRSGALQIESSEETDQGKYECVATNSAGVRYSSPANLYVRVRRVAPRFSILPMSHEIMPGGNVNITCVAVGSPMPYVKWMQGAEDLTPEDDMPVGRNVLELTDVKDSANYTCVAMSSLGVIEAVAQITVKSLPKAPGTPMVTENTATSITITWDSGNPDPVSYYVIEYKSKSQDGPYQIKEDITTTRYSIGGLSPNSEYEIWVSAVNSIGQGPPSESVVTRTGEQAPASAPRNVQARMLSATTMIVQWEEPVEPNGLIRGYRVYYTMEPEHPVGNWQKHNVDDSLLTTVGSLLEDETYTVRVLAFTSVGDGPLSDPIQVKTQQGVPGQPMNLRAEARSETSITLSWSPPRQESIIKYELLFREGDHGREVGRTFDPTTSYVVEDLKPNTEYAFRLAARSPQGLGAFTPVVRQRTLQSISPKNFKVKMIMKTSVLLSWEFPDNYNSPTPYKIQYNGLTLDVDGRTTKKLITHLKPHTFYNFVLTNRGSSLGGLQQTVTAWTAFNLLNGKPSVAPKPDADGFIMVYLPDGQSPVPVQSYFIVMVPLRKSRGGQFLTPLGSPEDMDLEELIQDISRLQRRSLRHSRQLEVPRPYIAARFSVLPPTFHPGDQKQYGGFDNRGLEPGHRYVLFVLAVLQKSEPTFAASPFSDPFQLDNPDPQPIVDGEEGLIWVIGPVLAVVFIICIVIAILLYKKKPHSKRKDSEPRTKCLLNNADLAPHHPKDPVEMRRINFQTPGMLSHPPIPIADMAEHTERLKANDSLKLSQEYESIDPGQQFTWEHSNLEVNKPKNRYANVIAYDHSRVILQPIEGIMGSDYINANYVDGYRCQNAYIATQGPLPETFGDFWRMVWEQRSATIVMMTRLEEKSRIKCDQYWPNRGTETYGFIQVTLLDTIELATFCVRTFSLHKNGSSEKREVRQFQFTAWPDHGVPEYPTPFLAFLRRVKTCNPPDAGPIVVHCSAGVGRTGCFIVIDAMLERIKPEKTVDVYGHVTLMRSQRNYMVQTEDQYSFIHEALLEAVGCGNTEVPARSLYAYIQKLAQVEPGEHVTGMELEFKRLANSKAHTSRFISANLPCNKFKNRLVNIMPYESTRVCLQPIRGVEGSDYINASFIDGYRQQKAYIATQGPLAETTEDFWRMLWENNSTIVVMLTKLREMGREKCHQYWPAERSARYQYFVVDPMAEYNMPQYILREFKVTDARDGQSRTVRQFQFTDWPEQGVPKSGEGFIDFIGQVHKTKEQFGQDGPISVHCSAGVGRTGVFITLSIVLERMRYEGVVDIFQTVKMLRTQRPAMVQTEDEYQFCYQAALEYLGSFDHYAT

SEQ ID NO: 106 - protein, 2146 aa, Homo sapiens
MAFWTQLMLLLWKNFMYRRRQPVQLLVELLWPLFLFFILVAVRHSHPPLEHHECHFPNKPLPSAGTVPWLQGLICNVNNTCFPQLTPGEEPGRLSNFNDSLVSRLLADARTVLGGASAHRTLAGLGKLIATLRAARSTAQPQPTKQSPLEPPMLDVAELLTSLLRTESLGLALGQAQEPLHSLLEAAEDLAQELLALRSLVELRALLQRPRGTSGPLELLSEALCSVRGPSSTVGPSLNWYEASDLMELVGQEPESALPDSSLSPACSELIGALDSHPLSRLLWRRLKPLILGKLLFAPDTPFTRKLMAQVNRTFEELTLLRDVREVWEMLGPRIFTFMNDSSNVAMLQRLLQMQDEGRRQPRPGGRDHMEALRSFLDPGSGGYSWQDAHADVGHLVGTLGRVTECLSLDKLEAAPSEAALVSRALQLLAEHRFWAGVVFLGPEDSSDPTEHPTPDLGPGHVRIKIRMDIDVVTRTNKIRDRFWDPGPAADPLTDLRYVWGGFVYLQDLVERAAVRVLSGANPRAGLYLQQMPYPCYVDDVFLRVLSRSLPLFLTLAWIYSVTLTVKAVVREKETRLRDTMRAMGLSRAVLWLGWFLSCLGPFLLSAALLVLVLKLGDILPYSHPGVVFLFLAAFAVATVTQSFLLSAFFSRANLAAACGGLAYFSLYLPYVLCVAWRDRLPAGGRVAASLLSPVAFGFGCESLALLEEQGEGAQWHNVGTRPTADVFSLAQVSGLLLLDAALYGLATWYLEAVCPGQYGIPEPWNFPFRRSYWCGPRPPKSPAPCPTPLDPKVLVEEAPPGLSPGVSVRSLEKRFPGSPQPALRGLSLDFYQGHITAFLGHNGAGKTTTLSILSGLFPPSGGSAFILGHDVRSSMAAIRPHLGVCPQYNVLFDMLTVDEHVWFYGRLKGLSAAVVGPEQDRLLQDVGLVSKQSVQTRHLSGGMQRKLSVAIAFVGGSQVVILDEPTAGVDPASRRGIWELLLKYREGRTLILSTHHLDEAELLGDRVAVVAGGRLCCCGSPLFLRRHLGSGYYLTLVKARLPLTTNEKADTDMEGSVDTRQEKKNGSQGSRVGTPQLLALVQHWVPGARLVEELPHELVLVLPYTGAHDGSFATLFRELDTRLAELRLTGYGISDTSLEEIFLKVVEECAADTDMEDGSCGQHLCTGIAGLDVTLRLKMPPQETALENGEPAGSAPETDQGSGPDAVGRVQGWALTRQQLQALLLKRFLLARRSRRGLFAQIVLPALFVGLALVFSLIVPPFGHYPALRLSPTMYGAQVSFFSEDAPGDPGRARLLEALLQEAGLEEPPVQHSSHRFSAPEVPAEVAKVLASGNWTPESPSPACQCSRPGARRLLPDCPAAAGGPPPPQAVTGSGEVVQNLTGRNLSDFLVKTYPRLVRQGLKTKKWVNEVRYGGFSLGGRDPGLPSGQELGRSVEELWALLSPLPGGALDRVLKNLTAWAHSLDAQDSLKIWFNNKGWHSMVAFVNRASNAILRAHLPPGPARHAHSITTLNHPLNLTKEQLSEGALMASSVDVLVSICVVFAMSFVPASFTLVLIEERVTRAKHLQLMGGLSPTLYWLGNFLWDMCNYLVPACIVVLIFLAFQQRAYVAPANLPALLLLLLLYGWSITPLMYPASFFFSVPSTAYVVLTCINLFIGINGSMATFVLELFSDQKLQEVSRILKQVFLIFPHFCLGRGLIDMVRNQAMADAFERLGDRQFQSPLRWEVVGKNLLAMVIQGPLFLLFTLLLQHRSQLLPQPRVRSLPLLGEEDEDVARERERVVQGATQGDVLVLRNLTKVYRGQRMPAVDRLCLGIPPGECFGLLGVNGAGKTSTFRMVTGDTLASRGEAVLAGHSVAREPSAAHLSMGYCPQSDAIFELLTGREHLELLARLRGVPEAQVAQTAGSGLARLGLSWYADRPAGTYSGGNKRKLATALALVGDPAVVFLDEPTTGMDPSARRFLWNSLLAVVREGRSVMLTSHSMEECEALCSRLAIMVNGRFRCLGSPQHLKGRFAAGHTLTLRVPAARSQPAAAFVAAEFPGAELREAHGGRLRFQLPPGGRCALARVFGELAVHGAEHGVEDFSVSQTMLEEVFLYFSKDQGKDEDTEEQKEAGVGVDPAPGLQHPKRVSQFLDDPSTAETVL

SEQ ID NO: 107 - protein, 655 aa, Homo sapiens
MVAPKSHTDDWAPGPFSSKPQRSQLQIFSSVLQTSLLFLLMGLRASGKDSAPTVVSGILGGSVTLPLNISVDTEIENVIWIGPKNALAFARPKENVTIMVKSYLGRLDITKWSYSLCISNLTLNDAGSYKAQINQRNFEVTTEEEFTLFVYEQLQEPQVTMKSVKVSENFSCNITLMCSVKGAEKSVLYSWTPREPHASESNGGSILTVSRTPCDPDLPYICTAQNPVSQRSSLPVHVGQFCTDPGASRGGTTGETVVGVLGEPVTLPLALPACRDTEKVVWLFNTSIISKEREEAATADPLIKSRDPYKNRVWVSSQDCSLKISQLKIEDAGPYHAYVCSEASSVTSMTHVTLLIYRRLRKPKITWSLRHSEDGICRISLTCSVEDGGNTVMYTWTPLQKEAVVSQGESHLNVSWRSSENHPNLTCTASNPVSRSSHQFLSENICSGPERNTKLWIGLFLMVCLLCVGIFSWCIWKRKGRCSVPAFCSSQAEAPADTPEPTAGHTLYSVLSQGYEKLDTPLRPARQQPTPTSDSSSDSNLTTEEDEDRPEVHKPISGRYEVFDQVTQEGAGHDPAPEGQADYDPVTPYVTEVESVVGENTMYAQVFNLQGKTPVSQKEESSATIYCSIRKPQVVPPPQQNDLEIPESPTYENFT

SEQ ID NO: 108 - protein, 819 aa, Homo sapiens
MVSWGRFICLVVVTMATLSLARPSFSLVEDTTLEPEEPPTKYQISQPEVYVAAPGESLEVRCLLKDAAVISWTKDGVHLGPNNRTVLIGEYLQIKGATPRDSGLYACTASRTVDSETWYFMVNVTDAISSGDDEDDTDGAEDFVSENSNNKRAPYWTNTEKMEKRLHAVPAANTVKFRCPAGGNPMPTMRWLKNGKEFKQEHRIGGYKVRNQHWSLIMESVVPSDKGNYTCVVENEYGSINHTYHLDVVERSPHRPILQAGLPANASTVVGGDVEFVCKVYSDAQPHIQWIKHVEKNGSKYGPDGLPYLKVLKAAGVNTTDKEIEVLYIRNVTFEDAGEYTCLAGNSIGISFHSAWLTVLPAPGREKEITASPDYLEIAIYCIGVFLIACMVVTVILCRMKNTTKKPDFSSQPAVHKLTKRIPLRRQVSAESSSSMNSNTPLVRITTRLSSTADTPMLAGVSEYELPEDPKWEFPRDKLTLGKPLGEGCFGQVVMAEAVGIDKDKPKEAVTVAVKMLKDDATEKDLSDLVSEMEMMKMIGKHKNIINLLGACTQDGPLYVIVEYASKGNLREYLRARRPPGMEYSYDINRVPEEQMTFKDLVSCTYQLARGMEYLASQKCIHRDLAARNVLVTENNVMKIADFGLARDINNIDYYKKTTNGRLPVKWMAPEALFDRVYTHQSDVWSFGVLMWEIFTLGGSPYPGIPVEELFKLLKEGHRMDKPANCTNELYMMMRDCWHAVPSQRPTFKQLVEDLDRILTLTTNEEYLDLSQPLEQYSPSYPDTRSSCSSGDDSVFSPDPMPYEPCLPQYPHINGSVKT

SEQ ID NO: 109 - protein, 1722 aa, Homo sapiens
MRTGWATPRRPAGLLMLLFWFFDLAEPSGRAANDPFTIVHGNTGKCIKPVYGWIVADDCDETEDKLWKWVSQHRLFHLHSQKCLGLDITKSVNELRMFSCDSSAMLWWKCEHHSLYGAARYRLALKDGHGTAISNASDVWKKGGSEESLCDQPYHEIYTRDGNSYGRPCEFPFLIDGTWHHDCILDEDHSGPWCATTLNYEYDRKWGICLKPENGCEDNWEKNEQFGSCYQFNTQTALSWKEAYVSCQNQGADLLSINSAAELTYLKEKEGIAKIFWIGLNQLYSARGWEWSDHKPLNFLNWDPDRPSAPTIGGSSCARMDAESGLWQSFSCEAQLPYVCRKPLNNTVELTDVWTYSDTRCDAGWLPNNGFCYLLVNESNSWDKAHAKCKAFSSDLISIHSLADVEVVVTKLHNEDIKEEVWIGLKNINIPTLFQWSDGTEVTLTYWDENEPNVPYNKTPNCVSYLGELGQWKVQSCEEKLKYVCKRKGEKLNDASSDKMCPPDEGWKRHGETCYKIYEDEVPFGTNCNLTITSRFEQEYLNDLMKKYDKSLRKYFWTGLRDVDSCGEYNWATVGGRRRAVTFSNWNFLEPASPGGCVAMSTGKSVGKWEVKDCRSFKALSICKKMSGPLGPEEASPKPDDPCPEGWQSFPASLSCYKVFHAERIVRKRNWEEAERFCQALGAHLSSFSHVDEIKEFLHFLTDQFSGQHWLWIGLNKRSPDLQGSWQWSDRTPVSTIIMPNEFQQDYDIRDCAAVKVFHRPWRRGWHFYDDREFIYLRPFACDTKLEWVCQIPKGRTPKTPDWYNPDRAGIHGPPLIIEGSEYWFVADLHLNYEEAVLYCASNHSFLATITSFVGLKAIKNKIANISGDGQKWWIRISEWPIDDHFTYSRYPWHRFPVTFGEECLYMSAKTWLIDLGKPTDCSTKLPFICEKYNVSSLEKYSPDSAAKVQCSEQWIPFQNKCFLKIKPVSLTFSQASDTCHSYGGTLPSVLSQIEQDFITSLLPDMEATLWIGLRWTAYEKINKWTDNRELTYSNFHPLLVSGRLRIPENFFEEESRYHCALILNLQKSPFTGTWNFTSCSERHFVSLCQKYSEVKSRQTLQNASETVKYLNNLYKIIPKTLTWHSAKRECLKSNMQLVSITDPYQQAFLSVQALLHNSSLWIGLFSQDDELNFGWSDGKRLHFSRWAETNGQLEDCVVLDTDGFWKTVDCNDNQPGAICYYSGNETEKEVKPVDSVKCPSPVLNTPWIPFQNCCYNFIITKNRHMATTQDEVHTKCQKLNPKSHILSIRDEKENNFVLEQLLYFNYMASWVMLGITYRNKSLMWFDKTPLSYTHWRAGRPTIKNEKFLAGLSTDGFWDIQTFKVIEEAVYFHQHSILACKIEMVDYKEEYNTTLPQFMPYEDGIYSVIQKKVTWYEALNMCSQSGGHLASVHNQNGQLFLEDIVKRDGFPLWVGLSSHDGSESSFEWSDGSTFDYIPWKGQTSPGNCVLLDPKGTWKHEKCNSVKDGAICYKPTKSKKLSRLTYSSRCPAAKENGSRWIQYKGHCYKSDQALHSFSEAKKLCSKHDHSATIVSIKDEDENKFVSRLMRENNNITMRVWLGLSQHSVDQSWSWLDGSEVTFVKWENKSKSGVGRCSMLIASNETWKKVECEHGFGRVVCKVPLGPDYTAIAIIVATLSILVLMGGLIWFLFQRHRLHLAGFSSVRYAQGVNEDEIMLPSFHD

SEQ ID NO: 110 - protein, 879 aa, Homo sapiens
MKEEAFLRRRFSLCPPSSTPQKVDPRKLTRNLLLSGDNELYPLSPGKDMEPNGPSLPRDEGPPTPSSATKVPPAEYRLCNGSDKECVSPTARVTKKETLKAQKENYRQEKKRATRQLLSALTDPSVVIMADSLKIRGTLKSWTKLWCVLKPGVLLIYKTPKVGQWVGTVLLHCCELIERPSKKDGFCFKLFHPLDQSVWAVKGPKGESVGSITQPLPSSYLIFRAASESDGRCWLDALELALRCSSLLRLGTCKPGRDGEPGTSPDASPSSLCGLPASATVHPDQDLFPLNGSSLENDAFSDKSERENPEESDTETQDHSRKTESGSDQSETPGAPVRRGTTYVEQVQEELGELGEASQVETVSEENKSLMWTLLKQLRPGMDLSRVVLPTFVLEPRSFLNKLSDYYYHADLLSRAAVEEDAYSRMKLVLRWYLSGFYKKPKGIKKPYNPILGETFRCCWFHPQTDSRTFYIAEQVSHHPPVSAFHVSNRKDGFCISGSITAKSRFYGNSLSALLDGKATLTFLNRAEDYTLTMPYAHCKGILYGTMTLELGGKVTIECAKNNFQAQLEFKLKPFFGGSTSINQISGKITSGEEVLASLSGHWDRDVFIKEEGSGSSALFWTPSGEVRRQRLRQHTVPLEEQTELESERLWQHVTRAISKGDQHRATQEKFALEEAQRQRARERQESLMPWKPQLFHLDPITQEWHYRYEDHSPWDPLKDIAQFEQDGILRTLQQEAVARQTTFLGSPGPRHERSGPDQRLRKASDQPSGHSQATESSGSTPESCPELSDEEQDGDFVPGGESPCPRCRKEARRLQALHEAILSIREAQQELHRHLSAMLSSTARAAQAPTPGLLQSPRSWFLLCVFLACQLFINHILK

SEQ ID NO: 111 - protein, 864 aa, Homo sapiens
MGCWGQLLVWFGAAGAILCSSPGSQETFLRSSPLPLASPSPRDPKVSAPPSILEPASPLNSPGTEGSWLFSTCGASGRHGPTQTQCDGAYAGTSVVVTVGAAGQLRGVQLWRVPGPGQYLISAYGAAGGKGAKNHLSRAHGVFVSAIFSLGLGESLYILVGQQGEDACPGGSPESQLVCLGESRAVEEHAAMDGSEGVPGSRRWAGGGGGGGGATYVFRVRAGELEPLLVAAGGGGRAYLRPRDRGRTQASPEKLENRSEAPGSGGRGGAAGGGGGWTSRAPSPQAGRSLQEGAEGGQGCSEAWATLGWAAAGGFGGGGGACTAGGGGGGYRGGDASETDNLWADGEDGVSFIHPSSELFLQPLAVTENHGEVEIRRHLNCSHCPLRDCQWQAELQLAECLCPEGMELAVDNVTCMDLHKPPGPLVLMVAVVATSTLSLLMVCGVLILVKQKKWQGLQEMRLPSPELELSKLRTSAIRTAPNPYYCQVGLGPAQSWPLPPGVTEVSPANVTLLRALGHGAFGEVYEGLVIGLPGDSSPLQVAIKTLPELCSPQDELDFLMEALIISKFRHQNIVRCVGLSLRATPRLILLELMSGGDMKSFLRHSRPHLGQPSPLVMRDLLQLAQDIAQGCHYLEENHFIHRDIAARNCLLSCAGPSRVAKIGDFGMARDIYRASYYRRGDRALLPVKWMPPEAFLEGIFTSKTDSWSFGVLLWEIFSLGYMPYPGRTNQEVLDFVVGGGRMDPPRGCPGPVYRIMTQCWQHEPELRPSFASILERLQYCTQDPDVLNSLLPMELGPTPEEEGTSGLGNRSLECLRPPQPQELSPEKLKSWGGSPLGPWLSSGLKPLKSRGLQPQNLWNPTYRS

SEQ ID NO: 112 - protein, 595 aa, Homo sapiens
MRVLLAALGLLFLGALRAFPQDRPFEDTCHGNPSHYYDKAVRRCCYRCPMGLFPTQQCPQRPTDCRKQCEPDYYLDEADRCTACVTCSRDDLVEKTPCAWNSSRVCECRPGMFCSTSAVNSCARCFFHSVCPAGMIVKFPGTAQKNTVCEPASPGVSPACASPENCKEPSSGTIPQAKPTPVSPATSSASTMPVRGGTRLAQEAASKLTRAPDSPSSVGRPSSDPGLSPTQPCPEGSGDCRKQCEPDYYLDEAGRCTACVSCSRDDLVEKTPCAWNSSRTCECRPGMICATSATNSCARCVPYPICAAETVTKPQDMAEKDTTFEAPPLGTQPDCNPTPENGEAPASTSPTQSLLVDSQASKTLPIPTSAPVALSSTGKPVLDAGPVLFWVILVLVVVVGSSAFLLCHRRACRKRIRQKLHLCYPVQTSQPKLELVDSRPRRSSTQLRSGASVTEPVAEERGLMSQPLMETCHSVGAAYLESLPLQDASPAGGPSSPRDLPEPRVSTEHTNNKIEKIYIMKADTVIVGTVKAELPEGRGLAGPAEPELEEELEADHTPHYPEQETEPPLGSCSDVMLSVEEEGKEDPLPTAASGK

SEQ ID NO: 113 - protein, 517 aa, Homo sapiens
MARMGLAGAAGRWWGLALGLTAFFLPGVHSQVVQVNDSMYGFIGTDVVLHCSFANPLPSVKITQVTWQKSTNGSKQNVAIYNPSMGVSVLAPYRERVEFLRPSFTDGTIRLSRLELEDEGVYICEFATFPTGNRESQLNLTVMAKPTNWIEGTQAVLRAKKGQDDKVLVATCTSANGKPPSVVSWETRLKGEAEYQEIRNPNGTVTVISRYRLVPSREAHQQSLACIVNYHMDRFKESLTLNVQYEPEVTIEGFDGNWYLQRMDVKLTCKADANPPATEYHWTTLNGSLPKGVEAQNRTLFFKGPINYSLAGTYICEATNPIGTRSGQVEVNITEFPYTPSPPEHGRRAGPVPTAIIGGVAGSILLVLIVVGGIVVALRRRRHTFKGDYSTKKHVYGNGYSKAGIPQHHPPMAQNLQYPDDSDDEKKAGPLGGSSYEEEEEEEEGGGGGERKVGGPHPKYDEDAKRPYFTVDEAEARQDGYGDRTLGYQYDPEQLDLAENMVSQNDGSFISKKEWYV

SEQ ID NO: 114 - protein, 1073 aa, Homo sapiens
MAAAGQLCLLYLSAGLLSRLGAAFNLDTREDNVIRKYGDPGSLFGFSLAMHWQLQPEDKRLLLVGAPRAEALPLQRANRTGGLYSCDITARGPCTRIEFDNDADPTSESKEDQWMGVTVQSQGPGGKVVTCAHRYEKRQHVNTKQESRDIFGRCYVLSQNLRIEDDMDGGDWSFCDGRLRGHEKFGSCQQGVAATFTKDFHYIVFGAPGTYNWKGIVRVEQKNNTFFDMNIFEDGPYEVGGETEHDESLVPVPANSYLGFSLDSGKGIVSKDEITFVSGAPRANHSGAVVLLKRDMKSAHLLPEHIFDGEGLASSFGYDVAVVDLNKDGWQDIVIGAPQYFDRDGEVGGAVYVYMNQQGRWNNVKPIRLNGTKDSMFGIAVKNIGDINQDGYPDIAVGAPYDDLGKVFIYHGSANGINTKPTQVLKGISPYFGYSIAGNMDLDRNSYPDVAVGSLSDSVTIFRSRPVINIQKTITVTPNRIDLRQKTACGAPSGICLQVKSCFEYTANPAGYNPSISIVGTLEAEKERRKSGLSSRVQFRNQGSEPKYTQELTLKRQKQKVCMEETLWLQDNIRDKLRPIPITASVEIQEPSSRRRVNSLPEVLPILNSDEPKTAHIDVHFLKEGCGDDNVCNSNLKLEYKFCTREGNQDKFSYLPIQKGVPELVLKDQKDIALEITVTNSPSNPRNPTKDGDDAHEAKLIATFPDTLTYSAYRELRAFPEKQLSCVANQNGSQADCELGNPFKRNSNVTFYLVLSTTEVTFDTPDLDINLKLETTSNQDNLAPITAKAKVVIELLLSVSGVAKPSQVYFGGTVVGEQAMKSEDEVGSLIEYEFRVINLGKPLTNLGTATLNIQWPKEISNGKWLLYLVKVESKGLEKVTCEPQKEINSLNLTESHNSRKKREITEKQIDDNRKFSLFAERKYQTLNCSVNVNCVNIRCPLRGLDSKASLILRSRLWNSTFLEEYSKLNYLDILMRAFIDVTAAAENIRLPNAGTQVRVTVFPSKTVAQYSGVPWWIILVAILAGILMLALLVFILWKCGFFKRNKKDHYDATYHKAEIHAQPSDKERLTSDA

SEQ ID NO: 115 - protein, 288 aa, Homo sapiens
MGHTRRQGTSPSKCPYLNFFQLLVLAGLSHFCSGVIHVTKEVKEVATLSCGHNVSVEELAQTRIYWQKEKKMVLTMMSGDMNIWPEYKNRTIFDITNNLSIVILALRPSDEGTYECVVLKYEKDAFKREHLAEVTLSVKADFPTPSISDFEIPTSNIRRIICSTSGGFPEPHLSWLENGEELNAINTTVSQDPETELYAVSSKLDFNMTTNHSFMCLIKYGHLRVNQTFNWNTTKQEHFPDNLLPSWAITLISVNGIFVICCLTYCFAPRCRERRRNERLRRESVRPV

SEQ ID NO: 116 - protein, 599 aa, Homo sapiens
MLCLGWIFLWLVAGERIKGFNISGCSTKKLLWTYSTRSEEEFVLFCDLPEPQKSHFCHRNRLSPKQVPEHLPFMGSNDLSDVQWYQQPSNGDPLEDIRKSYPHIIQDKCTLHFLTPGVNNSGSYICRPKMIKSPYDVACCVKMILEVKPQTNASCEYSASHKQDLLLGSTGSISCPSLSCQSDAQSPAVTWYKNGKLLSVERSNRIVVDEVYDYHQGTYVCDYTQSDTVSSWTVRAVVQVRTIVGDTKLKPDILDPVEDTLEVELGKPLTISCKARFGFERVFNPVIKWYIKDSDLEWEVSVPEAKSIKSTLKDEIIERNIILEKVTQRDLRRKFVCFVQNSIGNTTQSVQLKEKRGVVLLYILLGTIGTLVAVLAASALLYRHWIEIVLLYRTYQSKDQTLGDKKDFDAFVSYAKWSSFPSEATSSLSEEHLALSLFPDVLENKYGYSLCLLERDVAPGGVYAEDIVSIIKRSRRGIFILSPNYVNGPSIFELQAAVNLALDDQTLKLILIKFCYFQEPESLPHLVKKALRVLPTVTWRGLKSVPPNSRFWAKMRYHMPVKNSQGFTWNQLRITSRIFQWKGLSRTETTGRSSQPKEW

SEQ ID NO: 117 - protein, 434 aa, Homo sapiens
MEGAELAGKILSTWLTLVLGFILLPSVFGVSLGISEIYMKILVKTLEWATIRIEKGTPKESILKNSASVGIIQRDESPMEKGLSGLRGRDFELSDVFYFSKKGLEAIVEDEVTQRFSSEELVSWNLLTRTNVNFQYISLRLTMVWVLGVIVRYCVLLPLRVTLAFIGISLLVIGTTLVGQLPDSSLKNWLSELVHLTCCRICVRALSGTIHYHNKQYRPQKGGICVANHTSPIDVLILTTDGCYAMVGQVHGGLMGIIQRAMVKACPHVWFERSEMKDRHLVTKRLKEHIADKKKLPILIFPEGTCINNTSVMMFKKGSFEIGGTIHPVAIKYNPQFGDAFWNSSKYNMVSYLLRMMTSWAIVCDVWYMPPMTREEGEDAVQFANRVKSAIAIQGGLTELPWDGGLKRAKVKDIFKEEQQKNYSKMIVGNGSLS

SEQ ID NO: 118 - protein, 1384 aa, Homo sapiens
MMHLRLFCILLAAVSGAEGWGYYGCDEELVGPLYARSLGASSYYSLLTAPRFARLHGISGWSPRIGDPNPWLQIDLMKKHRIRAVATQGSFNSWDWVTRYMLLYGDRVDSWTPFYQRGHNSTFFGNVNESAVVRHDLHFHFTARYIRIVPLAWNPRGKIGLRLGLYGCPYKADILYFDGDDAISYRFPRGVSRSLWDVFAFSFKTEEKDGLLLHAEGAQGDYVTLELEGAHLLLHMSLGSSPIQPRPGHTTVSAGGVLNDQHWHYVRVDRFGRDVNFTLDGYVQRFILNGDFERLNLDTEMFIGGLVGAARKNLAYRHNFRGCIENVIFNRVNIADLAVRRHSRITFEGKVAFRCLDPVPHPINFGGPHNFVQVPGFPRRGRLAVSFRFRTWDLTGLLLFSRLGDGLGHVELTLSEGQVNVSIAQSGRKKLQFAAGYRLNDGFWHEVNFVAQENHAVISIDDVEGAEVRVSYPLLIRTGTSYFFGGCPKPASRWDCHSNQTAFHGCMELLKVDGQLVNLTLVEGRRLGFYAEVLFDTCGITDRCSPNMCEHDGRCYQSWDDFICYCELTGYKGETCHTPLYKESCEAYRLSGKTSGNFTIDPDGSGPLKPFVVYCDIRENRAWTVVRHDRLWTTRVTGSSMERPFLGAIQYWNASWEEVSALANASQHCEQWIEFSCYNSRLLNTAGGYPYSFWIGRNEEQHFYWGGSQPGIQRCACGLDRSCVDPALYCNCDADQPQWRTDKGLLTFVDHLPVTQVVIGDTNRSTSEAQFFLRPLRCYGDRNSWNTISFHTGAALRFPPIRANHSLDVSFYFRTSAPSGVFLENMGGPYCQWRRPYVRVELNTSRDVVFAFDVGNGDENLTVHSDDFEFNDDEWHLVRAEINVKQARLRVDHRPWVLRPMPLQTYIWMEYDQPLYVGSAELKRRPFVGCLRAMRLNGVTLNLEGRANASEGTSPNCTGHCAHPRLPCFHGGRCVERYSYYTCDCDLTAFDGPYCNHDIGGFFEPGTWMRYNLQSALRSAAREFSHMLSRPVPGYEPGYIPGYDTPGYVPGYHGPGYRLPDYPRPGRPVPGYRGPVYNVTGEEVSFSFSTSSAPAVLLYVSSFVRDYMAVLIKDDGTLQLRYQLGTSPYVYQLTTRPVTDGQPHSINITRVYRNLFIQVDYFPLTEQKFSLLVDSQLDSPKALYLGRVMETGVIDPEIQRYNTPGFSGCLSGVRFNNVAPLKTHFRTPRPMTAELAEALRVQGELSESNCGAMPRLVSEVPPELDPWYLPPDFPYYHDEGWVAILLGFLVAFLLLGLVGMLVLFYLQNHRYKGSYHTNEPKAAHEYHPGSKPPLPTSGPAQVPTPTAAPNQAPASAPAPAPTPAPAPGPRDQNLPQILEESRSE

SEQ ID NO: 119 - protein, 532 aa, Homo sapiens
MAPSSPRPALPALLVLLGALFPGPGNAQTSVSPSKVILPRGGSVLVTCSTSCDQPKLLGIETPLPKKELLLPGNNRKVYELSNVQEDSQPMCYSNCPDGQSTAKTFLTVYWTPERVELAPLPSWQPVGKNLTLRCQVEGGAPRANLTVVLLRGEKELKREPAVGEPAEVTTTVLVRRDHHGANFSCRTELDLRPQGLELFENTSAPYQLQTFVLPATPPQLVSPRVLEVDTQGTVVCSLDGLFPVSEAQVHLALGDQRLNPTVTYGNDSFSAKASVSVTAEDEGTQRLTCAVILGNQSQETLQTVTIYSFPAPNVILTKPEVSEGTEVTVKCEAHPRAKVTLNGVPAQPLGPRAQLLLKATPEDNGRSFSCSATLEVAGQLIHKNQTRELRVLYGPRLDERDCPGNWTWPENSQQTPMCQAWGNPLPELKCLKDGTFPLPIGESVTVTRDLEGTYLCRARSTQGEVTRKVTVNVLSPRYEIVIITVVAAAVIMGTAGLSTYLYNRQRKIKKYRLQQAQKGTPMKPNTQATPP

SEQ ID NO: 120 - protein, 147 aa, Homo sapiens
MAGNSILLAAVSILSACQQSYFALQVGKARLKYKVTPPAVTGSPEFERVFRAQQNCVEFYPIFIITLWMAGWYFNQVFATCLGLVYIYGRHLYFWGYSEAAKKRITGFRLSLGILALLTLLGALGIANSFLDEYLDLNIAKKLRRQF

SEQ ID NO: 121 - protein, 416 aa, Homo sapiens
MPRQLSAAAALFASLAVILHDGSQMRAKAFPETRDYSQPTAAATVQDIKKPVQQPAKQAPHQTLAARFMDGHITFQTAATVKIPTTTPATTKNTATTSPITYTLVTTQATPNNSHTAPPVTEVTVGPSLAPYSLPPTITPPAHTTGTSSSTVSHTTGNTTQPSNQTTLPATLSIALHKSTTGQKPVQPTHAPGTTAAAHNTTRTAAPASTVPGPTLAPQPSSVKTGIYQVLNGSRLCIKAEMGIQLIVQDKESVFSPRRYFNIDPNATQASGNCGTRKSNLLLNFQGGFVNLTFTKDEESYYISEVGAYLTVSDPETIYQGIKHAVVMFQTAVGHSFKCVSEQSLQLSAHLQVKTTDVQLQAFDFEDDHFGNVDECSSDYTIVLPVIGAIVVGLCLMGMGVYKIRLRCQSSGYQRI

SEQ ID NO: 122 - protein, 773 aa, Homo sapiens
MAEAHQAVAFQFTVTPDGIDLRLSHEALRQIYLSGLHSWKKKFIRFKNGIITGVYPASPSSWLIVVVGVMTTMYAKIDPSLGIIAKINRTLETANCMSSQTKNVVSGVLFGTGLWVALIVTMRYSLKVLLSYHGWMFTEHGKMSRATKIWMGMVKIFSGRKPMLYSFQTSLPRLPVPAVKDTVNRYLQSVRPLMKEEDFKRMTALAQDFAVGLGPRLQWYLKLKSWWATNYVSDWWEEYIYLRGRGPLMVNSNYYAMDLLYILPTHIQAARAGNAIHAILLYRRKLDREEIKPIRLLGSTIPLCSAQWERMFNTSRIPGEETDTIQHMRDSKHIVVYHRGRYFKVWLYHDGRLLKPREMEQQMQRILDNTSEPQPGEARLAALTAGDRVPWARCRQAYFGRGKNKQSLDAVEKAAFFVTLDETEEGYRSEDPDTSMDSYAKSLLHGRCYDRWFDKSFTFVVFKNGKMGLNAEHSWADAPIVAHLWEYVMSIDSLQLGYAEDGHCKGDINPNIPYPTRLQWDIPGECQEVIETSLNTANLLANDVDFHSFPFVAFGKGIIKKCRTSPDAFVQLALQLAHYKDMGKFCLTYEASMTRLFREGRTETVRSCTTESCDFVRAMVDPAQTVEQRLKLFKLASEKHQHMYRLAMTGSGIDRHLFCLYVVSKYLAVESPFLKEVLSEPWRLSTSQTPQQQVELFDLENNPEYVSSGGGFGPVADDGYGVSYILVGENLINFHISSKFSCPETDSHRFGRHLKEAMTDIITLFGLSSNSKK

SEQ ID NO: 123 - protein, 2436 aa, Homo sapiens [sequence omitted]

SEQ ID NO: 124 - protein, 1280 aa, Homo sapiens
MDLEGDRNGGAKKKNFFKLNNKSEKDKKEKKPTVSVFSMFRYSNWLDKLYMVVGTLAAIIHGAGLPLMMLVFGEMTDIFANAGNLEDLMSNITNRSDINDTGFFMNLEEDMTRYAYYYSGIGAGVLVAAYIQVSFWCLAAGRQIHKIRKQFFHAIMRQEIGWFDVHDVGELNTRLTDDVSKINEGIGDKIGMFFQSMATFFTGFIVGFTRGWKLTLVILAISPVLGLSAAVWAKILSSFTDKELLAYAKAGAVAEEVLAAIRTVIAFGGQKKELERYNKNLEEAKRIGIKKAITANISIGAAFLLIYASYALAFWYGTTLVLSGEYSIGQVLTVFFSVLIGAFSVGQASPSIEAFANARGAAYEIFKIIDNKPSIDSYSKSGHKPDNIKGNLEFRNVHFSYPSRKEVKILKGLNLKVQSGQTVALVGNSGCGKSTTVQLMQRLYDPTEGMVSVDGQDIRTINVRFLREIIGVVSQEPVLFATTIAENIRYGRENVTMDEIEKAVKEANAYDFIMKLPHKFDTLVGERGAQLSGGQKQRIAIARALVRNPKILLLDEATSALDTESEAVVQVALDKARKGRTTIVIAHRLSTVRNADVIAGFDDGVIVEKGNHDELMKEKGIYFKLVTMQTAGNEVELENAADESKSEIDALEMSSNDSRSSLIRKRSTRRSVRGSQAQDRKLSTKEALDESIPPVSFWRIMKLNLTEWPYFVVGVFCAIINGGLQPAFAIIFSKIIGVFTRIDDPETKRQNSNLFSLLFLALGIISFITFFLQGFTFGKAGEILTKRLRYMVFRSMLRQDVSWFDDPKNTTGALTTRLANDAAQVKGAIGSRLAVITQNIANLGTGIIISFIYGWQLTLLLLAIVPIIAIAGVVEMKMLSGQALKDKKELEGSGKIATEAIENFRTVVSLTQEQKFEHMYAQSLQVPYRNSLRKAHIFGITFSFTQAMMYFSYAGCFRFGAYLVAHKLMSFEDVLLVFSAVVFGAMAVGQVSSFAPDYAKAKISAAHIIMIIEKTPLIDSYSTEGLMPNTLEGNVTFGEVVFNYPTRPDIPVLQGLSLEVKKGQTLALVGSSGCGKSTVVQLLERFYDPLAGKVLLDGKEIKRLNVQWLRAHLGIVSQEPILFDCSIAENIAYGDNSRVVSQEEIVRAAKEANIHAFIESLPNKYSTKVGDKGTQLSGGQKQRIAIARALVRQPHILLLDEATSALDTESEKVVQEALDKAREGRTCIVIAHRLSTIQNADLIVVFQNGRVKEHGTHQQLLAQKGIYFSMVSVQAGTKRQ

SEQ ID NO: 125 - protein, 574 aa, Homo sapiens
MWTFLGIATFTYFYKKFGDFITLANREVLLCVLVFLSLGLVLSYRCRHRNGGLLGRQQSGSQFALFSDILSGLPFIGFFWAKSPPESENKEQLEARRRRKGTNISETSLIGTAACTSTSSQNDPEVIIVGAGVLGSALAAVLSRDGRKVTVIERDLKEPDRIVGEFLQPGGYHVLKDLGLGDTVEGLDAQVVNGYMIHDQESKSEVQIPYPLSENNQVQSGRAFHHGRFIMSLRKAAMAEPNAKFIEGVVLQLLEEDDVVMGVQYKDKETGDIKELHAPLTVVADGLFSKFRKSLVSNKVSVSSHFVGFLMKNAPQFKANHAELILANPSPVLIYQISSSETRVLVDIRGEMPRNLREYMVEKIYPQIPDHLKEPFLEATDNSHLRSMPASFLPPSSVKKRGVLLLGDAYNMRHPLTGGGMTVAFKDIKLWRKLLKGIPDLYDDAAIFEAKKSFYWARKTSHSFVVNILAQALYELFSATDDSLHQLRKACFLYFKLGGECVAGPVGLLSVLSPNPLVLIGHFFAVAIYAVYFCFKSEPWITKPRALLSSGAVLYKACSVIFPLIYSEMKYMVH

SEQ ID NO: 126 - protein, 956 aa, Homo sapiens
MTLLLLPLLLASLLASCSCNKANKHKPWIEAEYQGIVMENDNTVLLNPPLFALDKDAPLRYAGEICGFRLHGSGVPFEAVILDKATGEGLIRAKEPVDCEAQKEHTFTIQAYDCGEGPDGANTKKSHKATVHVRVNDVNEFAPVFVERLYRAAVTEGKLYDRILRVEAIDGDCSPQYSQICYYEILTPNTPFLIDNDGNIENTEKLQYSGERLYKFTVTAYDCGKKRAADDAEVEIQVKPTCKPSWQGWNKRIEYAPGAGSLALFPGIRLETCDEPLWNIQATIELQTSHVAKGCDRDNYSERALRKLCGAATGEVDLLPMPGPNANWTAGLSVHYSQDSSLIYWFNGTQAVQVPLGGPSGLGSGPQDSLSDHFTLSFWMKHGVTPNKGKKEEETIVCNTVQNEDGFSHYSLTVHGCRIAFLYWPLLESARPVKFLWKLEQVCDDEWHHYALNLEFPTVTLYTDGISFDPALIHDNGLIHPPRREPALMIGACWTEEKNKEKEKGDNSTDTTQGDPLSIHHYFHGYLAGFSVRSGRLESREVIECLYACREGLDYRDFESLGKGMKVHVNPSQSLLTLEGDDVETFNHALQHVAYMNTLRFATPGVRPLRLTTAVKCFSEESCVSIPEVEGYVVVLQPDAPQILLSGTAHFARPAVDFEGTNGVPLFPDLQITCSISHQVEAKKDESWQGTVTDTRMSDEIVHNLDGCEISLVGDDLDPERESLLLDTTSLQQRGLELTNTSAYLTIAGVESITVYEEILRQARYRLRHGAALYTRKFRLSCSEMNGRYSSNEFIVEVNVLHSMNRVAHPSHVLSSQQFLHRGHQPPPEMAGHSLASSHRNSMIPSAATLIIVVCVGFLVLMVVLGLVRIHSLHRRVSGAGGPPGASSDPKDPDLFWDDSALTIIVNPMESYQNRQSCVTGAVGGQQEDEDSSDSEVADSPSSDERRIIETPPHRY

SEQ ID NO: 127 - protein, 195 aa, Homo sapiens
MTDSVIYSMLELPTATQAQNDYGPQQKSSSSRPSCSCLVAIALGLLTAVLLSVLLYQWILCQGSNYSTCASCPSCPDRWMKYGNHCYYFSVEEKDWNSSLEFCLARDSHLLVITDNQEMSLLQVFLSEAFCWIGLRNNSGWRWEDGSPLNFSRISSNSFVQTCGAINKNGLQASSCEVPLHWVCKKCPFADQALF

SEQ ID NO: 128 - protein, 266 aa, Homo sapiens
MRVTLATIAWMVSFVSNYSHTANILPDIENEDFIKDCVRIHNKFRSEVKPTASDMLYMTWDPALAQIAKAWASNCQFSHNTRLKPPHKLHPNFTSLGENIWTGSVPIFSVSSAITNWYDEIQDYDFKTRICKKVCGHYTQVVWADSYKVGCAVQFCPKVSGFDALSNGAHFICNYGPGGNYPTWPYKRGATCSACPNNDKCLDNLCVNRQRDQVKRYYSVVYPGWPIYPRNRYTSLFLIVNSVILILSVIITILVQHKYPNLVLLD

SEQ ID NO: 129 - protein, 1342 aa, Homo sapiens
MRANDALQVLGLLFSLARGSEVGNSQAVCPGTLNGLSVTGDAENQYQTLYKLYERCEVVMGNLEIVLTGHNADLSFLQWIREVTGYVLVAMNEFSTLPLPNLRVVRGTQVYDGKFAIFVMLNYNTNSSHALRQLRLTQLTEILSGGVYIEKNDKLCHMDTIDWRDIVRDRDAEIVVKDNGRSCPPCHEVCKGRCWGPGSEDCQTLTKTICAPQCNGHCFGPNPNQCCHDECAGGCSGPQDTDCFACRHFNDSGACVPRCPQPLVYNKLTFQLEPNPHTKYQYGGVCVASCPHNFVVDQTSCVRACPPDKMEVDKNGLKMCEPCGGLCPKACEGTGSGSRFQTVDSSNIDGFVNCTKILGNLDFLITGLNGDPWHKIPALDPEKLNVFRTVREITGYLNIQSWPPHMHNFSVFSNLTTIGGRSLYNRGFSLLIMKNLNVTSLGFRSLKEISAGRIYISANRQLCYHHSLNWTKVLRGPTEERLDIKHNRPRRDCVAEGKVCDPLCSSGGCWGPGPGQCLSCRNYSRGGVCVTHCNFLNGEPREFAHEAECFSCHPECQPMEGTATCNGSGSDTCAQCAHFRDGPHCVSSCPHGVLGAKGPIYKYPDVQNECRPCHENCTQGCKGPELQDCLGQTLVLIGKTHLTMALTVIAGLVVIFMMLGGTFLYWRGRRIQNKRAMRRYLERGESIEPLDPSEKANKVLARIFKETELRKLKVLGSGVFGTVHKGVWIPEGESIKIPVCIKVIEDKSGRQSFQAVTDHMLAIGSLDHAHIVRLLGLCPGSSLQLVTQYLPLGSLLDHVRQHRGALGPQLLLNWGVQIAKGMYYLEEHGMVHRNLAARNVLLKSPSQVQVADFGVADLLPPDDKQLLYSEAKTPIKWMALESIHFGKYTHQSDVWSYGVTVWELMTFGAEPYAGLRLAEVPDLLEKGERLAQPQICTIDVYMVMVKCWMIDENIRPTFKELANEFTRMARDPPRYLVIKRESGPGIAPGPEPHGLTNKKLEEVELEPELDLDLDLEAEEDNLATTTLGSALSLPVGTLNRPRGSQSLLSPSSGYMPMNQGNLGESCQESAVSGSSERCPRPVSLHPMPRGCLASESSEGHVTGSEAELQEKVSMCRSRSRSRSPRPRGDSAYHSQRHSLLTPVTPLSPPGLEEEDVNGYVMPDTHLKGTPSSREGTLSSVGLSSVLGTEEEDEDEEYEYMNRRRRHSPPHPPRPSSLEELGYEYMDVGSDLSASLGSTQSCPLHPVPIMPTAGTTPDEDYEYMNRQRDGGGPGGDYAAMGACPASEQGYEEMRAFQGPGHQAPHVHYARLKTLRSLEATDSAFDNPDYWHSRLFPKANAQRT

SEQ ID NO: 130 - protein, 1163 aa, Homo sapiens
MTRTRAALLLFTALATSLGFNLDTEELTAFRVDSAGFGDSVVQYANSWVVVGAPQKITAANQTGGLYQCGYSTGACEPIGLQVPPEAVNMSLGLSLASTTSPSQLLACGPTVHHECGRNMYLTGLCFLLGPTQLTQRLPVSRQECPRQEQDIVFLIDGSGSISSRNFATMMNFVRAVISQFQRPSTQFSLMQFSNKFQTHFTFEEFRRSSNPLSLLASVHQLQGFTYTATAIQNVVHRLFHASYGARRDAAKILIVITDGKKEGDSLDYKDVIPMADAAGIIRYAIGVGLAFQNRNSWKELNDIASKPSQEHIFKVEDFDALKDIQNQLKEKIFAIEGTETTSSSSFELEMAQEGFSAVFTPDGPVLGAVGSFTWSGGAFLYPPNMSPTFINMSQENVDMRDSYLGYSTELALWKGVQSLVLGAPRYQHTGKAVIFTQVSRQWRMKAEVTGTQIGSYFGASLCSVDVDSDGSTDLVLIGAPHYYEQTRGGQVSVCPLPRGWRRWWCDAVLYGEQGHPWGRFGAALTVLGDVNGDKLTDVVIGAPGEEENRGAVYLFHGVLGPSISPSHSQRIAGSQLSSRLQYFGQALSGGQDLTQDGLVDLAVGARGQVLLLRTRPVLWVGVSMQFIPAEIPRSAFECREQVVSEQTLVQSNICLYIDKRSKNLLGSRDLQSSVTLDLALDPGRLSPRATFQETKNRSLSRVRVLGLKAHCENFNLLLPSCVEDSVTPITLRLNFTLVGKPLLAFRNLRPMLAADAQRYFTASLPFEKNCGADHICQDNLGISFSFPGLKSLLVGSNLELNAEVMVWNDGEDSYGTTITFSHPAGLSYRYVAEGQKQGQLRSLHLTCDSAPVGSQGTWSTSCRINHLIFRGGAQITFLATFDVSPKAVLGDRLLLTANVSSENNTPRTSKTTFQLELPVKYAVYTVVSSHEQFTKYLNFSESEEKESHVAMHRYQVNNLGQRDLPVSINFWVPVELNQEAVWMDVEVSHPQNPSLRCSSEKIAPPASDFLAHIQKNPVLDCSIAGCLRFRCDVPSFSVQEELDFTLKGNLSFGWVRQILQKKVSVVSVAEITFDTSVYSQLPGQEAFMRAQTTTVLEKYKVHNPTPLIVGSSIGGLLLLALITAVLYKVGFFKRQYKEMMEEANGQIAPENGTQTPSPPSEK

SEQ ID NO: 131 - protein, 1429 aa, Homo sapiens
MAGGAWGRLACYLEFLKKEELKEFQLLLANKAHSRSSSGETPAQPEKTSGMEVASYLVAQYGEQRAWDLALHTWEQMGLRSLCAQAQEGAGHSPSFPYSPSEPHLGSPSQPTSTAVLMPWIHELPAGCTQGSERRVLRQLPDTSGRRWREISASLLYQALPSSPDHESPSQESPNAPTSTAVLGSWGSPPQPSLAPREQEAPGTQWPLDETSGIYYTEIREREREKSEKGRPPWAAVVGTPPQAHTSLQPHHHPWEPSVRESLCSTWPWKNEDFNQKFTQLLLLQRPHPRSQDPLVKRSWPDYVEENRGHLIEIRDLFGPGLDTQEPRIVILQGAAGIGKSTLARQVKEAWGRGQLYGDRFQHVFYFSCRELAQSKVVSLAELIGKDGTATPAPIRQILSRPERLLFILDGVDEPGWVLQEPSSELCLHWSQPQPADALLGSLLGKTILPEASFLITARTTALQNLIPSLEQARWVEVLGFSESSRKEYFYRYFTDERQAIRAFRLVKSNKELWALCLVPWVSWLACTCLMQQMKRKEKLTLTSKTTTTLCLHYLAQALQAQPLGPQLRDLCSLAAEGIWQKKTLFSPDDLRKHGLDGAIISTFLKMGILQEHPIPLSYSFIHLCFQEFFAAMSYVLEDEKGRGKHSNCIIDLEKTLEAYGIHGLFGASTTRFLLGLLSDEGEREMENIFHCRLSQGRNLMQWVPSLQLLLQPHSLESLHCLYETRNKTFLTQVMAHFEEMGMCVETDMELLVCTFCIKFSRHVKKLQLIEGRQHRSTWSPTMVVLFRWVPVTDAYWQILFSVLKVTRNLKELDLSGNSLSHSAVKSLCKTLRRPRCLLETLRLAGCGLTAEDCKDLAFGLRANQTLTELDLSFNVLTDAGAKHLCQRLRQPSCKLQRLQLVSCGLTSDCCQDLASVLSASPSLKELDLQQNNLDDVGVRLLCEGLRHPACKLIRLGLDQTTLSDEMRQELRALEQEKPQLLIFSRRKPSVMTPTEGLDTGEMSNSTSSLKRQRLGSERAASHVAQANLKLLDVSKIFPIAEIAEESSPEVVPVELLCVPSPASQGDLHTKPLGTDDDFWGPTGPVATEVVDKEKNLYRVHFPVAGSYRWPNTGLCFVMREAVTVEIEFCVWDQFLGEINPQHSWMVAGPLLDIKAEPGAVEAVHLPHFVALQGGHVDTSLFQMAHFKEEGMLLEKPARVELHHIVLENPSFSPLGVLLKMIHNALRFIPVTSVVLLYHRVHPEEVTFHLYLIPSDCSIRKELELCYRSPGEDQLFSEFYVGHLGSGIRLQVKDKKDETLVWEALVKPGDLMPATTLIPPARIAVPSPLDAPQLLHFVDQYREQLIARVTSVEVVLDKLHGQVLSQEQYERVLAENTRPSQMRKLFSLSQSWDRKCKDGLYQALKETHPHLIMELWEKGSKKGLLPLSS

SEQ ID NO: 132 - protein, 248 aa, Homo sapiens
MQTCPLAFPGHVSQALGTLLFLAASLSAQNEGWDSPICTEGVVSVSWGENTVMSCNISNAFSHVNIKLRAHGQESAIFNEVAPGYFSRDGWQLQVQGGVAQLVIKGARDSHAGLYMWHLVGHQRNNRQVTLEVSGAEPQSAPDTGFWPVPAVVTAVFILLVALVMFAWYRCRCSQQRREKKFFLLEPQMKVAALRAGAQQGLSRASAELWTPDSEPTPRPLALVFKPSPLGALELLSPQPLFPYAADP

SEQ ID NO: 133 - protein, 299 aa, Homo sapiens
MAPRARRRRPLFALLLLCALLARLQVALQIAPPCTSEKHYEHLGRCCNKCEPGKYMSSKCTTTSDSVCLPCGPDEYLDSWNEEDKCLLHKVCDTGKALVAVVAGNSTTPRRCACTAGYHWSQDCECCRRNTECAPGLGAQHPLQLNKDTVCKPCLAGYFSDAFSSTDKCRPWTNCTFLGKRVEHHGTEKSDAVCSSSLPARKPPNGNVTGNSNSTFISSGQVMNFKGDIIVVYVSQTSQEGAAAAAEPMGRPVQEETLARRDSFAGNGPRFPDPCGGPEGLREPEKASRPVQEQGGAKA

SEQ ID NO: 134 - protein, 1255 aa, Homo sapiens [sequence omitted]

SEQ ID NO: 135 - protein, 531 aa, Homo sapiens
MLPITDRLLHLLGLEKTAFRIYAVSTLLLFLLFFLFRLLLRFLRLCRSFYITCRRLRCFPQPPRRNWLLGHLGMYLPNEAGLQDEKKVLDNMHHVLLVWMGPVLPLLVLVHPDYIKPLLGASAAIAPKDDLFYGFLKPWLGDGLLLSKGDKWSRHRRLLTPAFHFDILKPYMKIFNQSADIMHAKWRHLAEGSAVSLDMFEHISLMTLDSLQKCVFSYNSNCQEKMSDYISAIIELSALSVRRQYRLHHYLDFIYYRSADGRRFRQACDMVHHFTTEVIQERRRALRQQGAEAWLKAKQGKTLDFIDVLLLARDEDGKELSDEDIRAEADTFMFEGHDTTSSGISWMLFNLAKYPEYQEKCREEIQEVMKGRELEELEWDDLTQLPFTTMCIKESLRQYPPVTLVSRQCTEDIKLPDGRIIPKGIICLVSIYGTHHNPTVWPDSKVYNPYRFDPDNPQQRSPLAYVPFSAGPRNCIGQSFAMAELRVVVALTLLRFRLSVDRTRKVRRKPELILRTENGLWLKVEPLPPRA

SEQ ID NO: 136 - protein, 80 aa, Homo sapiens
MATPTQTPTKAPEEPDPFYYDYNTVQTVGMTLATILFLLGILIVISKKVKCRKADSRSESPTCKSCKSELPSSAPGGGGV

SEQ ID NO: 137 - protein, 165 aa, Homo sapiens
MDAPRRDMELLSNSLAAYAHIRANPESFGLYFVLGVCFGLLLTLCLLVISISWAPRPRPRGPAQRRDPRSSTLEPEDDDEDEEDTVTRLGPDDTLPGPELSAEPDGPLNVNVFTSAEELERAQRLEERERILREIWRTGQPDLLGTGTLGPSPTATGTLGRMHYY

SEQ ID NO: 138 - protein, 1106 aa, Homo sapiens
MEIKDQGAQMEPLLPTRNDEEAVVDRGGTRSILKTHFEKEDLEGHRTLFIGVHVPLGGRKSHRRHRHRGHKHRKRDRERDSGLEDGRESPSFDTPSQRVQFILGTEDDDEEHIPHDLFTELDEICWREGEDAEWRETARWLKFEEDVEDGGERWSKPYVATLSLHSLFELRSCILNGTVLLDMHANTLEEIADMVLDQQVSSGQLNEDVRHRVHEALMKQHHHQNQKKLTNRIPIVRSFADIGKKQSEPNSMDKNAGQVVSPQSAPACVENKNDVSRENSTVDFSKVDLHFMKKIPPGAEASNILVGELEFLDRTVVAFVRLSPAVLLQGLAEVPIPTRFLFILLGPLGKGQQYHEIGRSIATLMTDEVFHDVAYKAKDRNDLVSGIDEFLDQVTVLPPGEWDPSIRIEPPKNVPSQEKRKIPAVPNGTAAHGEAEPHGGHSGPELQRTGRIFGGLILDIKRKAPYFWSDFRDAFSLQCLASFLFLYCACMSPVITFGGLLGEATEGRISAIESLFGASMTGIAYSLFGGQPLTILGSTGPVLVFEKILFKFCKEYGLSYLSLRASIGLWTATLCIILVATDASSLVCYITRFTEEAFASLICIIFIYEALEKLFELSEAYPINMHNDLELLTQYSCNCVEPHNPSNGTLKEWRESNISASDIIWENLTVSECKSLHGEYVGRACGHDHPYVPDVLFWSVILFFSTVTLSATLKQFKTSRYFPTKVRSIVSDFAVFLTILCMVLIDYAIGIPSPKLQVPSVFKPTRDDRGWFVTPLGPNPWWTVIAAIIPALLCTILIFMDQQITAVIINRKEHKLKKGCGYHLDLLMVAVMLGVCSIMGLPWFVAATVLSITHVNSLKLESECSAPGEQPKFLGIREQRVTGLMIFILMGSSVFMTSILKFIPMPVLYGVFLYMGASSLKGIQFFDRIKLFWMPAKHQPDFIYLRHVPLRKVHLFTIIQMSCLGLLWIIKVSRAAIVFPMMVLALVFVRKLMDLLFTKRELSWLDDLMPESKKKKLEDAEKEEEQSMLAMEDEGTVQLPLEGHYRDDPSVINISDEMSKTALWRNLLITADNSKDKESSFPSKSIESRKEKKADSGKGVDRETCL

SEQ ID NO: 139 - protein, 963 aa, Homo sapiens
MWCLHCNSERTQSLLELELDSGVEGEAPSSETGTSLDSPSAYPQGPLVPGSSLSPDHYEHTSVGAYGLYSGPPGQQQRTRRPKLQHSTSILRKQAEEEAIKRSRSLSESYELSSDLQDKQVEMLERKYGGRLVTRHAARTIQTAFRQYQMNKNFERLRSSMSENRMSRRIVLSNMRMQFSFEGPEKVHSSYFEGKQVSVTNDGSQLGALVSPECGDLSEPTTLKSPAPSSDFADAITELEDAFSRQVKSLAESIDDALNCRSLHTEEAPALDAARARDTEPQTALHGMDHRKLDEMTASYSDVTLYIDEEELSPPLPLSQAGDRPSSTESDLRLRAGGAAPDYWALAHKEDKADTDTSCRSTPSLERQEQRLRVEHLPLLTIEPPSDSSVDLSDRSERGSLKRQSAYERSLGGQQGSPKHGPHSGAPKSLPREEPELRPRPPRPLDSHLAINGSANRQSKSESDYSDGDNDSINSTSNSNDTINCSSESSSRDSLREQTLSKQTYHKEARNSWDSPAFSNDVIRKRHYRIGLNLFNKKPEKGVQYLIERGFVPDTPVGVAHFLLQRKGLSRQMIGEFLGNRQKQFNRDVLDCVVDEMDFSTMELDEALRKFQAHIRVQGEAQKVERLIEAFSQRYCICNPGVVRQFRNPDTIFILAFAIILLNTDMYSPNVKPERKMKLEDFIKNLRGVDDGEDIPREMLMGIYERIRKRELKTNEDHVSQVQKVEKLIVGKKPIGSLHPGLGCVLSLPHRRLVCYCRLFEVPDPNKPQKLGLHQREIFLFNDLLVVTKIFQKKKNSVTYSFRQSFSLYGMQVLLFENQYYPNGIRLTSSVPGADIKVLINFNAPNPQDRKKFTDDLRESIAEVQEMEKHRIESELEKQKGVVRPSMSQCSSLKKESGNGTLSRACLDDSYASGEGLKRSALSSSLRDLSEAGKRGRRSSAGSLESNVEFQPFEPLQPSVLCS

SEQ ID NO: 140 - protein, 866 aa, Homo sapiens
MSGARGEGPEAGAGGAGGRAAPENPGGVLSVELPGLLAQLARSFALLLPVYALGYLGLSFSWVLLALALLAWCRRSRGLKALRLCRALALLEDEERVVRLGVRACDLPAWVHFPDTERAEWLNKTVKHMWPFICQFIEKLFRETIEPAVRGANTHLSTFSFTKVDVGQQPLRINGVKVYTENVDKRQIILDLQISFVGNCEIDLEIKRYFCRAGVKSIQIHGTMRVILEPLIGDMPLVGALSIFFLRKPLLEINWTGLTNLLDVPGLNGLSDTIILDIISNYLVLPNRITVPLVSEVQIAQLRFPVPKGVLRIHFIEAQDLQGKDTYLKGLVKGKSDPYGIIRVGNQIFQSRVIKENLSPKWNEVYEALVYEHPGQELEIELFDEDPDKDDFLGSLMIDLIEVEKERLLDEWFTLDEVPKGKLHLRLEWLTLMPNASNLDKVLTDIKADKDQANDGLSSALLILYLDSARNLPSNPLEFNPDVLKKTAVQRALKSGKKISSNPNPVVQMSVGHKAQESKIRYKTNEPVWEENFTFFIHNPKRQDLEVEVRDEQHQCSLGNLKVPLSQLLTSEDMTVSQRFQLSNSGPNSTIKMKIALRVLHLEKRERPPDHQHSAQVKRPSVSKEGRKTSIKSHMSGSPGPGGSNTAPSTPVIGGSDKPGMEEKAQPPEAGPQGLHDLGRSSSSLLASPGHISVKEPTPSIASDISLPIATQELRQRLRQLENGTTLGQSPLGQIQLTIRHSSQRNKLIVVVHACRNLIAFSEDGSDPYVRMYLLPDKRRSGRRKTHVSKKTLNPVFDQSFDFSVSLPEVQRRTLDVAVKNSGGFLSKDKGLLGKVLVALASEELAKGWTQWYDLTEDGTRPQAMT

SEQ ID NO: 141 - protein, 185 aa, Homo sapiens
MAGPRPRWRDQLLFMSIIVLVIVVICLMFYALLWEAGNLTDLPNLRIGFYNFCLWNEDTSTLQCHQFPELEALGVPRVGLGLARLGVYGSLVLTLFAPQPLLLAQCNSDERAWRLAVGFLAVSSVLLAGGLGLFLSYVWKWVRLSLPGPGFLALGSAQALLILLLIAMAVFPLRAERAESKLESC

SEQ ID NO: 142 - protein, 976 aa, Homo sapiens
MERRWPLGLGLVLLLCAPLPPGARAKEVTLMDTSKAQGELGWLLDPPKDGWSEQQQILNGTPLYMYQDCPMQGRRDTDHWLRSNWIYRGEEASRVHVELQFTVRDCKSFPGGAGPLGCKETFNLLYMESDQDVGIQLRRPLFQKVTTVAADQSFTIRDLVSGSVKLNVERCSLGRLTRRGLYLAFHNPGACVALVSVRVFYQRCPETLNGLAQFPDTLPGPAGLVEVAGTCLPHARASPRPSGAPRMHCSPDGEWLVPVGRCHCEPGYEEGGSGEACVACPSGSYRMDMDTPHCLTCPQQSTAESEGATICTCESGHYRAPGEGPQVACTGPPSAPRNLSFSASGTQLSLRWEPPADTGGRQDVRYSVRCSQCQGTAQDGGPCQPCGVGVHFSPGARGLTTPAVHVNGLEPYANYTFNVEAQNGVSGLGSSGHASTSVSISMGHAESLSGLSLRLVKKEPRQLELTWAGSRPRSPGANLTYELHVLNQDEERYQMVLEPRVLLTELQPDTTYIVRVRMLTPLGPGPFSPDHEFRTSPPVSRGLTGGEIVAVIFGLLLGAALLLGILVFRSRRAQRQRQQRQRDRATDVDREDKLWLKPYVDLQAYEDPAQGALDFTRELDPAWLMVDTVIGEGEFGEVYRGTLRLPSQDCKTVAIKTLKDTSPGGQWWNFLREATIMGQFSHPHILHLEGVVTKRKPIMIITEFMENGALDAFLREREDQLVPGQLVAMLQGIASGMNYLSNHNYVHRDLAARNILVNQNLCCKVSDFGLTRLLDDFDGTYETQGGKIPIRWTAPEAIAHRIFTTASDVWSFGIVMWEVLSFGDKPYGEMSNQEVMKSIEDGYRLPPPVDCPAPLYELMKNCWAYDRARRPHFQKLQAHLEQLLANPHSLRTIANFDPRMTLRLPSLSGSDGIPYRTVSEWLESIRMKRYILHFHSAGLDTMECVLELTAEDLTQMGITLPGHQKRILCSIQGFKD

SEQ ID NO: 143 - protein, 333 aa, Homo sapiens
MPANYTCTRPDGDNTDFRYFIYAVTYTVILVPGLIGNILALWVFYGYMKETKRAVIFMINLAIADLLQVLSLPLRIFYYLNHDWPFGPGLCMFCFYLKYVNMYASIYFLVCISVRRFWFLMYPFRFHDCKQKYDLYISIAGWLIICLACVLFPLLRTSDDTSGNRTKCFVDLPTRNVNLAQSVVMMTIGELIGFVTPLLIVLYCTWKTVLSLQDKYPMAQDLGEKQKALKMILTCAGVFLICFAPYHFSFPLDFLVKSNEIKSCLARRVILIFHSVALCLASLNSCLDPVIYYFSTNEFRRRLSRQDLHDSIQLHAKSFVSNHTASTMTPELC

SEQ ID NO: 144 - protein, 494 aa, Homo sapiens
MLTSKGQGFLHGGLCLWLCVFTPFFKGCVGCATEERLFHKLFSHYNQFIRPVENVSDPVTVHFEVAITQLANVDEVNQIMETNLWLRHIWNDYKLRWDPMEYDGIETLRVPADKIWKPDIVLYNNAVGDFQVEGKTKALLKYNGMITWTPPAIFKSSCPMDITFFPFDHQNCSLKFGSWTYDKAEIDLLIIGSKVDMNDFWENSEWEIIDASGYKHDIKYNCCEEIYTDITYSFYIRRLPMFYTINLIIPCLFISFLTVLVFYLPSDCGEKVTLCISVLLSLTVFLLVITETIPSTSLVVPLVGEYLLFTMIFVTLSIVVTVFVLNIHYRTPTTHTMPRWVKTVFLKLLPQVLLMRWPLDKTRGTGSDAVPRGLARRPAKGKLASHGEPRHLKECFHCHKSNELATSKRRLSHQPLQWVVENSEHSPEVEDVINSVQFIAENMKSHNETKEVEDDWKYVAMVVDRVFLWVFIIVCVFGTAGLFLQPLLGNTGKS

SEQ ID NO: 145 - protein, 3056 aa, Homo sapiens
MSLVLNDLLICCRQLEHDRATERKKEVEKFKRLIRDPETIKHLDRHSDSKQGKYLNWDAVFRFLQKYIQKETECLRIAKPNVSASTQASRQKKMQEISSLVKYFIKCANRRAPRLKCQELLNYIMDTVKDSSNGAIYGADCSNILLKDILSVRKYWCEISQQQWLELFSVYFRLYLKPSQDVHRVLVARIIHAVTKGCCSQTDGLNSKFLDFFSKAIQCARQEKSSSGLNHILAALTIFLKTLAVNFRIRVCELGDEILPTLLYIWTQHRLNDSLKEVIIELFQLQIYIHHPKGAKTQEKGAYESTKWRSILYNLYDLLVNEISHIGSRGKYSSGFRNIAVKENLIELMADICHQVFNEDTRSLEISQSYTTTQRESSDYSVPCKRKKIELGWEVIKDHLQKSQNDFDLVPWLQIATQLISKYPASLPNCELSPLLMILSQLLPQQRHGERTPYVLRCLTEVALCQDKRSNLESSQKSDLLKLWNKIWCITFRGISSEQIQAENFGLLGAIIQGSLVEVDREFWKLFTGSACRPSCPAVCCLTLALTTSIVPGTVKMGIEQNMCEVNRSFSLKESIMKWLLFYQLEGDLENSTEVPPILHSNFPHLVLEKILVSLTMKNCKAAMNFFQSVPECEHHQKDKEELSFSEVEELFLQTTFDKMDFLTIVRECGIEKHQSSIGFSVHQNLKESLDRCLLGLSEQLLNNYSSEITNSETLVRCSRLLVGVLGCYCYMGVIAEEEAYKSELFQKAKSLMQCAGESITLFKNKTNEEFRIGSLRNMMQLCTRCLSNCTKKSPNKIASGFFLRLLTSKLMNDIADICKSLASFIKKPFDRGEVESMEDDTNGNLMEVEDQSSMNLFNDYPDSSVSDANEPGESQSTIGAINPLAEEYLSKQDLLFLDMLKFLCLCVTTAQTNTVSFRAADIRRKLLMLIDSSTLEPTKSLHLHMYLMLLKELPGEEYPLPMEDVLELLKPLSNVCSLYRRDQDVCKTILNHVLHVVKNLGQSNMDSENTRDAQGQFLTVIGAFWHLTKERKYIFSVRMALVNCLKTLLEADPYSKWAILNVMGKDFPVNEVFTQFLADNHHQVRMLAAESINRLFQDTKGDSSRLLKALPLKLQQTAFENAYLKAQEGMREMSHSAENPETLDEIYNRKSVLLTLIAVVLSCSPICEKQALFALCKSVKENGLEPHLVKKVLEKVSETFGYRRLEDFMASHLDYLVLEWLNLQDTEYNLSSFPFILLNYTNIEDFYRSCYKVLIPHLVIRSHFDEVKSIANQIQEDWKSLLTDCFPKILVNILPYFAYEGTRDSGMAQQRETATKVYDMLKSENLLGKQIDHLFISNLPEIVVELLMTLHEPANSSASQSTDLCDFSGDLDPAPNPPHFPSHVIKATFAYISNCHKTKLKSILEILSKSPDSYQKILLAICEQAAETNNVYKKHRILKIYHLFVSLLLKDIKSGLGGAWAFVLRDVIYTLIHYINQRPSCIMDVSLRSFSLCCDLLSQVCQTAVTYCKDALENHLHVIVGTLIPLVYEQVEVQKQVLDLLKYLVIDNKDNENLYITIKLLDPFPDHVVFKDLRITQQKIKYSRGPFSLLEEINHFLSVSVYDALPLTRLEGLKDLRRQLELHKDQMVDIMRASQDNPQDGIMVKLVVNLLQLSKMAINHTGEKEVLEAVGSCLGEVGPIDFSTIAIQHSKDASYTKALKLFEDKELQWTFIMLTYLNNTLVEDCVKVRSAAVTCLKNILATKTGHSFWEIYKMTTDPMLAYLQPFRTSRKKFLEVPRFDKENPFEGLDDINLWIPLSENHDIWIKTLTCAFLDSGGTKCEILQLLKPMCEVKTDFCQTVLPYLIHDILLQDTNESWRNLLSTHVQGFFTSCLRHFSQTSRSTTPANLDSESEHFFRCCLDKKSQRTMLAVVDYMRRQKRPSSGTIFNDAFWLDLNYLEVAKVAQSCAAHFTALLYAEIYADKKSMDDQEKRSLAFEEGSQSTTISSLSEKSKEETGISLQDLLLEIYRSIGEPDSLYGCGGGKMLQPITRLRTYEHEAMWGKALVTYDLETAIPSSTRQAGIIQALQNLGLCHILSVYLKGLDYENKDWCPELEELHYQAAWRNMQWDHCTSVSKEVEGTSYHESLYNALQSLRDREFSTFYESLKYARVKEVEEMCKRSLESVYSLYPTLSRLQAIGELESIGELFSRSVTHRQLSEVYIKWQKHSQLLKDSDFSFQEPIMALRTVILEILMEKEMDNSQRECIKDILTKHLVELSILARTFKNTQLPERAIFQIKQYNSVSCGVSEWQLEEAQVFWAKKEQSLALSILKQMIKKLDASCAANNPSLKLTYTECLRVCGNWLAETCLENPAVIMQTYLEKAVEVAGNYDGESSDELRNGKMKAFLSLARFSDTQYQRIENYMKSSEFENKQALLKRAKEEVGLLREHKIQTNRYTVKVQRELELDELALRALKEDRKRFLCKAVENYINCLLSGEEHDMWVFRLCSLWLENSGVSEVNGMMKRDGMKIPTYKFLPLMYQLAARMGTKMMGGLGFHEVLNNLISRISMDHPHHTLFIILALANANRDEFLTKPEVARRSRITKNVPKQSSQLDEDRTEAANRIICTIRSRRPQMVRSVEALCDAYIILANLDATQWKTQRKGINIPADQPITKLKNLEDVVVPTMEIKVDHTGEYGNLVTIQSFKAEFRLAGGVNLPKIIDCVGSDGKERRQLVKGRDDLRQDAVMQQVFQMCNTLLQRNTETRKRKLTICTYKVVPLSQRSGVLEWCTGTVPIGEFLVNNEDGAHKRYRPNDFSAFQCQKKMMEVQKKSFEEKYEVFMDVCQNFQPVFRYFCMEKFLDPAIWFEKRLAYTRSVATSSIVGYILGLGDRHVQNILINEQSAELVHIDLGVAFEQGKILPTPETVPFRLTRDIVDGMGITGVEGVFRRCCEKTMEVMRNSQETLLTIVEVLLYDPLFDWTMNPLKALYLQQRPEDETELHPTLNADDQECKRNLSDIDQSFNKVAERVLMRLQEKLKGVEEGTVLSVGGQVNLLIQQAIDPKNLSRLFPGWKAWV

SEQ ID NO: 146 - protein, 445 aa, Homo sapiens
MGGVGEPGPREGPAQPGAPLPTFCWEQIRAHDQPGDKWLVIERRVYDISRWAQRHPGGSRLIGHHGAEDATDAFRAFHQDLNFVRKFLQPLLIGELAPEEPSQDGPLNAQLVEDFRALHQAAEDMKLFDASPTFFAFLLGHILAMEVLAWLLIYLLGPGWVPSALAAFILAISQAQSWCLQHDLGHASIFKKSWWNHVAQKFVMGQLKGFSAHWWNFRHFQHHAKPNIFHKDPDVTVAPVFLLGESSVEYGKKKRRYLPYNQQHLYFFLIGPPLLTLVNFEVENLAYMLVCMQWADLLWAASFYARFFLSYLPFYGVPGVLLFFVAVRVLESHWFVWITQMNHIPKEIGHEKHRDWVSSQLAATCNVEPSLFTNWFSGHLNFQIEHHLFPRMPRHNYSRVAPLVKSLCAKHGLSYEVKPFLTALVDIVRSLKKSGDIWLDAYLHQ

SEQ ID NO: 147 - protein, 444 aa, Homo sapiens
MGKGGNQGEGAAEREVSVPTFSWEEIQKHNLRTDRWLVIDRKVYNITKWSIQHPGGQRVIGHYAGEDATDAFRAFHPDLEFVGKFLKPLLIGELAPEEPSQDHGKNSKITEDFRALRKTAEDMNLFKTNHVFFLLLLAHIIALESIAWFTVFYFGNGWIPTLITAFVLATSQAQAGWLQHDYGHLSVYRKPKWNHLVHKFVIGHLKGASANWWNHRHFQHHAKPNIFHKDPDVNMLHVFVLGEWQPIEYGKKKLKYLPYNHQHEYFFLIGPPLLIPMYFQYQIIMTMIVHKNWVDLAWAVSYYIRFFITYIPFYGILGALLFLNFIRFLESHWFVWVTQMNHIVMEIDQEAYRDWFSSQLTATCNVEQSFFNDWFSGHLNFQIEHHLFPTMPRHNLHKIAPLVKSLCAKHGIEYQEKPLLRALLDIIRSLKKSGKLWLDAYLHK

SEQ ID NO: 148 - protein, 244 aa, Homo sapiens
MDTESNRRANLALPQEPSSVPAFEVLEISPQEVSSGRLLKSASSPPLHTWLTVLKKEQEFLGVTQILTAMICLCFGTVVCSVLDISHIEGDIFSSFKAGYPFWGAIFFSISGMLSIISERRNATYLVRGSLGANTASSIAGGTGITILIINLKKSLAYIHIHSCQKFFETKCFMASFSTEIVVMMLFLTILGLGSAVSLTICGAGEELKGNKVPEDRVYEELNIYSATYSELEDPGEMSPPIDL

SEQ ID NO: 149 - protein, 215 aa, Homo sapiens
MYGKSSTRAVLLLLGIQLTALWPIAAVEIYTSRVLEAVNGTDARLKCTFSSFAPVGDALTVTWNFRPLDGGPEQFVFYYHIDPFQPMSGRFKDRVSWDGNPERYDASILLWKLQFDDNGTYTCQVKNPPDVDGVIGEIRLSVVHTVRFSEIHFLALAIGSACALMIIIVIVVVLFQHYRKKRWAERAHKVVEIKSKEEERLNQEKKVSVYLEDTD

SEQ ID NO: 150 - protein, 478 aa, Homo sapiens
MAAAAAGGAPGPAPGPAGPPPPAAPTSAARAPPQALRRRGDSRRRQAALFFLNNISLDGRPPSLGPGGEKPPPPPAEAREPPAPPPPEPPTGLPARTPAPQGLLSPTQVPTGLGLDGQRQRKRVTSQRCSLEFLEDAVGCAPAQRTKHTSGSPRHKGLKKTHFIKNMRQYDTRNSRIVLICAKRSLCAAFSVLPYGEGLRISDLRVDSQKQRHPSGGVSVSSEMVFELEGVELGADGKVVSYAKFLYPTNALVTHKSDSHGLLPTPRPSVPRTLPGSRHKPAPTKSAPASTELGSDVGDTLEYNPNLLDDPQWPCGKHKRVLIFASYMTTVIEYVKPSDLKKDMNETFREKFPHVKLTLSKIRSLKREMRSLSEECSLEPVTVAMAYVYFEKLVLQGKLSKQNRKLCAGACVLLAAKISSDLRKSGVTQLIDKLEERFRFNRRDLIGFEFTVLVALELALYLPENQVLPHYRRLTQQF

SEQ ID NO: 151 - protein, 418 aa, Homo sapiens
MAPTQGPRAPLEFGGPLGAAALLLLLPATMFHLLLAARSGPARLLGPPASLPGLEVLWSPRALLLWLAWLGLQAALYLLPARKVAEGQELKDKSRLRYPINGFQALVLTALLVGLGMSAGLPLGALPEMLLPLAFVATLTAFIFSLFLYMKAQVAPVSALAPGGNSGNPIYDFFLGRELNPRICFFDFKYFCELRPGLIGWVLINLALLMKEAELRGSPSLAMWLVNGFQLLYVGDALWHEEAVLTTMDITHDGFGFMLAFGDMAWVPFTYSLQAQFLLHHPQPLGLPMASVICLINATGYYIFRGANSQKNTFRKNPSDPRVAGLETISTATGRKLLVSGWWGMVRHPNYLGDLIMALAWSLPCGVSHLLPYFYLLYFTALLVHREARDERQCLQKYGLAWQEYCRRVPYRIMPYIY

SEQ ID NO: 152 - protein, 383 aa, Homo sapiens
MAGIPGLLFLLFFLLCAVGQVSPYSAPWKPTWPAYRLPVVLPQSTLNLAKPDFGAEAKLEVSSSCGPQCHKGTPLPTYEEAKQYLSYETLYANGSRTETQVGIYILSSSGDGAQHRDSGSSGKSRRKRQIYGYDSRFSIFGKDFLLNYPFSTSVKLSTGCTGTLVAEKHVLTAAHCIHDGKTYVKGTQKLRVGFLKPKFKDGGRGANDSTSAMPEQMKFQWIRVKRTHVPKGWIKGNANDIGMDYDYALLELKKPHKRKFMKIGVSPPAKQLPGGRIHFSGYDNDRPGNLVYRFCDVKDETYDLLYQQCDAQPGASGSGVYVRMWKRQQQKWERKIIGIFSGHQWVDMNGSPQDFNVAVRITPLKYAQICYWIKGNYLDCREG

SEQ ID NO: 153 - protein, 1036 aa, Homo sapiens
MYLVAGDRGLAGCGHLLVSLLGLLLLLARSGTRALVCLPCDESKCEEPRNCPGSIVQGVCGCCYTCASQRNESCGGTFGIYGTCDRGLRCVIRPPLNGDSLTEYEAGVCEDENWTDDQLLGFKPCNENLIAGCNIINGKCECNTIRTCSNPFEFPSQDMCLSALKRIEEEKPDCSKARCEVQFSPRCPEDSVLIEGYAPPGECCPLPSRCVCNPAGCLRKVCQPGNLNILVSKASGKPGECCDLYECKPVFGVDCRTVECPPVQQTACPPDSYETQVRLTADGCCTLPTRCECLSGLCGFPVCEVGSTPRIVSRGDGTPGKCCDVFECVNDTKPACVFNNVEYYDGDMFRMDNCRFCRCQGGVAICFTAQCGEINCERYYVPEGECCPVCEDPVYPFNNPAGCYANGLILAHGDRWREDDCTFCQCVNGERHCVATVCGQTCTNPVKVPGECCPVCEEPTIITVDPPACGELSNCTLTGKDCINGFKRDHNGCRTCQCINTEELCSERKQGCTLNCPFGFLTDAQNCEICECRPRPKKCRPIICDKYCPLGLLKNKHGCDICRCKKCPELSCSKICPLGFQQDSHGCLICKCREASASAGPPILSGTCLTVDGHHHKNEESWHDGCRECYCLNGREMCALITCPVPACGNPTIHPGQCCPSCADDFVVQKPELSTPSICHAPGGEYFVEGETWNIDSCTQCTCHSGRVLCETEVCPPLLCQNPSRTQDSCCPQCTDQPFRPSLSRNNSVPNYCKNDEGDIFLAAESWKPDVCTSCICIDSVISCFSESCPSVSCERPVLRKGQCCPYCIEDTIPKKVVCHFSGKAYADEERWDLDSCTHCYCLQGQTLCSTVSCPPLPCVEPINVEGSCCPMCPEMYVPEPTNIPIEKTNHRGEVDLEVPLWPTPSENDIVHLPRDMGHLQVDYRDNRLHPSEDSSLDSIASVVVPIIICLSIIIAFLFINQKKQWIPLLCWYRTPTKPSSLNNQLVSVDCKKGTRVQVDSSQRMLRIAEPDARFSGFYSMQKQNHLQADNFYQTV

SEQ ID NO: 154 - protein, 501 aa, Homo sapiens
MVRKPVVSTISKGGYLQGNVNGRLPSLGNKEPPGQEKVQLKRKVTLLRGVSIIIGTIIGAGIFISPKGVLQNTGSVGMSLTIWTVCGVLSLFGALSYAELGTTIKKSGGHYTYILEVFGPLPAFVRVWVELLIIRPAATAVISLAFGRYILEPFFIQCEIPELAIKLITAVGITVVMVLNSMSVSWSARIQIFLTFCKLTAILIIIVPGVMQLIKGQTQNFKDAFSGRDSSITRLPLAFYYGMYAYAGWFYLNFVTEEVENPEKTIPLAICISMAIVTIGYVLTNVAYFTTINAEELLLSNAVAVTFSERLLGNFSLAVPIFVALSCFGSMNGGVFAVSRLFYVASREGHLPEILSMIHVRKHTPLPAVIVLHPLTMIMLFSGDLDSLLNFLSFARWLFIGLAVAGLIYLRYKCPDMHRPFKVPLFIPALFSFTCLFMVALSLYSDPFSTGIGFVITLTGVPAYYLFIIWDKKPRWFRIMSEKITRTLQIILEVVPEEDKL

SEQ ID NO: 155 - protein, 275 aa, Homo sapiens
MANFKGHALPGSFFLIIGLCWSVKYPLKYFSHTRKNSPLHYYQRLEIVEAAIRTLFSVTGILAEQFVPDGPHLHLYHENHWIKLMNWQHSTMYLFFAVSGIVDMLTYLVSHVPLGVDRLVMAVAVFMEGFLFYYHVHNRPPLDQHIHSLLLYALFGGCVSISLEVIFRDHIVLELFRTSLIILQGTWFWQIGFVLFPPFGTPEWDQKDDANLMFITMCFCWHYLAALSIVAVNYSLVYCLLTRMKRHGRGEIIGIQKLNSDDTYQTALLSGSDEE

SEQ ID NO: 156 - protein, 825 aa, Homo sapiens
MFSGFNVFRVGISFVIMCIFYMPTVNSLPELSPQKYFSTLQPGKASLAYFCQADSPRTSVFLEELNEAVRPLQDYGISVAKVNCVKEEISRYCGKEKDLMKAYLFKGNILLREFPTDTLFDVNAIVAHVLFALLFSEVKYITNLEDLQNIENALKGKANIIFSYVRAIGIPEHRAVMEAAFVYGTTYQFVLTTEIALLESIGSEDVEYAHLYFFHCKLVLDLTQQCRRTLMEQPLTTLNIHLFIKTMKAPLLTEVAEDPQQVSTVHLQLGLPLVFIVSQQATYEADRRTAEWVAWRLLGKAGVLLLLRDSLEVNIPQDANVVFKRAEEGVPVEFLVLHDVDLIISHVENNMHIEEIQEDEDNDMEGPDIDVQDDEVAETVFRDRKRKLPLELTVELTEETFNATVMASDSIVLFYAGWQAVSMAFLQSYIDVAVKLKGTSTMLLTRINCADWSDVCTKQNVTEFPIIKMYKKGENPVSYAGMLGTEDLLKFIQLNRISYPVNITSIQEAEEYLSGELYKDLILYSSVSVLGLFSPTMKTAKEDFSEAGNYLKGYVITGIYSEEDVLLLSTKYAASLPALLLARHTEGKIESIPLASTHAQDIVQIITDALLEMFPEITVENLPSYFRLQKPLLILFSDGTVNPQYKKAILTLVKQKYLDSFTPCWLNLKNTPVGRGILRAYFDPLPPLPLLVLVNLHSGGQVFAFPSDQAIIEENLVLWLKKLEAGLENHITILPAQEWKPPLPAYDFLSMIDAATSQRGTRKVPKCMKETDVQENDKEQHEDKSAVRKEPIETLRIKHWNRSNWFKEAEKSFRRDKELGCSKVN

SEQ ID NO: 157 - protein, 986 aa, Homo sapiens
MAGIFYFALFSCLFGICDAVTGSRVYPANEVTLLDSRSVQGELGWIASPLEGGWEEVSIMDEKNTPIRTYQVCNVMEPSQNNWLRTDWITREGAQRVYIEIKFTLRDCNSLPGVMGTCKETFNLYYYESDNDKERFIRENQFVKIDTIAADESFTQVDIGDRIMKLNTEIRDVGPLSKKGFYLAFQDVGACIALVSVRVFYKKCPLTVRNLAQFPDTITGADTSSLVEVRGSCVNNSEEKDVPKMYCGADGEWLVPIGNCLCNAGHEERSGECQACKIGYYKALSTDATCAKCPPHSYSVWEGATSCTCDRGFFRADNDAASMPCTRPPSAPLNLISNVNETSVNLEWSSPQNTGGRQDISYNVVCKKCGAGDPSKCRPCGSGVHYTPQQNGLKTTKVSITDLLAHTNYTFEIWAVNGVSKYNPNPDQSVSVTVTTNQAAPSSIALVQAKEVTRYSVALAWLEPDRPNGVILEYEVKYYEKDQNERSYRIVRTAARNTDIKGLNPLTSYVFHVRARTAAGYGDFSEPLEVTTNTVPSRIIGDGANSTVLLVSVSGSVVLVVILIAAFVISRRRSKYSKAKQEADEEKHLNQGVRTYVDPFTYEDPNQAVREFAKEIDASCIKIEKVIGVGEFGEVCSGRLKVPGKREICVAIKTLKAGYTDKQRRDFLSEASIMGQFDHPNIIHLEGVVTKCKPVMIITEYMENGSLDAFLRKNDGRFTVIQLVGMLRGIGSGMKYLSDMSYVHRDLAARNILVNSNLVCKVSDFGMSRVLEDDPEAAYTTRGGKIPIRWTAPEAIAYRKFTSASDVWSYGIVMWEVMSYGERPYWDMSNQDVIKAIEEGYRLPPPMDCPIALHQLMLDCWQKERSDRPKFGQIVNMLDKLIRNPNSLKRTGTESSRPNTALLDPSSPEFSAVVSVGDWLQAIKMDRYKDNFTAAGYTTLEAVVHVNQEDLARIGITAITHQNKILSSVQAMRTQMQQMHGRMVPV

SEQ ID NO: 158 - protein, 183 aa, Homo sapiens
MERVQPLEENVGNAARPRFERNKLLLVASVIQGLGLLLCFTYICLHFSALQVSHRYPRIQSIKVQFTEYKKEKGFILTSQKEDEIMKVQNNSVIINCDGFYLISLKGYFSQEVNISLHYQKDEEPLFQLKKVRSVNSLMVASLTYKDKVYLNVTTDNTSLDDFHVNGGELILIHQNPGEFCVL

SEQ ID NO: 159 - protein, 1112 aa, Homo sapiens
MRRDERDAKAMRSLQPPDGAGSPPESLRNGYVKSCVSPLRQDPPRGFFFHLCRFCNVELRPPPASPQQPRRCSPFCRARLSLGALAAFVLALLLGAEPESWAAGAAWLRTLLSVCSHSLSPLFSIACAFFFLTCFLTRTKRGPGPGRSCGSWWLLALPACCYLGDFLVWQWWSWPWGDGDAGSAAPHTPPEAAAGRLLLVLSCVGLLLTLAHPLRLRHCVLVLLLASFVWWVSFTSLGSLPSALRPLLSGLVGGAGCLLALGLDHFFQIREAPLHPRLSSAAEEKVPVIRPRRRSSCVSLGETAASYYGSCKIFRRPSLPCISREQMILWDWDLKQWYKPHYQNSGGGNGVDLSVLNEARNMVSDLLTDPSLPPQVISSLRSISSLMGAFSGSCRPKINPLTPFPGFYPCSEIEDPAEKGDRKLNKGLNRNSLPTPQLRRSSGTSGLLPVEQSSRWDRNNGKRPHQEFGISSQGCYLNGPFNSNLLTIPKQRSSSVSLTHHVGLRRAGVLSSLSPVNSSNHGPVSTGSLTNRSPIEFPDTADFLNKPSVILQRSLGNAPNTPDFYQQLRNSDSNLCNSCGHQMLKYVSTSESDGTDCCSGKSGEEENIFSKESFKLMETQQEEETEKKDSRKLFQEGDKWLTEEAQSEQQTNIEQEVSLDLILVEEYDSLIEKMSNWNFPIFELVEKMGEKSGRILSQVMYTLFQDTGLLEIFKIPTQQFMNYFRALENGYRDIPYHNRIHATDVLHAVWYLTTRPVPGLQQIHNGCGTGNETDSDGRINHGRIAYISSKSCSNPDESYGCLSSNIPALELMALYVAAAMHDYDHPGRTNAFLVATNAPQAVLYNDRSVLENHHAASAWNLYLSRPEYNFLLHLDHVEFKRFRFLVIEAILATDLKKHFDFLAEFNAKANDVNSNGIEWSNENDRLLVCQVCIKLADINGPAKVRDLHLKWTEGIVNEFYEQGDEEANLGLPISPFMDRSSPQLAKLQESFITHIVGPLCNSYDAAGLLPGQWLEAEEDNDTESGDDEDGEELDTEDEEMENNLNPKPPRRKSRRRIFCQLMHHLTENHKIWKEIVEEEEKCKADGNKLQVENSSLPQADEIQVIEEADEEE

SEQ ID NO: 160 - protein, 1338 aa, Homo sapiens
MVSYWDTGVLLCALLSCLLLTGSSSGSKLKDPELSLKGTQHIMQAGQTLHLQCRGEAAHKWSLPEMVSKESERLSITKSACGRNGKQFCSTLTLNTAQANHTGFYSCKYLAVPTSKKKETESAIYIFISDTGRPFVEMYSEIPEIIHMTEGRELVIPCRVTSPNITVTLKKFPLDTLIPDGKRIIWDSRKGFIISNATYKEIGLLTCEATVNGHLYKTNYLTHRQTNTIIDVQISTPRPVKLLRGHTLVLNCTATTPLNTRVQMTWSYPDEKNKRASVRRRIDQSNSHANIFYSVLTIDKMQNKDKGLYTCRVRSGPSFKSVNTSVHIYDKAFITVKHRKQQVLETVAGKRSYRLSMKVKAFPSPEVVWLKDGLPATEKSARYLTRGYSLIIKDVTEEDAGNYTILLSIKQSNVFKNLTATLIVNVKPQIYEKAVSSFPDPALYPLGSRQILTCTAYGIPQPTIKWFWHPCNHNHSEARCDFCSNNEESFILDADSNMGNRIESITQRMAIIEGKNKMASTLVVADSRISGIYICIASNKVGTVGRNISFYITDVPNGFHVNLEKMPTEGEDLKLSCTVNKFLYRDVTWILLRTVNNRTMHYSISKQKMAITKEHSITLNLTIMNVSLQDSGTYACRARNVYTGEEILQKKEITIRDQEAPYLLRNLSDHTVAISSSTTLDCHANGVPEPQITWFKNNHKIQQEPGIILGPGSSTLFIERVTEEDEGVYHCKATNQKGSVESSAYLTVQGTSDKSNLELITLTCTCVAATLFWLLLTLFIRKMKRSSSEIKTDYLSIIMDPDEVPLDEQCERLPYDASKWEFARERLKLGKSLGRGAFGKVVQASAFGIKKSPTCRTVAVKMLKEGATASEYKALMTELKILTHIGHHLNVVNLLGACTKQGGPLMVIVEYCKYGNLSNYLKSKRDLFFLNKDAALHMEPKKEKMEPGLEQGKKPRLDSVTSSESFASSGFQEDKSLSDVEEEEDSDGFYKEPITMEDLISYSFQVARGMEFLSSRKCIHRDLAARNILLSENNVVKICDFGLARDIYKNPDYVRKGDTRLPLKWMAPESIFDKIYSTKSDVWSYGVLLWEIFSLGGSPYPGVQMDEDFCSRLREGMRMRAPEYSTPEIYQIMLDCWHRDPKERPRFAELVEKLGDLLQANVQQDGKDYIPINAILTGNSGFTYSTPAFSEDFFKESISAPKFNSGSSDDVRYVNAFKFMSLERIKTFEELLPNATSMFDDYQGDSSTLLASPMLKRFTWTDSKPKASLKIDLRVTSKSKESGLSDVSRPSFCHSSCGHVSEGKRRFTYDHAELERKIACCSPPPDYNSVVLYSTPPI

SEQ ID NO: 161 - protein, 1493 aa, Homo sapiens
MAELSEPEGPVDWKERCVALESQLMKFRVQASKIRELLAEKMQQLERQVIDAERQAEKAFQQVQVMEDKLKAANIQTSESETRLYNKCQDLESLIQEKDDVIQNLELQLEEQKQIRIQEAKIIEEKAAKIKEWVTVKLNELELENQNLRLINQNQTEEIRTMQSKLQEVQGKKSSTVSTLKLSEGQRLSSLTFGCFLSRARSPPQVVKSEEMSKISSKEPEFTEGKDMEEMEIPEKSVDNQVLENNRGQRTLHQTPCGSEQNRKTRTSFATDGGISQNSGAPVSDWSSDEEDGSKGRSKSRCTSTLSSHTSEEGVQCSRMGSEMYLTASDDSSSIFEEETFGIKRPEHKKLYSWQQEAQWKALNSPLGKGNSELSKKEQDSSSDELNKKFQSQRLDYSSSSSEANTPSPILTPALMPKHPNSLSGKGTQLVPSSHLPPPKLRIPNVFSISVALAKRHLSQPQLSSDRMFGTNRNAISMIRPLRPQETDLDLVDGDSTEVLENMDTSCDDGLFSYDSLDSPNSDDQEHCDSAKKVAYSKPPTPPLHRFPSWESRIYAVAKSGIRMSEAFNMESVNKNSAATLSYTTSGLYTSLIYKNMTTPVYTTLKGKATQISSSPFLDDSSGSEEEDSSRSSSRTSESDSRSRSGPGSPRAMKRGVSLSSVASESDYAIPPDAYSTDTEYSQPEQKLPKTCSSSSDNGKNEPLEKSGYLLKMSGKVKSWKRRWFVLKGGELLYYKSPSDVIRKPQGHIELSASCSILRGDNKQTVQLTTEKHTYYLTADSPNILEEWIKVLQNVLRVQAANPLSLQPEGKPTMKGLLTKVKHGYSKRVWCTLIGKTLYYFRSQEDKFPLGQIKLWEAKVEEVDRSCDSDEDYEASGRSLLSTHYTIVIHPKDQGPTYLLIGSKHEKDTWLYHLTVAAGSNNVNVGSEFEQLVCKLLNIDGEPSSQIWRHPTLCHSKEGIISPLTTLPSEALQTEAIKLFKTCQLFINAAVDSPAIDYHISLAQSALQICLTHPELQNEICCQLIKQTRRRQPQNQPGPLQGWQLLALCVGLFLPHHPFLWLLRLHLKRNADSRTEFGKYAIYCQRCVERTQQNGDREARPSRMEILSTLLRNPYHHSLPFSIPVHFMNGIYQVVGFDASTTVEEFLNTLNQDTGMRKPAQSGFALFTDDPSGRDLEHCLQGNIKICDIISKWEQASKEQQPGKCEGTRTVRLTYKNRLYFSVQARGETDREKLLLMYQTNDQIINGLFPLNKDLALEMAALLSQVEIGDFERPFSTPAGHVTNQCKVNQTLKQVIEKFYPKRYRDGCSEEQLRQLCQRLSTRWMALRGHSAADCVRIYLTVARKWPFFGAKLFLAKPITPSSLGSTFLWLAVHEDGLSLLEYNSMRLIVSYVYKSLMTFGGYQDDFMVVINNTHSKDKPTEKLLFAMAKPKILEITLLIASYINNFHQQKAAFHHLSAPALLSAQTRGPQARMMGSQPLLSSSRPTKGPTLL

SEQ ID NO: 162 - protein, 360 aa, Homo sapiens
MDPEETSVYLDYYYATSPNSDIRETHSHVPYTSVFLPVFYTAVFLTGVLGNLVLMGALHFKPGSRRLIDIFIINLAASDFIFLVTLPLWVDKEASLGLWRTGSFLCKGSSYMISVNMHCSVLLLTCMSVDRYLAIVWPVVSRKFRRTDCAYVVCASIWFISCLLGLPTLLSRELTLIDDKPYCAEKKATPIKLIWSLVALIFTFFVPLLSIVTCYCCIARKLCAHYQQSGKHNKKLKKSIKIIFIVVAAFLVSWLPFNTFKFLAIVSGLRQEHYLPSAILQLGMEVSGPLAFANSCVNPFIYYIFDSYIRRAIVHCLCPCLKNYDFGSSTETSDSHLTKALSTFIHAEDFARRRKRSVSL

SEQ ID NO: 163 - protein, 1192 aa, Homo sapiens
MFCSEKKLREVERIVKANDREYNEKFQYADNRIHTSKYNILTFLPINLFEQFQRVANAYFLCLLILQLIPEISSLTWFTTIVPLVLVITMTAVKDATDDYFRHKSDNQVNNRQSEVLINSKLQNEKWMNVKVGDIIKLENNQFVAADLLLLSSSEPHGLCYVETAELDGETNLKVRHALSVTSELGADISRLAGFDGIVVCEVPNNKLDKFMGILSWKDSKHSLNNEKIILRGCILRNTSWCFGMVIFAGPDTKLMQNSGKTKFKRTSIDRLMNTLVLWIFGFLICLGIILAIGNSIWESQTGDQFRTFLFWNEGEKSSVFSGFLTFWSYIIILNTVVPISLYVSVEVIRLGHSYFINWDRKMYYSRKAIPAVARTTTLNEELGQIEYIFSDKTGTLTQNIMTFKRCSINGRIYGEVHDDLDQKTEITQEKEPVDFSVKSQADREFQFFDHHLMESIKMGDPKVHEFLRLLALCHTVMSEENSAGELIYQVQSPDEGALVTAARNFGFIFKSRTPETITIEELGTLVTYQLLAFLDFNNTRKRMSVIVRNPEGQIKLYSKGADTILFEKLHPSNEVLLSLTSDHLSEFAGEGLRTLAIAYRDLDDKYFKEWHKMLEDANAATEERDERIAGLYEEIERDLMLLGATAVEDKLQEGVIETVTSLSLANIKIWVLTGDKQETAINIGYACNMLTDDMNDVFVIAGNNAVEVREELRKAKQNLFGQNRNFSNGHVVCEKKQQLELDSIVEETITGDYALIINGHSLAHALESDVKNDLLELACMCKTVICCRVTPLQKAQVVELVKKYRNAVTLAIGDGANDVSMIKSAHIGVGISGQEGLQAVLASDYSFAQFRYLQRLLLVHGRWSYFRMCKFLCYFFYKNFAFTLVHFWFGFFCGFSAQTVYDQWFITLFNIVYTSLPVLAMGIFDQDVSDQNSVDCPQLYKPGQLNLLFNKRKFFICVLHGIYTSLVLFFIPYGAFYNVAGEDGQHIADYQSFAVTMATSLVIVVSVQIALDTSYWTFINHVFIWGSIAIYFSILFTMHSNGIFGIFPNQFPFVGNARHSLTQKCIWLVILLTTVASVMPVVAFRFLKVDLYPTLSDQIRRWQKAQKKARPPSSRRPRTRRSSSRRSGYAFAHQEGYGELITSGKNMRAKNPPPTSGLEKTHYNSTSWIENLCKKTTDTVSSFSQDKTVKL

SEQ ID NO: 164 - protein, 288 aa, Homo sapiens [sequence omitted]

SEQ ID NO: 165 - protein, 1237 aa, Homo sapiens
MDSGAGGRRCPEAALLILGPPRMEHLRHSPGPGGQRLLLPSMLLALLLLLAPSPGHATRVVYKVPEEQPPNTLIGSLAADYGFPDVGHLYKLEVGAPYLRVDGKTGDIFTTETSIDREGLRECQNQLPGDPCILEFEVSITDLVQNGSPRLLEGQIEVQDINDNTPNFASPVITLAIPENTNIGSLFPIPLASDRDAGPNGVASYELQAGPEAQELFGLQVAEDQEEKQPQLIVMGNLDRERWDSYDLTIKVQDGGSPPRASSALLRVTVLDTNDNAPKFERPSYEAELSENSPIGHSVIQVKANDSDQGANAEIEYTFHQAPEVVRRLLRLDRNTGLITVQGPVDREDLSTLRFSVLAKDRGTNPKSARAQVVVTVKDMNDNAPTIEIRGIGLVTHQDGMANISEDVAEETAVALVQVSDRDEGENAAVTCVVAGDVPFQLRQASETGSDSKKKYFLQTTTPLDYEKVKDYTIEIVAVDSGNPPLSSTNSLKVQVVDVNDNAPVFTQSVTEVAFPENNKPGEVIAEITASDADSGSNAELVYSLEPEPAAKGLFTISPETGEIQVKTSLDREQRESYELKVVAADRGSPSLQGTATVLVNVLDCNDNDPKFMLSGYNFSVMENMPALSPVGMVTVIDGDKGENAQVQLSVEQDNGDFVIQNGTGTILSSLSFDREQQSTYTFQLKAVDGGVPPRSAYVGVTINVLDENDNAPYITAPSNTSHKLLTPQTRLGETVSQVAAEDFDSGVNAELIYSIAGGNPYGLFQIGSHSGAITLEKEIERRHHGLHRLVVKVSDRGKPPRYGTALVHLYVNETLANRTLLETLLGHSLDTPLDIDIAGDPEYERSKQRGNILFGVVAGVVAVALLIALAVLVRYCRQREAKSGYQAGKKETKDLYAPKPSGKASKGNKSKGKKSKSPKPVKPVEDEDEAGLQKSLKFNLMSDAPGDSPRIHLPLNYPPGSPDLGRHYRSNSPLPSIQLQPQSPSASKKHQVVQDLPPANTFVGTGDTTSTGSEQYSDYSYRTNPPKYPSKQLPHRRVTFSATSQAQELQDPSQHSYYDSGLEESETPSSKSSSGPRLGPLALPEDHYERTTPDGSIGEMEHPENDLRPLPDVAMTGTCTRECSEFGHSDTCWMPGQSSPSRRTKSSALKLSTFVPYQDRGGQEPAGAGSPSPPEDRNTKTAPVRLLPSYSAFSHSSHDSCKDSATLEEIPLTQTSDFPPAATPASAQTAKREIYL

SEQ ID NO: 166 - protein, 1445 aa, Homo sapiens
MQGPPLLTAAHLLCVCTAALAVAPGPRFLVTAPGIIRPGGNVTIGVELLEHCPSQVTVKAELLKTASNLTVSVLEAEGVFEKGSFKTLTLPSLPLNSADEIYELRVTGRTQDEILFSNSTRLSFETKRISVFIQTDKALYKPKQEVKFRIVTLFSDFKPYKTSLNILIKDPKSNLIQQWLSQQSDLGVISKTFQLSSHPILGDWSIQVQVNDQTYYQSFQVSEYVLPKFEVTLQTPLYCSMNSKHLNGTITAKYTYGKPVKGDVTLTFLPLSFWGKKKNITKTFKINGSANFSFNDEEMKNVMDSSNGLSEYLDLSSPGPVEILTTVTESVTGISRNVSTNVFFKQHDYIIEFFDYTTVLKPSLNFTATVKVTRADGNQLTLEERRNNVVITVTQRNYTEYWSGSNSGNQKMEAVQKINYTVPQSGTFKIEFPILEDSSELQLKAYFLGSKSSMAVHSLFKSPSKTYIQLKTRDENIKVGSPFELVVSGNKRLKELSYMVVSRGQLVAVGKQNSTMFSLTPENSWTPKACVIVYYIEDDGEIISDVLKIPVQLVFKNKIKLYWSKVKAEPSEKVSLRISVTQPDSIVGIVAVDKSVNLMNASNDITMENVVHELELYNTGYYLGMFMNSFAVFQECGLWVLTDANLTKDYIDGVYDNAEYAERFMEENEGHIVDIHDFSLGSSPHVRKHFPETWIWLDTNMGYRIYQEFEVTVPDSITSWVATGFVISEDLGLGLTTTPVELQAFQPFFIFLNLPYSVIRGEEFALEITIFNYLKDATEVKVIIEKSDKFDILMTSNEINATGHQQTLLVPSEDGATVLFPIRPTHLGEIPITVTALSPTASDAVTQMILVKAEGIEKSYSQSILLDLTDNRLQSTLKTLSFSFPPNTVTGSERVQITAIGDVLGPSINGLASLIRMPYGCGEQNMINFAPNIYILDYLTKKKQLTDNLKEKALSFMRQGYQRELLYQREDGSFSAFGNYDPSGSTWLSAFVLRCFLEADPYIDIDQNVLHRTYTWLKGHQKSNGEFWDPGRVIHSELQGGNKSPVTLTAYIVTSLLGYRKYQPNIDVQESIHFLESEFSRGISDNYTLALITYALSSVGSPKAKEALNMLTWRAEQEGGMQFWVSSESKLSDSWQPRSLDIEVAAYALLSHFLQFQTSEGIPIMRWLSRQRNSLGGFASTQDTTVALKALSEFAALMNTERTNIQVTVTGPSSPSPVKFLIDTHNRLLLQTAELAVVQPTAVNISANGFGFAICQLNVVYNVKASGSSRRRRSIQNQEAFDLDVAVKENKDDLNHVDLNVCTSFSGPGRSGMALMEVNLLSGFMVPSEAISLSETVKKVEYDHGKLNLYLDSVNETQFCVNIPAVRNFKVSNTQDASVSIVDYYEPRRQAVRSYNSEVKLSSCDLCSDVQGCRPCEDGASGSHHHSSVIFIFCFKLLYFMELWL

SEQ ID NO: 167 - protein, 323 aa, Homo sapiens
MSPAAAAEPDGDQQDRHVSKLIFCFFVFGAVLLCVGVLLSIFGFQACQYKPLPDCPMVLKVAGPACAVVGLGAVILARSRAQLQLRAGLQRGQQMDPDRAFICGESRQFAQCLIFGFLFLTSGMLISVLGIWVPGCGSNWAQEPLNETDTGDSEPRMCGFLSLQIMGPLIVLVGLCFFVVAHVKKRNTLNAGQDASEREEGQIQIMEPVQVTVGDSVIIFPPPPPPYFPESSASAVAESPGTNSLLPNENPPSYYSIFNYGTPTSEGAASERDCESIYTISGTNSSSEASHTPHLPSELPPRYEEKENAAATFLPLSSEPSPP

SEQ ID NO: 168 - protein, 888 aa, Homo sapiens [sequence omitted]

SEQ ID NO: 169 - protein, 502 aa, Homo sapiens
MSLVLLSLAALCRSAVPREPTVQCGSETGPSPEWMLQHDLIPGDLRDLRVEPVTTSVATGDYSILMNVSWVLRADASIRLLKATKICVTGKSNFQSYSCVRCNYTEAFQTQTRPSGGKWTFSYIGFPVELNTVYFIGAHNIPNANMNEDGPSMSVNFTSPGCLDHIMKYKKKCVKAGSLWDPNITACKKNEETVEVNFTTTPLGNRYMALIQHSTIIGFSQVFEPHQKKQTRASVVIPVTGDSEGATVQLTPYFPTCGSDCIRHKGTVVLCPQTGVPFPLDNNKSKPGGWLPLLLLSLLVATWVLVAGIYLMWRHERIKKTSFSTTTLLPPIKVLVVYPSEICFHHTICYFTEFLQNHCRSEVILEKWQKKKIAEMGPVQWLATQKKAADKVVFLLSNDVNSVCDGTCGKSEGSPSENSQDLFPLAFNLFCSDLRSQIHLHKYVVVYFREIDTKDDYNALSVCPKYHLMKDATAFCAELLHVKQQVSAGKRSQACHDGCCSL

SEQ ID NO: 170 - protein, 340 aa, Homo sapiens
MAAGRLIIKTEFLPTKYRGYMLPLSQVFWLAGSLLIIGLASVIIPTIGWRWLIRVASIPGIILIVAFKFIPESARFNVSTGNTRAALATLERVAKMNRSVMPEGKLVEPVLEKRGRFADLLDAKYLRTTLQIWVIWLGISFAYYGVILASAELLERDLVCGSKSDSAVVVTGGDSGESQSPCYCHMFAPSDYRTMIISTIGEIALNPLNILGINFLGRRLSLSITMGCTALFFLLLNICTSSAGLIGFLFMLRALVAANFNTVYIYTAEVYPTTMRALGMGTSGSLCRIGAMVAPFISQVLMSASILGALCLFSSVCVVCAISAFTLPIETKGRALQQIK

SEQ ID NO: 171 - protein, 513 aa, Homo sapiens
MKMASFLAFLLLNFRVCLLLLQLLMPHSAQFSVLGPSGPILAMVGEDADLPCHLFPTMSAETMELKWVSSSLRQVVNVYADGKEVEDRQSAPYRGRTSILRDGITAGKAALRIHNVTASDSGKYLCYFQDGDFYEKALVELKVAALGSDLHVDVKGYKDGGIHLECRSTGWYPQPQIQWSNNKGENIPTVEAPVVADGVGLYAVAASVIMRGSSGEGVSCTIRSSLLGLEKTASISIADPFFRSAQRWIAALAGTLPVLLLLLGGAGYFLWQQQEEKKTQFRKKKREQELREMAWSTMKQEQSTRVKLLEELRWRSIQYASRGERHSAYNEWKKALFKPADVILDPKTANPILLVSEDQRSVQRAKEPQDLPDNPERFNWHYCVLGCESFISGRHYWEVEVGDRKEWHIGVCSKNVQRKGWVKMTPENGFWTMGLTDGNKYRTLTEPRTNLKLPKPPKKVGVFLDYETGDISFYNAVDGSHIHTFLDVSFSEALYPVFRILTLEPTALTICPA

SEQ ID NO: 172 - protein, 86 aa, Homo sapiens
MIPAVVLLLLLLVEQAAALGEPQLCYILDAILFLYGIVLTLLYCRLKIQVRKAAITSYEKSDGVYTGLSTRNQETYETLKHEKPPQ

SEQ ID NO: 173 - protein, 1223 aa, Homo sapiens
MRRLAAEELGVVTMQRIFNSFVYTEKISNGESEVQQLAKKIREKFNRYLDVVNRNKQVVEASYTAHLTSPLTAIQDCCTIPPSMMEFDGNFNTNVSRTISCDRLSTTVNSRAFNPGRDLNSVLADNLKSNPGIKWQYFSSEEGIFTVFPAHKFRCKGSYEHRSRPIYVSTVRPQSKHIVVILDHGASVTDTQLQIAKDAAQVILSAIDEHDKISVLTVADTVRTCSLDQCYKTFLSPATSETKRKMSTFVSSVKSSDSPTQHAVGFQKAFQLIRSTNNNTKFQANTDMVIIYLSAGITSKDSSEEDKKATLQVINEENSFLNNSVMILTYALMNDGVTGLKELAFLRDLAEQNSGKYGVPDRMALPVIKGSMMVLNQLSNLETTVGRFYTNLPNRMIDEAVFSLPFSDEMGDGLIMTVSKPCYFGNLLLGIVGVDVNLAYILEDVTYYQDSLASYTFLIDDKGYTLMHPSLTRPYLLSEPPLHTDIIHYENIPKFELVRQNILSLPLGSQIIAVPVNSSLSWHINKLRETGKEAYNVSYAWKMVQDTSFILCIVVIQPEIPVKQLKNLNTVPSSKLLYHRLDLLGQPSACLHFKQLATLESPTIMLSAGSFSSPYEHLSQPETKRMVEHYTAYLSDNTRLIANPGLKFSVRNEVMATSHVTDEWMTQMEMSSLNTYIVRRYIATPNGVLRIYPGSLMDKAFDPTRRQWYLHAVANPGLISLTGPYLDVGGAGYVVTISHTIHSSSTQLSSGHTVAVMGIDFTLRYFYKVLMDLLPVCNQDGGNKIRCFIMEDRGYLVAHPTLIDPKGHAPVEQQHITHKEPLVANDILNHPNFVKKNLCNSFSDRTVQRFYKFNTSLAGDLTNLVHGSHCSKYRLARIPGTNAFVGIVNETCDSLAFCACSMVDRLCLNCHRMEQNECECPCECPLEVNECTGNLTNAENRNPSCEVHQEPVTYTAIDPGLQDALHQCVNSRCSQRLESGDCFGVLDCEWCMVDSDGKTHLDKPYCAPQKECFGGIVGAKSPYVDDMGAIGDEVITLNMIKSAPVGPVAGGIMGCIMVLVLAVYAYRHQIHRRSHQHMSPLAAQEMSVRMSNLENDRDERDDDSHEDRGIISNTRFIAAVIERHAHSPERRRRYWGRSGTESDHGYSTMSPQEDSENPPCNNDPLSAGVDVGNHDEDLDLDTPPQTAALLSHKFHHYRSHHPTLHHSHHLQAAVTVHTVDAEC

SEQ ID NO: 174 - protein, 337 aa, Homo sapiens
MRPTLLWSLLLLLGVFAAAAAAPPDPLSQLPAPQHPKIRLYNAEQVLSWEPVALSNSTRPVVYQVQFKYTDSKWFTADIMSIGVNCTQITATECDFTAASPSAGFPMDFNVTLRLRAELGALHSAWVTMPWFQHYRNVTVGPPENIEVTPGEGSLIIRFSSPFDIADTSTAFFCYYVHYWEKGGIQQVKGPFRSNSISLDNLKPSRVYCLQVQAQLLWNKSNIFRVGHLSNISCYETMADASTELQQVILISVGTFSLLSVLAGACFFLVLKYRGLIKYWFHTPPSIPLQIEEYLKDPTQPILEALDKDSSPKDDVWDSVSIISFPEKEQEDVLQTL

SEQ ID NO: 175 - protein, 732 aa, Homo sapiens
MGQGWATAGLPSLLFLLLCYGHPLLVPSQEASQQVTVTHGTSSQATTSSQTTTHQATAHQTSAQSPNLVTDEAEASKFVEEYDRTSQVVWNEYAEANWNYNTNITTETSKILLQKNMQIANHTLKYGTQARKFDVNQLQNTTIKRIIKKVQDLERAALPAQELEEYNKILLDMETTYSVATVCHPNGSCLQLEPDLTNVMATSRKYEDLLWAWEGWRDKAGRAILQFYPKYVELINQAARLNGYVDAGDSWRSMYETPSLEQDLERLFQELQPLYLNLHAYVRRALHRHYGAQHINLEGPIPAHLLGNMWAQTWSNIYDLVVPFPSAPSMDTTEAMLKQGWTPRRMFKEADDFFTSLGLLPVPPEFWNKSMLEKPTDGREVVCHASAWDFYNGKDFRIKQCTTVNLEDLVVAHHEMGHIQYFMQYKDLPVALREGANPGFHEAIGDVLALSVSTPKHLHSLNLLSSEGGSDEHDINFLMKMALDKIAFIPFSYLVDQWRWRVFDGSITKENYNQEWWSLRLKYQGLCPPVPRTQGDFDPGAKFHIPSSVPYIRYFVSFIIQFQFHEALCQAAGHTGPLHKCDIYQSKEAGQRLATAMKLGFSRPWPEAMQLITGQPNMSASAMLSYFKPLLDWLRTENELHGEKLGWPQYNWTPNSARSEGPLPDSGRVSFLGLDLDAQQARVGQWLLLFLGIALLVATLGLSQRLFSIRHRSLHRHSHGPQFGSEVELRHS

SEQ ID NO: 176 - protein, 1306 aa, Homo sapiens
MGAASGRRGPGLLLPLPLLLLLPPQPALALDPGLQPGNFSADEAGAQLFAQSYNSSAEQVLFQSVAASWAHDTNITAENARRQEEAALLSQEFAEAWGQKAKELYEPIWQNFTDPQLRRIIGAVRTLGSANLPLAKRQQYNALLSNMSRIYSTAKVCLPNKTATCWSLDPDLTNILASSRSYAMLLFAWEGWHNAAGIPLKPLYEDFTALSNEAYKQDGFTDTGAYWRSWYNSPTFEDDLEHLYQQLEPLYLNLHAFVRRALHRRYGDRYINLRGPIPAHLLGDMWAQSWENIYDMVVPFPDKPNLDVTSTMLQQGWNATHMFRVAEEFFTSLELSPMPPEFWEGSMLEKPADGREVVCHASAWDFYNRKDFRIKQCTRVTMDQLSTVHHEMGHIQYYLQYKDLPVSLRRGANPGFHEAIGDVLALSVSTPEHLHKIGLLDRVTNDTESDINYLLKMALEKIAFLPFGYLVDQWRWGVFSGRTPPSRYNFDWWYLRTKYQGICPPVTRNETHFDAGAKFHVPNVTPYIRYFVSFVLQFQFHEALCKEAGYEGPLHQCDIYRSTKAGAKLRKVLQAGSSRPWQEVLKDMVGLDALDAQPLLKYFQPVTQWLQEQNQQNGEVLGWPEYQWHPPLPDNYPEGIDLVTDEAEASKFVEEYDRTSQVVWNEYAEANWNYNTNITTETSKILLQKNMQIANHTLKYGTQARKFDVNQLQNTTIKRIIKKVQDLERAALPAQELEEYNKILLDMETTYSVATVCHPNGSCLQLEPDLTNVMATSRKYEDLLWAWEGWRDKAGRAILQFYPKYVELINQAARLNGYVDAGDSWRSMYETPSLEQDLERLFQELQPLYLNLHAYVRRALHRHYGAQHINLEGPIPAHLLGNMWAQTWSNIYDLVVPFPSAPSMDTTEAMLKQGWTPRRMFKEADDFFTSLGLLPVPPEFWNKSMLEKPTDGREVVCHASAWDFYNGKDFRIKQCTTVNLEDLVVAHHEMGHIQYFMQYKDLPVALREGANPGFHEAIGDVLALSVSTPKHLHSLNLLSSEGGSDEHDINFLMKMALDKIAFIPFSYLVDQWRWRVFDGSITKENYNQEWWSLRLKYQGLCPPVPRTQGDFDPGAKFHIPSSVPYIRYFVSFIIQFQFHEALCQAAGHTGPLHKCDIYQSKEAGQRLATAMKLGFSRPWPEAMQLITGQPNMSASAMLSYFKPLLDWLRTENELHGEKLGWPQYNWTPNSARSEGPLPDSGRVSFLGLDLDAQQARVGQWLLLFLGIALLVATLGLSQRLFSIRHRSLHRHSHGPQFGSEVELRHS

SEQ ID NO: 177 - protein, 184 aa, Homo sapiens
MRRGPRSLRGRDAPAPTPCVPAECFDLLVRHCVACGLLRTPRPKPAGASSPAPRTALQPQESVGAGAGEAALPLPGLLFGAPALLGLALVLALVLVGLVSWRRRQRRLRGASSAEAPDGDKDAPEPLDKVIILSPGISDATAPAWPPPGEDPGTTPPGHSVPVPATELGSTELVTTKTAGPEQQ

SEQ ID NO: 178 - protein, 257 aa, Homo sapiens
MGTVRPPRPSLLLVSTRESCLFLLFCLHLGAACPQPCRCPDHAGAVAVFCSLRGLQEVPEDIPANTVLLKLDANKISHLPDGAFQHLHRLRELDLSHNAIEAIGSATFAGLAGGLRLLDLSYNRIQRIPKDALGKLSAKIRLSHNPLHCECALQEALWELKLDPDSVDEIACHTSVQEEFVGKPLVQALDAGASLCSVPHRTTDVAMLVTMFGWFAMVIAYVVYYVRHNQEDARRHLEYLKSLPSAPASKDPIGPGP

SEQ ID NO: 179 - protein, 304 aa, Homo sapiens
MSSTLPALLCVGLCLSQRISAQQQTLPKPFIWAEPHFMVPKEKQVTICCQGNYGAVEYQLHFEGSLFAVDRPKPPERINKVQFYIPDMNSRMAGQYSCIYRVGELWSEPSNLLDLVVTEMYDTPTLSVHPGPEVISGEKVTFYCRLDTATSMFLLLKEGRSSHVQRGYGKVQAEFPLGPVTTAHRGTYRCFGSYNNHAWSFPSEPVKLLVTGDIENTSLAPEDPTFPADTWGTYLLTTETGLQKDHALWDHTAQNLLRMGLAFLVLVALVWFLVEDWLSRKRTRERASRASTWEGRRRLNTQTL

SEQ ID NO: 180 - protein, 66 aa, Homo sapiens
MTGLSMDGGGSPKGDVDPFYYDYETVRNGGLIFAGLAFIVGLLILLSRRFRCGGNKKRRQINEDEP

SEQ ID NO: 181 - protein, 247 aa, Homo sapiens
MPRLLHPALPLLLGATLTFRALRRALCRLPLPVHVRADPLRTWRWHNLLVSFAHSIVSGIWALLCVWQTPDMLVEIETAWSLSGYLLVCFSAGYFIHDTVDIVASGQTRASWEYLVHHVMAMGAFFSGIFWSSFVGGGVLTLLVEVSNIFLTIRMMMKISNAQDHLLYRVNKYVNLVMYFLFRLAPQAYLTHFFLRYVNQRTLGTFLLGILLMLDVMIIIYFSRLLRSDFCPEHVPKKQHKDKFLTE

SEQ ID NO: 182 - protein, 372 aa, Homo sapiens
MNYPLTLEMDLENLEDLFWELDRLDNYNDTSLVENHLCPATEGPLMASFKAVFVPVAYSLIFLLGVIGNVLVLVILERHRQTRSSTETFLFHLAVADLLLVFILPFAVAEGSVGWVLGTFLCKTVIALHKVNFYCSSLLLACIAVDRYLAIVHAVHAYRHRRLLSIHITCGTIWLVGFLLALPEILFAKVSQGHHNNSLPRCTFSQENQAETHAWFTSRFLYHVAGFLLPMLVMGWCYVGVVHRLRQAQRRPQRQKAVRVAILVTSIFFLCWSPYHIVIFLDTLARLKAVDNTCKLNGSLPVAITMCEFLGLAHCCLNPMLYTFAGVKFRSDLSRLLTKLGCTGPASLCQLFPSWRRSSLSESENATSLTTF

SEQ ID NO: 183 - protein, 374 aa, Homo sapiens
MLSTSRSRFIRNTNESGEEVTTFFDYDYGAPCHKFDVKQIGAQLLPPLYSLVFIFGFVGNMLVVLILINCKKLKCLTDIYLLNLAISDLLFLITLPLWAHSAANEWVFGNAMCKLFTGLYHIGYFGGIFFIILLTIDRYLAIVHAVFALKARTVTFGVVTSVITWLVAVFASVPGIIFTKCQKEDSVYVCGPYFPRGWNNFHTIMRNILGLVLPLLIMVICYSGILKTLLRCRNEKKRHRAVRVIFTIMIVYFLFWTPYNIVILLNTFQEFFGLSNCESTSQLDQATQVTETLGMTHCCINPIIYAFVGEKFRSLFHIALGCRIAPLQKPVCGGPGVRPGKNVKVTTQGLLDGRGKGKSIGRAPEASLQDKEGA

SEQ ID NO: 184 - protein, 1049 aa, Homo sapiens
MGSRTPESPLHAVQLRWGPRRRPPLLPLLLLLLPPPPRVGGFNLDAEAPAVLSGPPGSFFGFSVEFYRPGTDGVSVLVGAPKANTSQPGVLQGGAVYLCPWGASPTQCTPIEFDSKGSRLLESSLSSSEGEEPVEYKSLQWFGATVRAHGSSILACAPLYSWRTEKEPLSDPVGTCYLSTDNFTRILEYAPCRSDFSWAAGQGYCQGGFSAEFTKTGRVVLGGPGSYFWQGQILSATQEQIAESYYPEYLINLVQGQLQTRQASSIYDDSYLGYSVAVGEFSGDDTEDFVAGVPKGNLTYGYVTILNGSDIRSLYNFSGEQMASYFGYAVAATDVNGDGLDDLLVGAPLLMDRTPDGRPQEVGRVYVYLQHPAGIEPTPTLTLTGHDEFGRFGSSLTPLGDLDQDGYNDVAIGAPFGGETQQGVVFVFPGGPGGLGSKPSQVLQPLWAASHTPDFFGSALRGGRDLDGNGYPDLIVGSFGVDKAVVYRGRPIVSASASLTIFPAMFNPEERSCSLEGNPVACINLSFCLNASGKHVADSIGFTVELQLDWQKQKGGVRRALFLASRQATLTQTLLIQNGAREDCREMKIYLRNESEFRDKLSPIHIALNFSLDPQAPVDSHGLRPALHYQSKSRIEDKAQILLDCGEDNICVPDLQLEVFGEQNHVYLGDKNALNLTFHAQNVGEGGAYEAELRVTAPPEAEYSGLVRHPGNFSSLSCDYFAVNQSRLLVCDLGNPMKAGASLWGGLRFTVPHLRDTKKTIQFDFQILSKNLNNSQSDVVSFRLSVEAQAQVTLNGVSKPEAVLFPVSDWHPRDQPQKEEDLGPAVHHVYELINQGPSSISQGVLELSCPQALEGQQLLYVTRVTGLNCTTNHPINPKGLELDPEGSLHHQQKREAPSRSSASSGPQILKCPEAECFRLRCELGPLHQQESQSLQLHFRVWAKTFLQREHQPFSLQCEAVYKALKMPYRILPRQLPQKERQVATAVQWTKAEGSYGVPLWIIILAILFGLLLLGLLIYILYKLGFFKRSLPYGTAMEKAQLKPPATSDA

SEQ ID NO: 185 - protein, 234 aa, Homo sapiens
MAFLAGPRLLDWASSPPHLQFNKFVLTGYRPASSGSGCLRSLFYLHNELGNIYTHGSVLYHLFMCHQGGSAVYARLLALDMCGVCLVNTLGALPIIHCTLACRPWLRPAALVGYTVLSGVAGWRALTAPSTSARLRAFGWQAAARLLVFGARGVGLGSGAPGSLPCYLRMDALALLGGLVNVARLPERWGPGRFDYWGNSHQIMHLLSVGSILQLHAGVVPDLLWAAHHACPRD

SEQ ID NO: 186 - protein, 1615 aa, Homo sapiens
MEAAPPGPPWPLLLLLLLLLALCGCPAPAAASPLLLFANRRDVRLVDAGGVKLESTIVVSGLEDAAAVDFQFSKGAVYWTDVSEEAIKQTYLNQTGAAVQNVVISGLVSPDGLACDWVGKKLYWTDSETNRIEVANLNGTSRKVLFWQDLDQPRAIALDPAHGYMYWTDWGETPRIERAGMDGSTRKIIVDSDIYWPNGLTIDLEEQKLYWADAKLSFIHRANLDGSFRQKVVEGSLTHPFALTLSGDTLYWTDWQTRSIHACNKRTGGKRKEILSALYSPMDIQVLSQERQPFFHTRCEEDNGGCSHLCLLSPSEPFYTCACPTGVQLQDNGRTCKAGAEEVLLLARRTDLRRISLDTPDFTDIVLQVDDIRHAIAIDYDPLEGYVYWTDDEVRAIRRAYLDGSGAQTLVNTEINDPDGIAVDWVARNLYWTDTGTDRIEVTRLNGTSRKILVSEDLDEPRAIALHPVMGLMYWTDWGENPKIECANLDGQERRVLVNASLGWPNGLALDLQEGKLYWGDAKTDKIEVINVDGTKRRTLLEDKLPHIFGFTLLGDFIYWTDWQRRSIERVHKVKASRDVIIDQLPDLMGLKAVNVAKVVGTNPCADRNGGCSHLCFFTPHATRCGCPIGLELLSDMKTCIVPEAFLVFTSRAAIHRISLETNNNDVAIPLTGVKEASALDFDVSNNHIYWTDVSLKTISRAFMNGSSVEHVVEFGLDYPEGMAVDWMGKNLYWADTGTNRIEVARLDGQFRQVLVWRDLDNPRSLALDPTKGYIYWTEWGGKPRIVRAFMDGTNCMTLVDKVGRANDLTIDYADQRLYWTDLDTNMIESSNMLGQERVVIADDLPHPFGLTQYSDYIYWTDWNLHSIERADKTSGRNRTLIQGHLDFVMDILVFHSSRQDGLNDCMHNNGQCGQLCLAIPGGHRCGCASHYTLDPSSRNCSPPTTFLLFSQKSAISRMIPDDQHSPDLILPLHGLRNVKAIDYDPLDKFIYWVDGRQNIKRAKDDGTQPFVLTSLSQGQNPDRQPHDLSIDIYSRTLFWTCEATNTINVHRLSGEAMGVVLRGDRDKPRAIVVNAERGYLYFTNMQDRAAKIERAALDGTEREVLFTTGLIRPVALVVDNTLGKLFWVDADLKRIESCDLSGANRLTLEDANIVQPLGLTILGKHLYWIDRQQQMIERVEKTTGDKRTRIQGRVAHLTGIHAVEEVSLEEFSAHPCARDNGGCSHICIAKGDGTPRCSCPVHLVLLQNLLTCGEPPTCSPDQFACATGEIDCIPGAWRCDGFPECDDQSDEEGCPVCSAAQFPCARGQCVDLRLRCDGEADCQDRSDEADCDAICLPNQFRCASGQCVLIKQQCDSFPDCIDGSDELMCEITKPPSDDSPAHSSAIGPVIGIILSLFVMGGVYFVCQRVVCQRYAGANGPFPHEYVSGTPHVPLNFIAPGGSQHGPFTGIACGKSMMSSVSLMGGRGGVPLYDRNHVTGASSSSSSSTKATLYPPILNPPPSPATDPSLYNMDMFYSSNIPATARPYRPYIIRGMAPPTTPCSTDVCDSDYSASRWKASKYYLDLNSDSDPYPPPPTPHSQYLSAEDSCPPSPATERSYFHLFPPPPSPCTDSS

SEQ ID NO: 187 - protein, 739 aa, Homo sapiens
MPGKMVVILGASNILWIMFAASQAFKIETTPESRYLAQIGDSVSLTCSTTGCESPFFSWRTQIDSPLNGKVTNEGTTSTLTMNPVSFGNEHSYLCTATCESRKLEKGIQVEIYSFPKDPEIHLSGPLEAGKPITVKCSVADVYPFDRLEIDLLKGDHLMKSQEFLEDADRKSLETKSLEVTFTPVIEDIGKVLVCRAKLHIDEMDSVPTVRQAVKELQVYISPKNTVISVNPSTKLQEGGSVTMTCSSEGLPAPEIFWSKKLDNGNLQHLSGNATLTLIAMRMEDSGIYVCEGVNLIGKNRKEVELIVQEKPFTVEISPGPRIAAQIGDSVMLTCSVMGCESPSFSWRTQIDSPLSGKVRSEGTNSTLTLSPVSFENEHSYLCTVTCGHKKLEKGIQVELYSFPRDPEIEMSGGLVNGSSVTVSCKVPSVYPLDRLEIELLKGETILENIEFLEDTDMKSLENKSLEMTFIPTIEDTGKALVCQAKLHIDDMEFEPKQRQSTQTLYVNVAPRDTTVLVSPSSILEEGSSVNMTCLSQGFPAPKILWSRQLPNGELQPLSENATLTLISTKMEDSGVYLCEGINQAGRSRKEVELIIQVTPKDIKLTAFPSESVKEGDTVIISCTCGNVPETWIILKKKAETGDTVLKSIDGAYTIRKAQLKDAGVYECESKNKVGSQLRSLTLDVQGRENNKDYFSPELLVLYFASSLIIPAIGMIIYFARKANMKGSYSLVEAQKSKV

SEQ ID NO: 188 - protein, 510 aa, Homo sapiens
MYTSHEDIGYDFEDGPKDKKTLKPHPNIDGGWAWMMVLSSFFVHILIMGSQMALGVLNVEWLEEFHQSRGLTAWVSSLSMGITLIVGPFIGLFINTCGCRQTAIIGGLVNSLGWVLSAYAANVHYLFITFGVAAGLGSGMAYLPAVVMVGRYFQKRRALAQGLSTTGTGFGTFLMTVLLKYLCAEYGWRNAMLIQGAVSLNLCVCGALMRPLSPGKNPNDPGEKDVRGLPAHSTESVKSTGQQGRTEEKDGGLGNEETLCDLQAQECPDQAGHRKNMCALRILKTVSWLTMRVRKGFEDWYSGYFGTASLFTNRMFVAFIFWALFAYSSFVIPFIHLPEIVNLYNLSEQNDVFPLTSIIAIVHIFGKVILGVIADLPCISVWNVFLLANFTLVLSIFILPLMHTYAGLAVICALIGFSSGYFSLMPVVTEDLVGIEHLANAYGIIICANGISALLGPPFAGWIYDITQKYDFSFYICGLLYMIGILFLLIQPCIRIIEQSRRKYMDGAHV

SEQ ID NO: 189 - protein, 870 aa, Homo sapiens
MNSNLPAENLTIAVNMTKTLPTAVTHGFNSTNDPPSMSITRLFPALLECFGIVLCGYIAGRANVITSTQAKGLGNFVSRFALPALLFKNMVVLNFSNVDWSFLYSILIAKASVFFIVCVLTLLVASPDSRFSKAGLFPIFATQSNDFALGYPIVEALYQTTYPEYLQYIYLVAPISLMMLNPIGFIFCEIQKWKDTQNASQNKIKIVGLGLLRVLQNPIVFMVFIGIAFNFILDRKVPVYVENFLDGLGNSFSGSALFYLGLTMVGKIKRLKKSAFVVLILLITAKLLVLPLLCREMVELLDKGDSVVNHTSLSNYAFLYGVFPVAPGVAIFATQFNMEVEIITSGMVISTFVSAPIMYVSAWLLTFPTMDPKPLAYAIQNVSFDISIVSLISLIWSLAILLLSKKYKQLPHMLTTNLLIAQSIVCAGMMIWNFVKEKNFVGQILVFVLLYSSLYSTYLWTGLLAISLFLLKKRERVQIPVGIIIISGWGIPALLVGVLLITGKHNGDSIDSAFFYGKEQMITTAVTLFCSILIAGISLMCMNQTAQAGSYEGFDQSQSHKVVEPGNTAFEESPAPVNEPELFTSSIPETSCCSCSMGNGELHCPSIEPIANTSTSEPVIPSFEKNNHCVSRCNSQSCILAQEEEQYLQSGDQQLTRHVLLCLLLIIGLFANLSSCLWWLFNQEPGRLYVELQFFCAVFNFGQGFISFGIFGLDKHLIILPFKRRLEFLWNNKDTAENRDSPVSEEIKMTCQQFIHYHRDLCIRNIVKERRCGAKTSAGTFCGCDLVSWLIEVGLASDRGEAVIYGDRLVQGGVIQHITNEYEFRDEYLFYRFLQKSPEQSPPAINANTLQQERYKEIEHSSPPSHSPKT

SEQ ID NO: 190 - protein, 350 aa, Homo sapiens
MSNITDPQMWDFDDLNFTGMPPADEDYSPCMLETETLNKYVVIIAYALVFLLSLLGNSLVMLVILYSRVGRSVTDVYLLNLALADLLFALTLPIWAASKVNGWIFGTFLCKVVSLLKEVNFYSGILLLACISVDRYLAIVHATRTLTQKRHLVKFVCLGCWGLSMNLSLPFFLFRQAYHPNNSSPVCYEVLGNDTAKWRMVLRILPHTFGFIVPLFVMLFCYGFTLRTLFKAHMGQKHRAMRVIFAVVLIFLLCWLPYNLVLLADTLMRTQVIQESCERRNNIGRALDATEILGFLHSCLNPIIYAFIGQNFRHGFLKILAMHGLVSKEFLARHRVTSYTSSSVNVSSNL

SEQ ID NO: 191 - protein, 410 aa, Homo sapiens
MAFLGLFSLLVLQSMATGATFPEEAIADLSVNMYNRLRATGEDENILFSPLSIALAMGMMELGAQGSTQKEIRHSMGYDSLKNGEEFSFLKEFSNMVTAKESQYVMKIANSLFVQNGFHVNEEFLQMMKKYFNAAVNHVDFSQNVAVANYINKWVENNTNNLVKDLVSPRDFDAATYLALINAVYFKGNWKSQFRPENTRTFSFTKDDESEVQIPMMYQQGEFYYGEFSDGSNEAGGIYQVLEIPYEGDEISMMLVLSRQEVPLATLEPLVKAQLVEEWANSVKKQKVEVYLPRFTVEQEIDLKDVLKALGITEIFIKDANLTGLSDNKEIFLSKAIHKSFLEVNEEGSEAAAVSGMIAISRMAVLYPQVIVDHPFFFLIRNRRTGTILFMGRVMHPETMNTSGHDFEEL

SEQ ID NO: 192 - protein, 2602 aa, Homo sapiens
MPVTEKDLAEDAPWKKIQQNTFTRWCNEHLKCVNKRIGNLQTDLSDGLRLIALLEVLSQKRMYRKYHQRPTFRQMQLENVSVALEFLDRESIKLVSIDSKAIVDGNLKLILGLVWTLILHYSISMPVWEDEGDDDAKKQTPKQRLLGWIQNKIPYLPITNFNQNWQDGKALGALVDSCAPGLCPDWESWDPQKPVDNAREAMQQADDWLGVPQVITPEEIIHPDVDEHSVMTYLSQFPKAKLKPGAPLKPKLNPKKARAYGRGIEPTGNMVKQPAKFTVDTISAGQGDVMVFVEDPEGNKEEAQVTPDSDKNKTYSVEYLPKVTGLHKVTVLFAGQHISKSPFEVSVDKAQGDASKVTAKGPGLEAVGNIANKPTYFDIYTAGAGVGDIGVEVEDPQGKNTVELLVEDKGNQVYRCVYKPMQPGPHVVKIFFAGDTIPKSPFVVQVGEACNPNACRASGRGLQPKGVRIRETTDFKVDTKAAGSGELGVTMKGPKGLEELVKQKDFLDGVYAFEYYPSTPGRYSIAITWGGHHIPKSPFEVQVGPEAGMQKVRAWGPGLHGGIVGRSADFVVESIGSEVGSLGFAIEGPSQAKIEYNDQNDGSCDVKYWPKEPGEYAVHIMCDDEDIKDSPYMAFIHPATGGYNPDLVRAYGPGLEKSGCIVNNLAEFTVDPKDAGKAPLKIFAQDGEGQRIDIQMKNRMDGTYACSYTPVKAIKHTIAVVWGGVNIPHSPYRVNIGQGSHPQKVKVFGPGVERSGLKANEPTHFTVDCTEAGEGDVSVGIKCDARVLSEDEEDVDFDIIHNANDTFTVKYVPPAAGRYTIKVLFASQEIPASPFRVKVDPSHDASKVKAEGPGLSKAGVENGKPTHFTVYTKGAGKAPLNVQFNSPLPGDAVKDLDIIDNYDYSHTVKYTPTQQGNMQVLVTYGGDPIPKSPFTVGVAAPLDLSKIKLNGLENRVEVGKDQEFTVDTRGAGGQGKLDVTILSPSRKVVPCLVTPVTGRENSTAKFIPREEGLYAVDVTYDGHPVPGSPYTVEASLPPDPSKVKAHGPGLEGGLVGKPAEFTIDTKGAGTGGLGLTVEGPCEAKIECSDNGDGTCSVSYLPTKPGEYFVNILFEEVHIPGSPFKADIEMPFDPSKVVASGPGLEHGKVGEAGLLSVDCSEAGPGALGLEAVSDSGTKAEVSIQNNKDGTYAVTYVPLTAGMYTLTMKYGGELVPHFPARVKVEPAVDTSRIKVFGPGIEGKDVFREATTDFTVDSRPLTQVGGDHIKAHIANPSGASTECFVTDNADGTYQVEYTPFEKGLHVVEVTYDDVPIPNSPFKVAVTEGCQPSRVQAQGPGLKEAFTNKPNVFTVVTRGAGIGGLGITVEGPSESKINCRDNKDGSCSAEYIPFAPGDYDVNITYGGAHIPGSPFRVPVKDVVDPSKVKIAGPGLGSGVRARVLQSFTVDSSKAGLAPLEVRVLGPRGLVEPVNVVDNGDGTHTVTYTPSQEGPYMVSVKYADEEIPRSPFKVKVLPTYDASKVTASGPGLSSYGVPASLPVDFAIDARDAGEGLLAVQITDQEGKPKRAIVHDNKDGTYAVTYIPDKTGRYMIGVTYGGDDIPLSPYRIRATQTGDASKCLATGPGIASTVKTGEEVGFVVDAKTAGKGKVTCTVLTPDGTEAEADVIENEDGTYDIFYTAAKPGTYVIYVRFGGVDIPNSPFTVMATDGEVTAVEEAPVNACPPGFRPWVTEEAYVPVSDMNGLGFKPFDLVIPFAVRKGEITGEVHMPSGKTATPEIVDNKDGTVTVRYAPTEVGLHEMHIKYMGSHIPESPLQFYVNYPNSGSVSAYGPGLVYGVANKTATFTIVTEDAGEGGLDLAIEGPSKAEISCIDNKDGTCTVTYLPTLPGDYSILVKYNDKHIPGSPFTAKITDDSRRCSQVKLGSAADFLLDISETDLSSLTASIKAPSGRDEPCLLKRLPNNHIGISFIPREVGEHLVSIKKNGNHVANSPVSIMVVQSEIGDARRAKVYGRGLSEGRTFEMSDFIVDTRDAGYGGISLAVEGPSKVDIQTEDLEDGTCKVSYFPTVPGVYIVSTKFADEHVPGSPFTVKISGEGRVKESITRTSRAPSVATVGSICDLNLKIPEINSSDMSAHVTSPSGRVTEAEIVPMGKNSHCVRFVPQEMGVHTVSVKYRGQHVTGSPFQFTVGPLGEGGAHKVRAGGPGLERGEAGVPAEFSIWTREAGAGGLSIAVEGPSKAEITFDDHKNGSCGVSYIAQEPGNYEVSIKFNDEHIPESPYLVPVIAPSDDARRLTVMSLQESGLKVNQPASFAIRLNGAKGKIDAKVHSPSGAVEECHVSELEPDKYAVRFIPHENGVHTIDVKFNGSHVVGSPFKVRVGEPGQAGNPALVSAYGTGLEGGTTGIQSEFFINTTRAGPGTLSVTIEGPSKVKMDCQETPEGYKVMYTPMAPGNYLISVKYGGPNHIVGSPFKAKVTGQRLVSPGSANETSSILVESVTRSSTETCYSAIPKASSDASKVTSKGAGLSKAFVGQKSSFLVDCSKAGSNMLLIGVHGPTTPCEEVSMKHVGNQQYNVTYVVKERGDYVLAVKWGEEHIPGSPFHVTVP

SEQ ID NO: 193 - protein, 99 aa, Homo sapiens
MAEGGFDPCECVCSHEHAMRRLINLLRQSQSYCTDTECLQELPGPSGDNGISVTMILVAWMVIALILFLLRPPNLRGSSLPGKPTSPHNGQDPPAPPVD

SEQ ID NO: 194 - protein, 836 aa, Homo sapiens
MAGLNCGVSIALLGVLLLGAARLPRGAEAFEIALPRESNITVLIKLGTPTLLAKPCYIVISKRHITMLSIKSGERIVFTFSCQSPENHFVIEIQKNIDCMSGPCPFGEVQLQPSTSLLPTLNRTFIWDVKAHKSIGLELQFSIPRLRQIGPGESCPDGVTHSISGRIDATVVRIGTFCSNGTVSRIKMQEGVKMALHLPWFHPRNVSGFSIANRSSIKRLCIIESVFEGEGSATLMSANYPEGFPEDELMTWQFVVPAHLRASVSFLNFNLSNCERKEERVEYYIPGSTTNPEVFKLEDKQPGNMAGNFNLSLQGCDQDAQSPGILRLQFQVLVQHPQNESNKIYVVDLSNERAMSLTIEPRPVKQSRKFVPGCFVCLESRTCSSNLTLTSGSKHKISFLCDDLTRLWMNVEKTISCTDHRYCQRKSYSLQVPSDILHLPVELHDFSWKLLVPKDRLSLVLVPAQKLQQHTHEKPCNTSFSYLVASAIPSQDLYFGSFCPGGSIKQIQVKQNISVTLRTFAPSFQQEASRQGLTVSFIPYFKEEGVFTVTPDTKSKVYLRTPNWDRGLPSLTSVSWNISVPRDQVACLTFFKERSGVVCQTGRAFMIIQEQRTRAEEIFSLDEDVLPKPSFHHHSFWVNISNCSPTSGKQLDLLFSVTLTPRTVDLTVILIAAVGGGVLLLSALGLIICCVKKKKKKTNKGPAVGIYNDNINTEMPRQPKKFQKGRKDNDSHVYAVIEDTMVYGHLLQDSSGSFLQPEVDTYRPFQGTMGVCPPSPPTICSRAPTAKLATEEPPPRSPPESESEPYTFSHPNNGDVSSKDTDIPLLNTQEPMEPAE

SEQ ID NO: 195 - protein, 1181 aa, Homo sapiens
MGPERTGAAPLPLLLVLALSQGILNCCLAYNVGLPEAKIFSGPSSEQFGYAVQQFINPKGNWLLVGSPWSGFPENRMGDVYKCPVDLSTATCEKLNLQTSTSIPNVTEMKTNMSLGLILTRNMGTGGFLTCGPLWAQQCGNQYYTTGVCSDISPDFQLSASFSPATQPCPSLIDVVVVCDESNSIYPWDAVKNFLEKFVQGLDIGPTKTQVGLIQYANNPRVVFNLNTYKTKEEMIVATSQTSQYGGDLTNTFGAIQYARKYAYSAASGGRRSATKVMVVVTDGESHDGSMLKAVIDQCNHDNILRFGIAVLGYLNRNALDTKNLIKEIKAIASIPTERYFFNVSDEAALLEKAGTLGEQIFSIEGTVQGGDNFQMEMSQVGFSADYSSQNDILMLGAVGAFGWSGTIVQKTSHGHLIFPKQAFDQILQDRNHSSYLGYSVAAISTGESTHFVAGAPRANYTGQIVLYSVNENGNITVIQAHRGDQIGSYFGSVLCSVDVDKDTITDVLLVGAPMYMSDLKKEEGRVYLFTIKEGILGQHQFLEGPEGIENTRFGSAIAALSDINMDGFNDVIVGSPLENQNSGAVYIYNGHQGTIRTKYSQKILGSDGAFRSHLQYFGRSLDGYGDLNGDSITDVSIGAFGQVVQLWSQSIADVAIEASFTPEKITLVNKNAQIILKLCFSAKFRPTKQNNQVAIVYNITLDADGFSSRVTSRGLFKENNERCLQKNMVVNQAQSCPEHIIYIQEPSDVVNSLDLRVDISLENPGTSPALEAYSETAKVFSIPFHKDCGEDGLCISDLVLDVRQIPAAQEQPFIVSNQNKRLTFSVTLKNKRESAYNTGIVVDFSENLFFASFSLPVDGTEVTCQVAASQKSVACDVGYPALKREQQVTFTINFDFNLQNLQNQASLSFQALSESQEENKADNLVNLKIPLLYDAEIHLTRSTNINFYEISSDGNVPSIVHSFEDVGPKFIFSLKVTTGSVPVSMATVIIHIPQYTKEKNPLMYLTGVQTDKAGDISCNADINPLKIGQTSSSVSFKSENFRHTKELNCRTASCSNVTCWLKDVHMKGEYFVNVTTRIWNGTFASSTFQTVQLTAAAEINTYNPEIYVIEDNTVTIPLMIMKPDEKAEVPTGVIIGSIIAGILLLLALVAILWKLGFFKRKYEKMTKNPDEIDETTELSS

SEQ ID NO: 196 - protein, 904 aa, Homo sapiens
MRQTLPCIYFWGGLLPFGMLCASSTTKCTVSHEVADCSHLKLTQVPDDLPTNITVLNLTHNQLRRLPAANFTRYSQLTSLDVGFNTISKLEPELCQKLPMLKVLNLQHNELSQLSDKTFAFCTNLTELHLMSNSIQKIKNNPFVKQKNLITLDLSHNGLSSTKLGTQVQLENLQELLLSNNKIQALKSEELDIFANSSLKKLELSSNQIKEFSPGCFHAIGRLFGLFLNNVQLGPSLTEKLCLELANTSIRNLSLSNSQLSTTSNTTFLGLKWTNLTMLDLSYNNLNVVGNDSFAWLPQLEYFFLEYNNIQHLFSHSLHGLFNVRYLNLKRSFTKQSISLASLPKIDDFSFQWLKCLEHLNMEDNDIPGIKSNMFTGLINLKYLSLSNSFTSLRTLTNETFVSLAHSPLHILNLTKNKISKIESDAFSWLGHLEVLDLGLNEIGQELTGQEWRGLENIFEIYLSYNKYLQLTRNSFALVPSLQRLMLRRVALKNVDSSPSPFQPLRNLTILDLSNNNIANINDDMLEGLEKLEILDLQHNNLARLWKHANPGGPIYFLKGLSHLHILNLESNGFDEIPVEVFKDLFELKIIDLGLNNLNTLPASVFNNQVSLKSLNLQKNLITSVEKKVFGPAFRNLTELDMRFNPFDCTCESIAWFVNWINETHTNIPELSSHYLCNTPPHYHGFPVRLFDTSSCKDSAPFELFFMINTSILLIFIFIVLLIHFEGWRISFYWNVSVHRVLGFKEIDRQTEQFEYAAYIIHAYKDKDWVWEHFSSMEKEDQSLKFCLEERDFEAGVFELEAIVNSIKRSRKIIFVITHHLLKDPLCKRFKVHHAVQQAIEQNLDSIILVFLEEIPDYKLNHALCLRRGMFKSHCILNWPVQKERIGAFRHKLQVALGSKNSVH

SEQ ID NO: 197 - protein, 710 aa, Homo sapiens
MLTFFLVSGGSLWLFVEFVLSLLEKMQTQEILRILRLPELGDLGQFFRSLSATTLVSMGALAAILAYWFTHRPKALQPPCNLLMQSEEVEDSGGARRSVIGSGPQLLTHYYDDARTMYQVFRRGLSISGNGPCLGFRKPKQPYQWLSYQEVADRAEFLGSGLLQHNCKACTDQFIGVFAQNRPEWIIVELACYTYSMVVVPLYDTLGPGAIRYIINTADISTVIVDKPQKAVLLLEHVERKETPGLKLIILMDPFEEALKERGQKCGVVIKSMQAVEHFLLSGLWPRESPGSCGNPKGAMLTHGNVVADFSGFLKVTESQWAPTCADVHISYLPLAHMFERMVQSVVYCHGGRVGFFQGDIRLLSDDMKALCPTIFPVVPRLLNRMYDKIFSQANTPLKRWLLEFAAKRKQAEVRSGIIRNDSIWDELFFNKIQASLGGCVRMIVTGAAPASPTVLGFLRAALGCQVYEGYGQTECTAGCTFTTPGDWTSGHVGAPLPCNHIKLVDVEELNYWACKGEGEICVRGPNVFKGYLKDPDRTKEALDSDGWLHTGDIGKWLPAGTLKIIDRKKHIFKLAQGEYVAPEKIENIYIRSQPVAQIYVHGDSLKAFLVGIVVPDPEVMPSWAQKRGIEGTYADLCTNKDLKKAILEDMVRLGKESGLHSFEQVKAIHIHSDMFSVQNGLLTPTLKAKRPELREYFKKQIEELYSISM

SEQ ID NO: 198 - protein, 714 aa, Homo sapiens
MLQNPQEKSQAYPRRRRPGCYAYRQNPEAIAAAAMYTFLPDNFSPAKPKPSKDLKPLLGSAVLGLLLVLAAVVAWCYYSVSLRKAERLRAELLDLKAGGFSIRNQKGEQVFRLAFRSGALDLDSCSRDGALLGCSLTADGLPLHFFIQTVRPKDTVMCYRVRWEEAAPGRAVEHAMFLGDAAAHWYGGAEMRTQHWPIRLDGQQEPQPFVTSDVYSSDAAFGGILERYWLSSRAAAIKVNDSVPFHLGWNSTERSLRLQARYHDTPYKPPAGRAAAPELSYRVCVGSDVTSIHKYMVRRYFNKPSRVPAPEAFRDPIWSTWALYGRAVDQDKVLRFAQQIRLHHFNSSHLEIDDMYTPAYGDFDFDEVKFPNASDMFRRLRDAGFRVTLWVHPFVNYNSSRFGEGVERELFVREPTGRLPALVRWWNGIGAVLDFTHPKARDWFQGHLRRLRSRYSVASFKFDAGEVSYLPRDFSTYRPLPDPSVWSRRYTEMALPFFSLAEVRVGYQSQNISCFFRLVDRDSVWGYDLGLRSLIPAVLTVSMLGYPFILPDMVGGNAVPQRTAGGDVPERELYIRWLEVAAFMPAMQFSIPPWRYDAEVVAIAQKFAALRASLVAPLLLELAGEVTDTGDPIVRPLWWIAPGDETAHRIDSQFLIGDTLLVAPVLEPGKQERDVYLPAGKWRSYKGELFDKTPVLLTDYPVDLDEIAYFTWAS

SEQ ID NO: 199 - protein, 369 aa, Homo sapiens
MADSAQAQKLVYLVTGGCGFLGEHVVRMLLQREPRLGELRVFDQHLGPWLEELKTGPVRVTAIQGDVTQAHEVAAAVAGAHVVIHTAGLVDVFGRASPKTIHEVNVQGTRNVIEACVQTGTRFLVYTSSMEVVGPNTKGHPFYRGNEDTPYEAVHRHPYPCSKALAEWLVLEANGRKVRGGLPLVTCALRPTGIYGEGHQIMRDFYRQGLRLGGWLFRAIPASVEHGRVYVGNVAWMHVLAARELEQRATLMGGQVYFCYDGSPYRSYEDFNMEFLGPCGLRLVGARPLLPYWLLVFLAALNALLQWLLRPLVLYAPLLNPYTLAVANTTFTVSTDKAQRHFGYEPLFSWEDSRTRTILWVQAATGSAQ

SEQ ID NO: 200 - protein, 292 aa, Homo sapiens
MGRQKELVSRCGEMLHIRYRLLRQALAECLGTLILVMFGCGSVAQVVLSRGTHGGFLTINLAFGFAVTLGILIAGQVSGAHLNPAVTFAMCFLAREPWIKLPIYTLAQTLGAFLGAGIVFGLYYDAIWHFADNQLFVSGPNGTAGIFATYPSGHLDMINGFFDQFIGTASLIVCVLAIVDPYNNPVPRGLEAFTVGLVVLVIGTSMGFNSGYAVNPARDFGPRLFTALAGWGSAVFTTGQHWWWVPIVSPLLGSIAGVFVYQLMIGCHLEQPPPSNEEENVKLAHVKHKEQI

SEQ ID NO: 201 - protein, 651 aa, Homo sapiens
MKDYDELLKYYELHETIGTGGFAKVKLACHILTGEMVAIKIMDKNTLGSDLPRIKTEIEALKNLRHQHICQLYHVLETANKIFMVLEYCPGGELFDYIISQDRLSEEETRVVFRQIVSAVAYVHSQGYAHRDLKPENLLFDEYHKLKLIDFGLCAKPKGNKDYHLQTCCGSLAYAAPELIQGKSYLGSEADVWSMGILLYVLMCGFLPFDDDNVMALYKKIMRGKYDVPKWLSPSSILLLQQMLQVDPKKRISMKNLLNHPWIMQDYNYPVEWQSKNPFIHLDDDCVTELSVHHRNNRQTMEDLISLWQYDHLTATYLLLLAKKARGKPVRLRLSSFSCGQASATPFTDIKSNNWSLEDVTASDKNYVAGLIDYDWCEDDLSTGAATPRTSQFTKYWTESNGVESKSLTPALCRTPANKLKNKENVYTPKSAVKNEEYFMFPEPKTPVNKNQHKREILTTPNRYTTPSKARNQCLKETPIKIPVNSTGTDKLMTGVISPERRCRSVELDLNQAHMEETPKRKGAKVFGSLERGLDKVITVLTRSKRKGSARDGPRRLKLHYNVTTTRLVNPDQLLNEIMSILPKKHVDFVQKGYTLKCQTQSDFGKVTMQFELEVCQLQKPDVVGIRRQRLKGDAWVYKRLVEDILSSCKV

SEQ ID NO: 202 - protein, 619 aa, Homo sapiens
MPWQAFRRFGQKLVRRRTLESGMAETRLARCLSTLDLVALGVGSTLGAGVYVLAGEVAKDKAGPSIVICFLVAALSSVLAGLCYAEFGARVPRSGSAYLYSYVTVGELWAFTTGWNLILSYVIGTASVARAWSSAFDNLIGNHISKTLQGSIALHVPHVLAEYPDFFALGLVLLLTGLLALGASESALVTKVFTGVNLLVLGFVMISGFVKGDVHNWKLTEEDYELAMAELNDTYSLGPLGSGGFVPFGFEGILRGAATCFYAFVGFDCIATTGEEAQNPQRSIPMGIVISLSVCFLAYFAVSSALTLMMPYYQLQPESPLPEAFLYIGWAPARYVVAVGSLCALSTSLLGSMFPMPRVIYAMAEDGLLFRVLARIHTGTRTPIIATVVSGIIAAFMAFLFKLTDLVDLMSIGTLLAYSLVSICVLILRYQPDQETKTGEEVELQEEAITTESEKLTLWGLFFPLNSIPTPLSGQIVYVCSSLLAVLLTALCLVLAQWSVPLLSGDLLWTAVVVLLLLLIIGIIVVIWRQPQSSTPLHFKVPALPLLPLMSIFVNIYLMMQMTAGTWARFGVWMLIGFAIYFGYGIQHSLEEIKSNQPSRKSRAKTVDLDPGTLYVHSV

SEQ ID NO: 203 - protein, 59 aa, Homo sapiens
MRQLKGKPKKETSKDKKERKQAMQEARQQITTVVLPTLAVVVLLIVVFVYVATRPTITE

SEQ ID NO: 204 - protein, 3298 aa, Homo sapiens
MQKELGIVPSCPGMKSPRPHLLLPLLLLLLLLLGAGVPGAWGQAGSLDLQIDEEQPAGTLIGDISAGLPAGTAAPLMYFISAQEGSGVGTDLAIDEHSGVVRTARVLDREQRDRYRFTAVTPDGATVEVTVRVADINDHAPAFPQARAALQVPEHTAFGTRYPLEPARDADAGRLGTQGYALSGDGAGETFRLETRPGPDGTPVPELVVTGELDRENRSHYMLQLEAYDGGSPPRRAQALLDVTLLDINDHAPAFNQSRYHAVVSESLAPGSPVLQVFASDADAGVNGAVTYEINRRQSEGDGPFSIDAHTGLLQLERPLDFEQRRVHELVVQARDGGAHPELGSAFVTVHVRDANDNQPSMTVIFLSADGSPQVSEAAPPGQLVARISVSDPDDGDFAHVNVSLEGGEGHFALSTQDSVIYLVCVARRLDREERDAYNLRVTATDSGSPPLRAEAAFVLHVTDVNDNAPAFDRQLYRPEPLPEVALPGSFVVRVTARDPDQGTNGQVTYSLAPGAHTHWFSIDPTSGIITTAASLDYELEPQPQLIVVATDGGLPPLASSATVSVALQDVNDNEPQFQRTFYNASLPEGTQPGTCFLQVTATDADSGPFGLLSYSLGAGLGSSGSPPFRIDAHSGDVCTTRTLDRDQGPSSFDFTVTAVDGGGLKSMVYVKVFLSDENDNPPQFYPREYAASISAQSPPGTAVLRLRAHDPDQGSHGRLSYHILAGNSPPLFTLDEQSGLLTVAWPLARRANSVVQLEIGAEDGGGLQAEPSARVDISIVPGTPTPPIFEQLQYVFSVPEDVAPGTSVGIVQAHNPPGRLAPVTLSLSGGDPRGLFSLDAVSGLLQTLRPLDRELLGPVLELEVRAGSGVPPAFAVARVRVLLDDVNDNSPAFPAPEDTVLLPPNTAPGTPIYTLRALDPDSGVNSRVTFTLLAGGGGAFTVDPTTGHVRLMRPLGPSGGPAHELELEARDGGSPPRTSHFRLRVVVQDVGTRGLAPRFNSPTYRVDLPSGTTAGTQVLQVQAQAPDGGPITYHLAAEGASSPFGLEPQSGWLWVRAALDREAQELYILKVMAVSGSKAELGQQTGTATVRVSILNQNEHSPRLSEDPTFLAVAENQPPGTSVGRVFATDRDSGPNGRLTYSLQQLSEDSKAFRIHPQTGEVTTLQTLDREQQSSYQLLVQVQDGGSPPRSTTGTVHVAVLDLNDNSPTFLQASGAAGGGLPIQVPDRVPPGTLVTTLQAKDPDEGENGTILYTLTGPGSELFSLHPHSGELLTAAPLIRAERPHYVLTLSAHDQGSPPRSASLQLLVQVLPSARLAEPPPDLAERDPAAPVPVVLTVTAAEGLRPGSLLGSVAAPEPAGVGALTYTLVGGADPEGTFALDAASGRLYLARPLDFEAGPPWRALTVRAEGPGGAGARLLRVQVQVQDENEHAPAFARDPLALALPENPEPGAALYTFRASDADGPGPNSDVRYRLLRQEPPVPALRLDARTGALSAPRGLDRETTPALLLLVEATDRPANASRRRAARVSARVFVTDENDNAPVFASPSRVRLPEDQPPGPAALHVVARDPDLGEAARVSYRLASGGDGHFRLHSSTGALSVVRPLDREQRAEHVLTVVASDHGSPPRSATQVLTVSVADVNDEAPTFQQQEYSVLLRENNPPGTSLLTLRATDPDVGANGQVTYGGVSSESFSLDPDTGVLTTLRALDREEQEEINLTVYAQDRGSPPQLTHVTVRVAVEDENDHAPTFGSAHLSLEVPEGQDPQTLTMLRASDPDVGANGQLQYRILDGDPSGAFVLDLASGEFGTMRPLDREVEPAFQLRIEARDGGQPALSATLLLTVTVLDANDHAPAFPVPAYSVEVPEDVPAGTLLLQLQAHDPDAGANGHVTYYLGAGTAGAFLLEPSSGELRTAAALDREQCPSYTFSVSAVDGAAAGPLSTTVSVTITVRDVNDHAPTFPTSPLRLRLPRPGPSFSTPTLALATLRAEDRDAGANASILYRLAGTPPPGTTVDSYTGEIRVARSPVALGPRDRVLFIVATDLGRPARSATGVIIVGLQGEAERGPRFPRASSEATIRENAPPGTPIVSPRAVHAGGTNGPITYSILSGNEKGTFSIQPSTGAITVRSAEGLDFEVSPRLRLVLQAESGGAFAFTVLTLTLQDANDNAPRFLRPHYVAFLPESRPLEGPLLQVEADDLDQGSGGQISYSLAASQPARGLFHVDPTTGTITTTAILDREIWAETRLVLMATDRGSPALVGSATLTVMVIDTNDNRPTIPQPWELRVSEDALLGSEIAQVTGNDVDSGPVLWYVLSPSGPQDPFSVGRYGGRVSLTGPLDFEQCDRYQLQLLAHDGPHEGRANLTVLVEDVNDNAPAFSQSLYQVMLLEHTPPGSAILSVSATDRDSGANGHISYHLASPADGFSVDPNNGTLFTIVGTVALGHDGSGAVDVVLEARDHGAPGRAARATVHVQLQDQNDHAPSFTLSHYRVAVTEDLPPGSTLLTLEATDADGSRSHAAVDYSIISGNWGRVFQLEPRLAEAGESAGPGPRALGCLVLLEPLDFESLTQYNLTVAAADRGQPPQSSVVPVTVTVLDVNDNPPVFTRASYRVTVPEDTPVGAELLHVEASDADPGPHGLVRFTVSSGDPSGLFELDESSGTLRLAHALDCETQARHQLVVQAADPAGAHFALAPVTIEVQDVNDHGPAFPLNLLSTSVAENQPPGTLVTTLHAIDGDAGAFGRLRYSLLEAGPGPEGREAFALNSSTGELRARVPFDYEHTESFRLLVGAADAGNLSASVTVSVLVTGEDEYDPVFLAPAFHFQVPEGARRGHSLGHVQATDEDGGADGLVLYSLATSSPYFGINQTTGALYLRVDSRAPGSGTATSGGGGRTRREAPRELRLEVIARGPLPGSRSATVPVTVDITHTALGLAPDLNLLLVGAVAASLGVVVVLALAALVLGLVRARSRKAEAAPGPMSQAAPLASDSLQKLGREPPSPPPSEHLYHQTLPSYGGPGAGGPYPRGGSLDPSHSSGRGSAEAAEDDEIRMINEFPRVASVASSLAARGPDSGIQQDADGLSDTSCEPPAPDTWYKGRKAGLLLPGAGATLYREEGPPATATAFLGGCGLSPAPTGDYGFPADGKPCVAGALTAIVAGEEELRGSYNWDYLLSWCPQFQPLASVFTEIARLKDEARPCPPAPRIDPPPLITAVAHPGAKSVPPKPANTAAARAIFPPASHRSPISHEGSLSSAAMSPSFSPSLSPLAARSPVVSPFGVAQGPSASALSAESGLEPPDDTELHI

SEQ ID NO: 205 - protein, 1449 aa, Homo sapiens
MEPSALRKAGSEQEEGFEGLPRRVTDLGMVSNLRRSNSSLFKSWRLQCPFGNNDKQESLSSWIPENIKKKECVYFVESSKLSDAGKVVCQCGYTHEQHLEEATKPHTFQGTQWDPKKHVQEMPTDAFGDIVFTGLSQKVKKYVRVSQDTPSSVIYHLMTQHWGLDVPNLLISVTGGAKNFNMKPRLKSIFRRGLVKVAQTTGAWIITGGSHTGVMKQVGEAVRDFSLSSSYKEGELITIGVATWGTVHRREGLIHPTGSFPAEYILDEDGQGNLTCLDSNHSHFILVDDGTHGQYGVEIPLRTRLEKFISEQTKERGGVAIKIPIVCVVLEGGPGTLHTIDNATTNGTPCVVVEGSGRVADVIAQVANLPVSDITISLIQQKLSVFFQEMFETFTESRIVEWTKKIQDIVRRRQLLTVFREGKDGQQDVDVAILQALLKASRSQDHFGHENWDHQLKLAVAWNRVDIARSEIFMDEWQWKPSDLHPTMTAALISNKPEFVKLFLENGVQLKEFVTWDTLLYLYENLDPSCLFHSKLQMHHVAQVLRELLGDFTQPLYPRPRHNDRLRLLLPVPHVKLNVQGVSLRSLYKRSSGHVTFTMDPIRDLLIWAIVQNRRELAGIIWAQSQDCIAAALACSKILKELSKEEEDTDSSEEMLALAEEYEHRAIGVFTECYRKDEERAQKLLTRVSEAWGKTTCLQLALEAKDMKFVSHGGIQAFLTKVWWGQLSVDNGLWRVTLCMLAFPLLLTGLISFREKRLQDVGTPAARARAFFTAPVVVFHLNILSYFAFLCLFAYVLMVDFQPVPSWCECAIYLWLFSLVCEEMRQLFYDPDECGLMKKAALYFSDFWNKLDVGAILLFVAGLTCRLIPATLYPGRVILSLDFILFCLRLMHIFTISKTLGPKIIIVKRMMKDVFFFLFLLAVWVVSFGVAKQAILIHNERRVDWLFRGAVYHSYLTIFGQIPGYIDGVNFNPEHCSPNGTDPYKPKCPESDATQQRPAFPEWLTVLLLCLYLLFTNILLLNLLIAMFNYTFQQVQEHTDQIWKFQRHDLIEEYHGRPAAPPPFILLSHLQLFIKRVVLKTPAKRHKQLKNKLEKNEEAALLSWEIYLKENYLQNRQFQQKQRPEQKIEDISNKVDAMVDLLDLDPLKRSGSMEQRLASLEEQVAQTAQALHWIVRTLRASGFSSEADVPTLASQKAAEEPDAEPGGRKKTEEPGDSYHVNARHLLYPNCPVTRFPVPNEKVPWETEFLIYDPPFYTAERKDAAAMDPMGENPMGRTGLRGRGSLSCFGPNHTLYPMVTRWRRNEDGAICRKSIKKMLEVLVVKLPLSEHWALPGGSREPGEMLPRKLKRILRQEHWPSFENLLKCGMEVYKGYMDDPRNTDNAWIETVAVSVHFQDQNDVELNRLNSNLHACDSGASIRWQVVDRRIPLYANHKTLLQKAAAEFGAHY

SEQ ID NO: 206 - protein, 1503 aa, Homo sapiens
MEPSALRKAGSEQEEGFEGLPRRVTDLGMVSNLRRSNSSLFKSWRLQCPFGNNDKQESLSSWIPENIKKKECVYFVESSKLSDAGKVVCQCGYTHEQHLEEATKPHTFQGTQWDPKKHVQEMPTDAFGDIVFTGLSQKVKKYVRVSQDTPSSVIYHLMTQHWGLDVPNLLISVTGGAKNFNMKPRLKSIFRRGLVKVAQTTGAWIITGGSHTGVMKQVGEAVRDFSLSSSYKEGELITIGVATWGTVHRREGLIHPTGSFPAEYILDEDGQGNLTCLDSNHSHFILVDDGTHGQYGVEIPLRTRLEKFISEQTKERGGVAIKIPIVCVVLEGGPGTLHTIDNATTNGTPCVVVEGSGRVADVIAQVANLPVSDITISLIQQKLSVFFQEMFETFTESRIVEWTKKIQDIVRRRQLLTVFREGKDGQQDVDVAILQALLKASRSQDHFGHENWDHQLKLAVAWNRVDIARSEIFMDEWQWKPSDLHPTMTAALISNKPEFVKLFLENGVQLKEFVTWDTLLYLYENLDPSCLFHSKLQKVLVEDPERPACAPAAPRLQMHHVAQVLRELLGDFTQPLYPRPRHNDRLRLLLPVPHVKLNVQGVSLRSLYKRSSGHVTFTMDPIRDLLIWAIVQNRRELAGIIWAQSQDCIAAALACSKILKELSKEEEDTDSSEEMLALAEEYEHRAIGVFTECYRKDEERAQKLLTRVSEAWGKTTCLQLALEAKDMKFVSHGGIQAFLTKVWWGQLSVDNGLWRVTLCMLAFPLLLTGLISFREKRLQDVGTPAARARAFFTAPVVVFHLNILSYFAFLCLFAYVLMVDFQPVPSWCECAIYLWLFSLVCEEMRQLFYDPDECGLMKKAALYFSDFWNKLDVGAILLFVAGLTCRLIPATLYPGRVILSLDFILFCLRLMHIFTISKTLGPKIIIVKRMMKDVFFFLFLLAVWVVSFGVAKQAILIHNERRVDWLFRGAVYHSYLTIFGQIPGYIDGVNFNPEHCSPNGTDPYKPKCPESDATQQRPAFPEWLTVLLLCLYLLFTNILLLNLLIAMFNYTFQQVQEHTDQIWKFQRHDLIEEYHGRPAAPPPFILLSHLQLFIKRVVLKTPAKRHKQLKNKLEKNEEAALLSWEIYLKENYLQNRQFQQKQRPEQKIEDISNKVDAMVDLLDLDPLKRSGSMEQRLASLEEQVAQTAQALHWIVRTLRASGFSSEADVPTLASQKAAEEPDAEPGGRKKTEEPGDSYHVNARHLLYPNCPVTRFPVPNEKVPWETEFLIYDPPFYTAERKDAAAMDPMGDTLEPLSTIQYNVVDGLRDRRSFHGPYTVQAGLPLNPMGRTGLRGRGSLSCFGPNHTLYPMVTRWRRNEDGAICRKSIKKMLEVLVVKLPLSEHWALPGGSREPGEMLPRKLKRILRQEHWPSFENLLKCGMEVYKGYMDDPRNTDNAWIETVAVSVHFQDQNDVELNRLNSNLHACDSGASIRWQVVDRRIPLYANHKTLLQKAAAEFGAHY

SEQ ID NO: 207 - protein, 270 aa, Homo sapiens
MSPHPTALLGLVLCLAQTIHTQEEDLPRPSISAEPGTVIPLGSHVTFVCRGPVGVQTFRLERDSRSTYNDTEDVSQASPSESEARFRIDSVREGNAGLYRCIYYKPPKWSEQSDYLELLVKGPTQRPSDNSHNEHAPASQGLKAEHLYILIGVSVVFLFCLLLLVLFCLHRQNQIKQGPPRSKDEEQKPQQRPDLAVDVLERTADKATVNGLPEKDRETDTSALAAGSSQEVTYAQLDHWALTQRTARAVSPQSTKPMAESITYAAVARH

SEQ ID NO: 208 - protein, 252 aa, Homo sapiens
MAQLCGLRRSRAFLALLGSLLLSGVLAADRERSIHDFCLVSKVVGRCRASMPRWWYNVTDGSCQLFVYGGCDGNSNNYLTKEECLKKCATVTENATGDLATSRNAADSSVPSAPRRQDSEDHSSDMFNYEEYCTANAVTGPCRASFPRWYFDVERNSCNNFIYGGCRGNKNSYRSEEACMLRCFRQQENPPLPLGSKVVVLAGLFVMVLILFLGASMVYLIRVARRNQERALRTVWSSGDDKEQLVKNTYVL

SEQ ID NO: 209 - protein, 282 aa, Homo sapiens
MGSPGMVLGLLVQIWALQEASSLSVQQGPNLLQVRQGSQATLVCQVDQATAWERLRVKWTKDGAILCQPYITNGSLSLGVCGPQGRLSWQAPSHLTLQLDPVSLNHSGAYVCWAAVEIPELEEAEGNITRLFVDPDDPTQNRNRIASFPGFLFVLLGVGSMGVAAIVWGAWFWGRRSCQQRDSGNSPGNAFYSNVLYRPRGAPKKSEDCSGEGKDQRGQSIYSTSFPQPAPRQPHLASRPCPSPRPCPSPRPGHPVSMVRVSPRPSPTQQPRPKGFPKVGEE

SEQ ID NO: 210 - protein, 361 aa, Homo sapiens
MAPTEPWSPSPGSAPWDYSGLDGLEELELCPAGDLPYGYVYIPALYLAAFAVGLLGNAFVVWLLAGRRGPRRLVDTFVLHLAAADLGFVLTLPLWAAAAALGGRWPFGDGLCKLSSFALAGTRCAGALLLAGMSVDRYLAVVKLLEARPLRTPRCALASCCGVWAVALLAGLPSLVYRGLQPLPGGQDSQCGEEPSHAFQGLSLLLLLLTFVLPLVVTLFCYCRISRRLRRPPHVGRARRNSLRIIFAIESTFVGSWLPFSALRAVFHLARLGALPLPCPLLLALRWGLTIATCLAFVNSCANPLIYLLLDRSFRARALDGACGRTGRLARRISSASSLSRDDSSVFRCRAQAANTASASW

SEQ ID NO: 211 - protein, 482 aa, Homo sapiens
MASFSAETNSTDLLSQPWNEPPVILSMVILSLTFLLGLPGNGLVLWVAGLKMQRTVNTIWFLHLTLADLLCCLSLPFSLAHLALQGQWPYGRFLCKLIPSIIVLNMFASVFLLTAISLDRCLVVFKPIWCQNHRNVGMACSICGCIWVVAFVMCIPVFVYREIFTTDNHNRCGYKFGLSSSLDYPDFYGDPLENRSLENIVQPPGEMNDRLDPSSFQTNDHPWTVPTVFQPQTFQRPSADSLPRGSARLTSQNLYSNVFKPADVVSPKIPSGFPIEDHETSPLDNSDAFLSTHLKLFPSASSNSFYESELPQGFQDYYNLGQFTDDDQVPTPLVAITITRLVVGFLLPSVIMIACYSFIVFRMQRGRFAKSQSKTFRVAVVVVAVFLVCWTPYHIFGVLSLLTDPETPLGKTLMSWDHVCIALASANSCFNPFLYALLGKDFRKKARQSIQGILEAAFSEELTRSTHCPSNNVISERNSTTV

SEQ ID NO: 212 - protein, 183 aa, Homo sapiens
MQAPRAALVFALVIALVPVGRGNYEELENSGDTTVESERPNKVTIPSTFAAVTIKETLNANINSTNFAPDENQLEFILMVLIPLILLVLLLLSVVFLATYYKRKRTKQEPSSQGSQSALQTYELGSENVKVPIFEEDTPSVMEIEMEELDKWMNSMNRNADFECLPTLKEEKESNHNPSDSES

SEQ ID NO: 213 - protein, 233 aa, Homo sapiens
MSQSNRELVVDFLSYKLSQKGYSWSQFSDVEENRTEAPEGTESEMETPSAINGNPSWHLADSPAVNGATGHSSSLDAREVIPMAAVKQALREAGDEFELRYRRAFSDLTSQLHITPGTAYQSFEQVVNELFRDGVNWGRIVAFFSFGGALCVESVDKEMQVLVSRIAAWMATYLNDHLEPWIQENGGWDTFVELYGNNAAAESRKGQERFNRWFLTGMTVAGVVLLGSLFSRK

SEQ ID NO: 214 - protein, 218 aa, Homo sapiens
MYALWRTGPTTSPALLTLLSKGVPRPAAPWTMSPSSVALICLLRYGQLLEQSRHSWVNTTALITGCTNAAGLLVVGNFQVDHARSLHYVGAGVAFPAGLLFVCLHCALSYQGATAPLDLAVAYLRSVLAVIAFITLVLSGVFFVHESSQLQHGAALCEWVCVIDILIFYGTFSYEFGAVSSDTLVAALQPTPGRACKSSGSSSTSTHLNCAPESIAMI

SEQ ID NO: 215 - protein, 265 aa, Homo sapiens
MSEEVTYADLQFQNSSEMEKIPEIGKFGEKAPPAPSHVWRPAALFLTLLCLLLLIGLGVLASMFHVTLKIEMKKMNKLQNISEELQRNISLQLMSNMNISNKIRNLSTTLQTIATKLCRELYSKEQEHKCKPCPRRWIWHKDSCYFLSDDVQTWQESKMACAAQNASLLKINNKNALEFIKSQSRSYDYWLGLSPEEDSTRGMRVDNIINSSAWVIRNAPDLNNMYCGYINRLYVQYYHCTYKKRMICEKMANPVQLGSTYFREA

SEQ ID NO: 216 - protein, 811 aa, Homo sapiens
MKEEAFLRRRFSLCPPSSTPQKVDPRKLTRNLLLSGDNELYPLSPGKDMEPNGPSLPRDEGPPTPSSATKVPPAEYRLCNGSDKECVSPTARVTKKETLKAQKENYRQEKKRATRQLLSALTDPSVVIMADSLKGPKGESVGSITQPLPSSYLIFRAASESDGRCWLDALELALRCSSLLRLGTCKPGRDGEPGTSPDASPSSLCGLPASATVHPDQDLFPLNGSSLENDAFSDKSERENPEESDTETQDHSRKTESGSDQSETPGAPVRRGTTYVEQVQEELGELGEASQVETVSEENKSLMWTLLKQLRPGMDLSRVVLPTFVLEPRSFLNKLSDYYYHADLLSRAAVEEDAYSRMKLVLRWYLSGFYKKPKGIKKPYNPILGETFRCCWFHPQTDSRTFYIAEQVSHHPPVSAFHVSNRKDGFCISGSITAKSRFYGNSLSALLDGKATLTFLNRAEDYTLTMPYAHCKGILYGTMTLELGGKVTIECAKNNFQAQLEFKLKPFFGGSTSINQISGKITSGEEVLASLSGHWDRDVFIKEEGSGSSALFWTPSGEVRRQRLRQHTVPLEEQTELESERLWQHVTRAISKGDQHRATQEKFALEEAQRQRARERQESLMPWKPQLFHLDPITQEWHYRYEDHSPWDPLKDIAQFEQDGILRTLQQEAVARQTTFLGSPGPRHERSGPDQRLRKASDQPSGHSQATESSGSTPESCPELSDEEQDGDFVPGGESPCPRCRKEARRLQALHEAILSIREAQQELHRHLSAMLSSTARAAQAPTPGLLQSPRSWFLLCVFLACQLFINHILK

SEQ ID NO: 217 - protein, 798 aa, Homo sapiens
MNLQPIFWIGLISSVCCVFAQTDENRCLKANAKSCGECIQAGPNCGWCTNSTFLQEGMPTSARCDDLEALKKKGCPPDDIENPRGSKDIKKNKNVTNRSKGTAEKLKPEDITQIQPQQLVLRLRSGEPQTFTLKFKRAEDYPIDLYYLMDLSYSMKDDLENVKSLGTDLMNEMRRITSDFRIGFGSFVEKTVMPYISTTPAKLRNPCTSEQNCTSPFSYKNVLSLTNKGEVFNELVGKQRISGNLDSPEGGFDAIMQVAVCGSLIGWRNVTRLLVFSTDAGFHFAGDGKLGGIVLPNDGQCHLENNMYTMSHYYDYPSIAHLVQKLSENNIQTIFAVTEEFQPVYKELKNLIPKSAVGTLSANSSNVIQLIIDAYNSLSSEVILENGKLSEGVTISYKSYCKNGVNGTGENGRKCSNISIGDEVQFEISITSNKCPKKDSDSFKIRPLGFTEEVEVILQYICECECQSEGIPESPKCHEGNGTFECGACRCNEGRVGRHCECSTDEVNSEDMDAYCRKENSSEICSNNGECVCGQCVCRKRDNTNEIYSGKFCECDNFNCDRSNGLICGGNGVCKCRVCECNPNYTGSACDCSLDTSTCEASNGQICNGRGICECGVCKCTDPKFQGQTCEMCQTCLGVCAEHKECVQCRAFNKGEKKDTCTQECSYFNITKVESRDKLPQPVQPDPVSHCKEKDVDDCWFYFTYSVNGNNEVMVHVVENPECPTGPDIIPIVAGVVAGIVLIGLALLLIWKLLMIIHDRREFAKFEKEKMNAKWDTGENPIYKSAVTTVVNPKYEGK

SEQ ID NO: 218 - protein, 359 aa, Homo sapiens
MKSPFYRCQNTTSVEKGNSAVMGGVLFSTGLLGNLLALGLLARSGLGWCSRRPLRPLPSVFYMLVCGLTVTDLLGKCLLSPVVLAAYAQNRSLRVLAPALDNSLCQAFAFFMSFFGLSSTLQLLAMALECWLSLGHPFFYRRHITLRLGALVAPVVSAFSLAFCALPFMGFGKFVQYCPGTWCFIQMVHEEGSLSVLGYSVLYSSLMALLVLATVLCNLGAMRNLYAMHRRLQRHPRSCTRDCAEPRADGREASPQPLEELDHLLLLALMTVLFTMCSLPVIYRAYYGAFKDVKEKNRTSEEAEDLRALRFLSVISIVDPWIFIIFRSPVFRIFFHKIFIRPLRYRSRCSNSTNMESSL

SEQ ID NO: 219 - protein, 257 aa, Homo sapiens
MVSWMICRLVVLVFGMLCPAYASYKAVKTKNIREYVRWMMYWIVFALFMAAEIVTDIFISWFPFYYEIKMAFVLWLLSPYTKGASLLYRKFVHPSLSRHEKEIDAYIVQAKERSYETVLSFGKRGLNIAASAAVQAATKSQGALAGRLRSFSMQDLRSISDAPAPAYHDPLYLEDQVSHRRPPIGYRAGGLQDSDTEDECWSDTEAVPRAPARPREKPLIRSQSLRVVKRKPPVREGTSRSLKVRTRKKTVPSDVDS

SEQ ID NO: 220 - protein, 336 aa, Homo sapiens
MNNNTTCIQPSMISSMALPIIYILLCIVGVFGNTLSQWIFLTKIGKKTSTHIYLSHLVTANLLVCSAMPFMSIYFLKGFQWEYQSAQCRVVNFLGTLSMHASMFVSLLILSWIAISRYATLMQKDSSQETTSCYEKIFYGHLLKKFRQPNFARKLCIYIWGVVLGIIIPVTVYYSVIEATEGEESLCYNRQMELGAMISQIAGLIGTTFIGFSFLVVLTSYYSFVSHLRKIRTCTSIMEKDLTYSSVKRHLLVIQILLIVCFLPYSIFKPIFYVLHQRDNCQQLNYLIETKNILTCLASARSSTDPIIFLLLDKTFKKTLYNLFTKSNSAHMQSYG

SEQ ID NO: 221 - protein, 963 aa, Homo sapiens
MGLPEPGPLRLLALLLLLLLLLLLQLQHLAAAAADPLLGGQGPAKDCEKDQFQCRNERCIPSVWRCDEDDDCLDHSDEDDCPKKTCADSDFTCDNGHCIHERWKCDGEEECPDGSDESEATCTKQVCPAEKLSCGPTSHKCVPASWRCDGEKDCEGGADEAGCATLCAPHEFQCGNRSCLAAVFVCDGDDDCGDGSDERGCADPACGPREFRCGGDGGGACIPERWVCDRQFDCEDRSDEAAELCGRPGPGATSAPAACATASQFACRSGECVHLGWRCDGDRDCKDKSDEADCPLGTCRGDEFQCGDGTCVLAIKHCNQEQDCPDGSDEAGCLQGLNECLHNNGGCSHICTDLKIGFECTCPAGFQLLDQKTCGDIDECKDPDACSQICVNYKGYFKCECYPGYEMDLLTKNCKAAAGKSPSLIFTNRHEVRRIDLVKRNYSRLIPMLKNVVALDVEVATNRIYWCDLSYRKIYSAYMDKASDPKEQEVLIDEQLHSPEGLAVDWVHKHIYWTDSGNKTISVATVDGGRRRTLFSRNLSEPRAIAVDPLRGFMYWSDWGDQAKIEKSGLNGVDRQTLVSDNIEWPNGITLDLLSQRLYWVDSKLHQLSSIDFSGGNRKTLISSTDFLSHPFGIAVFEDKVFWTDLENEAIFSANRLNGLEISILAENLNNPHDIVIFHELKQPRAPDACELSVQPNGGCEYLCLPAPQISSHSPKYTCACPDTMWLGPDMKRCYRAPQSTSTTTLASTMTRTVPATTRAPGTTVHRSTYQNHSTETPSLTAAVPSSVSVPRAPSISPSTLSPATSNHSQHYANEDSKMGSTVTAAVIGIIVPIVVIALLCMSGYLIWRNWKRKNTKSMNFDNPVYRKTTEEEDEDELHIGRTAQIGHVYPAAISSFDRPLWAEPCLGETREPEDPAPALKELFVLPGEPRSQLHQLPKNPLSELPVVKSKRVALSLEDDGLP

SEQ ID NO: 222 - protein, 664 aa, Homo sapiens
MAAVGPPQQQVRMAHQQVWAALEVALRVPCLYIIDAIFNSYPDSSQSRFCIVLQIFLRLFGVFASSIVLILSQRSLFKFYTYSSAFLLAATSVLVNYYASLHIDFYGAYNTSAFGIELLPRKGPSLWMALIVLQLTFGIGYVTLLQIHSIYSQLIILDLLVPVIGLITELPLHIRETLLFTSSLILTLNTVFVLAVKLKWFYYSTRYVYLLVRHMYRIYGLQLLMEDTWKRIRFPDILRVFWLTRVTAQATVLMYILRMANETDSFFISWDDFWDLICNLIISGCDSTLTVLGMSAVISSVAHYLGLGILAFIGSTEEDDRRLGFVAPVLFFILALQTGLSGLRPEERLIRLSRNMCLLLTAVLHFIHGMTDPVLMSLSASHVSSFRRHFPVLFVSACLFILPVLLSYVLWHHYALNTWLFAVTAFCVELCLKVIVSLTVYTLFMIDGYYNVLWEKLDDYVYYVRSTGSIIEFIFGVVMFGNGAYTMMFESGSKIRAFMMCLHAYFNIYLQAKNGWKTFMNRRTAVKKINSLPEIKGSRLQEINDVCAICYHEFTTSARITPCNHYFHALCLRKWLYIQDTCPMCHQKVYIEDDIKDNSNVSNNNGFIPPNETPEEAVREAAAESDRELNEDDSTDCDDDVQRERNGVIQHTGAAAEEFNDDTD

SEQ ID NO: 223 - protein, 342 aa, Homo sapiens
MAEHDYHEDYGFSSFNDSSQEEHQDFLQFSKVFLPCMYLVVFVCGLVGNSLVLVISIFYHKLQSLTDVFLVNLPLADLVFVCTLPFWAYAGIHEWVFGQVMCKSLLGIYTINFYTSMLILTCITVDRFIVVVKATKAYNQQAKRMTWGKVTSLLIWVISLLVSLPQIIYGNVFNLDKLICGYHDEAISTVVLATQMTLGFFLPLLTMIVCYSVIIKTLLHAGGFQKHRSLKIIFLVMAVFLLTQMPFNLMKFIRSTHWEYYAMTSFHYTIMVTEAIAYLRACLNPVLYAFVSLKFRKNFWKLVKDIGCLPYLGVSHQWKSSEDNSKTFSASHNVEATSMFQL

SEQ ID NO: 224 - protein, 296 aa, Homo sapiens
MRGQRSLLLGPARLCLRLLLLLGYRRRCPPLLRGLVQRWRYGKVCLRSLLYNSFGGSDTAVDAAFEPVYWLVDNVIRWFGVGRNDIATVSICKKCIYPKPARTHHCSICNRCVLKMDHHCPWLNNCVGHYNHRYFFSFCFFMTLGCVYCSYGSWDLFREAYAAIETYHQTPPPTFSFRERMTHKSLVYLWFLCSSVALALGALTVWHAVLISRGETSIERHINKKERRRLQAKGRVFRNPYNYGCLDNWKVFLGVDTGRHWLTRVLLPSSHLPHGNGMSWEPPPWVTAHSASVMAV

SEQ ID NO: 225 - protein, 332 aa, Homo sapiens
MLLETQDALYVALELVIAALSVAGNVLVCAAVGTANTLQTPTNYFLVSLAAADVAVGLFAIPFAITISLGFCTDFYGCLFLACFVLVLTQSSIFSLLAVAVDRYLAICVPLRYKSLVTGTRARGVIAVLWVLAFGIGLTPFLGWNSKDSATNNCTEPWDGTTNESCCLVKCLFENVVPMSYMVYFNFFGCVLPPLLIMLVIYIKIFLVACRQLQRTELMDHSRTTLQREIHAAKSLAMIVGIFALCWLPVHAVNCVTLFQPAQGKNKPKWAMNMAILLSHANSVVNPIVYAYRNRDFRYTFHKIISRYLLCQADVKSGNGQAGVQPALGVGL

SEQ ID NO: 226 - protein, 647 aa, Homo sapiens
MPGKMVVILGASNILWIMFAASQAFKIETTPESRYLAQIGDSVSLTCSTTGCESPFFSWRTQIDSPLNGKVTNEGTTSTLTMNPVSFGNEHSYLCTATCESRKLEKGIQVEIYSFPKDPEIHLSGPLEAGKPITVKCSVADVYPFDRLEIDLLKGDHLMKSQEFLEDADRKSLETKSLEVTFTPVIEDIGKVLVCRAKLHIDEMDSVPTVRQAVKELQVYISPKNTVISVNPSTKLQEGGSVTMTCSSEGLPAPEIFWSKKLDNGNLQHLSGNATLTLIAMRMEDSGIYVCEGVNLIGKNRKEVELIVQAFPRDPEIEMSGGLVNGSSVTVSCKVPSVYPLDRLEIELLKGETILENIEFLEDTDMKSLENKSLEMTFIPTIEDTGKALVCQAKLHIDDMEFEPKQRQSTQTLYVNVAPRDTTVLVSPSSILEEGSSVNMTCLSQGFPAPKILWSRQLPNGELQPLSENATLTLISTKMEDSGVYLCEGINQAGRSRKEVELIIQVTPKDIKLTAFPSESVKEGDTVIISCTCGNVPETWIILKKKAETGDTVLKSIDGAYTIRKAQLKDAGVYECESKNKVGSQLRSLTLDVQGRENNKDYFSPELLVLYFASSLIIPAIGMIIYFARKANMKGSYSLVEAQKSKV

SEQ ID NO: 227 - protein, 265 aa, Homo sapiens
MNMSVLTLQEYEFEKQFNENEAIQWMQENWKKSFLFSALYAAFIFGGRHLMNKRAKFELRKPLVLWSLTLAVFSIFGALRTGAYMVYILMTKGLKQSVCDQGFYNGPVSKFWAYAFVLSKAPELGDTIFIILRKQKLIFLHWYHHITVLLYSWYSYKDMVAGGGWFMTMNYGVHAVMYSYYALRAAGFRVSRKFAMFITLSQITQMLMGCVVNYLVFCWMQHDQCHSHFQNIFWSSLMYLSYLVLFCHFFFEAYIGKMRKTTKAE

SEQ ID NO: 228 - protein, 413 aa, Homo sapiens [sequence omitted]

SEQ ID NO: 229 - protein, 387 aa, Homo sapiens
MPVPASWPHPPGPFLLLTLLLGLTEVAGEEELQMIQPEKLLLVTVGKTATLHCTVTSLLPVGPVLWFRGVGPGRELIYNQKEGHFPRVTTVSDLTKRNNMDFSIRISSITPADVGTYYCVKFRKGSPENVEFKSGPGTEMALGAKPSAPVVLGPAARTTPEHTVSFTCESHGFSPRDITLKWFKNGNELSDFQTNVDPTGQSVAYSIRSTARVVLDPWDVRSQVICEVAHVTLQGDPLRGTANLSEAIRVPPTLEVTQQPMRVGNQVNVTCQVRKFYPQSLQLTWSENGNVCQRETASTLTENKDGTYNWTSWFLVNISDQRDDVVLTCQVKHDGQLAVSKRLALEVTVHQKDQSSDATPGPASSLTALLLIAVLLGPIYVPWKQKT

SEQ ID NO: 230 - protein, 116 aa, Homo sapiens
MAGIELERCQQQANEVTEIMRNNFGKVLERGVKLAELQQRSDQLLDMSSTFNKTTQNLAQKKCWENIRYRICVGLVVVGVLLIILIVLLVVFLPQSSDSSSAPRTQDAGIASGPGN

SEQ ID NO: 231 - protein, 426 aa, Homo sapiens
MTPLCLNCSVLPGDLYPGGARNPMACNGSAARGHFDPEDLNLTDEALRLKYLGPQQTELFMPICATYLLIFVVGAVGNGLTCLVILRHKAMRTPTNYYLFSLAVSDLLVLLVGLPLELYEMWHNYPFLLGVGGCYFRTLLFEMVCLASVLNVTALSVERYVAVVHPLQARSMVTRAHVRRVLGAVWGLAMLCSLPNTSLHGIRQLHVPCRGPVPDSAVCMLVRPRALYNMVVQTTALLFFCLPMAIMSVLYLLIGLRLRRERLLLMQEAKGRGSAAARSRYTCRLQQHDRGRRQVTKMLFVLVVVFGICWAPFHADRVMWSVVSQWTDGLHLAFQHVHVISGIFFYLGSAANPVLYSLMSSRFRETFQEALCLGACCHRLRPRHSSHSLSRMTTGSTLCDVGSLGSWVHPLAGNDGPEAQQETDPS

SEQ ID NO: 232 - protein, 459 aa, Homo sapiens
MTILGTTFGMVFSLLQVVSGESGYAQNGDLEDAELDDYSFSCYSQLEVNGSQHSLTCAFEDPDVNITNLEFEICGALVEVKCLNFRKLQEIYFIETKKFLLIGKSNICVKVGEKSLTCKKIDLTTIVKPEAPFDLSVVYREGANDFVVTFNTSHLQKKYVKVLMHDVAYRQEKDENKWTHVNLSSTKLTLLQRKLQPAAMYEIKVRSIPDHYFKGFWSEWSPSYYFRTPEINNSSGEMDPILLTISILSFFSVALLVILACVLWKKRIKPIVWPSLPDHKKTLEHLCKKPRKNLNVSFNPESFLDCQIHRVDDIQARDEVEGFLQDTFPQQLEESEKQRLGGDVQSPNCPSEDVVITPESFGRDSSLTCLAGNVSACDAPILSSSRSLDCRESGKNGPHVYQDLLLSLGTTNSTLPPPFSLQSGILTLNPVAQGQPILTSLGSNQEEAYVTMSSFYQNQ

SEQ ID NO: 233 - protein, 454 aa, Homo sapiens
MAQPLAFILDVPETPGDQGQGPSPYDESEVHDSFQQLIQEQSQCTAQEGLELQQREREVTGSSQQTLWRPEGTQSTATLRILASMPSRTIGRSRGAIISQYYNRTVQLRCRSSRPLLGNFVRSAWPSLRLYDLELDPTALEEEEKQSLLVKELQSLAVAQRDHMLRGMPLSLAEKRSLREKSRTPRGKWRGQPGSGGVCSCCGRLRYACVLALHSLGLALLSALQALMPWRYALKRIGGQFGSSVLSYFLFLKTLLAFNALLLLLLVAFIMGPQVAFPPALPGPAPVCTGLELLTGAGCFTHTVMYYGHYSNATLNQPCGSPLDGSQCTPRVGGLPYNMPLAYLSTVGVSFFITCITLVYSMAHSFGESYRVGSTSGIHAITVFCSWDYKVTQKRASRLQQDNIRTRLKGEDKIFLINKLHSIYERKEREERSRVGTTEEAAAPPALLTDEQDA

SEQ ID NO: 234 - protein, 518 aa, Homo sapiens
MALERLCSVLKVLLITVLVVEGIAVAQKTQDGQNIGIKHIPATQCGIWVRTSNGGHFASPNYPDSYPPNKECIYILEAAPRQRIELTFDEHYYIEPSFECRFDHLEVRDGPFGFSPLIDRYCGVKSPPLIRSTGRFMWIKFSSDEELEGLGFRAKYSFIPDPDFTYLGDCQFELSGADGIVRSSQVEQEEKTKPGQAVDCIWTIKATPKAKIYLRFLDYQMEHSNECKRNFVAVYDGSSSIENLKAKFCSTVANDVMLKTGIGVIRMWADEGSRLSRFRMLFTSFVEPPCTSSTFFCHSNMCINNSLVCNGVQNCAYPWDENHCKEKKKAGVFEQITKTHGTIIGITSGIVLVLLIISILVQVKQPRKKVMACKTAFNKTGFQEVFDPPHYELFSLRDKEISADLADLSEELDNYQKMRRSSTASRCIHDHHCGSQASSVKQSRTNLSSMELPFRNDFAQPQPMKTFNSTFKKSSYTFKQGHECPEQALEDRVMEEIPCEIYVRGREDSAQASISIDF

SEQ ID NO: 235 - protein, 1479 aa, Homo sapiens
MGPGRPAPAPWPRHLLRCVLLLGCLHLGRPGAPGDAALPEPNVFLIFSHGLQGCLEAQGGQVRVTPACNTSLPAQRWKWVSRNRLFNLGTMQCLGTGWPGTNTTASLGMYECDREALNLRWHCRTLGDQLSLLLGARTSNISKPGTLERGDQTRSGQWRIYGSEEDLCALPYHEVYTIQGNSHGKPCTIPFKYDNQWFHGCTSTGREDGHLWCATTQDYGKDERWGFCPIKSNDCETFWDKDQLTDSCYQFNFQSTLSWREAWASCEQQGADLLSITEIHEQTYINGLLTGYSSTLWIGLNDLDTSGGWQWSDNSPLKYLNWESDQPDNPSEENCGVIRTESSGGWQNRDCSIALPYVCKKKPNATAEPTPPDRWANVKVECEPSWQPFQGHCYRLQAEKRSWQESKKACLRGGGDLVSIHSMAELEFITKQIKQEVEELWIGLNDLKLQMNFEWSDGSLVSFTHWHPFEPNNFRDSLEDCVTIWGPEGRWNDSPCNQSLPSICKKAGQLSQGAAEEDHGCRKGWTWHSPSCYWLGEDQVTYSEARRLCTDHGSQLVTITNRFEQAFVSSLIYNWEGEYFWTALQDLNSTGSFFWLSGDEVMYTHWNRDQPGYSRGGCVALATGSAMGLWEVKNCTSFRARYICRQSLGTPVTPELPGPDPTPSLTGSCPQGWASDTKLRYCYKVFSSERLQDKKSWVQAQGACQELGAQLLSLASYEEEHFVANMLNKIFGESEPEIHEQHWFWIGLNRRDPRGGQSWRWSDGVGFSYHNFDRSRHDDDDIRGCAVLDLASLQWVAMQCDTQLDWICKIPRGTDVREPDDSPQGRREWLRFQEAEYKFFEHHSTWAQAQRICTWFQAELTSVHSQAELDFLSHNLQKFSRAQEQHWWIGLHTSESDGRFRWTDGSIINFISWAPGKPRPVGKDKKCVYMTASREDWGDQRCLTALPYICKRSNVTKETQPPDLPTTALGGCPSDWIQFLNKCFQVQGQEPQSRVKWSEAQFSCEQQEAQLVTITNPLEQAFITASLPNVTFDLWIGLHASQRDFQWVEQEPLMYANWAPGEPSGPSPAPSGNKPTSCAVVLHSPSAHFTGRWDDRSCTEETHGFICQKGTDPSLSPSPAALPPAPGTELSYLNGTFRLLQKPLRWHDALLLCESRNASLAYVPDPYTQAFLTQAARGLRTPLWIGLAGEEGSRRYSWVSEEPLNYVGWQDGEPQQPGGCTYVDVDGAWRTTSCDTKLQGAVCGVSSGPPPPRRISYHGSCPQGLADSAWIPFREHCYSFHMELLLGHKEARQRCQRAGGAVLSILDEMENVFVWEHLQSYEGQSRGAWLGMNFNPKGGTLVWQDNTAVNYSNWGPPGLGPSMLSHNSCYWIQSNSGLWRPGACTNITMGVVCKLPRAEQSSFSPSALPENPAALVVVLMAVLLLLALLTAALILYRRRQSIERGAFEGARYSRSSSSPTEATEKNILVSDMEMNEQQE

SEQ ID NO: 236 - protein, 142 aa, Homo sapiens
MESARENIDLQPGSSDPRSQPINLNHYATKKSVAESMLDVALFMSNAMRLKAVLEQGPSSHYYTTLVTLISLSLLLQVVIGVLLVVIARLNLNEVEKQWRLNQLNNAATILVFFTVVINVFITAFGAHKTGFLAARASRNPL

SEQ ID NO: 237 - protein, 757 aa, Homo sapiens
MLLRLLLAWAAAGPTLGQDPWAAEPRAACGPSSCYALFPRRRTFLEAWRACRELGGDLATPRTPEEAQRVDSLVGAGPASRLLWIGLQRQARQCQLQRPLRGFTWTTGDQDTAFTNWAQPASGGPCPAQRCVALEASGEHRWLEGSCTLAVDGYLCQFGFEGACPALQDEAGQAGPAVYTTPFHLVSTEFEWLPFGSVAAVQCQAGRGASLLCVKQPEGGVGWSRAGPLCLGTGCSPDNGGCEHECVEEVDGHVSCRCTEGFRLAADGRSCEDPCAQAPCEQQCEPGGPQGYSCHCRLGFRPAEDDPHRCVDTDECQIAGVCQQMCVNYVGGFECYCSEGHELEADGISCSPAGAMGAQASQDLGDELLDDGEDEEDEDEAWKAFNGGWTEMPGILWMEPTQPPDFALAYRPSFPEDREPQIPYPEPTWPPPLSAPRVPYHSSVLSVTRPVVVSATHPTLPSAHQPPVIPATHPALSRDHQIPVIAANYPDLPSAYQPGILSVSHSAQPPAHQPPMISTKYPELFPAHQSPMFPDTRVAGTQTTTHLPGIPPNHAPLVTTLGAQLPPQAPDALVLRTQATQLPIIPTAQPSLTTTSRSPVSPAHQISVPAATQPAALPTLLPSQSPTNQTSPISPTHPHSKAPQIPREDGPSPKLALWLPSPAPTAAPTALGEAGLAEHSQRDDRWLLVALLVPTCVFLVVLLALGIVYCTRCGPHAPNKRITDCYRWVIHAGSKSPTEPMPPRGSLTGVQTCRTSV

SEQ ID NO: 238 - protein, 186 aa, Homo sapiens
MWLPWALLLLWVPASTSMTPASITAAKTSTITTAFPPVSSTTLFAVGATHSASIQEETEEVVNSQLPLLLSLLALLLLLLVGASLLAWRMFQKWIKAGDHSELSQNPKQAATQSELHYANLELLMWPLQEKPAPPREVEVEYSTVASPREELHYASVVFDSNTNRIAAQRPREEEPDSDYSVIRKT

SEQ ID NO: 239 - protein, 338 aa, Homo sapiens
MINSTSTQPPDESCSQNLLITQQIIPVLYCMVFIAGILLNGVSGWIFFYVPSSKSFIIYLKNIVIADFVMSLTFPFKILGDSGLGPWQLNVFVCRVSAVLFYVNMYVSIVFFGLISFDRYYKIVKPLWTSFIQSVSYSKLLSVIVWMLMLLLAVPNIILTNQSVREVTQIKCIELKSELGRKWHKASNYIFVAIFWIVFLLLIVFYTAITKKIFKSHLKSSRNSTSVKKKSSRNIFSIVFVFFVCFVPYHIARIPYTKSQTEAHYSCQSKEILRYMKEFTLLLSAANVCLDPIIYFFLCQPFREILCKKLHIPLKAQNDLDISRIKRGNTTLESTDTL

SEQ ID NO: 240 - protein, 591 aa, Homo sapiens
MVPSSPAVEKQVPVEPGPDPELRSWRHLVCYLCFYGFMAQIRPGESFITPYLLGPDKNFTREQVTNEITPVLSYSYLAVLVPVFLLTDYLRYTPVLLLQGLSFVSVWLLLLLGHSVAHMQLMELFYSVTMAARIAYSSYIFSLVRPARYQRVAGYSRAAVLLGVFTSSVLGQLLVTVGRVSFSTLNYISLAFLTFSVVLALFLKRPKRSLFFNRDDRGRCETSASELERMNPGPGGKLGHALRVACGDSVLARMLRELGDSLRRPQLRLWSLWWVFNSAGYYLVVYYVHILWNEVDPTTNSARVYNGAADAASTLLGAITSFAAGFVKIRWARWSKLLIAGVTATQAGLVFLLAHTRHPSSIWLCYAAFVLFRGSYQFLVPIATFQIASSLSKELCALVFGVNTFFATIVKTIITFIVSDVRGLGLPVRKQFQLYSVYFLILSIIYFLGAMLDGLRHCQRGHHPRQPPAQGLRSAAEEKAAQALSVQDKGLGGLQPAQSPPLSPEDSLGAVGPASLEQRQSDPYLAQAPAPQAAEFLSPVTTPSPCTLCSAQASGPEAADETCPQLAVHPPGVSKLGLQCLPSDGVQNVNQ

SEQ ID NO: 241 - protein, 911 aa, Homo sapiens
MDSRPRAGCCEWLRCCGGGEARPRTVWLGHPEKRDQRYPRNVINNQKYNFFTFLPGVLFNQFKYFFNLYFLLLACSQFVPEMRLGALYTYWVPLGFVLAVTVIREAVEEIRCYVRDKEVNSQVYSRLTARGTVVGVVLYTGRELRSVMNTSNPRSKIGLFDLEVNCLTKILFGALVVVSLVMVALQHFAGRWYLQIIRFLLLFSNIIPISLRVNLDMGKIVYSWVIRRDSKIPGTVVRSSTIPEQLGRISYLLTDKTGTLTQNEMIFKRLHLGTVAYGLDSMDEVQSHIFSIYTQQSQDPPAQKGPTLTTKVRRTMSSRVHEAVKAIALCHNVTPVYESNGVTDQAEAEKQYEDSCRVYQASSPDEVALVQWTESVGLTLVGRDQSSMQLRTPGDQILNFTILQIFPFTYESKRMGIIVRDESTGEITFYMKGADVVMAGIVQYNDWLEEECGNMAREGLRVLVVAKKSLAEEQYQDFEARYVQAKLSVHDRSLKVATVIESLEMEMELLCLTGVEDQLQADVRPTLETLRNAGIKVWMLTGDKLETATCTAKNAHLVTRNQDIHVFRLVTNRGEAHLELNAFRRKHDCALVISGDSLEVCLKYYEYEFMELACQCPAVVCCRCAPTQKAQIVRLLQERTGKLTCAVGDGGNDVSMIQESDCGVGVEGKEGKQASLAADFSITQFKHLGRLLMVHGRNSYKRSAALSQFVIHRSLCISTMQAVFSSVFYFASVPLYQGFLIIGYSTIYTMFPVFSLVLDKDVKSEVAMLYPELYKDLLKGRPLSYKTFLIWVLISIYQGSTIMYGALLLFESEFVHIVAISFTSLILTELLMVALTIQTWHWLMTVAELLSLACYIASLVFLHEFIDVYFIATLSFLWKVSVITLVSCLPLYVLKYLRRRFSPPSYSKLTS

SEQ ID NO: 242 - protein, 780 aa, Homo sapiens
MTHEEHHAAKTLGIGKAIAVLTSGGDAQGMNAAVRAVVRVGIFTGARVFFVHEGYQGLVDGGDHIKEATWESVSMMLQLGGTVIGSARCKDFREREGRLRAAYNLVKRGITNLCVIGGDGSLTGADTFRSEWSDLLSDLQKAGKITDEEATKSSYLNIVGLVGSIDNDFCGTDMTIGTDSALHRIMEIVDAITTTAQSHQRTFVLEVMGRHCGYLALVTSLSCGADWVFIPECPPDDDWEEHLCRRLSETRTRGSRLNIIIVAEGAIDKNGKPITSEDIKNLVVKRLGYDTRVTVLGHVQRGGTPSAFDRILGSRMGVEAVMALLEGTPDTPACVVSLSGNQAVRLPLMECVQVTKDVTKAMDEKKFDEALKLRGRSFMNNWEVYKLLAHVRPPVSKSGSHTVAVMNVGAPAAGMNAAVRSTVRIGLIQGNRVLVVHDGFEGLAKGQIEEAGWSYVGGWTGQGGSKLGTKRTLPKKSFEQISANITKFNIQGLVIIGGFEAYTGGLELMEGRKQFDELCIPFVVIPATVSNNVPGSDFSVGADTALNTICTTCDRIKQSAAGTKRRVFIIETMGGYCGYLATMAGLAAGADAAYIFEEPFTIRDLQANVEHLVQKMKTTVKRGLVLRNEKCNENYTTDFIFNLYSEEGKGIFDSRKNVLGHMQQGGSPTPFDRNFATKMGAKAMNWMSGKIKESYRNGRIFANTPDSGCVLGMRKRALVFQPVAELKDQTDFEHRIPKEQWWLKLRPILKILAKYEIDLDTSDHAHLEHITRKRSGEAAV

SEQ ID NO: 243 - protein, 189 aa, Homo sapiens
MAAKQPPPLMKKHSQTDLVSRLKTRKILGVGGEDDDGEVHRSKISQVLGNEIKFTIREPLGLRVWQFVSAVLFSGIAIMALAFPDQLYDAVFDGAQVTSKTPIRLYGGALLSISLIMWNALYTAEKVIIRWTLLTEACYFGVQFLVVTATLAETGLMSLGILLLLVSRLLFVVISIYYYYQVGRRPKKA

SEQ ID NO: 244 - protein, 1132 aa, Homo sapiens
MPRAPRCRAVRSLLRSHYREVLPLATFVRRLGPQGWRLVQRGDPAAFRALVAQCLVCVPWDARPPPAAPSFRQVSCLKELVARVLQRLCERGAKNVLAFGFALLDGARGGPPEAFTTSVRSYLPNTVTDALRGSGAWGLLLRRVGDDVLVHLLARCALFVLVAPSCAYQVCGPPLYQLGAATQARPPPHASGPRRRLGCERAWNHSVREAGVPLGLPAPGARRRGGSASRSLPLPKRPRRGAAPEPERTPVGQGSWAHPGRTRGPSDRGFCVVSPARPAEEATSLEGALSGTRHSHPSVGRQHHAGPPSTSRPPRPWDTPCPPVYAETKHFLYSSGDKEQLRPSFLLSSLRPSLTGARRLVETIFLGSRPWMPGTPRRLPRLPQRYWQMRPLFLELLGNHAQCPYGVLLKTHCPLRAAVTPAAGVCAREKPQGSVAAPEEEDTDPRRLVQLLRQHSSPWQVYGFVRACLRRLVPPGLWGSRHNERRFLRNTKKFISLGKHAKLSLQELTWKMSVRDCAWLRRSPGVGCVPAAEHRLREEILAKFLHWLMSVYVVELLRSFFYVTETTFQKNRLFFYRKSVWSKLQSIGIRQHLKRVQLRELSEAEVRQHREARPALLTSRLRFIPKPDGLRPIVNMDYVVGARTFRREKRAERLTSRVKALFSVLNYERARRPGLLGASVLGLDDIHRAWRTFVLRVRAQDPPPELYFVKVDVTGAYDTIPQDRLTEVIASIIKPQNTYCVRRYAVVQKAAHGHVRKAFKSHVSTLTDLQPYMRQFVAHLQETSPLRDAVVIEQSSSLNEASSGLFDVFLRFMCHHAVRIRGKSYVQCQGIPQGSILSTLLCSLCYGDMENKLFAGIRRDGLLLRLVDDFLLVTPHLTHAKTFLRTLVRGVPEYGCVVNLRKTVVNFPVEDEALGGTAFVQMPAHGLFPWCGLLLDTRTLEVQSDYSSYARTSIRASLTFNRGFKAGRNMRRKLFGVLRLKCHSLFLDLQVNSLQTVCTNIYKILLLQAYRFHACVLQLPFHQQVWKNPTFFLRVISDTASLCYSILKAKNAGMSLGAKGAAGPLPSEAVQWLCHQAFLLKLTRHRVTYVPLLGSLRTAQTQLSRKLPGTTLTALEAAANPALPSDFKTILD

SEQ ID NO: 245 - protein, 724 aa, Homo sapiens
MKSAKGIENLAFVPSSPDILRRLSASPSQIEVSALSSDPQRENSQPQELQKPQEPQKSPEPSLPSAPPNVSEEKLRSLSLSEFEEGSYGWRNFHPQCLQRCNTPGGFLLHYCLLAVTQGIVVNGLVNISISTVEKRYEMKSSLTGLISSSYDISFCLLSLFVSFFGERGHKPRWLAFAAFMIGLGALVFSLPQFFSGEYKLGSLFEDTCVTTRNSTSCTSSTSSLSNYLYVFILGQLLLGAGGTPLYTLGTAFLDDSVPTHKSSLYIGTGYAMSILGPAIGYVLGGQLLTIYIDVAMGESTDVTEDDPRWLGAWWIGFLLSWIFAWSLIIPFSCFPKHLPGTAEIQAGKTSQAHQSNSNADVKFGKSIKDFPAALKNLMKNAVFMCLVLSTSSEALITTGFATFLPKFIENQFGLTSSFAATLGGAVLIPGAALGQILGGFLVSKFRMTCKNTMKFALFTSGVALTLSFVFMYAKCENEPFAGVSESYNGTGELGNLIAPCNANCNCSRSYYYPVCGDGVQYFSPCFAGCSNPVAHRKPKVYYNCSCIERKTEITSTAETFGFEAKAGKCETHCAKLPIFLCIFFIVIIFTFMAGTPITVSILRCVNHRQRSLALGIQFMVLRLLGTIPGPIIFGFTIDSTCILWDINDCGIKGACWIYDNIKMAHMLVAISVTCKVITMFFNGFAIFLYKPPPSATDVSFHKENAVVTNVLAEQDLNKIVKEG

SEQ ID NO: 246 - protein, 821 aa, Homo sapiens
MVSWGRFICLVVVTMATLSLARPSFSLVEDTTLEPEEPPTKYQISQPEVYVAAPGESLEVRCLLKDAAVISWTKDGVHLGPNNRTVLIGEYLQIKGATPRDSGLYACTASRTVDSETWYFMVNVTDAISSGDDEDDTDGAEDFVSENSNNKRAPYWTNTEKMEKRLHAVPAANTVKFRCPAGGNPMPTMRWLKNGKEFKQEHRIGGYKVRNQHWSLIMESVVPSDKGNYTCVVENEYGSINHTYHLDVVERSPHRPILQAGLPANASTVVGGDVEFVCKVYSDAQPHIQWIKHVEKNGSKYGPDGLPYLKVLKVFAAGVNTTDKEIEVLYIRNVTFEDAGEYTCLAGNSIGISFHSAWLTVLPAPGREKEITASPDYLEIAIYCIGVFLIACMVVTVILCRMKNTTKKPDFSSQPAVHKLTKRIPLRRQVSAESSSSMNSNTPLVRITTRLSSTADTPMLAGVSEYELPEDPKWEFPRDKLTLGKPLGEGCFGQVVMAEAVGIDKDKPKEAVTVAVKMLKDDATEKDLSDLVSEMEMMKMIGKHKNIINLLGACTQDGPLYVIVEYASKGNLREYLRARRPPGMEYSYDINRVPEEQMTFKDLVSCTYQLARGMEYLASQKCIHRDLAARNVLVTENNVMKIADFGLARDINNIDYYKKTTNGRLPVKWMAPEALFDRVYTHQSDVWSFGVLMWEIFTLGGSPYPGIPVEELFKLLKEGHRMDKPANCTNELYMMMRDCWHAVPSQRPTFKQLVEDLDRILTLTTNEEYLDLSQPLEQYSPSYPDTRSSCSSGDDSVFSPDPMPYEPCLPQYPHINGSVKT

SEQ ID NO: 247 - protein, 132 aa, Homo sapiens
MCSAGELLRGGDGGERDEDGDALAEREAAGTGWDPGASPRRRGQRPKESEQDVEDSQNHTGEPVGDDYKKMGTLFGELNKNLINMGFTRMYFGERIVEPVIVIFFWVMLWFLGLQALGLVAVLCLVIIYVQQ

SEQ ID NO: 248 - protein, 635 aa, Homo sapiens
MSVGVSTSAPLSPTSGTSVGMSTFSIMDYVVFVLLLVLSLAIGLYHACRGWGRHTVGELLMADRKMGCLPVALSLLATFQSAVAILGVPSEIYRFGTQYWFLGCCYFLGLLIPAHIFIPVFYRLHLTSAYEYLELRFNKTVRVCGTVTFIFQMVIYMGVVLYAPSLALNAVTGFDLWLSVLALGIVCTVYTALGGLKAVIWTDVFQTLVMFLGQLAVIIVGSAKVGGLGRVWAVASQHGRISGFELDPDPFVRHTFWTLAFGGVFMMLSLYGVNQAQVQRYLSSRTEKAAVLSCYAVFPFQQVSLCVGCLIGLVMFAYYQEYPMSIQQAQAAPDQFVLYFVMDLLKGLPGLPGLFIACLFSGSLSTISSAFNSLATVTMEDLIRPWFPEFSEARAIMLSRGLAFGYGLLCLGMAYISSQMGPVLQAAISIFGMVGGPLLGLFCLGMFFPCANPPGAVVGLLAGLVMAFWIGIGSIVTSMGSSMPPSPSNGSSFSLPTNLTVATVTTLMPLTTFSKPTGLQRFYSLSYLWYSAHNSTTVIVVGLIVSLLTGRMRGRSLNPATIYPVLPKLLSLLPLSCQKRLHCRSYGQDHLDTGLFPEKPRNGVLGDSRDKEAMALDGTAYQGSSSTCILQETSL

SEQ ID NO: 249 - protein, 158 aa, Homo sapiens
MNKQRGTYSEVSLAQDPKRQQRKLKGNKISISGTKQEIFQVELNLQNASSDHQGNDKTYHCKGLLPPPEKLTAEVLGIICIVLMATVLKTIVLIPCIGVLEQNNFSLNRRMQKARHCGHCPEEWITYSNSCYYIGKERRTWEERVCWPVLRRTLICFL

SEQ ID NO: 250 - protein, 386 aa, Homo sapiens
MGLWGQSVPTASSARAGRYPGARTASGTRPWLLDPKILKFVVFIVAVLLPVRVDSATIPRQDEVPQQTVAPQQQRRSLKEEECPAGSHRSEYTGACNPCTEGVDYTIASNNLPSCLLCTVCKSGQTNKSSCTTTRDTVCQCEKGSFQDKNSPEMCRTCRTGCPRGMVKVSNCTPRSDIKCKNESAASSTGKTPAAEETVTTILGMLASPYHYLIIIVVLVIILAVVVVGFSCRKKFISYLKGICSGGGGGPERVHRVLFRRRSCPSRVPGAEDNARNETLSNRYLQPTQVSEQEIQGQELAELTGVTVELPEEPQRLLEQAEAEGCQRRRLLVPVNDADSADISTLLDASATLEEGHAKETIQDQLVGSEKLFYEEDEAGSATSCL

SEQ ID NO: 251 - protein, 377 aa, Homo sapiens
MTQEPFREELAYDRMPTLERGRQDPASYAPDAKPSDLQLSKRLPPCFSHKTWVFSVLMGSCLLVTSGFSLYLGNVFPAEMDYLRCAAGSCIPSAIVSFTVSRRNANVIPNFQILFVSTFAVTTTCLIWFGCKLVLNPSAININFNLILLLLLELLMAATVIIAARSSEEDCKKKKGSMSDSANILDEVPFPARVLKSYSVVEVIAGISAVLGGIIALNVDDSVSGPHLSVTFFWILVACFPSAIASHVAAECPSKCLVEVLIAISSLTSPLLFTASGYLSFSIMRIVEMFKDYPPAIKPSYDVLLLLLLLVLLLQAGLNTGTAIQCVRFKVSARLQGASWDTQNGPQERLAGEVARSPLKEFDKEKAWRAVVVQMAQ

SEQ ID NO: 252 - protein, 333 aa, Homo sapiens
MESSGNPESTTFFYYDLQSQPCENQAWVFATLATTVLYCLVFLLSLVGNSLVLWVLVKYESLESLTNIFILNLCLSDLVFACLLPVWISPYHWGWVLGDFLCKLLNMIFSISLYSSIFFLTIMTIHRYLSVVSPLSTLRVPTLRCRVLVTMAVWVASILSSILDTIFHKVLSSGCDYSELTWYLTSVYQHNLFFLLSLGIILFCYVEILRTLFRSRSKRRHRTVKLIFAIVVAYFLSWGPYNFTLFLQTLFRTQIIRSCEAKQQLEYALLICRNLAFSHCCFNPVLYVFVGVKFRTHLKHVLRQFWFCRLQAPSPASIPHSPGAFAYEGASFY

SEQ ID NO: 253 - protein, 471 aa, Homo sapiens
MPAPQRKHRRGGFSHRCFPTPQTAMTPQPAGPPDGGWGWVVAAAAFAINGLSYGLLRSLGLAFPDLAEHFDRSAQDTAWISALALAVQQAASPVGSALSTRWGARPVVMVGGVLASLGFVFSAFASDLLHLYLGLGLLAGFGWALVFAPALGTLSRYFSRRRVLAVGLALTGNGASSLLLAPALQLLLDTFGWRGALLLLGAITLHLTPCGALLLPLVLPGDPPAPPRSPLAALGLSLFTRRAFSIFALGTALVGGGYFVPYVHLAPHALDRGLGGYGAALVVAVAAMGDAGARLVCGWLADQGWVPLPRLLAVFGALTGLGLWVVGLVPVVGGEESWGGPLLAAAVAYGLSAGSYAPLVFGVLPGLVGVGGVVQATGLVMMLMSLGGLLGPPLSGFLRDETGDFTASFLLSGSLILSGSFIYIGLPRALPSCGPASPPATPPPETGELLPAPQAVLLSPGGPGSTLDTTC

SEQ ID NO: 254 - protein, 1222 aa, Homo sapiens
MPKGGAPPWIMALMFTGHLLFLALLMFAFSTFEESVSNYSEWAVFTDDIDQFKTQKVQDFRPNQKLKKSMLHPSLYFDAGEIQAMRQKSRASHLHLFRAIRSAVTVMLSNPTYYLPPPKHADFAAKWNEIYGNNLPPLALYCLLCPEDKVAFEFVLEYMDRMVGYKDWLVENAPGDEVPIGHSLTGFATAFDFLYNLLDNHRRQKYLEKIWVITEEMYEYSKVRSWGKQLLHNHQATNMIALLTGALVTGVDKGSKANIWKQAVVDVMEKTMFLLNHIVDGSLDEGVAYGSYTAKSVTQYVFLAQRHFNINNLDNNWLKMHFWFYYATLLPGFQRTVGIADSNYNWFYGPESQLVFLDKFILKNGAGNWLAQQIRKHRPKDGPMVPSTAQRWSTLHTEYIWYDPQLTPQPPADYGTAKIHTFPNWGVVTYGAGLPNTQTNTFVSFKSGKLGGRAVYDIVHFQPYSWIDGWRSFNPGHEHPDQNSFTFAPNGQVFVSEALYGPKLSHLNNVLVFAPSPSSQCNKPWEGQLGECAQWLKWTGEEVGDAAGEIITASQHGEMVFVSGEAVSAYSSAMRLKSVYRALLLLNSQTLLVVDHIERQEDSPINSVSAFFHNLDIDFKYIPYKFMNRYNGAMMDVWDAHYKMFWFDHHGNSPMASIQEAEQAAEFKKRWTQFVNVTFQMEPTITRIAYVFYGPYINVSSCRFIDSSNPGLQISLNVNNTEHVVSIVTDYHNLKTRFNYLGFGGFASVADQGQITRFGLGTQAIVKPVRHDRIIFPFGFKFNIAVGLILCISLVILTFQWRFYLSFRKLMRWILILVIALWFIELLDVWSTCSQPICAKWTRTEAEGSKKSLSSEGHHMDLPDVVITSLPGSGAEILKQLFFNSSDFLYIRVPTAYIDIPETELEIDSFVDACEWKVSDIRSGHFRLLRGWLQSLVQDTKLHLQNIHLHEPNRGKLAQYFAMNKDKKRKFKRRESLPEQRSQMKGAFDRDAEYIRALRRHLVYYPSARPVLSLSSGSWTLKLHFFQEVLGASMRALYIVRDPRAWIYSMLYNSKPSLYSLKNVPEHLAKLFKIEGGKGKCNLNSGYAFEYEPLRKELSKSKSNAVSLLSHLWLANTAAALRINTDLLPTSYQLVKFEDIVHFPQKTTERIFAFLGIPLSPASLNQILFATSTNLFYLPYEGEISPTNTNVWKQNLPRDEIKLIENICWTLMDRLGYPKFMD

SEQ ID NO: 255 - protein, 224 aa, Homo sapiens
MNIEVGNISYTGAIISWSSSEPCLEDYYHIMYRPNWNSIFSGYLRYSFHHEEKVPRTISSVVLEHLAPSTLYFLCISCKKAAFPYRHYCTMFHTLDKSPLAPGSSLVDPQISLWVLMAILLACFTAVLAFICLQFWCVRCHEPRWSYRAGHMEEANGLVRWPEEAPDLGQREEDLQGLPLVEMPRKNSRDGAELDPEANQDAPDAGALQRGGGDPPAILPHCGE

SEQ ID NO: 256 - protein, 524 aa, Homo sapiens
MDTESTYSGYSYYSSHSKKSHRQGERTRERHKSPRNKDGRGSEKSVTIQPPTGEPLLGNDSTRTEEVQDDNWGETTTAITGTSEHSISQEDIARISKDMEDSVGLDCKRYLGLTVASFLGLLVFLTPIAFILLPPILWRDELEPCGTICEGLFISMAFKLLILLIGTWALFFRKRRADMPRVFVFRALLLVLIFLFVVSYWLFYGVRILDSRDRNYQGIVQYAVSLVDALLFIHYLAIVLLELRQLQPMFTLQVVRSTDGESRFYSLGHLSIQRAALVVLENYYKDFTIYNPNLLTASKFRAAKHMAGLKVYNVDGPSNNATGQSRAMIAAAARRRDSSHNELYYEEAEHERRVKKRKARLVVAVEEAFIHIQRLQAEEQQKAPGEVMDPREAAQAIFPSMARALQKYLRITRQQNYHSMESILQHLAFCITNGMTPKAFLERYLSAGPTLQYDKDRWLSTQWRLVSDEAVTNGLRDGIVFVLKCLDFSLVVNVKKIPFIILSEEFIDPKSHKFVLRLQSETSV

SEQ ID NO: 257 - protein, 1300 aa, Homo sapiens
MGTGPAQTPRSTRAGPEPSPAPPGPGDTGDSDVTQEGSGPAGIRGGETVIRAGMGDSPGRGAPERRHKAQPGRARKYEWRPEGPTSMGSLGQREDLQDEDRNSAFTWKVQANNRAYNGQFKEKVILCWQRKKYKTNVIRTAKYNFYSFLPLNLYEQFHRVSNLFFLIIIILQSIPDISTLPWFSLSTPMVCLLFIRATRDLVDDMGRHKSDRAINNRPCQILMGKSFKQKKWQDLCVGDVVCLRKDNIVPADMLLLASTEPSSLCYVETVDIDGETNLKFRQALMVTHKELATIKKMASFQGTVTCEAPNSRMHHFVGCLEWNDKKYSLDIGNLLLRGCRIRNTDTCYGLVIYAGFDTKIMKNCGKIHLKRTKLDLLMNKLVVVIFISVVLVCLVLAFGFGFSVKEFKDHHYYLSGVHGSSVAAESFFVFWSFLILLSVTIPMSMFILSEFIYLGNSVFIDWDVQMYYKPQDVPAKARSTSLNDHLGQVEYIFSDKTGTLTQNILTFNKCCISGRVYGPDSEATTRPKENPYLWNKFADGKLLFHNAALLHLVRTNGDEAVREFWRLLAICHTVMVRESPRERPDQLLYQAASPDEGALVTAARNFGYVFLSRTQDTVTIMELGEERVYQVLAIMDFNSTRKRMSVLVRKPEGAICLYTKGADTVIFERLHRRGAMEFATEEALAAFAQETLRTLCLAYREVAEDIYEDWQQRHQEASLLLQNRAQALQQLLGATAIEDRLQDGVPETIKCLKKSNIKIWVLTGDKQETAVNIGFACELLSENMLILEEKEISRILETYWENSNNLLTRESLSQVKLALVINGDFLDKLLVSLRKEPRALAQNVNMDEAWQELGQSRRDFLYARRLSLLCRRFGLPLAAPPAQDSRARRSSEVLQERAFVDLASKCQAVICCRVTPKQKALIVALVKKYHQVVTLAIGDGANDINMIKTADVGVGLAGQEGMQAVQNSDFVLGQFCFLQRLLLVHGRWSYVRICKFLRYFFYKSMASMMVQVWFACYNGFTGQPLYEGWFLALFNLLYSTLPVLYIGLFEQDVSAEQSLEKPELYVVGQKDELFNYWVFVQAIAHGVTTSLVNFFMTLWISRDTAGPASFSDHQSFAVVVALSCLLSITMEVILIIKYWTALCVATILLSLGFYAIMTTTTQSFWLFRVSPTTFPFLYADLSVMSSPSILLVVLLSVSINTFPVLALRVIFPALKELRAKEEKVEEGPSEEIFTMEPLPHVHRESRARRSSYAFSHREGYANLITQGTILRRGPGVSSDIASESLDPSDEEAASSPKESQ

SEQ ID NO: 258 - protein, 337 aa, Homo sapiens
MGPRARPALLLLMLLQTAVLQGRLLRSHSLHYLFMGASEQDLGLSLFEALGYVDDQLFVFYDHESRRVEPRTPWVSSRISSQMWLQLSQSLKGWDHMFTVDFWTIMENHNHSKESHTLQVILGCEMQEDNSTEGYWKYGYDGQDHLEFCPDTLDWRAAEPRAWPTKLEWERHKIRARQNRAYLERDCPAQLQQLLELGRGVLDQQVPPLVKVTHHVTSSVTTLRCRALNYYPQNITMKWLKDKQPMDAKEFEPKDVLPNGDGTYQGWITLAVPPGEEQRYTCQVEHPGLDQPLIVIWEPSPSGTLVIGVISGIAVFVVILFIGILFIILRKRQGSSF

SEQ ID NO: 259 - protein, 373 aa, Homo sapiens
MRMEDEDYNTSISYGDEYPDYLDSIVVLEDLSPLEARVTRIFLVVVYSIVCFLGILGNGLVIIIATFKMKKTVNMVWFLNLAVADFLFNVFLPIHITYAAMDYHWVFGTAMCKISNFLLIHNMFTSVFLLTIISSDRCISVLLPVWSQNHRSVRLAYMACMVIWVLAFFLSSPSLVFRDTANLHGKISCFNNFSLSTPGSSSWPTHSQMDPVGYSRHMVVTVTRFLCGFLVPVLIITACYLTIVCKLQRNRLAKTKKPFKIIVTIIITFFLCWCPYHTLNLLELHHTAMPGSVFSLGLPLATALAIANSCMNPILYVFMGQDFKKFKVALFSRLVNALSEDTGHSSYPSHRSFTKMSSMNERTSMNERETGML

SEQ ID NO: 260 - protein, 301 aa, Homo sapiens
MFSHLPFDCVLLLLLLLLTRSSEVEYRAEVGQNAYLPCFYTPAAPGNLVPVCWGKGACPVFECGNVVLRTDERDVNYWTSRYWLNGDFRKGDVSLTIENVTLADSGIYCCRIQIPGIMNDEKFNLKLVIKPAKVTPAPTRQRDFTAAFPRMLTTRGHGPAETQTLGSLPDINLTQISTLANELRDSRLANDLRDSGATIRIGIYIGAGICAGLALALIFGALIFKWYSHSKEKIQNLSLISLANLPPSGLANAVAEGIRSEENIYTIEENVYEVEEPNEYYCYVSSRQQPSQPLGCRFAMP

SEQ ID NO: 261 - protein, 168 aa, Homo sapiens
MGPRARPALLLLMLLQTAVLQGRLLLPPLVKVTHHVTSSVTTLRCRALNYYPQNITMKWLKDKQPMDAKEFEPKDVLPNGDGTYQGWITLAVPPGEEQRYTCQVEHPGLDQPLIVIWEPSPSGTLVIGVISGIAVFVVILFIGILFIILRKRQGSRGAMGHYVLAERE

SEQ ID NO: 262 - protein, 269 aa, Homo sapiens
MERLVIRMPFSHLSTYSLVWVMAAVVLCTAQVQVVTQDEREQLYTPASLKCSLQNAQEALIVTWQKKKAVSPENMVTFSENHGVVIQPAYKDKINITQLGLQNSTITFWNITLEDEGCYMCLFNTFGFGKISGTACLTVYVQPIVSLHYKFSEDHLNITCSATARPAPMVFWKVPRSGIENSTVTLSHPNGTTSVTSILHIKDPKNQVGKEVICQVLHLGTVTDFKQTVNKGYWFSVPLLLSIVSLVILLVLISILLYWKRHRNQDREP

SEQ ID NO: 263 - protein, 805 aa, Homo sapiens
MAQPLAFILDVPETPGDQGQGPSPYDESEVHDSFQQLIQEQSQCTAQEGLELQQREREVTGSSQQTLWRPEGTQSTATLRILASMPSRTIGRSRGAIISQYYNRTVQLRCRSSRPLLGNFVRSAWPSLRLYDLELDPTALEEEEKQSLLVKELQSLAVAQRDHMLRGMPLSLAEKRSLREKSRTPRGKWRGQPGSGGVCSCCGRLRYACVLALHSLGLALLSALQALMPWRYALKRIGGQFGSSVLSYFLFLKTLLAFNALLLLLLVAFIMGPQVAFPPALPGPAPVCTGLELLTGAGCFTHTVMYYGHYSNATLNQPCGSPLDGSQCTPRVGGLPYNMPLAYLSTVGVSFFITCITLVYSMAHSFGESYRVGSTSGIHAITVFCSWDYKVTQKRASRLQQDNIRTRLKELLAEWQLRHSPRSVCGRLRQAAVLGLVWLLCLGTALGCAVAVHVFSEFMIQSPEAAGQEAVLLVLPLVVGLLNLGAPYLCRVLAALEPHDSPVLEVYVAICRNLILKLAILGTLCYHWLGRRVGVLQGQCWEDFVGQELYRFLVMDFVLMLLDTLFGELVWRIISEKKLKRRRKPEFDIARNVLELIYGQTLTWLGVLFSPLLPAVQIIKLLLVFYVKKTSLLANCQAPRRPWLASHMSTVFLTLLCFPAFLGAAVFLCYAVWQVKPSSTCGPFRTLDTMYEAGRVWVRHLEAAGPRVSWLPWVHRYLMENTFFVFLVSALLLAVIYLNIQVVRGQRKVICLLKEQISNEGEDKIFLINKLHSIYERKEREERSRVGTTEEAAAPPALLTDEQDA

SEQ ID NO: 264 - protein, 273 aa, Homo sapiens
MLGQVVTLILLLLLKVYQGKGCQGSADHVVSISGVPLQLQPNSIQTKVDSIAWKKLLPSQNGFHHILKWENGSLPSNTSNDRFSFIVKNLSLLIKAAQQQDSGLYCLEVTSISGKVQTATFQVFVFEFRFWPFLVIIVILSALFLGTLACFCVWRRKRKEKQSETSPKEFLTIYEDVKDLKTRRNHEQEQTFPGGGSTIYSMIQSQSSAPTSQEPAYTLYSLIQPSRKSGSRKRNHSPSFNSTIYEVIGKSQPKAQNPARLSRKELENFDVYS

SEQ ID NO: 265 - protein, 256 aa, Homo sapiens
MGPRARPALLLLMLLQTAVLQGRLLRSHSLHYLFMGASEQDLGLSLFEALGYVDDQLFVFYDHESRRVEPRTPWVSSRISSQMWLQLSQSLKGWDHMFTVDFWTIMENHNHSKVPPLVKVTHHVTSSVTTLRCRALNYYPQNITMKWLKDKQPMDAKEFEPKDVLPNGDGTYQGWITLAVPPGEEQRYTCQVEHPGLDQPLIVIWEPSPSGTLVIGVISGIAVFVVILFIGILFIILRKRQGSRGAMGHYVLAERE

SEQ ID NO: 266 - protein, 378 aa, Homo sapiens
MDLAGLLKSQFLCHLVFCYVFIASGLIINTIQLFTLLLWPINKQLFRKINCRLSYCISSQLVMLLEWWSGTECTIFTDPRAYLKYGKENAIVVLNHKFEIDFLCGWSLSERFGLLGGSKVLAKKELAYVPIIGWMWYFTEMVFCSRKWEQDRKTVATSLQHLRDYPEKYFFLIHCEGTRFTEKKHEISMQVARAKGLPRLKHHLLPRTKGFAITVRSLRNVVSAVYDCTLNFRNNENPTLLGVLNGKKYHADLYVRRIPLEDIPEDDDECSAWLHKLYQEKDAFQEEYYRTGTFPETPMVPPRRPWTLVNWLFWASLVLYPFFQFLVSMIRSGSSLTLASFILVFFVASVGVRWMIGVTEIDKGSAYGNSDSKQKLND

SEQ ID NO: 267 - protein, 146 aa, Homo sapiens
MGRVSGLVPSRFLTLLAHLVVVITLFWSRDSNIQACLPLTFTPEEYDKQDIHPLPLCRLVAALSVTLGLFAVELAGFLSGVSMFNSTQSLISIGAHCSASVALSFFIFERWECTTYWYIFVFCSALPAVTEMALFVTVFGLKKKPF

SEQ ID NO: 268 - protein, 297 aa, Homo sapiens
MTTPRNSVNGTFPAEPMKGPIAMQSGPKPLFRRMSSLVGPTQSFFMRESKTLGAVQIMNGLFHIALGGLLMIPAGIYAPICVTVWYPLWGGIMYIISGSLLAATEKNSRKCLVKGKMIMNSLSLFAAISGMILSIMDILNIKISHFLKMESLNFIRAHTPYINIYNCEPANPSEKNSPSTQYCYSIQSLFLGILSVMLIFAFFQELVIAGIVENEWKRTCSRPKSNIVLLSAEEKKEQTIEIKEEVVGLTETSSQPKNEEDIEIIPIQEEEEEETETNFPEPPQDQESSPIENDSSP

SEQ ID NO: 269 - protein, 716 aa, Homo sapiens
MARMSFVIAACQLVLGLLMTSLTESSIQNSECPQLCVCEIRPWFTPQSTYREATTVDCNDLRLTRIPSNLSSDTQVLLLQSNNIAKTVDELQQLFNLTELDFSQNNFTNIKEVGLANLTQLTTLHLEENQITEMTDYCLQDLSNLQELYINHNQISTISAHAFAGLKNLLRLHLNSNKLKVIDSRWFDSTPNLEILMIGENPVIGILDMNFKPLANLRSLVLAGMYLTDIPGNALVGLDSLESLSFYDNKLVKVPQLALQKVPNLKFLDLNKNPIHKIQEGDFKNMLRLKELGINNMGELVSVDRYALDNLPELTKLEATNNPKLSYIHRLAFRSVPALESLMLNNNALNAIYQKTVESLPNLREISIHSNPLRCDCVIHWINSNKTNIRFMEPLSMFCAMPPEYKGHQVKEVLIQDSSEQCLPMISHDSFPNRLNVDIGTTVFLDCRAMAEPEPEIYWVTPIGNKITVETLSDKYKLSSEGTLEISNIQIEDSGRYTCVAQNVQGADTRVATIKVNGTLLDGTQVLKIYVKQTESHSILVSWKVNSNVMTSNLKWSSATMKIDNPHITYTARVPVDVHEYNLTHLQPSTDYEVCLTVSNIHQQTQKSCVNVTTKNAAFAVDISDQETSTALAAVMGSMFAVISLASIAVYFAKRFKRKNYHHSLKKYMQKTSSIPLNELYPPLINLWEGDSEKDKDGSADTKPTQVDTSRSYYMW

SEQ ID NO: 270 - protein, 399 aa, Homo sapiens
MAELLRSLQDSQLVARFQRRCGLFPAPDEGPRENGADPTERAARVPGVEHLPAANGKGGEAPANGLRRAAAPEAYVQKYVVKNYFYYYLFQFSAALGQEVFYITFLPFTHWNIDPYLSRRLIIIWVLVMYIGQVAKDVLKWPRPSSPPVVKLEKRLIAEYGMPSTHAMAATAIAFTLLISTMDRYQYPFVLGLVMAVVFSTLVCLSRLYTGMHTVLDVLGGVLITALLIVLTYPAWTFIDCLDSASPLFPVCVIVVPFFLCYNYPVSDYYSPTRADTTTILAAGAGVTIGFWINHFFQLVSKPAESLPVIQNIPPLTTYMLVLGLTKFAVGIVLILLVRQLVQNLSLQVLYSWFKVVTRNKEARRRLEIEVPYKFVTYTSVGICATTFVPMLHRFLGLP

SEQ ID NO: 271 - protein, 322 aa, Homo sapiens
MSGELPPNINIKEPRWDQSTFIGRANHFFTVTDPRNILLTNEQLESARKIVHDYRQGIVPPGLTENELWRAKYIYDSAFHPDTGEKMILIGRMSAQVPMNMTITGCMMTFYRTTPAVLFWQWINQSFNAVVNYTNRSGDAPLTVNELGTAYVSATTGAVATALGLNALTKHVSPLIGRFVPFAAVAAANCINIPLMRQRELKVGIPVTDENGNRLGESANAAKQAITQVVVSRILMAAPGMAIPPFIMNTLEKKAFLKRFPWMSAPIQVGLVGFCLVFATPLCCALFPQKSSMSVTSLEAELQAKIQESHPELRRVYFNKGL

SEQ ID NO: 272 - protein, 370 aa, Homo sapiens
MSASAATGVFVLSLSAIPVTYVFNHLAAQHDSWTIVGVAALILFLVALLARVLVKRKPPRDPLFYVYAVFGFTSVVNLIIGLEQDGIIDGFMTHYLREGEPYLNTAYGHMICYWDGSAHYLMYLVMVAAIAWEETYRTIGLYWVGSIIMSVVVFVPGNIVGKYGTRICPAFFLSIPYTCLPVWAGFRIYNQPSENYNYPSKVIQEAQAKDLLRRPFDLMLVVCLLLATGFCLFRGLIALDCPSELCRLYTQFQEPYLKDPAAYPKIQMLAYMFYSVPYFVTALYGLVVPGCSWMPDITLIHAGGLAQAQFSHIGASLHARTAYVYRVPEEAKILFLALNIAYGVLPQLLAYRCIYKPEFFIKTKAEEKVE

SEQ ID NO: 273 - protein, 1925 aa, Homo sapiens
MAPRAAGGAPLSARAAAASPPPFQTPPRCPVPLLLLLLLGAARAGALEIQRRFPSPTPTNNFALDGAAGTVYLAAVNRLYQLSGANLSLEAEAAVGPVPDSPLCHAPQLPQASCEHPRRLTDNYNKILQLDPGQGLVVVCGSIYQGFCQLRRRGNISAVAVRFPPAAPPAEPVTVFPSMLNVAANHPNASTVGLVLPPAAGAGGSRLLVGATYTGYGSSFFPRNRSLEDHRFENTPEIAIRSLDTRGDLAKLFTFDLNPSDDNILKIKQGAKEQHKLGFVSAFLHPSDPPPGAQSYAYLALNSEARAGDKESQARSLLARICLPHGAGGDAKKLTESYIQLGLQCAGGAGRGDLYSRLVSVFPARERLFAVFERPQGSPAARAAPAALCAFRFADVRAAIRAARTACFVEPAPDVVAVLDSVVQGTGPACERKLNIQLQPEQLDCGAAHLQHPLSILQPLKATPVFRAPGLTSVAVASVNNYTAVFLGTVNGRLLKINLNESMQVVSRRVVTVAYGEPVHHVMQFDPADSGYLYLMTSHQMARVKVAACNVHSTCGDCVGAADAYCGWCALETRCTLQQDCTNSSQQHFWTSASEGPSRCPAMTVLPSEIDVRQEYPGMILQISGSLPSLSGMEMACDYGNNIRTVARVPGPAFGHQIAYCNLLPRDQFPPFPPNQDHVTVEMSVRVNGRNIVKANFTIYDCSRTAQVYPHTACTSCLSAQWPCFWCSQQHSCVSNQSRCEASPNPTSPQDCPRTLLSPLAPVPTGGSQNILVPLANTAFFQGAALECSFGLEEIFEAVWVNESVVRCDQVVLHTTRKSQVFPLSLQLKGRPARFLDSPEPMTVMVYNCAMGSPDCSQCLGREDLGHLCMWSDGCRLRGPLQPMAGTCPAPEIHAIEPLSGPLDGGTLLTIRGRNLGRRLSDVAHGVWIGGVACEPLPDRYTVSEEIVCVTGPAPGPLSGVVTVNASKEGKSRDRFSYVLPLVHSLEPTMGPKAGGTRITIHGNDLHVGSELQVLVNDTDPCTELMRTDTSIACTMPEGALPAPVPVCVRFERRGCVHGNLTFWYMQNPVITAISPRRSPVSGGRTITVAGERFHMVQNVSMAVHHIGREPTLCKVLNSTLITCPSPGALSNASAPVDFFINGRAYADEVAVAEELLDPEEAQRGSRFRLDYLPNPQFSTAKREKWIKHHPGEPLTLVIHKEQDSLGLQSHEYRVKIGQVSCDIQIVSDRIIHCSVNESLGAAVGQLPITIQVGNFNQTIATLQLGGSETAIIVSIVICSVLLLLSVVALFVFCTKSRRAERYWQKTLLQMEEMESQIREEIRKGFAELQTDMTDLTKELNRSQGIPFLEYKHFVTRTFFPKCSSLYEERYVLPSQTLNSQGSSQAQETHPLLGEWKIPESCRPNMEEGISLFSSLLNNKHFLIVFVHALEQQKDFAVRDRCSLASLLTIALHGKLEYYTSIMKELLVDLIDASAAKNPKLMLRRTESVVEKMLTNWMSICMYSCLRETVGEPFFLLLCAIKQQINKGSIDAITGKARYTLSEEWLLRENIEAKPRNLNVSFQGCGMDSLSVRAMDTDTLTQVKEKILEAFCKNVPYSQWPRAEDVDLEWFASSTQSYILRDLDDTSVVEDGRKKLNTLAHYKIPEGASLAMSLIDKKDNTLGRVKDLDTEKYFHLVLPTDELAEPKKSHRQSHRKKVLPEIYLTRLLSTKGTLQKFLDDLFKAILSIREDKPPLAVKYFFDFLEEQAEKRGISDPDTLHIWKTNSLPLRFWVNILKNPQFVFDIDKTDHIDACLSVIAQAFIDACSISDLQLGKDSPTNKLLYAKEIPEYRKIVQRYYKQIQDMTPLSEQEMNAHLAEESRKYQNEFNTNVAMAEIYKYAKRYRPQIMAALEANPTARRTQLQHKFEQVVALMEDNIYECYSEA

SEQ ID NO: 274 - protein, 252 aa, Homo sapiens
MGRLSWQVAAAAAVGLALTLEALPWVLRWLRSRRRRPRREALFFPSQVTCTEALLRAPGAELAELPEGCPCGLPHGESALSRLLRALLAARASLDLCLFAFSSPQLGRAVQLLHQRGVRVRVVTDCDYMALNGSQIGLLRKAGIQVRHDQDPGYMHHKFAIVDKRVLITGSLNWTTQAIQNNRENVLITEDDEYVRLFLEEFERIWEQFNPTKYTFFPPKKSHGSCAPPVSRAGGRLLSWHRTCGTSSESQT

SEQ ID NO: 275 - protein, 1226 aa, Homo sapiens
MDSFDLALLQEWDLESLCVYEPDRNALRRKERERRNQETQQDDGTFNSSYSLFSEPYKTNKGDELSNRIQNTLGNYDEMKDFLTDRSNQSHLVGVPKPGVPQTPVNKIDEHFVADSRAQNQPSSICSTTTSTPAAVPVQQSKRGTMGWQKAGHPPSDGQQRATQQGSLRTLLGDGVGRQQPRAKQVCNVEVGLQTQERPPAMAAKHSSSGHCVQNFPPSLASKPSLVQQKPTAYVRPMDGQDQAPDESPKLKSSSETSVHCTSYRGVPASKPEPARAKAKLSKFSIPKQGEESRSGETNSCVEEIIREMTWLPPLSAIQAPGKVEPTKFPFPNKDSQLVSSGHNNPKKGDAEPESPDNGTSNTSMLEDDLKLSSDEEENEQQAAQRTALRALSDSAVVQQPNCRTSVPSSKGSSSSSSSGSSSSSSDSESSSGSDSETESSSSESEGSKPPHFSSPEAEPASSNKWQLDKWLNKVNPHKPPILIQNESHGSESNQYYNPVKEDVQDCGKVPDVCQPSLREKEIKSTCKEEQRPRTANKAPGSKGVKQKSPPAAVAVAVSAAAPPPAVPCAPAENAPAPARRSAGKKPTRRTERTSAGDGANCHRPEEPAAADALGTSVVVPPEPTKTRPCGNNRASHRKELRSSVTCEKRRTRGLSRIVPKSKEFIETESSSSSSSSDSDLESEQEEYPLSKAQTVAASASSGNDQRLKEAAANGGSGPRAPVGSINARTTSDIAKELEEQFYTLVPFGRNELLSPLKDSDEIRSLWVKIDLTLLSRIPEHLPQEPGVLSAPATKDSESAPPSHTSDTPAEKALPKSKRKRKCDNEDDYREIKKSQGEKDSSSRLATSTSNTLSANHCNMNINSVAIPINKNEKMLRSPISPLSDASKHKYTSEDLTSSSRPNGNSLFTSASSSKKPKADSQLQPHGGDLTKAAHNNSENIPLHKSRPQTKPWSPGSNGHRDCKRQKLVFDDMPRSADYFMQEAKRMKHKADAMVEKFGKALNYAEAALSFIECGNAMEQGPMESKSPYTMYSETVELIRYAMRLKTHSGPNATPEDKQLAALCYRCLALLYWRMFRLKRDHAVKYSKALIDYFKNSSKAAQAPSPWGASGKSTGTPSPMSPNPSPASSVGSQGSLSNASALSPSTIVSIPQRIHQMAANHVSITNSILHSYDYWEMADNLAKENREFFNDLDLLMGPVTLHSSMEHLVQYSQQGLHWLRNSAHLS

SEQ ID NO: 276 - protein, 1349 aa, Homo sapiens
MIWYVATFIASVIGTRGLAAEGAHGLREEPEFVTARAGESVVLRCDVIHPVTGQPPPYVVEWFKFGVPIPIFIKFGYYPPHVDPEYAGRASLHDKASLRLEQVRSEDQGWYECKVLMLDQQYDTFHNGSWVHLTINAPPTFTETPPQYIEAKEGGSITMTCTAFGNPKPIVTWLKEGTLLGASGKYQVSDGSLTVTSVSREDRGAYTCRAYSIQGEAVHTTHLLVQGPPFIVSPPENITVNISQDALLTCRAEAYPGNLTYTWYWQDENVYFQNDLKLRVRILIDGTLIIFRVKPEDSGKYTCVPSNSLGRSPSASAYLTVQYPARVLNMPPVIYVPVGIHGYIRCPVDAEPPATVVKWNKDGRPLQVEKNLGWTLMEDGSIRIEEATEEALGTYTCVPYNTLGTMGQSAPARLVLKDPPYFTVLPGWEYRQEAGRELLIPCAAAGDPFPVITWRKVGKPSRSKHSALPSGSLQFRALSKEDHGEWECVATNVVTSITASTHLTVIGTSPHAPGSVRVQVSMTTANVSWEPGYDGGYEQTFSVWMKRAQFGPHDWLSLPVPPGPSWLLVDTLEPETAYQFSVLAQNKLGTSAFSEVVTVNTLAFPITTPEPLVLVTPPRCLIANRTQQGVLLSWLPPANHSFPIDRYIMEFRVAERWELLDDGIPGTEGEFFAKDLSQDTWYEFRVLAVMQDLISEPSNIAGVSSTDIFPQPDLTEDGLARPVLAGIVATICFLAAAILFSTLAACFVNKQRKRKLKRKKDPPLSITHCRKSLESPLSSGKVSPESIRTLRAPSESSDDQGQPAAKRMLSPTREKELSLYKKTKRAISSKKYSVAKAEAEAEATTPIELISRGPDGRFVMDPAEMEPSLKSRRIEGFPFAEETDMYPEFRQSDEENEDPLVPTSVAALKSQLTPLSSSQESYLPPPAYSPRFQPRGLEGPGGLEGRLQATGQARPPAPRPFHHGQYYGYLSSSSPGEVEPPPFYVPEVGSPLSSVMSSPPLPTEGPFGHPTIPEENGENASNSTLPLTQTPTGGRSPEPWGRPEFPFGGLETPAMMFPHQLPPCDVPESLQPKAGLPRGLPPTSLQVPAAYPGILSLEAPKGWAGKSPGRGPVPAPPAAKWQDRPMQPLVSQGQLRHTSQGMGIPVLPYPEPAEPGAHGGPSTFGLDTRWYEPQPRPRPSPRQARRAEPSLHQVVLQPSRLSPLTQSPLSSRTGSPELAARARPRPGLLQQAEMSEITLQPPAAVSFSRKSTPSTGSPSQSSRSGSPSYRPAMGFTTLATGYPSPPPGPAPAGPGDSLDVFGQTPSPRRTGEELLRPETPPPTLPTSGKLQRDRPAPATSPPERALSKL

SEQ ID NO: 277 - protein, 858 aa, Homo sapiens
MLQTKDLIWTLFFLGTAVSLQVDIVPSQGEISVGESKFFLCQVAGDAKDKDISWFSPNGEKLTPNQQRISVVWNDDSSSTLTIYNANIDDAGIYKCVVTGEDGSESEATVNVKIFQKLMFKNAPTPQEFREGEDAVIVCDVVSSLPPTIIWKHKGRDVILKKDVRFIVLSNNYLQIRGIKKTDEGTYRCEGRILARGEINFKDIQVIVNVPPTIQARQNIVNATANLGQSVTLVCDAEGFPEPTMSWTKDGEQIEQEEDDEKYIFSDDSSQLTIKKVDKNDEAEYICIAENKAGEQDATIHLKVFAKPKITYVENQTAMELEEQVTLTCEASGDPIPSITWRTSTRNISSEEKASWTRPEKQETLDGHMVVRSHARVSSLTLKSIQYTDAGEYICTASNTIGQDSQSMYLEVQYAPKLQGPVAVYTWEGNQVNITCEVFAYPSATISWFRDGQLLPSSNYSNIKIYNTPSASYLEVTPDSENDFGNYNCTAVNRIGQESLEFILVQADTPSSPSIDQVEPYSSTAQVQFDEPEATGGVPILKYKAEWRAVGEEVWHSKWYDAKEASMEGIVTIVGLKPETTYAVRLAALNGKGLGEISAASEFKTQPVQGEPSAPKLEGQMGEDGNSIKVNLIKQDDGGSPIRHYLVRYRALSSEWKPEIRLPSGSDHVMLKSLDWNAEYEVYVVAENQQGKSKAAHFVFRTSAQPTAIPANGSPTSGLSTGAIVGILIVIFVLLLVVVDITCYFLNKCGLFMCIAVNLCGKAGPGAKGKDMEEGKAAFSKDESKEPIVEVRTEEERTPNHDGGKHTEPNETTPLTEPEKGPVEAKPECQETETKPAPAEVKTVPNDATQTKENESKA

SEQ ID NO: 278 - protein, 389 aa, Homo sapiens
MEDSPTMVRVDSPTMVRGENQVSPCQGRRCFPKALGYVTGDMKELANQLKDKPVVLQFIDWILRGISQVVFVNNPVSGILILVGLLVQNPWWALTGWLGTVVSTLMALLLSQDRSLIASGLYGYNATLVGVLMAVFSDKGDYFWWLLLPVCAMSMTCPIFSSALNSMLSKWDLPVFTLPFNMALSMYLSATGHYNPFFPAKLVIPITTAPNISWSDLSALELLKSIPVGVGQIYGCDNPWTGGIFLGAILLSSPLMCLHAAIGSLLGIAAGLSLSAPFEDIYFGLWGFNSSLACIAMGGMFMALTWQTHLLALGCALFTAYLGVGMANFMAEVGLPACTWPFCLATLLFLIMTTKNSNIYKMPLSKVTYPEENRIFYLQAKKRMVESPL

SEQ ID NO: 279 - protein, 360 aa, Homo sapiens
MEDFNMESDSFEDFWKGEDLSNYSYSSTLPPFLLDAAPCEPESLEINKYFVVIIYALVFLLSLLGNSLVMLVILYSRVGRSVTDVYLLNLALADLLFALTLPIWAASKVNGWIFGTFLCKVVSLLKEVNFYSGILLLACISVDRYLAIVHATRTLTQKRYLVKFICLSIWGLSLLLALPVLLFRRTVYSSNVSPACYEDMGNNTANWRMLLRILPQSFGFIVPLLIMLFCYGFTLRTLFKAHMGQKHRAMRVIFAVVLIFLLCWLPYNLVLLADTLMRTQVIQETCERRNHIDRALDATEILGILHSCLNPLIYAFIGQKFRHGLLKILAIHGLISKDSLPKDSRPSFVGSSSGHTSTTL

SEQ ID NO: 280 - protein, 159 aa, Homo sapiens
MELPAVNLKVILLGHWLLTTWGCIVFSGSYAWANFTILALGVWAVAQRDSIDAISMFLGGLLATIFLDIVHISIFYPRVSLTDTGRFGVGMAILSLLLKPLSCCFVYHMYRERGGELLVHTGFLGSSQDRSAYQTIDSAEAPADPFAVPEGRSQDARGY

SEQ ID NO: 281 - protein, 823 aa, Homo sapiens
MGGRVFLVFLAFCVWLTLPGAETQDSRGCARWCPQDSSCVNATACRCNPGFSSFSEIITTPMETCDDINECATLSKVSCGKFSDCWNTEGSYDCVCSPGYEPVSGAKTFKNESENTCQDVDECQQNPRLCKSYGTCVNTLGSYTCQCLPGFKLKPEDPKLCTDVNECTSGQNPCHSSTHCLNNVGSYQCRCRPGWQPIPGSPNGPNNTVCEDVDECSSGQHQCDSSTVCFNTVGSYSCRCRPGWKPRHGIPNNQKDTVCEDMTFSTWTPPPGVHSQTLSRFFDKVQDLGRDYKPGLANNTIQSILQALDELLEAPGDLETLPRLQQHCVASHLLDGLEDVLRGLSKNLSNGLLNFSYPAGTELSLEVQKQVDRSVTLRQNQAVMQLDWNQAQKSGDPGPSVVGLVSIPGMGKLLAEAPLVLEPEKQMLLHETHQGLLQDGSPILLSDVISAFLSNNDTQNLSSPVTFTFSHRSVIPRQKVLCVFWEHGQNGCGHWATTGCSTIGTRDTSTICRCTHLSSFAVLMAHYDVQEEDPVLTVITYMGLSVSLLCLLLAALTFLLCKAIQNTSTSLHLQLSLCLFLAHLLFLVAIDQTGHKVLCSIIAGTLHYLYLATLTWMLLEALYLFLTARNLTVVNYSSINRFMKKLMFPVGYGVPAVTVAISAASRPHLYGTPSRCWLQPEKGFIWGFLGPVCAIFSVNLVLFLVTLWILKNRLSSLNSEVSTLRNTRMLAFKATAQLFILGCTWCLGILQVGPAARVMAYLFTIINSLQGVFIFLVYCLLSQQVREQYGKWSKGIRKLKTESEMHTLSSSAKADTSKPSTVN

SEQ ID NO: 282 - protein, 645 aa, Homo sapiens
MERQSRVMSEKDEYQFQHQGAVELLVFNFLLILTILTIWLFKNHRFRFLHETGGAMVYGLIMGLILRYATAPTDIESGTVYDCVKLTFSPSTLLVNITDQVYEYKYKREISQHNINPHQGNAILEKMTFDPEIFFNVLLPPIIFHAGYSLKKRHFFQNLGSILTYAFLGTAISCIVIGLIMYGFVKAMIHAGQLKNGDFHFTDCLFFGSLMSATDPVTVLAIFHELHVDPDLYTLLFGESVLNDAVAIVLTYSISIYSPKENPNAFDAAAFFQSVGNFLGIFAGSFAMGSAYAIITALLTKFTKLCEFPMLETGLFFLLSWSAFLSAEAAGLTGIVAVLFCGVTQAHYTYNNLSSDSKIRTKQLFEFMNFLAENVIFCYMGLALFTFQNHIFNALFILGAFLAIFVARACNIYPLSFLLNLGRKQKIPWNFQHMMMFSGLRGAIAFALAIRNTESQPKQMMFTTTLLLVFFTVWVFGGGTTPMLTWLQIRVGVDLDENLKEDPSSQHQEANNLDKNMTKAESARLFRMWYSFDHKYLKPILTHSGPPLTTTLPEWCGPISRLLTSPQAYGEQLKEDDVECIVNQDELAINYQEQASSPCSPPARLGLDQKASPQTPGKENIYEGDLGLGGYELKLEQTLGQSQLN

SEQ ID NO: 283 - protein, 535 aa, Homo sapiens
MEEGARHRNNTEKKHPGGGESDASPEAGSGGGGVALKKEIGLVSACGIIVGNIIGSGIFVSPKGVLENAGSVGLALIVWIVTGFITVVGALCYAELGVTIPKSGGDYSYVKDIFGGLAGFLRLWIAVLVIYPTNQAVIALTFSNYVLQPLFPTCFPPESGLRLLAAICLLLLTWVNCSSVRWATRVQDIFTAGKLLALALIIIMGIVQICKGEYFWLEPKNAFENFQEPDIGLVALAFLQGSFAYGGWNFLNYVTEELVDPYKNLPRAIFISIPLVTFVYVFANVAYVTAMSPQELLASNAVAVTFGEKLLGVMAWIMPISVALSTFGGVNGSLFTSSRLFFAGAREGHLPSVLAMIHVKRCTPIPALLFTCISTLLMLVTSDMYTLINYVGFINYLFYGVTVAGQIVLRWKKPDIPRPIKINLLFPIIYLLFWAFLLVFSLWSEPVVCGIGLAIMLTGVPVYFLGVYWQHKPKCFSDFIELLTLVSQKMCVVVYPEVERGSGTEEANEDMEEQQQPMYQPTPTKDKDVAGQPQP

SEQ ID NO: 284 - protein, 413 aa, Homo sapiens
MLPSLGPMLLWTAVLLFVPCVGKTVWLYLQAWPNPVFEGDALTLRCQGWKNTPLSQVKFYRDGKFLHFSKENQTLSMGAATVQSRGQYSCSGQVMYIPQTFTQTSETAMVQVQELFPPPVLSAIPSPEPREGSLVTLRCQTKLHPLRSALRLLFSFHKDGHTLQDRGPHPELCIPGAKEGDSGLYWCEVAPEGGQVQKQSPQLEVRVQAPVSRPVLTLHHGPADPAVGDMVQLLCEAQRGSPPILYSFYLDEKIVGNHSAPCGGTTSLLFPVKSEQDAGNYSCEAENSVSRERSEPKKLSLKGSQVLFTPASNWLVPWLPASLLGLMVIAAALLVYVRSWRKAGPLPSQIPPTAPGGEQCPLYANVHHQKGKDEGVVYSVVHRTSKRSEARSAEFTVGRKFYHLCGGEMPAAQ

SEQ ID NO: 285 - protein, 195 aa, Homo sapiens
MAPAASRLRAEAGLGALPRRALAQYLLFLRLYPVLTKAATSGILSALGNFLAQMIEKKRKKENSRSLDVGGPLRYAVYGFFFTGPLSHFFYFFMEHWIPPEVPLAGLRRLLLDRLVFAPAFLMLFFLIMNFLEGKDASAFAAKMRGGFWPALRMNWRVWTPLQFININYVPLKFRVLFANLAALFWYAYLASLGK

SEQ ID NO: 286 - protein, 425 aa, Homo sapiens
MGPRRLLLVAACFSLCGPLLSARTRARRPESKATNATLDPRSFLLRNPNDKYEPFWEDEEKNESGLTEYRLVSINKSSPLQKQLPAFISEDASGYLTSSWLTLFVPSVYTGVFVVSLPLNIMAIVVFILKMKVKKPAVVYMLHLATADVLFVSVLPFKISYYFSGSDWQFGSELCRFVTAAFYCNMYASILLMTVISIDRFLAVVYPMQSLSWRTLGRASFTCLAIWALAIAGVVPLLLKEQTIQVPGLNITTCHDVLNETLLEGYYAYYFSAFSAVFFFVPLIISTVCYVSIIRCLSSSAVANRSKKSRALFLSAAVFCIFIICFGPTNVLLIAHYSFLSHTSTTEAAYFAYLLCVCVSSISCCIDPLIYYYASSECQRYVYSILCCKESSDPSSYNSSGQLMASKMDTCSSNLNNSIYKKLLT

SEQ ID NO: 287 - protein, 292 aa, Homo sapiens
MTTTRYRPTWDLALDPLVSCKLCLGEYPVEQMTTIAQCQCIFCTLCLKQYVELLIKEGLETAISCPDAACPKQGHLQENEIECMVAAEIMQRYKKLQFEREVLFDPCRTWCPASTCQAVCQLQDVGLQTPQPVQCKACRMEFCSTCKASWHPGQGCPETMPITFLPGETSAAFKMEEDDAPIKRCPKCKVYIERDEGCAQMMCKNCKHAFCWYCLESLDDDFLLIHYDKGPCRNKLGHSRASVIWHRTQVVGIFAGFGLLLLVASPFLLLATPFVLCCKCKCSKGDDDPLPT

SEQ ID NO: 288 - protein, 629 aa, Homo sapiens
MNQVTIQWDAVIALYILFSWCHGGITNINCSGHIWVEPATIFKMGMNISIYCQAAIKNCQPRKLHFYKNGIKERFQITRINKTTARLWYKNFLEPHASMYCTAECPKHFQETLICGKDISSGYPPDIPDEVTCVIYEYSGNMTCTWNAGKLTYIDTKYVVHVKSLETEEEQQYLTSSYINISTDSLQGGKKYLVWVQAANALGMEESKQLQIHLDDIVIPSAAVISRAETINATVPKTIIYWDSQTTIEKVSCEMRYKATTNQTWNVKEFDTNFTYVQQSEFYLEPNIKYVFQVRCQETGKRYWQPWSSLFFHKTPETVPQVTSKAFQHDTWNSGLTVASISTGHLTSDNRGDIGLLLGMIVFAVMLSILSLIGIFNRSFRTGIKRRILLLIPKWLYEDIPNMKNSNVVKMLQENSELMNNNSSEQVLYVDPMITEIKEIFIPEHKPTDYKKENTGPLETRDYPQNSLFDNTTVVYIPDLNTGYKPQISNFLPEGSHLSNNNEITSLTLKPPVDSLDSGNNPRLQKHPNFAFSVSSVNSLSNTIFLGELSLILNQGECSSPDIQNSVEEETTMLLENDSPSETIPEQTLLPDEFVSCLGIVNEELPSINTYFPQNILESHFNRISLLEK

SEQ ID NO: 289 - protein, 417 aa, Homo sapiens
MESNLSGLVPAAGLVPALPPAVTLGLTAAYTTLYALLFFSVYAQLWLVLLYGHKRLSYQTVFLALCLLWAALRTTLFSFYFRDTPRANRLGPLPFWLLYCCPVCLQFFTLTLMNLYFAQVVFKAKVKRRPEMSRGLLAVRGAFVGASLLFLLVNVLCAVLSHRRRAQPWALLLVRVLVSDSLFVICALSLAACLCLVARRAPSTSIYLEAKGTSVCQAAAMGGAMVLLYASRACYNLTALALAPQSRLDTFDYDWYNVSDQADLVNDLGNKGYLVFGLILFVWELLPTTLLVGFFRVHRPPQDLSTSHILNGQVFASRSYFFDRAGHCEDEGCSWEHSRGESTRCQDQAATTTVSTPPHRRDPPPSPTEYPGPSPPHPRPLCQVCLPLLAQDPGGRGYPLLWPAPCCSCHSELVPSP

SEQ ID NO: 290 - protein, 273 aa, Homo sapiens
MAFLAGPRLLDWASSPPHLQFNKFVLTGYRPASSGSGCLRSLFYLHNELGNIYTHGLALLGFLVLVPMTMPWGQLGKDGWLGGTHCVACLAPPAGSVLYHLFMCHQGGSAVYARLLALDMCGVCLVNTLGALPIIHCTLACRPWLRPAALVGYTVLSGVAGWRALTAPSTSARLRAFGWQAAARLLVFGARGVGLGSGAPGSLPCYLRMDALALLGGLVNVARLPERWGPGRFDYWGNSHQIMHLLSVGSILQLHAGVVPDLLWAAHHACPRD

SEQ ID NO: 291 - protein, 230 aa, Homo sapiens
MVKISFQPAVAGIKGDKADKASASAPAPASATEILLTPAREEQPPQHRSKRGGSVGGVCYLSMGMVVLLMGLVFASVYIYRYFFLAQLARDNFFRCGVLYEDSLSSQVRTQMELEEDVKIYLDENYERINVPVPQFGGGDPADIIHDFQRRGTYLPQTYIIQEEMVVTEHVSDKEALGSFIYHLCNGKDTYRLRRRATRRRINKRGAKNCNAIRHFENTFVVETLICGVV

SEQ ID NO: 292 - protein, 501 aa, Homo sapiens
MGTRAARPAGLPCGAENPARRRLALGARQQIHSWSPRTPSTRLTAPAGPARGVARPAMAPDPVAAETAAQGPTPRYFTWDEVAQRSGCEERWLVIDRKVYNISEFTRRHPGGSRVISHYAGQDATDPFVAFHINKGLVKKYMNSLLIGELSPEQPSFEPTKNKELTDEFRELRATVERMGLMKANHVFFLLYLLHILLLDGAAWLTLWVFGTSFLPFLLCAVLLSAVQAQAGWLQHDFGHLSVFSTSKWNHLLHHFVIGHLKGAPASWWNHMHFQHHAKPNCFRKDPDINMHPFFFALGKILSVELGKQKKKYMPYNHQHKYFFLIGPPALLPLYFQWYIFYFVIQRKKWVDLAWMITFYVRFFLTYVPLLGLKAFLGLFFIVRFLESNWFVWVTQMNHIPMHIDHDRNMDWVSTQLQATCNVHKSAFNDWFSGHLNFQIEHHLFPTMPRHNYHKVAPLVQSLCAKHGIEYQSKPLLSAFADIIHSLKESGQLWLDAYLHQ

SEQ ID NO: 293 - protein, 520 aa, Homo sapiens
MVTSSFPISVAVFALITLQVGTQDSFIAAVYEHAVILPNKTETPVSQEDALNLMNENIDILETAIKQAAEQGARIIVTPEDALYGWKFTRETVFPYLEDIPDPQVNWIPCQDPHRFGHTPVQARLSCLAKDNSIYVLANLGDKKPCNSRDSTCPPNGYFQYNTNVVYNTEGKLVARYHKYHLYSEPQFNVPEKPELVTFNTAFGRFGIFTCFDIFFYDPGVTLVKDFHVDTILFPTAWMNVLPLLTAIEFHSAWAMGMGVNLLVANTHHVSLNMTGSGIYAPNGPKVYHYDMKTELGKLLLSEVDSHPLSSLAYPTAVNWNAYATTIKPFPVQKNTFRGFISRDGFNFTELFENAGNLTVCQKELCCHLSYRMLQKEENEVYVLGAFTGLHGRRRREYWQVCTLLKCKTTNLTTCGRPVETASTRFEMFSLSGTFGTEYVFPEVLLTEIHLSPGKFEVLKDGRLVNKNGSSGPILTVSLFGRWYTKDSLYSSCGTSNSAITYLLIFILLMIIALQNIVML

SEQ ID NO: 294 - protein, 267 aa, Homo sapiens
MVKISFQPAVAGIKGDKADKASASAPAPASATEILLTPAREEQPPQHRSKRGGSVGGVCYLSMGMVVLLMGLVFASVYIYRYFFLAQLARDNFFRCGVLYEDSLSSQVRTQMELEEDVKIYLDENYERINVPVPQFGGGDPADIIHDFQRGLTAYHDISLDKCYVIELNTTIVLPPRNFWELLMNVKRGTYLPQTYIIQEEMVVTEHVSDKEALGSFIYHLCNGKDTYRLRRRATRRRINKRGAKNCNAIRHFENTFVVETLICGVV

SEQ ID NO: 295 - protein, 309 aa, Homo sapiens
MNGTYNTCGSSDLTWPPAIKLGFYAYLGVLLVLGLLLNSLALWVFCCRMQQWTETRIYMTNLAVADLCLLCTLPFVLHSLRDTSDTPLCQLSQGIYLTNRYMSISLVTAIAVDRYVAVRHPLRARGLRSPRQAAAVCAVLWVLVIGSLVARWLLGIQEGGFCFRSTRHNFNSMAFPLLGFYLPLAVVVFCSLKVVTALAQRPPTDVGQAEATRKAARMVWANLLVFVVCFLPLHVGLTVRLAVGWNACALLETIRRALYITSKLSDANCCLDAICYYYMAKEFQEASALAVAPSAKAHKSQDSLCVTLA

SEQ ID NO: 296 - protein, 338 aa, Homo sapiens
MRGQRSLLLGPARLCLRLLLLLGYRRRCPPLLRGLVQRWRYGKVCLRSLLYNSFGGSDTAVDAAFEPVYWLVDNVIRWFGVVFVVLVIVLTGSIVAIAYLCVLPLILRTYSVPRLCWHFFYSHWNLILIVFHYYQAITTPPGYPPQGRNDIATVSICKKCIYPKPARTHHCSICNSYGSWDLFREAYAAIEKMKQLDKNKLQAVANQTYHQTPPPTFSFRERMTHKSLVYLWFLCSSVALALGALTVWHAVLISRGETSIERHINKKERRRLQAKGRVFRNPYNYGCLDNWKVFLGVDTGRHWLTRVLLPSSHLPHGNGMSWEPPPWVTAHSASVMAV

SEQ ID NO: 297 - protein, 331 aa, Homo sapiens
MASALWTVLPSRMSLRSLKWSLLLLSLLSFFVMWYLSLPHYNVIERVNWMYFYEYEPIYRQDFHFTLREHSNCSHQNPFLVILVTSHPSDVKARQAIRVTWGEKKSWWGYEVLTFFLLGQEAEKEDKMLALSLEDEHLLYGDIIRQDFLDTYNNLTLKTIMAFRWVTEFCPNAKYVMKTDTDVFINTGNLVKYLLNLNHSEKFFTGYPLIDNYSYRGFYQKTHISYQEYPFKVFPPYCSGLGYIMSRDLVPRIYEMMGHVKPIKFEDVYVGICLNLLKVNIHIPEDTNLFFLYRIHLDVCQLRRVIAAHGFSSKEIITFWQVMLRNTTCHY

SEQ ID NO: 298 - protein, 374 aa, Homo sapiens
MAANVSGAKSCPANFLAAADDKLSGFQGDFLWPILVVEFLVAVASNGLALYRFSIRKQRPWHPAVVFSVQLAVSDLLCALTLPPLAAYLYPPKHWRYGEAACRLERFLFTCNLLGSVIFITCISLNRYLGIVHPFFARSHLRPKHAWAVSAAGWVLAALLAMPTLSFSHLKRPQQGAGNCSVARPEACIKCLGTADHGLAAYRAYSLVLAGLGCGLPLLLTLAAYGALGRAVLRSPGMTVAEKLRVAALVASGVALYASSYVPYHIMRVLNVDARRRWSTRCPSFADIAQATAALELGPYVGYQVMRGLMPLAFCVHPLLYMAAVPSLGCCCRHCPGYRDSWNPEDAKSTGQALPLNATAAPKPSEPQSRELSQ

SEQ ID NO: 299 - protein, 500 aa, Homo sapiens
MRGELWLLVLVLREAARALSPQPGAGHDEGPGSGWAAKGTVRGWNRRARESPGHVSEPDRTQLSQDLGGGTLAMDTLPDNRTRVVEDNHSYYVSRLYGPSEPHSRELWVDVAEANRSQVKIHTILSNTHRQASRVVLSFDFPFYGHPLRQITIATGGFIFMGDVIHRMLTATQYVAPLMANFNPGYSDNSTVVYFDNGTVFVVQWDHVYLQGWEDKGSFTFQAALHHDGRIVFAYKEIPMSVPEISSSQHPVKTGLSDAFMILNPSPDVPESRRRSIFEYHRIELDPSKVTSMSAVEFTPLPTCLQHRSCDACMSSDLTFNCSWCHVLQRCSSGFDRYRQEWMDYGCAQEAEGRMCEDFQDEDHDSASPDTSFSPYDGDLTTTSSSLFIDSLTTEDDTKLNPYAGGDGLQNNLSPKTKGTPVHLGTIVGIVLAVLLVAAIILAGIYINGHPTSNAALFFIERRPHHWPAMKFRSHPDHSTYAEVEPSGHEKEGFMEAEQC

SEQ ID NO: 300 - protein, 672 aa, Homo sapiens
MSKEERPGREEILECQVMWEPDSKKNTQMDRFRAAVGAACGLALESYDDLYHWSVESYSDFWAEFWKFSGIVFSRVYDEVVDTSKGIADVPEWFKGSRLNYAENLLRHKENDRVALYIAREGKEEIVKVTFEELRQEVALFAAAMRKMGVKKGDRVVGYLPNSEHAVEAMLAAASIGAIWSSTSPDFGVNGVLDRFSQIQPKLIFSVEAVVYNGKEHNHMEKLQQVVKGLPDLKKVVVIPYVSSRENIDLSKIPNSVFLDDFLATGTSEQAPQLEFEQLPFSHPLFIMFSSGTTGAPKCMVHSAGGTLIQHLKEHLLHGNMTSSDILLCYTTVGWMMWNWMVSLLATGAAMVLYDGSPLVPTPNVLWDLVDRIGITVLVTGAKWLSVLEEKAMKPVETHSLQMLHTILSTGSPLKAQSYEYVYRCIKSSILLGSISGGTDIISCFMGHNFSLPVYKGEIQARNLGMAVEAWNEEGKAVWGESGELVCTKPIPCQPTHFWNDENGNKYRKAYFSKFPGIWAHGDYCRINPKTGGIVMLGRSDGTLNPNGVRFGSSEIYNIVESFEEVEDSLCVPQYNKYREERVILFLKMASGHAFQPDLVKRIRDAIRMGLSARHVPSLILETKGIPYTLNGKKVEVAVKQIIAGKAVEQGGAFSNPETLDLYRDIPELQGF

SEQ ID NO: 301 - protein, 495 aa, Homo sapiens
MAAEPQPSSLSYRTTGSTYLHPLSELLGIPLDQVNFVVCQLVALFAAFWFRIYLRPGTTSSDVRHAVATIFGIYFVIFCFGWYSVHLFVLVLMCYAIMVTASVSNIHRYSFFVAMGYLTICHISRIYIFHYGILTTDFSGPLMIVTQKITTLAFQVHDGLGRRAEDLSAEQHRLAIKVKPSFLEYLSYLLNFMSVIAGPCNNFKDYIAFIEGKHIHMKLLEVNWKRKGFHSLPEPSPTGAVIHKLGITLVSLLLFLTLTKTFPVTCLVDDWFVHKASFPARLCYLYVVMQASKPKYYFAWTLADAVNNAAGFGFSGVDKNGNFCWDLLSNLNIWKIETATSFKMYLENWNIQTATWLKCVCYQRVPWYPTVLTFILSALWHGVYPGYYFTFLTGILVTLAARAVRNNYRHYFLSSRALKAVYDAGTWAVTQLAVSYTVAPFVMLAVEPTISLYKSMYFYLHIISLLIILFLPMKPQAHTQRRPQTLNSINKRKTD

SEQ ID NO: 302 - protein, 1183 aa, Homo sapiens
MQLKIMPKKKRLSAGRVPLILFLCQMISALEVPLDLVQPPTITQQSPKDYIIDPRENIVIQCEAKGKPPPSFSWTRNGTHFDIDKDPLVTMKPGTGTLIINIMSEGKAETYEGVYQCTARNERGAAVSNNIVVRPSRSPLWTKEKLEPITLQSGQSLVLPCRPPIGLPPPIIFWMDNSFQRLPQSERVSQGLNGDLYFSNVLPEDTREDYICYARFNHTQTIQQKQPISVKVISVDELNDTIAANLSDTEFYGAKSSRERPPTFLTPEGNASNKEELRGNVLSLECIAEGLPTPIIYWAKEDGMLPKNRTVYKNFEKTLQIIHVSEADSGNYQCIAKNALGAIHHTISVRVKAAPYWITAPQNLVLSPGEDGTLICRANGNPKPRISWLTNGVPIEIAPDDPSRKIDGDTIIFSNVQERSSAVYQCNASNEYGYLLANAFVNVLAEPPRILTPANTLYQVIANRPALLDCAFFGSPLPTIEWFKGAKGSALHEDIYVLHENGTLEIPVAQKDSTGTYTCVARNKLGMAKNEVHLEIKDPTWIVKQPEYAVVQRGSMVSFECKVKHDHTLSLTVLWLKDNRELPSDERFTVDKDHLVVADVSDDDSGTYTCVANTTLDSVSASAVLSVVDVPNPPFDLELTDQLDKSVQLSWTPGDDNNSPITKFIIEYEDAMHKPGLWHHQTEVSGTQTTAQLKLSPYVNYSFRVMAVNSIGKSLPSEASEQYLTKASEPDKNPTAVEGLGSEPDNLVITWKPLNGFESNGPGLQYKVSWRQKDGDDEWTSVVVANVSKYIVSGTPTFVPYLIKVQALNDMGFAPEPAVVMGHSGEDLPMVAPGNVRVNVVNSTLAEVHWDPVPLKSIRGHLQGYRIYYWKTQSSSKRNRRHIEKKILTFQGSKTHGMLPGLEPFSHYTLNVRVVNGKGEGPASPDRVFNTPEGVPSAPSSLKIVNPTLDSLTLEWDPPSHPNGILTEYTLKYQPINSTHELGPLVDLKIPANKTRWTLKNLNFSTRYKFYFYAQTSAGSGSQITEEAVTTVDEAMASRQVDIATQGWFIGLMCAVALLILILLIVCFIRRNKGGKYPVKEKEDAHADPEIQPMKEDDGTFGEYSDAEDHKPLKKGSRTPSDRTVKKEDSDDSLVDYGEGVNGQFNEDGSFIGQYSGKKEKEPAEGNESSEAPSPVNAMNSFV

SEQ ID NO: 303 - protein, 726 aa, Homo sapiens
MLLPRSVSSERAPGVPEPEELWEAEMERLRGSGTPVRGLPYAMMDKRLIWQLREPAGVQTLRWQRWQRRRQTVERRLREAAQRLARGLGLWEGALYEIGGLFGTGIRSYFTFLRFLLLLNLLSLLLTASFVLLPLVWLRPPDPGPTLNLTLQCPGSRQSPPGVLRFHNQLWHVLTGRAFTNTYLFYGAYRVGPESSSVYSIRLAYLLSPLACLLLCFCGTLRRMVKGLPQKTLLGQGYQAPLSAKVFSSWDFCIRVQEAATIKKHEISNEFKVELEEGRRFQLMQQQTRAQTACRLLSYLRVNVLNGLLVVGAISAIFWATKYSQDNKEESLFLLLQYLPPGVIALVNFLGPLLFTFLVQLENYPPNTEVNLTLIWCVVLKLASLGMFSVSLGQTILCIGRDKSSCESYGYNVCDYQCWENSVGEELYKLSIFNFLLTVAFAFLVTLPRRLLVDRFSGRFWAWLEREEFLVPKNVLDIVAGQTVTWMGLFYCPLLPLLNSVFLFLTFYIKKYTLLKNSRASSRPFRASSSTFFFQLVLLLGLLLAAVPLGYVVSSIHSSWDCGLFTNYSAPWQVVPELVALGLPPIGQRALHYLGSHAFSFPLLIMLSLVLTVCVSQTQANARAIHRLRKQLVWQVQEKWHLVEDLSRLLPEPGPSDSPGPKYPASQASRPQSFCPGCPCPGSPGHQAPRPGPSVVDAAGLRSPCPGQHGAPASARRFRFPSGAEL

SEQ ID NO: 304 - protein, 355 aa, Homo sapiens
MDYTLDLSVTTVTDYYYPDIFSSPCDAELIQTNGKLLLAVFYCLLFVFSLLGNSLVILVLVVCKKLRSITDVYLLNLALSDLLFVFSFPFQTYYLLDQWVFGTVMCKVVSGFYYIGFYSSMFFITLMSVDRYLAVVHAVYALKVRTIRMGTTLCLAVWLTAIMATIPLLVFYQVASEDGVLQCYSFYNQQTLKWKIFTNFKMNILGLLIPFTIFMFCYIKILHQLKRCQNHNKTKAIRLVLIVVIASLLFWVPFNVVLFLTSLHSMHILDGCSISQQLTYATHVTEIISFTHCCVNPVIYAFVGEKFKKHLSEIFQKSCSQIFNYLGRQMPRESCEKSSSCQQHSSRSSSVDYIL

SEQ ID NO: 305 - protein, 731 aa, Homo sapiens
MWSWKCLLFWAVLVTATLCTARPSPTLPEQDALPSSEDDDDDDDSSSEEKETDNTKPNPVAPYWTSPEKMEKKLHAVPAAKTVKFKCPSSGTPNPTLRWLKNGKEFKPDHRIGGYKVRYATWSIIMDSVVPSDKGNYTCIVENEYGSINHTYQLDVVERSPHRPILQAGLPANKTVALGSNVEFMCKVYSDPQPHIQWLKHIEVNGSKIGPDNLPYVQILKTAGVNTTDKEMEVLHLRNVSFEDAGEYTCLAGNSIGLSHHSAWLTVLEALEERPAVMTSPLYLEIIIYCTGAFLISCMVGSVIVYKMKSGTKKSDFHSQMAVHKLAKSIPLRRQVTVSADSSASMNSGVLLVRPSRLSSSGTPMLAGVSEYELPEDPRWELPRDRLVLGKPLGEGCFGQVVLAEAIGLDKDKPNRVTKVAVKMLKSDATEKDLSDLISEMEMMKMIGKHKNIINLLGACTQDGPLYVIVEYASKGNLREYLQARRPPGLEYCYNPSHNPEEQLSSKDLVSCAYQVARGMEYLASKKCIHRDLAARNVLVTEDNVMKIADFGLARDIHHIDYYKKTTNGRLPVKWMAPEALFDRIYTHQSDVWSFGVLLWEIFTLGGSPYPGVPVEELFKLLKEGHRMDKPSNCTNELYMMMRDCWHAVPSQRPTFKQLVEDLDRIVALTSNQEYLDLSMPLDQYSPSFPDTRSSTCSSGEDSVFSHEPLPEEPCLPRHPAQLANGGLKRR

SEQ ID NO: 306 - protein, 457 aa, Homo sapiens
MRPPSPLPARWLCVLAGALAWALGPAGGQAARLQEECDYVQMIEVQHKQCLEEAQLENETIGCSKMWDNLTCWPATPRGQVVVLACPLIFKLFSSIQGRNVSRSCTDEGWTHLEPGPYPIACGLDDKAASLDEQQTMFYGSVKTGYTIGYGLSLATLLVATAILSLFRKLHCTRNYIHMHLFISFILRAAAVFIKDLALFDSGESDQCSEGSVGCKAAMVFFQYCVMANFFWLLVEGLYLYTLLAVSFFSERKYFWGYILIGWGVPSTFTMVWTIARIHFEDYGCWDTINSSLWWIIKGPILTSILVNFILFICIIRILLQKLRPPDIRKSDSSPYSRLARSTLLLIPLFGVHYIMFAFFPDNFKPEVKMVFELVVGSFQGFVVAILYCFLNGEVQAELRRKWRRWHLQGVLGWNPKYRHPSGGSNGATCSTQVSMLTRVSPGARRSSSFQAEVSLV

SEQ ID NO: 307 - protein, 224 aa, Homo sapiens
MPLTPEPPSGRVEGPPAWEAAPWPSLPCGPCIPIMLVLATLAALFILTTAVLAERLFRRALRPDPSHRAPTLVWRPGGELWIEPMGTARERSEDWYGSAVPLLTDRAPEPPTQVGTLEARATAPPAPSAPNSAPSNLGPQTVLEVPARSTFWGPQPWEGRPPATGLVSWAEPEQRPEASVQFGSPQARRQRPGSPDPEWGLQPRVTLEQISAFWKREGRTSVGF

SEQ ID NO: 308 - protein, 554 aa, Homo sapiens
MTAPGAAGRCPPTTWLGSLLLLVCLLASRSITEEVSEYCSHMIGSGHLQSLQRLIDSQMETSCQITFEFVDQEQLKDPVCYLKKAFLLVQDIMEDTMRFRDNTPNAIAIVQLQELSLRLKSCFTKDYEEHDKACVRTFYETPLQLLEKVKNVFNETKNLLDKDWNIFSKNCNNSFAECSSQDVVTKPDCNCLYPKAIPSSDPASVSPHQPLAPSMAPVAGLTWEDSEGTEGSSLLPGEQPLHTVDPGSAKQRPPRSTCQSFEPPETPVVKDSTIGGSPQPRPSVGAFNPGMEDILDSAMGTNWVPEEASGEASEIPVPQGTELSPSRPGGGSMQTEPARPSNFLSASSPLPASAKGQQPADVTGTALPRVGPVRPTGQDWNHTPQKTDHPSALLRDPPEPGSPRISSLRPQGLSNPSTLSAQPQLSRSHSSGSVLPLGELEGRRSTRDRRSPAEPEGGPASEGAARPLPRFNSVPLTDTGHERQSEGSFSPQLQESVFHLLVPSVILVLLAVGGLLFYRWRRRSHQEPQRADSPLEQPEGSPLTQDDRQVELPV

SEQ ID NO: 309 - protein, 839 aa, Homo sapiens
MSIRRLLILILKIGRRWTELIRTMESRVLLRTFCLIFGLGAVWGLGVDPSLQIDVLTELELGESTTGVRQVPGLHNGTKAFLFQDTPRSIKASTATAEQFFQKLRNKHEFTILVTLKQTHLNSGVILSIHHLDHRYLELESSGHRNEVRLHYRSGSHRPHTEVFPYILADDKWHKLSLAISASHLILHIDCNKIYERVVEKPSTDLPLGTTFWLGQRNNAHGYFKGIMQDVQLLVMPQGFIAQCPDLNRTCPTCNDFHGLVQKIMELQDILAKTSAKLSRAEQRMNRLDQCYCERTCTMKGTTYREFESWIDGCKNCTCLNGTIQCETLICPNPDCPLKSALAYVDGKCCKECKSICQFQGRTYFEGERNTVYSSSGVCVLYECKDQTMKLVESSGCPALDCPESHQITLSHSCCKVCKGYDFCSERHNCMENSICRNLNDRAVCSCRDGFRALREDNAYCEDIDECAEGRHYCRENTMCVNTPGSFMCICKTGYIRIDDYSCTEHDECITNQHNCDENALCFNTVGGHNCVCKPGYTGNGTTCKAFCKDGCRNGGACIAANVCACPQGFTGPSCETDIDECSDGFVQCDSRANCINLPGWYHCECRDGYHDNGMFSPSGESCEDIDECGTGRHSCANDTICFNLDGGYDCRCPHGKNCTGDCIHDGKVKHNGQIWVLENDRCSVCSCQNGFVMCRRMVCDCENPTVDLFCCPECDPRLSSQCLHQNGETLYNSGDTWVQNCQQCRCLQGEVDCWPLPCPDVECEFSILPENECCPRCVTDPCQADTIRNDITKTCLDEMNVVRFTGSSWIKHGTECTLCQCKNGHICCSVDPQCLQEL

SEQ ID NO: 310 - protein, 398 aa, Homo sapiens
MESGLLRPAPVSEVIVLHYNYTGKLRGARYQPGAGLRADAVVCLAVCAFIVLENLAVLLVLGRHPRFHAPMFLLLGSLTLSDLLAGAAYAANILLSGPLTLKLSPALWFAREGGVFVALTASVLSLLAIALERSLTMARRGPAPVSSRGRTLAMAAAAWGVSLLLGLLPALGWNCLGRLDACSTVLPLYAKAYVLFCVLAFVGILAAICALYARIYCQVRANARRLPARPGTAGTTSTRARRKPRSLALLRTLSVVLLAFVACWGPLFLLLLLDVACPARTCPVLLQADPFLGLAMANSLLNPIIYTLTNRDLRHALLRLVCCGRHSCGRDPSGSQQSASAAEASGGLRRCLPPGLDGSFSGSERSSPQRDGLDTSGSTGSPGAPTAARTLVSEPAAD

SEQ ID NO: 311 - protein, 692 aa, Homo sapiens
MELLPLWLCLGFHFLTVGWRNRSGTATAASQGVCKLVGGAADCRGQSLASVPSSLPPHARMLTLDANPLKTLWNHSLQPYPLLESLSLHSCHLERISRGAFQEQGHLRSLVLGDNCLSENYEETAAALHALPGLRRLDLSGNALTEDMAALMLQNLSSLRSVSLAGNTIMRLDDSVFEGLERLRELDLQRNYIFEIEGGAFDGLAELRHLNLAFNNLPCIVDFGLTRLRVLNVSYNVLEWFLATGGEAAFELETLDLSHNQLLFFPLLPQYSKLRTLLLRDNNMGFYRDLYNTSSPREMVAQFLLVDGNVTNITTVSLWEEFSSSDLADLRFLDMSQNQFQYLPDGFLRKMPSLSHLNLHQNCLMTLHIREHEPPGALTELDLSHNQLSELHLAPGLASCLGSLRLFNLSSNQLLGVPPGLFANARNITTLDMSHNQISLCPLPAASDRVGPPSCVDFRNMASLRSLSLEGCGLGALPDCPFQGTSLTYLDLSSNWGVLNGSLAPLQDVAPMLQVLSLRNMGLHSSFMALDFSGFGNLRDLDLSGNCLTTFPRFGGSLALETLDLRRNSLTALPQKAVSEQLSRGLRTIYLSQNPYDCCGVDGWGALQHGQTVADWAMVTCNLSSKIIRVTELPGGVPRDCKWERLDLGLLYLVLILPSCLTLLVACTVIVLTFKKPLLQVIKSRCHWSSVY

SEQ ID NO: 312 - protein, 652 aa, Homo sapiens
MPLLLLLLLLPSPLHPHPICEVSKVASHLEVNCDKRNLTALPPDLPKDTTILHLSENLLYTFSLATLMPYTRLTQLNLDRCELTKLQVDGTLPVLGTLDLSHNQLQSLPLLGQTLPALTVLDVSFNRLTSLPLGALRGLGELQELYLKGNELKTLPPGLLTPTPKLEKLSLANNNLTELPAGLLNGLENLDTLLLQENSLYTIPKGFFGSHLLPFAFLHGNPWLCNCEILYFRRWLQDNAENVYVWKQGVDVKAMTSNVASVQCDNSDKFPVYKYPGKGCPTLGDEGDTDLYDYYPEEDTEGDKVRATRTVVKFPTKAHTTPWGLFYSWSTASLDSQMPSSLHPTQESTKEQTTFPPRWTPNFTLHMESITFSKTPKSTTEPTPSPTTSEPVPEPAPNMTTLEPTPSPTTPEPTSEPAPSPTTPEPTSEPAPSPTTPEPTSEPAPSPTTPEPTPIPTIATSPTILVSATSLITPKSTFLTTTKPVSLLESTKKTIPELDQPPKLRGVLQGHLESSRNDPFLHPDFCCLLPLGFYVLGLFWLLFASVVLILLLSWVGHVKPQALDSGQGAALTTATQTTHLELQRGRQVTVPRAWLLFLRGSLPTFRSSLFLWVRPNGRVGPLVAGRRPSALSQGRGQDLLSTVSIRYSGHSL

SEQ ID NO: 313 - protein, 391 aa, Homo sapiens
MAPTQGPRAPLEFGGPLGAAALLLLLPATMFHLLLAARSGPARLLGPPASLPGLEVLWSPRALLLWLAWLGLQAALYLLPARKVAEGQELKDKSRLRYPINGFQALVLTALLVGLGMSAGLPLGALPEMLLPLAFVATLTAFIFSLFLYMKAQVAPVSALAPGGNSGNPIYDFFLGRELNPRICFFDFKYFCELRPGLIGWVLINLALLMKEAELRGSPSLAMWLVNGFQLLYVGDALWHEEAVLTTMDITHDGFGFMLAFGDMAWVPFTYSLQAQFLLHHPQPLGLPMASVICLINGLETISTATGRKLLVSGWWGMVRHPNYLGDLIMALAWSLPCGVSHLLPYFYLLYFTALLVHREARDERQCLQKYGLAWQEYCRRVPYRIMPYIY

SEQ ID NO: 314 - protein, 46 aa, Homo sapiens
MCSLASGATGYSHLLKKHFHTVSLSISLILTAWFINMDLNFMDTLS

SEQ ID NO: 315 - protein, 125 aa, Homo sapiens
MHKEEHEVAVLGPPPSTILPRSTVINIHSETSVPDHVVWSLFNTLFLNWCCLGFIAFAYSVKSRDRKMVGDVTGAQAYASTAKCLNIWALILGILMTIGFILLLVFGSVTVYHIMLQIIQEKRGY

SEQ ID NO: 316 - protein, 1452 aa, Homo sapiens
MRGLGTCLATLAGLLLTAAGETFSGGCLFDEPYSTCGYSQSEGDDFNWEQVNTLTKPTSDPWMPSGSFMLVNASGRPEGQRAHLLLPQLKENDTHCIDFHYFVSSKSNSPPGLLNVYVKVNNGPLGNPIWNISGDPTRTWNRAELAISTFWPNFYQVIFEVITSGHQGYLAIDEVKVLGHPCTRTPHFLRIQNVEVNAGQFATFQCSAIGRTVAGDRLWLQGIDVRDAPLKEIKVTSSRRFIASFNVVNTTKRDAGKYRCMIRTEGGVGISNYAELVVKEPPVPIAPPQLASVGATYLWIQLNANSINGDGPIVAREVEYCTASGSWNDRQPVDSTSYKIGHLDPDTEYEISVLLTRPGEGGTGSPGPALRTRTKCADPMRGPRKLEVVEVKSRQITIRWEPFGYNVTRCHSYNLTVHYCYQVGGQEQVREEVSWDTENSHPQHTITNLSPYTNVSVKLILMNPEGRKESQELIVQTDEDLPGAVPTESIQGSTFEEKIFLQWREPTQTYGVITLYEITYKAVSSFDPEIDLSNQSGRVSKLGNETHFLFFGLYPGTTYSFTIRASTAKGFGPPATNQFTTKISAPSMPAYELETPLNQTDNTVTVMLKPAHSRGAPVSVYQIVVEEERPRRTKKTTEILKCYPVPIHFQNASLLNSQYYFAAEFPADSLQAAQPFTIGDNKTYNGYWNTPLLPYKSYRIYFQAASRANGETKIDCVQVATKGAATPKPVPEPEKQTDHTVKIAGVIAGILLFVIIFLGVVLVMKKRKLAKKRKETMSSTRQEMTVMVNSMDKSYAEQGTNCDEAFSFMDTHNLNGRSVSSPSSFTMKTNTLSTSVPNSYYPDETHTMASDTSSLVQSHTYKKREPADVPYQTGQLHPAIRVADLLQHITQMKCAEGYGFKEEYESFFEGQSAPWDSAKKDENRMKNRYGNIIAYDHSRVRLQTIEGDTNSDYINGNYIDGYHRPNHYIATQGPMQETIYDFWRMVWHENTASIIMVTNLVEVGRVKCCKYWPDDTEIYKDIKVTLIETELLAEYVIRTFAVEKRGVHEIREIRQFHFTGWPDHGVPYHATGLLGFVRQVKSKSPPSAGPLVVHCSAGAGRTGCFIVIDIMLDMAEREGVVDIYNCVRELRSRRVNMVQTEEQYVFIHDAILEACLCGDTSVPASQVRSLYYDMNKLDPQTNSSQIKEEFRTLNMVTPTLRVEDCSIALLPRNHEKNRCMDILPPDRCLPFLITIDGESSNYINAALMDSYKQPSAFIVTQHPLPNTVKDFWRLVLDYHCTSVVMLNDVDPAQLCPQYWPENGVHRHGPIQVEFVSADLEEDIISRIFRIYNAARPQDGYRMVQQFQFLGWPMYRDTPVSKRSFLKLIRQVDKWQEEYNGGEGRTVVHCLNGGGRSGTFCAISIVCEMLRHQRTVDVFHAVKTLRNNKPNMVDLLDQYKFCYEVALEYLNSG

SEQ ID NO: 317 - protein, 244 aa, Homo sapiens
MELTIFILRLAIYILTFPLYLLNFLGLWSWICKKWFPYFLVRFTVIYNEQMASKKRELFSNLQEFAGPSGKLSLLEVGCGTGANFKFYPPGCRVTCIDPNPNFEKFLIKSIAENRHLQFERFVVAAGENMHQVADGSVDVVVCTLVLCSVKNQERILREVCRVLRPGGAFYFMEHVAAECSTWNYFWQQVLDPAWHLLFDGCNLTRESWKALERASFSKLKLQHIQAPLSWELVRPHIYGYAVK

SEQ ID NO: 318 - protein, 329 aa, Homo sapiens
MDPQCTMGLSNILFVMAFLLSGAAPLKIQAYFNETADLPCQFANSQNQSLSELVVFWQDQENLVLNEVYLGKEKFDSVHSKYMGRTSFDSDSWTLRLHNLQIKDKGLYQCIIHHKKPTGMIRIHQMNSELSVLANFSQPEIVPISNITENVYINLTCSSIHGYPEPKKMSVLLRTKNSTIEYDGVMQKSQDNVTELYDVSISLSVSFPDVTSNMTIFCILETDKTRLLSSPFSIELEDPQPPPDHIPWITAVLPTVIICVMVFCLILWKWKKKKRPRNSYKCGTNTMEREESEQTKKREKIHIPERSDEAQRVFKSSKTSSCDKSDTCF

SEQ ID NO: 319 - protein, 958 aa, Homo sapiens [sequence omitted]

SEQ ID NO: 320 - protein, 233 aa, Homo sapiens
MEGGAYGAGKAGGAFDPYTLVRQPHTILRVVSWLFSIVVFGSIVNEGYLNSASEGEEFCIYNRNPNACSYGVAVGVLAFLTCLLYLALDVYFPQISSVKDRKKAVLSDIGVSAFWAFLWFVGFCYLANQWQVSKPKDNPLNEGTDAARAAIAFSFFSIFTWAGQAVLAFQRYQIGADSALFSQDYMDPSQDSSMPYAPYVEPTGPDPAGMGGTYQQPANTFDTEPQGYQSQGY

SEQ ID NO: 321 - protein, 362 aa, Homo sapiens
MGTEATEQVSWGHYSGDEEDAYSAEPLPELCYKADVQAFSRAFQPSVSLTVAALGLAGNGLVLATHLAARRAARSPTSAHLLQLALADLLLALTLPFAAAGALQGWSLGSATCRTISGLYSASFHAGFLFLACISADRYVAIARALPAGPRPSTPGRAHLVSVIVWLLSLLLALPALLFSQDGQREGQRRCRLIFPEGLTQTVKGASAVAQVALGFALPLGVMVACYALLGRTLLAARGPERRRALRVVVALVAAFVVLQLPYSLALLLDTADLLAARERSCPASKRKDVALLVTSGLALARCGLNPVLYAFLGLRFRQDLRRLLRGGSCPSGPQPRRGCPRRPRLSSCSAPTETHSLSWDN

SEQ ID NO: 322 - protein, 360 aa, Homo sapiens
MNPTDIADTTLDESIYSNYYLYESIPKPCTKEGIKAFGELFLPPLYSLVFVFGLLGNSVVVLVLFKYKRLRSMTDVYLLNLAISDLLFVFSLPFWGYYAADQWVFGLGLCKMISWMYLVGFYSGIFFVMLMSIDRYLAIVHAVFSLRARTLTYGVITSLATWSVAVFASLPGFLFSTCYTERNHTYCKTKYSLNSTTWKVLSSLEINILGLVIPLGIMLFCYSMIIRTLQHCKNEKKNKAVKMIFAVVVLFLGFWTPYNIVLFLETLVELEVLQDCTFERYLDYAIQATETLAFVHCCLNPIIYFFLGEKFRKYILQLFKTCRGLFVLCQYCGLLQIYSADTPSSSYTQSTMDHDLHDAL

SEQ ID NO: 323 - protein, 395 aa, Homo sapiens
MSANATLKPLCPILEQMSRLQSHSNTSIRYIDHAAVLLHGLASLLGLVENGVILFVVGCRMRQTVVTTWVLHLALSDLLASASLPFFTYFLAVGHSWELGTTFCKLHSSIFFLNMFASGFLLSAISLDRCLQVVRPVWAQNHRTVAAAHKVCLVLWALAVLNTVPYFVFRDTISRLDGRIMCYYNVLLLNPGPDRDATCNSRQVALAVSKFLLAFLVPLAIIASSHAAVSLRLQHRGRRRPGRFVRLVAAVVAAFALCWGPYHVFSLLEARAHANPGLRPLVWRGLPFVTSLAFFNSVANPVLYVLTCPDMLRKLRRSLRTVLESVLVDDSELGGAGSSRRRRTSSTARSASPLALCSRPEEPRGPARLLGWLLGSCAASPQTGPLNRALSSTSS

SEQ ID NO: 324 - protein, 410 aa, Homo sapiens
MPGVCDRAPDFLSPSEDQVLRPALGSSVALNCTAWVVSGPHCSLPSVQWLKDGLPLGIGGHYSLHEYSWVKANLSEVLVSSVLGVNVTSTEVYGAFTCSIQNISFSSFTLQRAGPTSHVAAVLASLLVLLALLLAALLYVKCRLNVLLWYQDAYGEVEINDGKLYDAYVSYSDCPEDRKFVNFILKPQLERRRGYKLFLDDRDLLPRAEPSADLLVNLSRCRRLIVVLSDAFLSRAWCSHSFREGLCRLLELTRRPIFITFEGQRRDPAHPALRLLRQHRHLVTLLLWRPGSVTPSSDFWKEVQLALPRKVQYRPVEGDPQTQLQDDKDPMLILRGRVPEGRALDSEVDPDPEGDLGVRGPVFGEPSAPPHTSGVSLGESRSSEVDVSDLGSRNYSARTDFYCLVSKDDM

SEQ ID NO: 325 - protein, 173 aa, Homo sapiens
MVSWMICRLVVLVFGMLCPAYASYKAVKTKNIREYVRWMMYWIVFALFMAAEIVTDIFISWFPFYYEIKMAFVLWLLSPYTKGASLLYRKFVHPSLSRHEKEIDAYIVQAKERSYETVLSFGKRGLNIAASAAVQAATKGTGPGACRTATPRMSVGQILRQSPGRQPGPERSP

SEQ ID NO: 326 - protein, 2353 aa, Homo sapiens
MTEGARAADEVRVPLGAPPPGPAALVGASPESPGAPGREAERGSELGVSPSESPAAERGAELGADEEQRVPYPALAATVFFCLGQTTRPRSWCLRLVCNPWFEHVSMLVIMLNCVTLGMFRPCEDVECGSERCNILEAFDAFIFAFFAVEMVIKMVALGLFGQKCYLGDTWNRLDFFIVVAGMMEYSLDGHNVSLSAIRTVRVLRPLRAINRVPSMRILVTLLLDTLPMLGNVLLLCFFVFFIFGIVGVQLWAGLLRNRCFLDSAFVRNNNLTFLRPYYQTEEGEENPFICSSRRDNGMQKCSHIPGRRELRMPCTLGWEAYTQPQAEGVGAARNACINWNQYYNVCRSGDSNPHNGAINFDNIGYAWIAIFQVITLEGWVDIMYYVMDAHSFYNFIYFILLIIVGSFFMINLCLVVIATQFSETKQRESQLMREQRARHLSNDSTLASFSEPGSCYEELLKYVGHIFRKVKRRSLRLYARWQSRWRKKVDPSAVQGQGPGHRQRRAGRHTASVHHLVYHHHHHHHHHYHFSHGSPRRPGPEPGACDTRLVRAGAPPSPPSPGRGPPDAESVHSIYHADCHIEGPQERARVAHAAATAAASLRLATGLGTMNYPTILPSGVGSGKGSTSPGPKGKWAGGPPGTGGHGPLSLNSPDPYEKIPHVVGEHGLGQAPGHLSGLSVPCPLPSPPAGTLTCELKSCPYCTRALEDPEGELSGSESGDSDGRGVYEFTQDVRHGDRWDPTRPPRATDTPGPGPGSPQRRAQQRAAPGEPGWMGRLWVTFSGKLRRIVDSKYFSRGIMMAILVNTLSMGVEYHEQPEELTNALEISNIVFTSMFALEMLLKLLACGPLGYIRNPYNIFDGIIVVISVWEIVGQADGGLSVLRTFRLLRVLKLVRFLPALRRQLVVLVKTMDNVATFCTLLMLFIFIFSILGMHLFGCKFSLKTDTGDTVPDRKNFDSLLWAIVTVFQILTQEDWNVVLYNGMASTSSWAALYFVALMTFGNYVLFNLLVAILVEGFQAEGDANRSDTDEDKTSVHFEEDFHKLRELQTTELKMCSLAVTPNGHLEGRGSLSPPLIMCTAATPMPTPKSSPFLDAAPSLPDSRRGSSSSGDPPLGDQKPPASLRSSPCAPWGPSGAWSSRRSSWSSLGRAPSLKRRGQCGERESLLSGEGKGSTDDEAEDGRAAPGPRATPLRRAESLDPRPLRPAALPPTKCRDRDGQVVALPSDFFLRIDSHREDAAELDDDSEDSCCLRLHKVLEPYKPQWCRSREAWALYLFSPQNRFRVSCQKVITHKMFDHVVLVFIFLNCVTIALERPDIDPGSTERVFLSVSNYIFTAIFVAEMMVKVVALGLLSGEHAYLQSSWNLLDGLLVLVSLVDIVVAMASAGGAKILGVLRVLRLLRTLRPLRVISRAPGLKLVVETLISSLRPIGNIVLICCAFFIIFGILGVQLFKGKFYYCEGPDTRNISTKAQCRAAHYRWVRRKYNFDNLGQALMSLFVLSSKDGWVNIMYDGLDAVGVDQQPVQNHNPWMLLYFISFLLIVSFFVLNMFVGVVVENFHKCRQHQEAEEARRREEKRLRRLERRRRSTFPSPEAQRRPYYADYSPTRRSIHSLCTSHYLDLFITFIICVNVITMSMEHYNQPKSLDEALKYCNYVFTIVFVFEAALKLVAFGFRRFFKDRWNQLDLAIVLLSLMGITLEEIEMSAALPINPTIIRIMRVLRIARVLKLLKMATGMRALLDTVVQALPQVGNLGLLFMLLFFIYAALGVELFGRLECSEDNPCEGLSRHATFSNFGMAFLTLFRVSTGDNWNGIMKDTLRECSREDKHCLSYLPALSPVYFVTFVLVAQFVLVNVVVAVLMKHLEESNKEAREDAELDAEIELEMAQGPGSARRVDADRPPLPQESPGARDAPNLVARKVSVSRMLSLPNDSYMFRPVVPASAPHPRPLQEVEMETYGAGTPLGSVASVHSPPAESCASLQIPLAVSSPARSGEPLHALSPRGTARSPSLSRLLCRQEAVHTDSLEGKIDSPRDTLDPAEPGEKTPVRPVTQGGSLQSPPRSPRPASVRTRKHTFGQRCVSSRPAAPGGEEAEASDPADEEVSHITSSACPWQPTAEPHGPEASPVAGGERDLRRLYSVDAQGFLDKPGRADEQWRPSAELGSGEPGEAKAWGPEAEPALGARRKKKMSPPCISVEPPAEDEGSARPSAAEGGSTTLRRRTPSCEATPHRDSLEPTEGSGAGGDPAAKGERWGQASCRAEHLTVPSFAFEPLDLGVPSGDPFLDGSHSVTPESRASSSGAIVPLEPPESEPPMPVGDPPEKRRGLYLTVPQCPLEKPGSPSATPAPGGGADDPV

SEQ ID NO: 327 - protein, 346 aa, Homo sapiens
MAPRSLLLLLSGALALTDTWAGSHSLRYFSTAVSRPGRGEPRYIAVEYVDDTQFLRFDSDAAIPRMEPREPWVEQEGPQYWEWTTGYAKANAQTDRVALRNLLRRYNQSEAGSHTLQGMNGCDMGPDGRLLRGYHQHAYDGKDYISLNEDLRSWTAADTVAQITQRFYEAEEYAEEFRTYLEGECLELLRRYLENGKETLQRADPPKAHVAHHPISDHEATLRCWALGFYPAEITLTWQRDGEEQTQDTELVETRPAGDGTFQKWAAVVVPPGEEQRYTCHVQHEGLPQPLILRWEQSPQPTIPIVGIVAGLVVLGAVVTGAVVAAVMWRKKSSDRNRGSYSQAAV

SEQ ID NO: 328 - protein, 1069 aa, Homo sapiens
MPRAPRCRAVRSLLRSHYREVLPLATFVRRLGPQGWRLVQRGDPAAFRALVAQCLVCVPWDARPPPAAPSFRQVSCLKELVARVLQRLCERGAKNVLAFGFALLDGARGGPPEAFTTSVRSYLPNTVTDALRGSGAWGLLLRRVGDDVLVHLLARCALFVLVAPSCAYQVCGPPLYQLGAATQARPPPHASGPRRRLGCERAWNHSVREAGVPLGLPAPGARRRGGSASRSLPLPKRPRRGAAPEPERTPVGQGSWAHPGRTRGPSDRGFCVVSPARPAEEATSLEGALSGTRHSHPSVGRQHHAGPPSTSRPPRPWDTPCPPVYAETKHFLYSSGDKEQLRPSFLLSSLRPSLTGARRLVETIFLGSRPWMPGTPRRLPRLPQRYWQMRPLFLELLGNHAQCPYGVLLKTHCPLRAAVTPAAGVCAREKPQGSVAAPEEEDTDPRRLVQLLRQHSSPWQVYGFVRACLRRLVPPGLWGSRHNERRFLRNTKKFISLGKHAKLSLQELTWKMSVRDCAWLRRSPGVGCVPAAEHRLREEILAKFLHWLMSVYVVELLRSFFYVTETTFQKNRLFFYRKSVWSKLQSIGIRQHLKRVQLRELSEAEVRQHREARPALLTSRLRFIPKPDGLRPIVNMDYVVGARTFRREKRAERLTSRVKALFSVLNYERARRPGLLGASVLGLDDIHRAWRTFVLRVRAQDPPPELYFVKVDVTGAYDTIPQDRLTEVIASIIKPQNTYCVRRYAVVQKAAHGHVRKAFKSHVSTLTDLQPYMRQFVAHLQETSPLRDAVVIEQSSSLNEASSGLFDVFLRFMCHHAVRIRGKSYVQCQGIPQGSILSTLLCSLCYGDMENKLFAGIRRDGLLLRLVDDFLLVTPHLTHAKTFLSYARTSIRASLTFNRGFKAGRNMRRKLFGVLRLKCHSLFLDLQVNSLQTVCTNIYKILLLQAYRFHACVLQLPFHQQVWKNPTFFLRVISDTASLCYSILKAKNAGMSLGAKGAAGPLPSEAVQWLCHQAFLLKLTRHRVTYVPLLGSLRTAQTQLSRKLPGTTLTALEAAANPALPSDFKTILD

SEQ ID NO: 329 - protein, 549 aa, Homo sapiens
MDFLIVLVCLIFSVLSTIEQYAALATGTLFWMEIVLVVFFGTEYVVRLWSAGCRSKYVGLWGRLRFARKPISIIDLIVVVASMVVLCVGSKGQVFATSAIRGIRFLQILRMLHVDRQGGTWRLLGSVVFIHRQELITTLYIGFLGLIFSSYFVYLAEKDAVNESGRVEFGSYADALWWGVVTVTTIGYGDKVPQTWVGKTIASCFSVFAISFFALPAGILGSGFALKVQQKQRQKHFNRQIPAAASLIQTAWRCYAAENPDSSTWKIYIRKAPRSHTLLSPSPKPKKSVVVKKKKFKLDKDNGVTPGEKMLTVPHITCDPPEERRLDHFSVDGYDSSVRKSPTLLEVSMPHFMRTNSFAEDLDLEGETLLTPITHISQLREHHRATIKVIRRMQYFVAKKKFQQARKPYDVRDVIEQYSQGHLNLMVRIKELQRRLDQSIGKPSLFISVSEKSKDRGSNTIGARLNRVEDKVTQLDQRLALITDMLHQLLSLHGGSTPGSGGPPREGGAHITQPCGSGGSVDPELFLPSNTLPTYEQLTVPRRGPDEGS

SEQ ID NO: 330 - protein, 793 aa, Homo sapiens
MGLPEPGPLRLLALLLLLLLLLLLQLQHLAAAAADPLLGGQGPAKDCEKDQFQCRNERCIPSVWRCDEDDDCLDHSDEDDCPKKTCADSDFTCDNGHCIHERWKCDGEEECPDGSDESEATCTKQVCPAEKLSCGPTSHKCVPASWRCDGEKDCEGGADEAGCATWLNECLHNNGGCSHICTDLKIGFECTCPAGFQLLDQKTCGDIDECKDPDACSQICVNYKGYFKCECYPGYEMDLLTKNCKAAAGKSPSLIFTNRHEVRRIDLVKRNYSRLIPMLKNVVALDVEVATNRIYWCDLSYRKIYSAYMDKASDPKEQEVLIDEQLHSPEGLAVDWVHKHIYWTDSGNKTISVATVDGGRRRTLFSRNLSEPRAIAVDPLRGFMYWSDWGDQAKIEKSGLNGVDRQTLVSDNIEWPNGITLDLLSQRLYWVDSKLHQLSSIDFSGGNRKTLISSTDFLSHPFGIAVFEDKVFWTDLENEAIFSANRLNGLEISILAENLNNPHDIVIFHELKQPRAPDACELSVQPNGGCEYLCLPAPQISSHSPKYTCACPDTMWLGPDMKRCYRAPQSTSTTTLASTMTRTVPATTRAPGTTVHRSTYQNHSTETPSLTAAVPSSVSVPRAPSISPSTLSPATSNHSQHYANEDSKMGSTVTAAVIGIIVPIVVIALLCMSGYLIWRNWKRKNTKSMNFDNPVYRKTTEEEDEDELHIGRTAQIGHVYPAAISSFDRPLWAEPCLGETREPEDPAPALKELFVLPGEPRSQLHQLPKNPLSELPVVKSKRVALSLEDDGLP

SEQ ID NO: 331 - protein, 271 aa, Homo sapiens
MTAWILLPVSLSAFSITGIWTVYAMAVMNHHVCPVENWSYNESCPPDPAEQGGPKTCCTLDDVPLISKCGSYPPESCLFSLIGNMGAFMVALICLLRYGQLLEQSRHSWVNTTALITGCTNAAGLLVVGNFQVDHARSLHYVGAGVAFPAGLLFVCLHCALSYQGATAPLDLAVAYLRSVLAVIAFITLVLSGVFFVHESSQLQHGAALCEWVCVIDILIFYGTFSYEFGAVSSDTLVAALQPTPGRACKSSGSSSTSTHLNCAPESIAMI

SEQ ID NO: 332 - protein, 834 aa, Homo sapiens
MAVEDEGLRVFQSVKIKIGEAKNLPSYPGPSKMRDCYCTVNLDQEEVFRTKIVEKSLCPFYGEDFYCEIPRSFRHLSFYIFDRDVFRRDSIIGKVAIQKEDLQKYHNRDTWFQLQHVDADSEVQGKVHLELRLSEVITDTGVVCHKLATRIVECQGLPIVNGQCDPYATVTLAGPFRSEAKKTKVKRKTNNPQFDEVFYFEVTRPCSYSKKSHFDFEEEDVDKLEIRVDLWNASNLKFGDEFLGELRIPLKVLRQSSSYEAWYFLQPRDNGSKSLKPDDLGSLRLNVVYTEDHVFSSDYYSPLRDLLLKSADVEPVSASAAHILGEVCREKQEAAVPLVRLFLHYGRVVPFISAIASAEVKRTQDPNTIFRGNSLASKCIDETMKLAGMHYLHVTLKPAIEEICQSHKPCEIDPVKLKDGENLENNMENLRQYVDRVFHAITESGVSCPTVMCDIFFSLREAAAKRFQDDPDVRYTAVSSFIFLRFFAPAILSPNLFQLTPHHTDPQTSRTLTLISKTVQTLGSLSKSKSASFKESYMATFYEFFNEQKYADAVKNFLDLISSSGRRDPKSVEQPIVLKEGFMIKRAQGRKRFGMKNFKKRWFRLTNHEFTYHKSKGDQPLYSIPIENILAVEKLEEESFKMKNMFQVIQPERALYIQANNCVEAKDWIDILTKVSQCNQKRLTVYHPSAYLSGHWLCCRAPSDSAPGCSPCTGGLPANIQLDIDGDRETERIYSLFNLYMSKLEKMQEACGSKSVYDGPEQEEYSTFVIDDPQETYKTLKQVIAGVGALEQEHAQYKRDKFKKTKYGSQEHPIGDKSFQNYIRQQSETSTHSI

SEQ ID NO: 333 - protein, 288 aa, Homo sapiens
MQIPQAPWPVVWAVLQLGWRPGWFLDSPDRPWNPPTFSPALLVVTEGDNATFTCSFSNTSESFVLNWYRMSPSNQTDKLAAFPEDRSQPGQDCRFRVTQLPNGRDFHMSVVRARRNDSGTYLCGAISLAPKAQIKESLRAELRVTERRAEVPTAHPSPSPRPAGQFQTLVVGVVGGLLGSLVLLVWVLAVICSRAARGTIGARRTGQPLKEDPSAVPVFSVDYGELDFQWREKTPEPPVPCVPEQTEYATIVFPSGMGTSSPARRGSADGPRSAQPLRPEDGHCSWPL

SEQ ID NO: 334 - protein, 228 aa, Homo sapiens
MSYVFVNDSSQTNVPLLQACIDGDFNYSKRLLESGFDPNIRDSRGRTGLHLAAARGNVDICQLLHKFGADLLATDYQGNTALHLCGHVDTIQFLVSNGLKIDICNHQGATPLVLAKRRGVNKDVIRLLESLEEQEVKGFNRGTHSKLETMQTAESESAMESHSLLNPNLQQGEGVLSSFRTTWQEFVEDLGFWRVLLLIFVIALLSLGIAYYVSGVLPFVENQPELVH

SEQ ID NO: 335 - protein, 812 aa, Homo sapiens
MAAVTRDFGEMLLHSGRVLPAEAQPWGAPVEVESFLVHPGDLLQLRCRLRDDVQSINWLRDGVQLAESNRTRITGEEVEVQDSVPADSGLYACVTSSPSGSDTTYFSVNVSDALPSSEDDDDDDDSSSEEKETDNTKPNRMPVAPYWTSPEKMEKKLHAVPAAKTVKFKCPSSGTPNPTLRWLKNGKEFKPDHRIGGYKVRYATWSIIMDSVVPSDKGNYTCIVENEYGSINHTYQLDVVERSPHRPILQAGLPANKTVALGSNVEFMCKVYSDPQPHIQWLKHIEVNGSKIGPDNLPYVQILKTAGVNTTDKEMEVLHLRNVSFEDAGEYTCLAGNSIGLSHHSAWLTVLEALEERPAVMTSPLYLEIIIYCTGAFLISCMVGSVIVYKMKSGTKKSDFHSQMAVHKLAKSIPLRRQVSADSSASMNSGVLLVRPSRLSSSGTPMLAGVSEYELPEDPRWELPRDRLVLGKPLGEGCFGQVVLAEAIGLDKDKPNRVTKVAVKMLKSDATEKDLSDLISEMEMMKMIGKHKNIINLLGACTQDGPLYVIVEYASKGNLREYLQARRPPGLEYCYNPSHNPEEQLSSKDLVSCAYQVARGMEYLASKKCIHRDLAARNVLVTEDNVMKIADFGLARDIHHIDYYKKTTNGRLPVKWMAPEALFDRIYTHQSDVWSFGVLLWEIFTLGGSPYPGVPVEELFKLLKEGHRMDKPSNCTNELYMMMRDCWHAVPSQRPTFKQLVEDLDRIVALTSNQEYLDLSMPLDQYSPSFPDTRSSTCSSGEDSVFSHEPLPEEPCLPRHPAQLANGGLKRR

SEQ ID NO: 336 - protein, 491 aa, Homo sapiens
MAGQGLPLHVATLLTGLLECLGFAGVLFGWPSLVFVFKNEDYFKDLCGPDAGPIGNATGQADCKAQDERFSLIFTLGSFMNNFMTFPTGYIFDRFKTTVARLIAIFFYTTATLIIAFTSAGSAVLLFLAMPMLTIGGILFLITNLQIGNLFGQHRSTIITLYNGAFDSSSAVFLIIKLLYEKGISLRASFIFISVCSTWHVARTFLLMPRGHIPYPLPPNYSYGLCPGNGTTKEEKETAEHENRELQSKEFLSAKEETPGAGQKQELRSFWSYAFSRRFAWHLVWLSVIQLWHYLFIGTLNSLLTNMAGGDMARVSTYTNAFAFTQFGVLCAPWNGLLMDRLKQKYQKEARKTGSSTLAVALCSTVPSLALTSLLCLGFALCASVPILPLQYLTFILQVISRSFLYGSNAAFLTLAFPSEHFGKLFGLVMALSAVVSLLQFPIFTLIKGSLQNDPFYVNVMFMLAILLTFFHPFLVYRECRTWKESPSAIA

SEQ ID NO: 337 - protein, 651 aa, Homo sapiens
MGLADASGPRDTQALLSATQAMDLRRRDYHMERPLLNQEHLEELGRWGSAPRTHQWRTWLQCSRARAYALLLQHLPVLVWLPRYPVRDWLLGDLLSGLSVAIMQLPQGLAYALLAGLPPVFGLYSSFYPVFIYFLFGTSRHISVVLEVCWKLPQSKVGTVVTAAVAGVVLVVVKLLNDKLQQQLPMPIPGELLTLIGATGISYGMGLKHRFEVDVVGNIPAGLVPPVAPNTQLFSKLVGSAFTIAVVGFAIAISLGKIFALRHGYRVDSNQELVALGLSNLIGGIFQCFPVSCSMSRSLVQESTGGNSQVAGAISSLFILLIIVKLGELFHDLPKAVLAAIIIVNLKGMLRQLSDMRSLWKANRADLLIWLVTFTATILLNLDLGLVVAVIFSLLLVVVRTQMPHYSVLGQVPDTDIYRDVAEYSEAKEVRGVKVFRSSATVYFANAEFYSDALKQRCGVDVDFLISQKKKLLKKQEQLKLKQLQKEEKLRKQAASPKGASVSINVNTSLEDMRSNNVEDCKMMVSSGDKMEDATANGQEDSKAPDGSTLKALGLPQPDFHSLILDLGALSFVDTVCLKSLKNIFHDFREIEVEVYMAACHSPVVSQLEAGHFFDASITKKHLFASVHDAVTFALQHPRPVPDSPVSVTRL

SEQ ID NO: 338 - protein, 669 aa, Homo sapiens
MVSWGRFICLVVVTMATLSLARPSFSLVEDTTLEPEDAISSGDDEDDTDGAEDFVSENSNNKRAPYWTNTEKMEKRLHAVPAANTVKFRCPAGGNPMPTMRWLKNGKEFKQEHRIGGYKVRNQHWSLIMESVVPSDKGNYTCVVENEYGSINHTYHLDVVERSPHRPILQAGLPANASTVVGGDVEFVCKVYSDAQPHIQWIKHVEKNGSKYGPDGLPYLKVLKAAGVNTTDKEIEVLYIRNVTFEDAGEYTCLAGNSIGISFHSAWLTVLPAPGREKEITASPDYLEIAIYCIGVFLIACMVVTVILCRMKNTTKKPDFSSQPAVHKLTKRIPLRRQVSAESSSSMNSNTPLVRITTRLSSTADTPMLAGVSEYELPEDPKWEFPRDKLTLGKPLGEGCFGQVVMAEAVGIDKDKPKEAVTVAVKMLKDDATEKDLSDLVSEMEMMKMIGKHKNIINLLGACTQDGPLYVIVEYASKGNLREYLRARRPPGMEYSYDINRVPEEQMTFKDLVSCTYQLARGMEYLASQKCIHRDLAARNVLVTENNVMKIADFGLARDINNIDYYKKTTNGRLPVKWMAPEALFDRVYTHQSDVWSFGVLMWEIFTLGGSPYPGIPVEELFKLLKEGHRMDKPANCTNELYMMMRDCWHAVPSQRPTFKQLVEDLDRI

SEQ ID NO: 339 - protein, 562 aa, Homo sapiens
MRLRLRLLALLLLLLAPPARAPKPSAQDVSLGVDWLTRYGYLPPPHPAQAQLQSPEKLRDAIKVMQRFAGLPETGRMDPGTVATMRKPRCSLPDVLGVAGLVRRRRRYALSGSVWKKRTLTWRVRSFPQSSQLSQETVRVLMSYALMAWGMESGLTFHEVDSPQGQEPDILIDFARAFHQDSYPFDGLGGTLAHAFFPGEHPISGDTHFDDEETWTFGSKDGEGTDLFAVAVHEFGHALGLGHSSAPNSIMRPFYQGPVGDPDKYRLSQDDRDGLQQLYGKAPQTPYDKPTRKPLAPPPQPPASPTHSPSFPIPDRCEGNFDAIANIRGETFFFKGPWFWRLQPSGQLVSPRPARLHRFWEGLPAQVRVVQAAYARHRDGRILLFSGPQFWVFQDRQLEGGARPLTELGLPPGEEVDAVFSWPQNGKTYLVRGRQYWRYDEAAARPDPGYPRDLSLWEGAPPSPDDVTVSNAGDTYFFKGAHYWRFPKNSIKTEPDAPQPMGPNWLDCPAPSSGPRAPRPPKATPVSETCDCQCELNQAAGRWPAPIPLLLLPLLVGGVASR

SEQ ID NO: 340 - protein, 242 aa, Homo sapiens
MGPRARPALLLLMLLQTAVLQGRLLRSHSLHYLFMGASEQDLGLSLFEALGYVDDQLFVFYDHESRRVEPRTPWVSSRISSQMWLQLSQSLKGWDHMFTVDFWTIMENHNHSKVTTLRCRALNYYPQNITMKWLKDKQPMDAKEFEPKDVLPNGDGTYQGWITLAVPPGEEQRYTCQVEHPGLDQPLIVIWEPSPSGTLVIGVISGIAVFVVILFIGILFIILRKRQGSRGAMGHYVLAERE

SEQ ID NO: 341 - protein, 179 aa, Homo sapiens
MAVFKTTLWRLISGTLGIICLSLMSTLGILLKNSFTKLSIEPAFTPGPNIELQKDSDCCSCQEKWVGYRCNCYFISSEQKTWNESRHLCASQKSSLLQLQNTDELDFMSSSQQFYWIGLSYSEEHTAWLWENGSALSQYLFPSFETFNTKNCIAYNPNGNALDESCEDKNRYICKQQLI

SEQ ID NO: 342 - protein, 1204 aa, Homo sapiens
MYVTMMMTDQIPLELPPLLNGEVAMMPHLVNGDAAQQVILVQVNPGETFTIRAEDGTLQCIQGPAEVPMMSPNGSIPPIHVPPGYISQVIEDSTGVRRVVVTPQSPECYPPSYPSAMSPTHHLPPYLTHHPHFIHNSHTAYYPPVTGPGDMPPQFFPQHHLPHTIYGEQEIIPFYGMSTYITREDQYSKPPHKKLKDRQIDRQNRLNSPPSSIYKSSCTTVYNGYGKGHSGGSGGGGSGSGPGIKKTERRARSSPKSNDSDLQEYELEVKRVQDILSGIEKPQVSNIQARAVVLSWAPPVGLSCGPHSGLSFPYSYEVALSDKGRDGKYKIIYSGEELECNLKDLRPATDYHVRVYAMYNSVKGSCSEPVSFTTHSCAPECPFPPKLAHRSKSSLTLQWKAPIDNGSKITNYLLEWDEGKRNSGFRQCFFGSQKHCKLTKLCPAMGYTFRLAARNDIGTSGYSQEVVCYTLGNIPQMPSAPRLVRAGITWVTLQWSKPEGCSPEEVITYTLEIQEDENDNLFHPKYTGEDLTCTVKNLKRSTQYKFRLTASNTEGKSCPSEVLVCTTSPDRPGPPTRPLVKGPVTSHGFSVKWDPPKDNGGSEILKYLLEITDGNSEANQWEVAYSGSATEYTFTHLKPGTLYKLRACCISTGGHSQCSESLPVRTLSIAPGQCRPPRVLGRPKHKEVHLEWDVPASESGCEVSEYSVEMTEPEDVASEVYHGPELECTVGNLLPGTVYRFRVRALNDGGYGPYSDVSEITTAAGPPGQCKAPCISCTPDGCVLVGWESPDSSGADISEYRLEWGEDEESLELIYHGTDTRFEIRDLLPAAQYCCRLQAFNQAGAGPYSELVLCQTPASAPDPVSTLCVLEEEPLDAYPDSPSACLVLNWEEPCNNGSEILAYTIDLGDTSITVGNTTMHVMKDLLPETTYRIRIQAINEIGAGPFSQFIKAKTRPLPPLPPRLECAAAGPQSLKLKWGDSNSKTHAAEDIVYTLQLEDRNKRFISIYRGPSHTYKVQRLTEFTCYSFRIQAASEAGEGPFSETYTFSTTKSVPPTIKAPRVTQLEGNSCEILWETVPSMKGDPVNYILQVLVGRESEYKQVYKGEEATFQISGLQTNTDYRFRVCACRRCLDTSQELSGAFSPSAAFVLQRSEVMLTGDMGSLDDPKMKSMMPTDEQFAAIIVLGFATLSILFAFILQYFLMK

SEQ ID NO: 343 - protein, 443 aa, Homo sapiens
MDFPCLWLGLLLPLVAALDFNYHRQEGMEAFLKTVAQNYSSVTHLHSIGKSVKGRNLWVLVVGRFPKEHRIGIPEFKYVANMHGDETVGRELLLHLIDYLVTSDGKDPEITNLINSTRIHIMPSMNPDGFEAVKKPDCYYSIGRENYNQYDLNRNFPDAFEYNNVSRQPETVAVMKWLKTETFVLSANLHGGALVASYPFDNGVQATGALYSRSLTPDDDVFQYLAHTYASRNPNMKKGDECKNKMNFPNGVTNGYSWYPLQGGMQDYNYIWAQCFEITLELSCCKYPREEKLPSFWNNNKASLIEYIKQVHLGVKGQVFDQNGNPLPNVIVEVQDRKHICPYRTNKYGEYYLLLLPGSYIINVTVPGHDPHITKVIIPEKSQNFSALKKDILLPFQGQLDSIPVSNPSCPMIPLYRNLPDHSAATKPSLFLFLVSLLHIFFK

SEQ ID NO: 344 - protein, 374 aa, Homo sapiens
MSGESMNFSDVFDSSEDYFVSVNTSYYSVDSEMLLCSLQEVRQFSRLFVPIAYSLICVFGLLGNILVVITFAFYKKARSMTDVYLLNMAIADILFVLTLPFWAVSHATGAWVFSNATCKLLKGIYAINFNCGMLLLTCISMDRYIAIVQATKSFRLRSRTLPRSKIICLVVWGLSVIISSSTFVFNQKYNTQGSDVCEPKYQTVSEPIRWKLLMLGLELLFGFFIPLMFMIFCYTFIVKTLVQAQNSKRHKAIRVIIAVVLVFLACQIPHNMVLLVTAANLGKMNRSCQSEKLIGYTKTVTEVLAFLHCCLNPVLYAFIGQKFRNYFLKILKDLWCVRRKYKSSGFSCAGRYSENISRQTSETADNDNASSFTM

SEQ ID NO: 345 - protein, 287 aa, Homo sapiens
MSSTLPALLCVGLCLSQRISAQQQTLPKPFIWAEPHFMVPKEKQVTICCQGNYGAVEYQLHFEGSLFAVDRPKPPERINKVQFYIPDMNSRMAGQYSCIYRVGELWSEPSNLLDLVVTEMYDTPTLSVHPGPEVISGEKVTFYCRLDTATSMFLLLKEGRSSHVQRGYGKVQAEFPLGPVTTAHRGTYRCFGSYNNHAWSFPSEPVKLLVTGDIENTSLAPEDPTFPDHALWDHTAQNLLRMGLAFLVLVALVWFLVEDWLSRKRTRERASRASTWEGRRRLNTQTL

SEQ ID NO: 346 - protein, 123 aa, Homo sapiens
MAEKRHTRDSEAQRLPDSFKDSPSKGLGPCGWILVAFSFLFTVITFPISIWMCIKVIAAEGEMNASRALKEASMVITESPAALQLRYLQTLTTIAAEKNSTIVFPLPIDMLQGIIGAKHSHLG

SEQ ID NO: 347 - protein, 242 aa, Homo sapiens
MGSACIKVTKYFLFLFNLIFFILGAVILGFGVWILADKSSFISVLQTSSSSLRMGAYVFIGVGAVTMLMGFLGCIGAVNEVRCLLGLLKQEMGGIVTELIRDYNSSREDSLQDAWDYVQAQVKCCGWVSFYNWTDNAELMNRPEVTYPCSCEVKGEEDNSLSVRKGFCEAPGNRTQSGNHPEDWPVYQEGCMEKVQAWLQENLGIILGVGVGVAIIELLGMVLSICLCRHVHSEDYSKVPKY

SEQ ID NO: 348 - protein, 248 aa, Homo sapiens
MEGDCLSCMKYLMFVFNFFIFLGGACLLAIGIWVMVDPTGFREIVAANPLLLTGAYILLAMGGLLFLLGFLGCCGAVRENKCLLLFFFLFILIIFLAELSAAILAFIFRENLTREFFTKELTKHYQGNNDTDVFSATWNSVMITFGCCGVNGPEDFKFASVFRLLTLDSEEVPEACCRREPQSRDGVLLSREECLLGRSLFLNKQGCYTVILNTFETYVYLAGALAIGVLAIELFAMIFAMCLFRGIQ

SEQ ID NO: 349 - protein, 178 aa, Homo sapiens
MPRLHDHFWSCSCAHSARRRGPPRASAKLDFANNVQLSLTLAALSLGLWWTFDRSRSGLGLGITIAFLATLITQFLVYNGVYQYTSPDFLYIRSWLPCIFFSGGVTVGNIGRQLAMLIPFCEELNLKTTWLFHKTRSNYRVFLKSPIVIESSKPPILRARKILEENLTVDYDKDYLFS

SEQ ID NO: 350 - protein, 631 aa, Homo sapiens
MPRYGASLRQSCPRSGREQGQDGTAGAPGLLWMGLVLALALALALALALSDSRVLWAPAEAHPLSPQGHPARLHRIVPRLRDVFGWGNLTCPICKGLFTAINLGLKKEPNVARVGSVAIKLCNLLKIAPPAVCQSIVHLFEDDMVEVWRRSVLSPSEACGLLLGSTCGHWDIFSSWNISLPTVPKPPPKPPSPPAPGAPVSRILFLTDLHWDHDYLEGTDPDCADPLCCRRGSGLPPASRPGAGYWGEYSKCDLPLRTLESLLSGLGPAGPFDMVYWTGDIPAHDVWHQTRQDQLRALTTVTALVRKFLGPVPVYPAVGNHESTPVNSFPPPFIEGNHSSRWLYEAMAKAWEPWLPAEALRTLRIGGFYALSPYPGLRLISLNMNFCSRENFWLLINSTDPAGQLQWLVGELQAAEDRGDKVHIIGHIPPGHCLKSWSWNYYRIVARYENTLAAQFFGHTHVDEFEVFYDEETLSRPLAVAFLAPSATTYIGLNPGYRVYQIDGNYSGSSHVVLDHETYILNLTQANIPGAIPHWQLLYRARETYGLPNTLPTAWHNLVYRMRGDMQLFQTFWFLYHKGHPPSEPCGTPCRLATLCAQLSARADSPALCRHLMPDGSLPEAQSLWPRPLFC

SEQ ID NO: 351 - protein, 904 aa, Homo sapiens
MEWGSESAAVRRHRVGVERREGAAAAPPPEREARAQEPLVDGCSGGGRTRKRSPGGSGGASRGAGTGLSEVRAALGLALYLIALRTLVQLSLQQLVLRGAAGHRGEFDALQARDYLEHITSIGPRTTGSPENEILTVHYLLEQIKLIEVQSNSLHKISVDVQRPTGSFSIDFLGGFTSYYDNITNVVVKLEPRDGAQHAVLANCHFDSVANSPGASDDAVSCSVMLEVLRVLSTSSEALHHAVIFLFNGAEENVLQASHGFITQHPWASLIRAFINLEAAGVGGKELVFQTGPENPWLVQAYVSAAKHPFASVVAQEVFQSGIIPSDTDFRIYRDFGNIPGIDLAFIENGYIYHTKYDTADRILTDSIQRAGDNILAVLKHLATSDMLAAASKYRHGNMVFFDVLGLFVIAYPSRIGSIINYMVVMGVVLYLGKKFLQPKHKTGNYKKDFLCGLGITLISWFTSLVTVLIIAVFISLIGQSLSWYNHFYVSVCLYGTATVAKIILIHTLAKRFYYMNASAQYLGEVFFDISLFVHCCFLVTLTYQGLCSAFISAVWVAFPLLTKLCVHKDFKQHGAQGKFIAFYLLGMFIPYLYALYLIWAVFEMFTPILGRSGSEIPPDVVLASILAGCTMILSSYFINFIYLAKSTKKTMLTLTLVCAITFLLVCSGTFFPYSSNPANPKPKRVFLQHMTRTFHDLEGNAVKRDSGIWINGFDYTGISHITPHIPEINDSIRAHCEENAPLCGFPWYLPVHFLIRKNWYLPAPEVSPRNPPHFRLISKEQTPWDSIKLTFEATGPSHMSFYVRAHKGSTLSQWSLGNGTPVTSKGGDYFVFYSHGLQASAWQFWIEVQVSEEHPEGMVTVAIAAHYLSGEDKRSPQLDALKEKFPDWTFPSAWVCTYDLFVF

SEQ ID NO: 352 - protein, 835 aa, Homo sapiens
MLSRLFRMHGLFVASHPWEVIVGTVTLTICMMSMNMFTGNNKICGWNYECPKFEEDVLSSDIIILTITRCIAILYIYFQFQNLRQLGSKYILGIAGLFTIFSSFVFSTVVIHFLDKELTGLNEALPFFLLLIDLSRASTLAKFALSSNSQDEVRENIARGMAILGPTFTLDALVECLVIGVGTMSGVRQLEIMCCFGCMSVLANYFVFMTFFPACVSLVLELSRESREGRPIWQLSHFARVLEEEENKPNPVTQRVKMIMSLGLVLVHAHSRWIADPSPQNSTADTSKVSLGLDENVSKRIEPSVSLWQFYLSKMISMDIEQVITLSLALLLAVKYIFFEQTETESTLSLKNPITSPVVTQKKVPDNCCRREPMLVRNNQKCDSVEEETGINRERKVEVIKPLVAETDTPNRATFVVGNSSLLDTSSVLVTQEPEIELPREPRPNEECLQILGNAEKGAKFLSDAEIIQLVNAKHIPAYKLETLMETHERGVSIRRQLLSKKLSEPSSLQYLPYRDYNYSLLGGGASSRVLADGMTRGPVVRLPRACDSAEVKAWLETSEGFAVIKEAFDSTSRFARLQKLHTSIAGRNLYIRFQSRSGDAMGMNMISKGTEKALSKLHEYFPEMQILAVSGNYCTDKKPAAINWIEGRGKSVVCEAVIPAKVVREVLKTTTEAMIEVNINKNLVGSAMAGSIGGYNAHAANIVTAIYIACGQDAAQNVGSSNCITLMEASGPTNEDLYISCTMPSIEIGTVGGGTNLLPQQACLQMLGVQGACKDNPGENARQLARIVCGTVMAGELSLMAALAAGHLVKSHMIHNRSKINLQDLQGACTKKTA

SEQ ID NO: 353 - protein, 397 aa, Homo sapiens
MLLWTAVLLFVPCVGKTVWLYLQAWPNPVFEGDALTLRCQGWKNTPLSQVKFYRDGKFLHFSKENQTLSMGAATVQSRGQYSCSGQVMYIPQTFTQTSETAMVQVQELFPPPVLSAIPSPEPREGSLVTLRCQTKLHPLRSALRLLFSFHKDGHTLQDRGPHPELCIPGAKEGDSGLYWCEVAPEGGQVQKQSPQLEVRVQAPVSRPVLTLHHGPADPAVGDMVQLLCEAQRGSPPILYSFYLDEKIVGNHSAPCGGTTSLLFPVKSEQDAGNYSCEAENSVSRERSEPKKLSLKGSQVLFTPASNWLVPWLPASLLGLMVIAAALLVYVRSWRKAGPLPSQIPPTAPGGEQCPLYANVHHQKGKDEGVVYSVVHRTSKRSEGQFYHLCGGEMPAAQ

SEQ ID NO: 354 - protein, 973 aa, Homo sapiens
MSPVRRWGSPCLFPLQLFSLCWVLSVAQSKTVRYSTFEEDAPGTVIGTLAEDLHMKVSGDTSFRLMKQFNSSLLRVREGDGQLTVGDAGLDRERLCGQAPQCVLAFDVVSFSQEQFRLVHVEVEVRDVNDHAPRFPRAQIPVEVSEGAAVGTRIPLEVPVDEDVGANGLQTVRLAEPHSPFRVELQTRADGAQCADLVLLQELDRESQAAYSLELVAQDGGRPPRSATAALSVRVLDANDHSPAFPQGAVAEVELAEDAPVGSLLLDLDAADPDEGPNGDVVFAFGARTPPEARRLFRLDPRSGRLTLAGPVDYERQDTYELDVRAQDRGPGPRAATCKVIVRIRDVNDNAPDIAITPLAAPGAPATSPFAAAAAAAALGGADASSPAGAGTPEAGATSLVPEGAARESLVALVSTSDRDSGANGQVRCALYGHEHFRLQPAYAGSYLVVTAASLDRERIAEYNLTLVAEDRGAPPLRTVRPYTVRVGDENDNAPLFTRPVYEVSVRENNPPGAYLATVAARDRDLGRNGQVTYRLLEAEVGRAGGAVSTYVSVDPATGAIYALRSFDYETLRQLDVRIQASDGGSPQLSSSALVQVRVLDQNDHAPVLVHPAPANGSLEVAVPGRTAKDTVVARVQARDADEGANGELAFELQQQEPREAFAIGRRTGEILLTGDLSQEPPGRVFRALLVISDGGRPPLTTTATVSFVVTAGGGRGPAAPASAGSPERSRPPGSRLGVSGSVLQWDTPLIVIIVLAGSCTLLLAAIIAIATTCNRRKKEPYGASPGFGKEPAPPVAVWKGHSFNTISGREAEKFSGKDSGKGDSDFNDSDSDISGDALKKDLINHMQSGLWACTAECKILGHSDRCWSPSCSGPNAHPSPHPPAQMSTFCKSTSLPRDPLRRDNYYQAQLPKTVGLQSVYEKVLHRDYDRTVTLLSPPRPGRLPDLQEIGVPLYQSPPGRYLSPKKGANENV

SEQ ID NO: 355 - protein, 454 aa, Homo sapiens
MTWRAAASTCAALLILLWALTTEGDLKVEMMAGGTQITPLNDNVTIFCNIFYSQPLNITSMGITWFWKSLTFDKEVKVFEFFGDHQEAFRPGAIVSPWRLKSGDASLRLPGIQLEEAGEYRCEVVVTPLKAQGTVQLEVVASPASRLLLDQVGMKENEDKYMCESSGFYPEAINITWEKQTQKFPHPIEISEDVITGPTIKNMDGTFNVTSCLKLNSSQEDPGTVYQCVVRHASLHTPLRSNFTLTAARHSLSETEKTDNFSIHWWPISFIGVGLVLLIVLIPWKKICNKSSSAYTPLKCILKHWNSFDTQTLKKEHLIFFCTRAWPSYQLQDGEAWPPEGSVNINTIQQLDVFCRQEGKWSEVPYVQAFFALRDNPDLCQCCRIDPALLTVTSGKSIDDNSTKSEKQTPREHSDAVPDAPILPVSPIWEPPPATTSTTPVLSSQPPTLLLPLQ

SEQ ID NO: 356 - protein, 8392 aa, Homo sapiens
MQRLQDEQEIVQKRTFTKWINSHLAKRKPPMVVDDLFEDMKDGVKLLALLEVLSGQKLPCEQGRRMKRIHAVANIGTALKFLEGRKIKLVNINSTDIADGRPSIVLGLMWTIILYFQIEELTSNLPQLQSLSSSASSVDSIVSSETPSPPSKRKVTTKIQGNAKKALLKWVQYTAGKQTGIEVKDFGKSWRSGVAFHSVIHAIRPELVDLETVKGRSNRENLEDAFTIAETELGIPRLLDPEDVDVDKPDEKSIMTYVAQFLKHYPDIHNASTDGQEDDEILPGFPSFANSVQNFKREDRVIFKEMKVWIEQFERDLTRAQMVESNLQDKYQSFKHFRVQYEMKRKQIEHLIQPLHRDGKLSLDQALVKQSWDRVTSRLFDWHIQLDKSLPAPLGTIGAWLYRAEVALREEITVQQVHEETANTIQRKLEQHKRKCQTIMDLLQNTDAHKRAFHEIYRTRSVNGIPVPPDQLEDMAERFHFVSSTSELHLMKMEFLELKYRLLSLLVLAESKLKSWIIKYGRRESVEQLLQNYVSFIENSKFFEQYEVTYQILKQTAEMYVKADGSVEEAENVMKFMNETTAQWRNLSVEVRSVRSMLEEVISNWDRYGNTVASLQAWLEDAEKMLNQSENAKKDFFRNLPHWIQQHTAMNDAGNFLIETCDEMVSRDLKQQLLLLNGRWRELFMEVKQYAQADEMDRMKKEYTDCVVTLSAFATEAHKKLSEPLEVSFMNVKLLIQDLEDIEQRVPVMDAQYKIITKTAHLITKESPQEEGKEMFATMSKLKEQLTKVKECYSPLLYESQQLLIPLEELEKQMTSFYDSLGKINEIITVLEREAQSSALFKQKHQLRILKCKWCNSSQKMTLCLVLGSMISMLSTAKITIAGYKSEVEVSELLACQENCKKTLTLIEKGSQSVQKFVTLSNVLKHFDQTRLQTDCRYSCCFSVMRKQHHIMIVFHIKSMVKKTGDWKKHVETNSRLMKKFEESRAELEKVLRIAQEGLEEKGDPEELLRRHTEFFSQLDQRVLNAFLKACDELTDILPEQEQQGLQEAVRKLHKQWKDLQGEAPYHLLHLKIDVEKNRFLASVEECRTELDRETKLMPQEGSEKIIKEHRVFFSDKGPHHLCEKRLQLIEELCVKLPVRDPVRDTPGTCHVTLKELRAAIDSTYRKLMEDPDKWKDYTSRFSEFSSWISTNETQLKGIKGEAIDTANHGEVKRAVEEIRNGVTKRGETLSWLKSRLKVLTEVSSENEAQKQGDELAKLSSSFKALVTLLSEVEKMLSNFGDCVQYKEIVKNSLEELISGSKEVQEQAEKILDTENLFEAQQLLLHHQQKTKRISAKKRDVQQQIAQAQQGEGGLPDRGHEELRKLESTLDGLERSRERQERRIQVTLRKWERFETNKETVVRYLFQTGSSHERFLSFSSLESLSSELEQTKEFSKRTESIAVQAENLVKEASEIPLGPQNKQLLQQQAKSIKEQVKKLEDTLEEEYVIDNKTMEMVKTKWDHFGSNFETLSVWITEKEKELNALETSSSAMDMQISQIKVTIQEIESKLSSIVGLEEEAQSFAQFVTTGESARIKAKLTQIRRYGEELREHAQCLEGTILGHLSQQQKFEENLRKIQQSVSEFEDKLAVPIKICSSATETYKVLQEHMDLCQALESLSSAITAFSASARKVVNRDSCVQEAAALQQQYEDILRRAKERQTALENLLAHWQRLEKELSSFLTWLERGEAKASSPEMDISADRVKVEASKDDVKMMKLHLEQLDERWRDLPQIINKRINFLQSVVAEHQQFDELLLSFSVWIKLFLSELQTTSEISIMDHQVALTRHKDHAAEVESKKGELQSLQGHLAKLGSLGRAEDLHLLQGKAEDCFQLFEEASQVVERRQLALSHLAEFLQSHASLSGILRQLRQTVEATNSMNKNESDLIEKDLNDALQNAKALESAAVSLDGILSKAQYHLKIGSSEQRTSCRATADQLCGEVERIQNLLGTKQSEADALAVLKKAFQDQKEELLKSIEDIEERTDKERLKEPTRQALQQRLRVFNQLEDELNSHEHELCWLKDKAKQIAQKDVAFAPEVDREINRLEVTWDDTKRLIHENQGQCCGLIDLMREYQNLKSAVSKVLENASSVIVTRTTIKDQEDLKWAFSKHETAKNKMNYKQKDLDNFTSKGKHLLSELKKIHSSDFSLVKTDMESTVDKWLDVSEKLEENMDRLRVSLSIWDDVLSTRDEIEGWSNNCVPQMAENISNLDNHLRAEELLKEFESEVKNKALRLEELHSKVNDLKELTKNLETPPDLQFIEADLMQKLEHAKEITEVAKGTLKDFTAQSTQVEKFINDITTWFTKVEESLMNCAQNETCEALKKVKDIQKELQSQQSNISSTQENLNSLCRKYHSAELESLGRAMTGLIKKHEAVSQLCSKTQASLQESLEKHFSEESMQEFQEWFLGAKAAAKESSDRTGDSKVLEAKLHDLQQNILDSVSDGQSKLDAVTQEGQTLYAHLSKQIVSSIQEQITKANEEFQAFLKQCLKDKQALQDCASELGSFEDQHRKLNLWIHEMEERFNTENLGESKQHIPEKKNEVHKVEMFLGELLAARESLDKLSQRGQLLSEEGHGAGQEGRLCSQLLTSHQNLLRMTKEKLRSCQVALQEHEALEEALQSMWFWVKAIQDRLACAESTLGSKDTLEKRLSQIQDILLMKGEGEVKLNMAIGKGEQALRSSNKEGQRVIQTQLETLKEVWADIMSSSVHAQSTLESVISQWNDYVERKNQLEQWMESVDQKIEHPLQPQPGLKEKFVLLDHLQSILSEAEDHTRALHRLIAKSRELYEKTEDESFKDTAQEELKTQFNDIMTVAKEKMRKVEEIVKDHLMYLDAVHEFTDWLHSAKEELHRWSDMSGDSSATQKKLSKIKELIDSREIGASRLSRVESLAPEVKQNTTASGCELMHTEMQALRADWKQWEDSVFQTQSCLENLVSQMALSEQEFSGQVAQLEQALEQFSALLKTWAQQLTLLEGKNTDEEIVECWHKGQEILDALQKAEPRTEDLKSQLNELCRFSRDLSTYSGKVSGLIKEYNCLCLQASKGCQNKEQILQQRFRKAFRDFQQWLVNAKITTAKCFDIPQNISEVSTSLQKIQEFLSESENGQHKLNMMLSKGELLSTLLTKEKAKGIQAKVTAAKEDWKNFHSNLHQKESALENLKIQMKDFEVSAEPIQDWLSKTEKMVHESSNRLYDLPAKRREQQKLQSVLEEIHCYEPQLNRLKEKAQQLWEGQAASKSFRHRVSQLSSQYLALSNLTKEKVSRLDRIVAEHNQFSLGIKELQDWMTDAIHMLDSYCHPTSDKSVLDSRTLKLEALLSVKQEKEIQMKMIVTRGESVLQNTSPEGIPTIQQQLQSVKDMWASLLSAGIRCKRVRLPCAYIALKLRVHQHAELRDKTTMLGKAKEAVTKSEKLVRLHQEYQRDLKAFEVWLGQEQEKLDQYSVLEGDAHTHETTLRDLQELQVHCAEGQALLNSVLHTREDVIPSGIPQAEDRALESLRQDWQAYQHRLSETRTQFNNVVNKLRLMEQKFQQVDEWLKTAEEKVSPRTRRQSNRATKEIQLHQMKKWHEEVTAYRDEVEEVGARAQEILDESHVNSRMGCQATQLTSRYQALLLQVLEQIKFLEEEIQSLEESESSLSSYSDWYGSTHKNFKNVATKIDKVDTVMMGKKLKTLEVLLKDMEKGHSLLKSAREKGERAVKYLEEGEAERLRKEIHDHMEQLKELTSTVRKEHMTLEKSLQQTVLSHEPSVKSVREKGEALLELVQDVTLKDKIDQLQSDYQDLCSIGKEHVFSLEAKVKDHEDYNSELQEVEKWLLQMSGRLVAPDLLETSSLETITQQLAHHKMYQSLEHELQKHVSRQDTLQQCQAWLSAVQPDLEPSPQPPLSRAEAIKQVKHFRALQEQARTYLDLLCSMCDLSNASVKTTAKDIQQTEQTIEQKLVQAQNLTQGWEEIKHLKSELWIYLQDADQQLQNMKRRHSELELNIAQNMVSQVKDFVKKLQSKQASVNTIIEKVNKLTKKEESPEHKEINHLNDQWLDLCRQSNNLCLQREEDLQRTRDYHDCMNVVEVFLEKFTTEWDNLARSDAESTAVHLEALKKLALALQERKYAIEDLKDQKQKMIEHLNLDDKELVKEQTSHLEQRWFQLEDLIKRKIQVSVTNLEELNVVQSRFQELMEWAEEQQPNIAEALKQSPPPDMAQNLLMDHLAICSELEAKQMLLKSLIKDADRVMADLGLNERQVIQKALSDAQSHVNCLSDLVGQRRKKHFKEDFDKACHWLKQADIVTFPEINLMNESSELHTQLAKYQNILEQSPEYENLLLTLQRTGQTILPSLNEVDHSYLSEKLNALPRQFNVIVALAKDKFYKVQEAILARKEYASLIELTTQSLSELEAQFLRMSKVPTDLAVEEALSLQDGCRAILDEVAGLGEAVDELNQKKEGFRSTGQPWQPDKMLHLVTLYHRLKRQTEQRVSLLEDTTSAYQEHEKMCQQLERQLKSVKEEQSKVNEETLPAEEKLKMYHSLAGSLQDSGIVLKRVTIHLEDLAPHLDPLAYEKARHQIQSWQGELKLLTSAIGETVTECESRMVQSIDFQTEMSRSLDWLRRVKAELSGPVYLDLNLQDIQEEIRKIQIHQEEVQSSLRIMNALSHKEKEKFTKAKELISADLEHSLAELSELDGDIQEALRTRQATLTEIYSQCQRYYQVFQAANDWLEDAQELLQLAGNGLDVESAEENLKSHMEFFSTEDQFHSNLEELHSLVATLDPLIKPTGKEDLEQKVASLELRSQRMSRDSGAQALVSVVNSFHEKIVALEEKASQLEKTGNDASKATLSRSMTTVWQRWTRLRAVAQDQEKILEDAVDEWTGFNNKVKKATEMIDQLQDKLPGSSAEKASKAELLTLLEYHDTFVLELEQQQSALGMLRQQTLSMLQDGAAPTPGEEPPLMQEITAMQDRCLKMVETQINSVKCWVQETKEYLGNPTIEIDAQLEELQILLTEATNHRQNIEKMAEEQKEKYLGLYTILPSELSLQLAEVALDLKIRDQIQDKIKEVEQSKATSQELSRQIQKLAKDLTTILTKLKAKTDNVVQAKTDQKAASHLEEYNEMLELILKWIEKAKVLAHGTIAWNSASQLREQYILHQTLLEESKEIDSELEAMTEKLQYLTSVYCTEKMSQQVAELGRETEELRQMIKIRLQNLQDAAKDMKKFEAELKKLQAALEQAQATLTSPEVGRLSLKEQLSHRQHLLSEMESLKPKVQAVQLCQSALRIPEDVVASLPLCHAALRLQEEASRLQHTAIQQCNIMQEAVVQYEQYEQEMKHLQQLIEGAHREIEDKPVATSNIQELQAQISRHEELAQKIKGYQEQIASLNSKCKMLTMKAKHATMLLTVTEVEGLAEGTEDLDGELLPTPSAHPSVVMMTAGRCHTLLSPVTEESGEEGTNSEISSPPACRSPSPVANTDASVNQDIAYYQALSAERLQTDAAKIHPSTSASQEFYEPGLEPSATAKLGDLQRSWETLKNVISEKQRTLYEALERQQKYQDSLQSISTKMEAIELKLSESPEPGRSPESQMAEHQALMDEILMLQDEINELQSSLAEELVSESCEADPAEQLALQSTLTVLAERMSTIRMKASGKRQLLEEKLNDQLEEQRQEQALQRYRCEADELDSWLLSTKATLDTALSPPKEPMDMEAQLMDCQNMLVEIEQKVVALSELSVHNENLLLEGKAHTKDEAEQLAGKLRRLKGSLLELQRALHDKQLNMQGTAQEKEESDVDLTATQSPGVQEWLAQARTTWTQQRQSSLQQQKELEQELAEQKSLLRSVASRGEEILIQHSAAETSGDAGEKPDVLSQELGMEGEKSSAEDQMRMKWESLHQEFSTKQKLLQNVLEQEQEQVLYSRPNRLLSGVPLYKGDVPTQDKSAVTSLLDGLNQAFEEVSSQSGGAKRQSIHLEQKLYDGVSATSTWLDDVEERLFVATALLPEETETCLFNQEILAKDIKEMSEEMDKNKNLFSQAFPENGDNRDVIEDTLGCLLGRLSLLDSVVNQRCHQMKERLQQILNFQNDLKVLFTSLADNKYIILQKLANVFEQPVAEQIEAIQQAEDGLKEFDAGIIELKRRGDKLQVEQPSMQELSKLQDMYDELMMIIGSRRSGLNQNLTLKSQYERALQDLADLLETGQEKMAGDQKIIVSSKEEIQQLLDKHKEYFQGLESHMILTETLFRKIISFAVQKETQFHTELMAQASAVLKRAHKRGVELEYILETWSHLDEDQQELSRQLEVVESSIPSVGLVEENEDRLIDRITLYQHLKSSLNEYQPKLYQVLDDGKRLLISISCSDLESQLNQLGECWLSNTNKMSKELHRLETILKHWTRYQSESADLIHWLQSAKDRLEFWTQQSVTVPQELEMVRDHLNAFLEFSKEVDAQSSLKSSVLSTGNQLLRLKKVDTATLRSELSRIDSQWTDLLTNIPAVQEKLHQLQMDKLPSRHAISEVMSWISLMENVIQKDEDNIKNSIGYKAIHEYLQKYKGFKIDINCKQLTVDFVNQSVLQISSQDVESKRSDKTDFAEQLGAMNKSWQILQGLVTEKIQLLEGLLESWSEYENNVQCLKTWFETQEKRLKQQHRIGDQASVQNALKDCQDLEDLIKAKEKEVEKIEQNGLALIQNKKEDVSSIVMSTLRELGQTWANLDHMVGQLKILLKSVLDQWSSHKVAFDKINSYLMEARYSLSRFRLLTGSLEAVQVQVDNLQNLQDDLEKQERSLQKFGSITNQLLKECHPPVTETLTNTLKEVNMRWNNLLEEIAEQLQSSKALLQLWQRYKDYSKQCASTVQQQEDRTNELLKAATNKDIADDEVATWIQDCNDLLKGLGTVKDSLFFLHELGEQLKQQVDASAASAIQSDQLSLSQHLCALEQALCKQQTSLQAGVLDYETFAKSLEALEAWIVEAEEILQGQDPSHSSDLSTIQERMEELKGQMLKFSSMAPDLDRLNELGYRLPLNDKEIKRMQNLNRHWSLISSQTTERFSKLQSFLLQHQTFLEKCETWMEFLVQTEQKLAVEISGNYQHLLEQQRAHELFQAEMFSRQQILHSIIIDGQRLLEQGQVDDRDEFNLKLTLLSNQWQGVIRRAQQRRGIIDSQIRQWQRYREMAEKLRKWLVEVSYLPMSGLGSVPIPLQQARTLFDEVQFKEKVFLRQQGSYILTVEAGKQLLLSADSGAEAALQAELAEIQEKWKSASMRLEEQKKKLAFLLKDWEKCEKGIADSLEKLRTFKKKLSQSLPDHHEELHAEQMRCKELENAVGSWTDDLTQLSLLKDTLSAYISADDISILNERVELLQRQWEELCHQLSLRRQQIGERLNEWAVFSEKNKELCEWLTQMESKVSQNGDILIEEMIEKLKKDYQEEIAIAQENKIQLQQMGERLAKASHESKASEIEYKLGKVNDRWQHLLDLIAARVKKLKETLVAVQQLDKNMSSLRTWLAHIESELAKPIVYDSCNSEEIQRKLNEQQELQRDIEKHSTGVASVLNLCEVLLHDCDACATDAECDSIQQATRNLDRRWRNICAMSMERRLKIEETWRLWQKFLDDYSRFEDWLKSSERTAAFPSSSGVIYTVAKEELKKFEAFQRQVHECLTQLELINKQYRRLARENRTDSACSLKQMVHEGNQRWDNLQKRVTSILRRLKHFIGQREEFETARDSILVWLTEMDLQLTNIEHFSECDVQAKIKQLKAFQQEISLNHNKIEQIIAQGEQLIEKSEPLDAAIIEEELDELRRYCQEVFGRVERYHKKLIRLPLPDDEHDLSDRELELEDSAALSDLHWHDRSADSLLSPQPSSNLSLSLAQPLRSERSGRDTPASVDSIPLEWDHDYDLSRDLESAMSRALPSEDEEGQDDKDFYLRGAVGLSGDHSALESQIRQLGKALDDSRFQIQQTENIIRSKTPTGPELDTSYKGYMKLLGECSSSIDSVKRLEHKLKEEEESLPGFVNLHSTETQTAGVIDRWELLQAQALSKELRMKQNLQKWQQFNSDLNSIWAWLGDTEEELEQLQRLELSTDIQTIELQIKKLKELQKAVDHRKAIILSINLCSPEFTQADSKESRDLQDRLSQMNGRWDRVCSLLEEWRGLLQDALMQCQGFHEMSHGLLLMLENIDRRKNEIVPIDSNLDAEILQDHHKQLMQIKHELLESQLRVASLQDMSCQLLVNAEGTDCLEAKEKVHVIGNRLKLLLKEVSRHIKELEKLLDVSSSQQDLSSWSSADELDTSGSVSPTSGRSTPNRQKTPRGKCSLSQPGPSVSSPHSRSTKGGSDSSLSEPGPGRSGRGFLFRVLRAALPLQLLLLLLIGLACLVPMSEEDYSCALSNNFARSFHPMLRYTNGPPPL

SEQ ID NO: 357 - protein, 715 aa, Homo sapiens
MVPGARGGGALARAAGRGLLALLLAVSAPLRLQAEELGDGCGHLVTYQDSGTMTSKNYPGTYPNHTVCEKTITVPKGKRLILRLGDLDIESQTCASDYLLFTSSSDQYGPYCGSMTVPKELLLNTSEVTVRFESGSHISGRGFLLTYASSDHPDLITCLERASHYLKTEYSKFCPAGCRDVAGDISGNMVDGYRDTSLLCKAAIHAGIIADELGGQISVLQRKGISRYEGILANGVLSRDGSLSDKRFLFTSNGCSRSLSFEPDGQIRASSSWQSVNESGDQVHWSPGQARLQDQGPSWASGDSSNNHKPREWLEIDLGEKKKITGIRTTGSTQSNFNFYVKSFVMNFKNNNSKWKTYKGIVNNEEKVFQGNSNFRDPVQNNFIPPIVARYVRVVPQTWHQRIALKVELIGCQITQGNDSLVWRKTSQSTSVSTKKEDETITRPIPSEETSTGINITTVAIPLVLLVVLVFAGMGIFAAFRKKKKKGSPYGSAEAQKTDCWKQIKYPFARHQSAEFTISYDNEKEMTQKLDLITSDMADYQQPLMIGTGTVTRKGSTFRPMDTDAEEAGVSTDAGGHYDCPQRAGRHEYALPLAPPEPEYATPIVERHVLRAHTFSAQSGYRVPGPQPGHKHSLSSGGFSPVAGVGAQDGDYQRPHSAQPADRGYDRPKAVSALATESGHPDSQKPPTHPGTSDSYSAPRDCLTPLNQTAMTALL

SEQ ID NO: 358 - protein, 1047 aa, Homo sapiens
MTDNIPLQPVRQKKRMDSRPRAGCCEWLRCCGGGEARPRTVWLGHPEKRDQRYPRNVINNQKYNFFTFLPGVLFNQFKYFFNLYFLLLACSQFVPEMRLGALYTYWVPLGFVLAVTVIREAVEEIRCYVRDKEVNSQVYSRLTARGTVKVKSSNIQVGDLIIVEKNQRVPADMIFLRTSEKNGSCFLRTDQLDGETDWKLRLPVACTQRLPTAADLLQIRSYVYAEEPNIDIHNFVGTFTREDSDPPISESLSIENTLWAGTVVASGTVVGVVLYTGRELRSVMNTSNPRSKIGLFDLEVNCLTKILFGALVVVSLVMVALQHFAGRWYLQIIRFLLLFSNIIPISLRVNLDMGKIVYSWVIRRDSKIPGTVVRSSTIPEQLGRISYLLTDKTGTLTQNEMIFKRLHLGTVAYGLDSMDEVQSHIFSIYTQQSQDPPAQKGPTLTTKVRRTMSSRVHEAVKAIALCHNVTPVYESNGVTDQAEAEKQYEDSCRVYQASSPDEVALVQWTESVGLTLVGRDQSSMQLRTPGDQILNFTILQIFPFTYESKRMGIIVRDESTGEITFYMKGADVVMAGIVQYNDWLEEECGNMAREGLRVLVVAKKSLAEEQYQDFEARYVQAKLSVHDRSLKVATVIESLEMEMELLCLTGVEDQLQADVRPTLETLRNAGIKVWMLTGDKLETATCTAKNAHLVTRNQDIHVFRLVTNRGEAHLELNAFRRKHDCALVISGDSLEVCLKYYEYEFMELACQCPAVVCCRCAPTQKAQIVRLLQERTGKLTCAVGDGGNDVSMIQESDCGVGVEGKEGKQASLAADFSITQFKHLGRLLMVHGRNSYKRSAALSQFVIHRSLCISTMQAVFSSVFYFASVPLYQGFLIIGYSTIYTMFPVFSLVLDKDVKSEVAMLYPELYKDLLKGRPLSYKTFLIWVLISIYQGSTIMYGALLLFESEFVHIVAISFTSLILTELLMVALTIQTWHWLMTVAELLSLACYIASLVFLHEFIDVYFIATLSFLWKVSVITLVSCLPLYVLKYLRRRFSPPSYSKLTS

SEQ ID NO: 359 - protein, 589 aa, Homo sapiens
MPNDDFCPGLTIKAMGAERAPQRQPCTLHLLVLVPILLSLVASQDWKAERSQDPFEKCMQDPDYEQLLKVVTWGLNRTLKPQRVIVVGAGVAGLVAAKVLSDAGHKVTILEADNRIGGRIFTYRDQNTGWIGELGAMRMPSSHRILHKLCQGLGLNLTKFTQYDKNTWTEVHEVKLRNYVVEKVPEKLGYALRPQEKGHSPEDIYQMALNQALKDLKALGCRKAMKKFERHTLLEYLLGEGNLSRPAVQLLGDVMSEDGFFYLSFAEALRAHSCLSDRLQYSRIVGGWDLLPRALLSSLSGLVLLNAPVVAMTQGPHDVHVQIETSPPARNLKVLKADVVLLTASGPAVKRITFSPPLPRHMQEALRRLHYVPATKVFLSFRRPFWREEHIEGGHSNTDRPSRMIFYPPPREGALLLASYTWSDAAAAFAGLSREEALRLALDDVAALHGPVVRQLWDGTGVVKRWAEDQHSQGGFVVQPPALWQTEKDDWTVPYGRIYFAGEHTAYPHGWVETAVKSALRAAIKINSRKGPASDTASPEGHASDMEGQGHVHGVASSPSHDLAKEEGSHPPVQGQLSLQNTTHTRTSH

SEQ ID NO: 360 - protein, 326 aa, Homo sapiens
MREWWVQVGLLAVPLLAAYLHIPPPQLSPALHSWKSSGKFFTYKGLRIFYQDSVGVVGSPEIVVLLHGFPTSSYDWYKIWEGLTLRFHRVIALDFLGFGFSDKPRPHHYSIFEQASIVEALLRHLGLQNRRINLLSHDYGDIVAQELLYRYKQNRSGRLTIKSLCLSNGGIFPETHRPLLLQKLLKDGGVLSPILTRLMNFFVFSRGLTPVFGPYTRPSESELWDMWAGIRNNDGNLVIDSLLQYINQRKKFRRRWVGALASVTIPIHFIYGPLDPVNPYPEFLELYRKTLPRSTVSILDDHISHYPQLEDPMGFLNAYMGFINSF

SEQ ID NO: 361 - protein, 170 aa, Homo sapiens
MPVPASWPHPPGPFLLLTLLLGLTEVAGEEELQMIQPEKLLLVTVGKTATLHCTVTSLLPVGPVLWFRGVGPGRELIYNQKEGHFPRVTTVSDLTKRNNMDFSIRISSITPADVGTYYCVKFRKGSPENVEFKSGPGTEMALGGPASSLTALLLIAVLLGPIYVPWKQKT

SEQ ID NO: 362 - protein, 143 aa, Homo sapiens
MPHTLSLPYPQLLGLSVATMVTLTYFGAHFAVIRRASLEKNPYQAVHQWAFSAGLSLVGLLTLGAVLSAAATVREAQGLMAGGFLCFSLAFCAQVQVVFWRLHSPTQVEDAMLDTYDLVYEQAMKVSVLWEEVSFQPSGEHRG

SEQ ID NO: 363 - protein, 319 aa, Homo sapiens
MDPQNQHGSGSSLVVIQQPSLDSRQRLDYEREIQPTAILSLDQIKAIRGSNEYTEGPSVVKRPAPRTAPRQEKHERTHEIIPINVNNNYEHRHTSHLGHAVLPSNARGPILSRSTSTGSAASSGSNSSASSEQGLLGRSPPTRPVPGHRSERAIRTQPKQLIVDDLKGSLKEDLTQHKFICEQCGKCKCGECTAPRTLPSCLACNRQCLCSAESMVEYGTCMCLVKGIFYHCSNDDEGDSYSDNPCSCSQSHCCSRYLCMGAMSLFLPCLLCYPPAKGCLKLCRRCYDWIHRPGCRCKNSNTVYCKLESCPSRGQGKPS

SEQ ID NO: 364 - protein, 506 aa, Homo sapiens
MGCSAKARWAAGALGVAGLLCAVLGAVMIVMVPSLIKQQVLKNVRIDPSSLSFNMWKEIPIPFYLSVYFFDVMNPSEILKGEKPQVRERGPYVYREFRHKSNITFNNNDTVSFLEYRTFQFQPSKSHGSESDYIVMPNILVLGAAVMMENKPMTLKLIMTLAFTTLGERAFMNRTVGEIMWGYKDPLVNLINKYFPGMFPFKDKFGLFAELNNSDSGLFTVFTGVQNISRIHLVDKWNGLSKVDFWHSDQCNMINGTSGQMWPPFMTPESSLEFYSPEACRSMKLMYKESGVFEGIPTYRFVAPKTLFANGSIYPPNEGFCPCLESGIQNVSTCRFSAPLFLSHPHFLNADPVLAEAVTGLHPNQEAHSLFLDIHPVTGIPMNCSVKLQLSLYMKSVAGIGQTGKIEPVVLPLLWFAESGAMEGETLHTFYTQLVLMPKVMHYAQYVLLALGCVLLLVPVICQIRSQGPEDTVSQPGLAAGPDRPPSPYTPLLPDSPSGQPPSPTA

SEQ ID NO: 365 - protein, 229 aa, Homo sapiens
CLQEHSQPSQLLCTLLLCWCVLGRERPFRKAQSTSSPLEGVPRFLKRLLLTWVNCSSVRWATRVQDIFTAGKLLALALIIIMGIVQICKGEYFWLEPKNAFENFQEPDIGLVALAFLQGSFAYGGWNFLNYVTEELVDPYKLFFAGAREGHLPSVLAMIHVKRCTPIPALLFTCISTLLMLVTSDMYTLINYVGFINYLFYGVTVAGQIVLRWKKPDIPRPIKPLPYQG

SEQ ID NO: 366 - protein, 164 aa, Homo sapiens
MPRLHDHFWSCSCAHSARRRGPPRASAAGLAAKVGEMINVSVSGPSLLAAHGAPDADPAPRGRSAAMSGPEPGSPYPNTWHHRLLQRSLVLFSVGVVLALVLNLLQIQRNVTLFPEEVIATIFSSAWWVPPCCGTAAGIHPQISSIFVLGSLVYFSQEASRWGT

SEQ ID NO: 367 - protein, 213 aa, Homo sapiens
MHYYRYSNAKVSCWYKYLLFSYNIIFWLAGVVFLGVGLWAWSEKGVLSDLTKVTRMHGIDPVVLVLMVGVVMFTLGFAGCVGALRENICLLNFNQCCGAYGPEDWDLNVYFNCSGASYSREKCGVPFSCCVPDPAQKVVNTQCGYDVRIQLKSKWDESIFTKGCIQALESWLPRNIYIVAGVFIAISLLQIFGIFLARTLISDIEAVKAGHHF

SEQ ID NO: 368 - protein, 2436 aa, Homo sapiens
MGFLHQLQLLLWKNVTLKRRSPWVLAFEIFIPLVLFFILLGLRQKKPTISVKEVSFYTAAPLTSAGILPVMQSLCPDGQRDEFGFLQYANSTVTQLLERLDRVVEEGNLFDPARPSLGSELEALRQHLEALSAGPGTSGSHLDRSTVSSFSLDSVARNPQELWRFLTQNLSLPNSTAQALLAARVDPPEVYHLLFGPSSALDSQSGLHKGQEPWSRLGGNPLFRMEELLLAPALLEQLTCTPGSGELGRILTVPESQKGALQGYRDAVCSGQAAARARRFSGLSAELRNQLDVAKVSQQLGLDAPNGSDSSPQAPPPRRLQALLGDLLDAQKVLQDVDVLSALALLLPQGACTGRTPGPPASGAGGAANGTGAGAVMGPNATAEEGAPSAAALATPDTLQGQCSAFVQLWAGLQPILCGNNRTIEPEALRRGNMSSLGFTSKEQRNLGLLVHLMTSNPKILYAPAGSEVDRVILKANETFAFVGNVTHYAQVWLNISAEIRSFLEQGRLQQHLRWLQQYVAELRLHPEALNLSLDELPPALRQDNFSLPSGMALLQQLDTIDNAACGWIQFMSKVSVDIFKGFPDEESIVNYTLNQAYQDNVTVFASVIFQTRKDGSLPPHVHYKIRQNSSFTEKTNEIRRAYWRPGPNTGGRFYFLYGFVWIQDMMERAIIDTFVGHDVVEPGSYVQMFPYPCYTRDDFLFVIEHMMPLCMVISWVYSVAMTIQHIVAEKEHRLKEVMKTMGLNNAVHWVAWFITGFVQLSISVTALTAILKYGQVLMHSHVVIIWLFLAVYAVATIMFCFLVSVLYSKAKLASACGGIIYFLSYVPYMYVAIREEVAHDKITAFEKCIASLMSTTAFGLGSKYFALYEVAGVGIQWHTFSQSPVEGDDFNLLLAVTMLMVDAVVYGILTWYIEAVHPGMYGLPRPWYFPLQKSYWLGSGRTEAWEWSWPWARTPRLSVMEEDQACAMESRRFEETRGMEEEPTHLPLVVCVDKLTKVYKDDKKLALNKLSLNLYENQVVSFLGHNGAGKTTTMSILTGLFPPTSGSATIYGHDIRTEMDEIRKNLGMCPQHNVLFDRLTVEEHLWFYSRLKSMAQEEIRREMDKMIEDLELSNKRHSLVQTLSGGMKRKLSVAIAFVGGSRAIILDEPTAGVDPYARRAIWDLILKYKPGRTILLSTHHMDEADLLGDRIAIISHGKLKCCGSPLFLKGTYGDGYRLTLVKRPAEPGGPQEPGLASSPPGRAPLSSCSELQVSQFIRKHVASCLLVSDTSTELSYILPSEAAKKGAFERLFQHLERSLDALHLSSFGLMDTTLEEVFLKVSEEDQSLENSEADVKESRKDVLPGAEGPASGEGHAGNLARCSELTQSQASLQSASSVGSARGDEGAGYTDVYGDYRPLFDNPQDPDNVSLQEVEAEALSRVGQGSRKLDGGWLKVRQFHGLLVKRFHCARRNSKALFSQILLPAFFVCVAMTVALSVPEIGDLPPLVLSPSQYHNYTQPRGNFIPYANEERREYRLRLSPDASPQQLVSTFRLPSGVGATCVLKSPANGSLGPTLNLSSGESRLLAARFFDSMCLESFTQGLPLSNFVPPPPSPAPSDSPASPDEDLQAWNVSLPPTAGPEMWTSAPSLPRLVREPVRCTCSAQGTGFSCPSSVGGHPPQMRVVTGDILTDITGHNVSEYLLFTSDRFRLHRYGAITFGNVLKSIPASFGTRAPPMVRKIAVRRAAQVFYNNKGYHSMPTYLNSLNNAILRANLPKSKGNPAAYGITVTNHPMNKTSASLSLDYLLQGTDVVIAIFIIVAMSFVPASFVVFLVAEKSTKAKHLQFVSGCNPIIYWLANYVWDMLNYLVPATCCVIILFVFDLPAYTSPTNFPAVLSLFLLYGWSITPIMYPASFWFEVPSSAYVFLIVINLFIGITATVATFLLQLFEHDKDLKVVNSYLKSCFLIFPNYNLGHGLMEMAYNEYINEYYAKIGQFDKMKSPFEWDIVTRGLVAMAVEGVVGFLLTIMCQYNFLRRPQRMPVSTKPVEDDVDVASERQRVLRGDADNDMVKIENLTKVYKSRKIGRILAVDRLCLGVRPGECFGLLGVNGAGKTSTFKMLTGDESTTGGEAFVNGHSVLKELLQVQQSLGYCPQCDALFDELTAREHLQLYTRLRGISWKDEARVVKWALEKLELTKYADKPAGTYSGGNKRKLSTAIALIGYPAFIFLDEPTTGMDPKARRFLWNLILDLIKTGRSVVLTSHSMEECEALCTRLAIMVNGRLRCLGSIQHLKNRFGDGYMITVRTKSSQSVKDVVRFFNRNFPEAMLKERHHTKVQYQLKSEHISLAQVFSKMEQVSGVLGIEDYSVSQTTLDNVFVNFAKKQSDNLEQQETEPPSALQSPLGCLLSLLRPRSAPTELRALVADEPEDLDTEDEGLISFEEERAQLSFNTDTLC

SEQ ID NO: 369 - protein, 155 aa, Homo sapiens
MGGNGSTCKPDTERQGTLSTAAPTTSPAPCLSNHHNKKHLILAFCAGVLLTLLLIAFIFLIIKSYRKYRRERLPISPGPLLRWVPLLSGTMADHSKPQAPDPHSDPPAKLSSIPGESLTYASTTFKLSEEKSNHLAENHSADFDPIVYAQIKVTN

SEQ ID NO: 370 - protein, 1035 aa, Homo sapiens
MSTENVEGKPSNLGERGRARSSTFLRVVQPMFNHSIFTSAVSPAAERIRFILGEEDDSPAPPQLFTELDELLAVDGQEMEWKETARWIKFEEKVEQGGERWSKPHVATLSLHSLFELRTCMEKGSIMLDREASSLPQLVEMIVDHQIETGLLKPELKDKVTYTLLRKHRHQTKKSNLRSLADIGKTVSSASRMFTNPDNGSPAMTHRNLTSSSLNDISDKPEKDQLKNKFMKKLPRDAEASNVLVGEVDFLDTPFIAFVRLQQAVMLGALTEVPVPTRFLFILLGPKGKAKSYHEIGRAIATLMSDEVFHDIAYKAKDRHDLIAGIDEFLDEVIVLPPGEWDPAIRIEPPKSLPSSDKRKNMYSGGENVQMNGDTPHDGGHGGGGHGDCEELQRTGRFCGGLIKDIKRKAPFFASDFYDALNIQALSAILFIYLATVTNAITFGGLLGDATDNMQGVLESFLGTAVSGAIFCLFAGQPLTILSSTGPVLVFERLLFNFSKDNNFDYLEFRLWIGLWSAFLCLILVATDASFLVQYFTRFTEEGFSSLISFIFIYDAFKKMIKLADYYPINSNFKVGYNTLFSCTCVPPDPANISISNDTTLAPEYLPTMSSTDMYHNTTFDWAFLSKKECSKYGGNLVGNNCNFVPDITLMSFILFLGTYTSSMALKKFKTSPYFPTTARKLISDFAIILSILIFCVIDALVGVDTPKLIVPSEFKPTSPNRGWFVPPFGENPWWVCLAAAIPALLVTILIFMDQQITAVIVNRKEHKLKKGAGYHLDLFWVAILMVICSLMALPWYVAATVISIAHIDSLKMETETSAPGEQPKFLGVREQRVTGTLVFILTGLSVFMAPILKFIPMPVLYGVFLYMGVASLNGVQFMDRLKLLLMPLKHQPDFIYLRHVPLRRVHLFTFLQVLCLALLWILKSTVAAIIFPVMILALVAVRKGMDYLFSQHDLSFLDDVIPEKDKKKKEDEKKKKKKKGSLDSDNDDSDCPYSEKVPSIKIPMDIMEQQPFLSDSKPSDRERSPTFLERHTSC

SEQ ID NO: 371 - protein, 209 aa, Homo sapiens
MSSTLPALLCVGLCLSQRISAQQQMYDTPTLSVHPGPEVISGEKVTFYCRLDTATSMFLLLKEGRSSHVQRGYGKVQAEFPLGPVTTAHRGTYRCFGSYNNHAWSFPSEPVKLLVTGDIENTSLAPEDPTFPADTWGTYLLTTETGLQKDHALWDHTAQNLLRMGLAFLVLVALVWFLVEDWLSRKRTRERASRASTWEGRRRLNTQTL

SEQ ID NO: 372 - protein, 666 aa, Homo sapiens
MEGVSALLARCPTAGLAGGLGVTACAAAGVLLYRIARRMKPTHTMVNCWFCNQDTLVPYGNRNCWDCPHCEQYNGFQENGDYNKPIPAQYLEHLNHVVSSAPSLRDPSQPQQWVSSQVLLCKRCNHHQTTKIKQLAAFAPREEGRYDEEVEVYRHHLEQMYKLCRPCQAAVEYYIKHQNRQLRALLLSHQFKRREADQTHAQNFSSAVKSPVQVILLRALAFLACAFLLTTALYGASGHFAPGTTVPLALPPGGNGSATPDNGTTPGAEGWRQLLGLLPEHMAEKLCEAWAFGQSHQTGVVALGLLTCLLAMLLAGRIRLRRIDAFCTCLWALLLGLHLAEQHLQAASPSWLDTLKFSTTSLCCLVGFTAAVATRKATGPRRFRPRRFFPGDSAGLFPTSPSLAIPHPSVGGSPASLFIPSPPSFLPLANQQLFRSPRRTSPSSLPGRLSRALSLGTIPSLTRADSGYLFSGSRPPSQVSRSGEFPVSDYFSLLSGSCPSSPLPSPAPSVAGSVASSSGSLRHRRPLISPARLNLKGQKLLLFPSPPGEAPTTPSSSDEHSPHNGSLFTMEPPHVPRKPPLQDVKHALDLRSKLERGSACSNRSIKKEDDSSQSSTCVVDTTTRGCSEEAATWRGRFGPSLVRGLLAVSLAANALFTSVFLYQSLR

SEQ ID NO: 373 - protein, 127 aa, Homo sapiens
MQQPFNYPYPQIYWVDSSASSPWAPPGTVLPCPTSVPRRPGQRRPPPPPPPPPLPPPPPPPPLPPLPLPPLKKRGNHSTGLCLLVMFFMVLVALVGLGLGMFQLFHLQKELAELREATPVHPLKKRS

SEQ ID NO: 374 - protein, 277 aa, Homo sapiens
MPRLHDHFWSCSCAHSARRRGPPRASAAGLAAKVGEMINVSVSGPSLLAAHGAPDADPAPRGRSAAMSGPEPGSPYPNTWHHRLLQRSLVLFSVGVVLALVLNLLQIQRNVTLFPEEVIATIFSSAWWVPPCCGTAAAVVGLLYPCIDSHLGEPHKFKREWASVMRCIAVFVGINHASAKLDFANNVQLSLTLAALSLGLWWTFDRSRSGLGLGITIAFLATLITQFLVYNGVYQYTSPDFLYIRSWLPCIFFSGGVTVGNIGRQLAMGVPEKPHSD

SEQ ID NO: 375 - protein, 392 aa, Homo sapiens
MEGVSALLARCPTAGLAGGLGVTACAAAGVLLYRIARRMKPTHTMVNCWFCNQDTLVPYGNRNCWDCPHCEQYNGFQENGDYNKPIPAQYLEHLNHVVSSAPSLRDPSQPQQWVSSQVLLCKRCNHHQTTKIKQLAAFAPREEGRYDEEVEVYRHHLEQMYKLCRPCQAAVEYYIKHQNRQLRALLLSHQFKRREADQTHAQNFSSAVKSPVQVILLRALAFLACAFLLTTALYGASGHFAPGTTVPLALPPGGNGSATPDNGTTPGAEGWRQLLGLLPEHMAEKLCEAWAFGQSHQTGVVALGLLTCLLAMLLAGRIRLRRIDAFCTCLWALLLGLHLAEQHLQAASPSWLDTLKFSTTSLCCLVGFTAAVATRKATGPRRFRPRRSEKQP

SEQ ID NO: 376 - protein, 72 aa, Homo sapiens
MAVFKTTLWRLISGTLGIICLSLMSTLGILLKNSFTKLSIEPAFTPGPNIELQKAGFYELQSTILLDWTLLQ

SEQ ID NO: 377 - protein, 472 aa, Homo sapiens
MGQVLPVFAHCKEAPSTASSTPDSTEGGNDDSDFRELHTAREFSEEDEEETTSQDWGTPRELTFSYIAFDGVVGSGGRRDSTARRPRPQGRSVSEPRDQHPQPSLGDSLESIPSLSQSPEPGRRGDPDTAPPSERPLEDLRLRLDHLGWVARGTGSGEDSSTSSSTPLEDEEPQEPNRLETGEAGEELDLRLRLAQPSSPEVLTPQLSPGSGTPQAGTPSPSRSRDSNSGPEEPLLEEEEKQWGPLEREPVRGQCLDSTDQLEFTVEPRLLVADLLYWKDTRTSGVVFTGLMVSLLCLLHFSIVSVAAHLALLLLCGTISLRVYRKVLQAVHRGDGANPFQAYLDVDLTLTREQTERLSHQITSRVVSAATQLRHFFLVEDLVDSLKLALLFYILTFVGAIFNGLTLLILGVIGLFTIPLLYRQHQAQIDQYVGLVTNQLSHIKAKIRAKIPGTGALASAAAAVSGSKAKAE

SEQ ID NO: 378 - protein, 605 aa, Homo sapiens
MGRLLRAARLPPLLSPLLLLLVGGAFLGACVAGSDEPGPEGLTSTSLLDLLLPTGLEPLDSEEPSETMGLGAGLGAPGSGFPSEENEESRILQPPQYFWEEEEELNDSSLDLGPTADYVFPDLTEKAGSIEDTSQAQELPNLPSPLPKMNLVEPPWHMPPREEEEEEEEEEEREKEEVEKQEEEEEEELLPVNGSQEEAKPQVRDFSLTSSSQTPGATKSRHEDSGDQASSGVEVESSMGPSLLLPSVTPTTVTPGDQDSTSQEAEATVLPAAGLGVEFEAPQEASEEATAGAAGLSGQHEEVPALPSFPQTTAPSGAEHPDEDPLGSRTSASSPLAPGDMELTPSSATLGQEDLNQQLLEGQAAEAQSRIPWDSTQVICKDWSNLAGKNYIILNMTENIDCEVFRQHRGPQLLALVEEVLPRHGSGHHGAWHISLSKPSEKEQHLLMTLVGEQGVVPTQDVLSMLGDIRRSLEEIGIQNYSTTSSCQARASQVRSDYGTLFVVLVVIGAICIIIIALGLLYNCWQRRLPKLKHVSHGEELRFVENGCHDNPTLDVASDSQSEMQEKHPSLNGGGALNGPGSWGALMGGKRDPEDSDVFEEDTHL

SEQ ID NO: 379 - protein, 572 aa, Homo sapiens
MDRAGADMWASTFTLAMAERKPQDVWVLLPEHSLVPGCLDGGGVQYLLVGLSRLQCGHCPGTWDSAHVHVLFHLWWDRASHRGLVKMRIWGQRCRLCPAPGDCQVRPPGEQPFLSRLVLHILQDCYGDGPGPARHPREAYEGCCEACELGVCFLQKAPDPAWSANATKGNFPATAWGGTGTVSRGKPLSTPGDDLGKGGVVIAIPFSLVGTSNDQVPIAEGPAPPAGASLPVTGSCEALVIGQGSIFLSGDSVAMPGGKGFPVAIGDPLFHGPGLLGSSIQTFELKGFLFKGRGSLCSPVGVAQGWGPISLNNGLVPVGKHTPTVFYCVGLSASGEGSLTFPSSLTSIFTNTLSEPTDGPVATKEASITFPFIFTDVKDAVAEVAEGNGKEGGGQGLVPVGHDALPETNAGGLPSQVKGSLALPFPADVQGKDAFTDITEGKEKEGGLVTAGHDAPLEANAEGPITVSEGCITIPFAVFDVIKRKGGGHVAYGPQGNGCFSQGYYQKRQLRSRFHKARCGCRREEDERPGRACRRPHAEPYEDFWIWVSMTVCVFWLMCMCRLNPGIYPQQV

SEQ ID NO: 380 - protein, 361 aa, Homo sapiens
MRGQRSLLLGPARLCLRLLLLLGYRRRCPPLLRGLVQRWRYGKVCLRSLLYNSFGGSDTAVDAAFEPVYWLVDNVIRWFGVVFVVLVIVLTGSIVAIAYLCVLPLILRTYSVPRLCWHFFYSHWNLILIVFHYYQAITTPPGYPPQGRNDIATVSICKKCIYPKPARTHHCSICNRCVLKMDHHCPWLNNCVGHYNHRYFFSFCFFMTLGCVYCSYGSWDLFREAYAAIETYHQTPPPTFSFRERMTHKSLVYLWFLCSSVALALGALTVWHAVLISRGETSIERHINKKERRRLQAKGRVFRNPYNYGCLDNWKVFLGVDTGRHWLTRVLLPSSHLPHGNGMSWEPPPWVTAHSASVMAV

SEQ ID NO: 381 - protein, 851 aa, Homo sapiens
MHKDEFHLKFFMCVIQSRQLVRTPQRTAGEASTSSMLIPKPPPKTDILKSLDTMDDPDTVGSIPVFKTEWIMTHEEHHAAKTLGIGKAIAVLTSGGDAQGMNAAVRAVVRVGIFTGARVFFVHEGYQGLVDGGDHIKEATWESVSMMLQLGGTVIGSARCKDFREREGRLRAAYNLVKRGITNLCVIGGDGSLTGADTFRSEWSDLLSDLQKAGKITDEEATKSSYLNIVGLVGSIDNDFCGTDMTIGTDSALHRIMEIVDAITTTAQSHQRTFVLEVMGRHCGYLALVTSLSCGADWVFIPECPPDDDWEEHLCRRLSETRTRGSRLNIIIVAEGAIDKNGKPITSEDIKNLVVKRLGYDTRVTVLGHVQRGGTPSAFDRILGSRMGVEAVMALLEGTPDTPACVVSLSGNQAVRLPLMECVQVTKDVTKAMDEKKFDEALKLRGRSFMNNWEVYKLLAHVRPPVSKSGSHTVAVMNVGAPAAGMNAAVRSTVRIGLIQGNRVLVVHDGFEGLAKGQIEEAGWSYVGGWTGQGGSKLGTKRTLPKKSFEQISANITKFNIQGLVIIGGFEAYTGGLELMEGRKQFDELCIPFVVIPATVSNNVPGSDFSVGADTALNTICTTCDRIKQSAAGTKRRVFIIETMGGYCGYLATMAGLAAGADAAYIFEEPFTIRDLQANVEHLVQKMKTTVKRGLVLRNEKCNENYTTDFIFNLYSEEGKGIFDSRKNVLGHMQQGGSPTPFDRNFATKMGAKAMNWMSGKIKESYRNGRIFANTPDSGCVLGMRKRALVFQPVAELKDQTDFEHRIPKEQWWLKLRPILKILAKYEIDLDTSDHAHLEHITRKRSGEAAV

SEQ ID NO: 382 - protein, 556 aa, Homo sapiens
MGRARPGQRGPPSPGPAAQPPAPPRRRARSLALLGALLAAAAAAAVRVCARHAEAQAAARQELALKTLGTDGLFLFSSLDTDGDMYISPEEFKPIAEKLTGSTPAASCEEEELPPDPSEETLTIEARFQPLLPETMTKSKDGFLGVSRLALSGLRNWTAAASPSAVFATRHFQPFLPPPGQELGEPWWIIPSELSMFTGYLSNNRFYPPPPKGKEVIIHRLLSMFHPRPFVKTRFAPQGAVACLTAISDFYYTVMFRIHAEFQLSEPPDFPFWFSPAQFTGHIILSKDATHVRDFRLFVPNHRSLNVDMEWLYGASESSNMEVDIGYIPQMELEATGPSVPSVILDEDGSMIDSHLPSGEPLQFVFEEIKWQQELSWEEAARRLEVAMYPFKKVSYLPFTEAFDRAKAENKLVHSILLWGALDDQSCHCSGRTLRETVLESSPILTLLNESFISTWSLVKELEELQNNQENSSHQKLAGLHLEKYSFPVEMMICLPNGTVVHHINANYFLDITSVKPEEIESNLFSFSSTFEDPSTATYMQFLKEGLRRGLPLLQP

SEQ ID NO: 383 - protein, 1443 aa, Homo sapiens
MAGGAWGRLACYLEFLKKEELKEFQLLLANKAHSRSSSGETPAQPEKTSGMEVASYLVAQYGEQRAWDLALHTWEQMGLRSLCAQAQEGAGHSPSFPYSPSEPHLGSPSQPTSTAVLMPWIHELPAGCTQGSERRVLRQLPDTSGRRWREISASLLYQALPSSPDHESPSQESPNAPTSTAVLGSWGSPPQPSLAPREQEAPGTQWPLDETSGIYYTEIREREREKSEKGRPPWAAVVGTPPQAHTSLQPHHHPWEPSVRESLCSTWPWKNEDFNQKFTQLLLLQRPHPRSQDPLVKRSWPDYVEENRGHLIEIRDLFGPGLDTQEPRIVILQGAAGIGKSTLARQVKEAWGRGQLYGDRFQHVFYFSCRELAQSKVVSLAELIGKDGTATPAPIRQILSRPERLLFILDGVDEPGWVLQEPSSELCLHWSQPQPADALLGSLLGKTILPEASFLITARTTALQNLIPSLEQARWVEVLGFSESSRKEYFYRYFTDERQAIRAFRLVKSNKELWALCLVPWVSWLACTCLMQQMKRKEKLTLTSKTTTTLCLHYLAQALQAQPLGPQLRDLCSLAAEGIWQKKTLFSPDDLRKHGLDGAIISTFLKMGILQEHPIPLSYSFIHLCFQEFFAAMSYVLEDEKGRGKHSNCIIDLEKTLEAYGIHGLFGASTTRFLLGLLSDEGEREMENIFHCRLSQGRNLMQWVPSLQLLLQPHSLESLHCLYETRNKTFLTQVMAHFEEMGMCVETDMELLVCTFCIKFSRHVKKLQLIEGRQHRSTWSPTMVVLFRWVPVTDAYWQILFSVLKVTRNLKELDLSGNSLSHSAVKSLCKTLRRPRCLLETLRLAGCGLTAEDCKDLAFGLRANQTLTELDLSFNVLTDAGAKHLCQRLRQPSCKLQRLQLVSCGLTSDCCQDLASVLSASPSLKELDLQQNNLDDVGVRLLCEGLRHPACKLIRLGKPSVMTPTEGLDTGEMSNSTSSLKRQRLGSERAASHVAQANLKLLDVSKIFPIAEIAEESSPEVVPVELLCVPSPASQGDLHTKPLGTDDDFWGPTGPVATEVVDKEKNLYRVHFPVAGSYRWPNTGLCFVMREAVTVEIEFCVWDQFLGEINPQHSWMVAGPLLDIKAEPGAVEAVHLPHFVALQGGHVDTSLFQMAHFKEEGMLLEKPARVELHHIVLENPSFSPLGVLLKMIHNALRFIPVTSVVLLYHRVHPEEVTFHLYLIPSDCSIRKAIDDLEMKFQFVRIHKPPPLTPLYMGCRYTVSGSGSGMLEILPKELELCYRSPGEDQLFSEFYVGHLGSGIRLQVKDKKDETLVWEALVKPGDLMPATTLIPPARIAVPSPLDAPQLLHFVDQYREQLIARVTSVEVVLDKLHGQVLSQEQYERVLAENTRPSQMRKLFSLSQSWDRKCKDGLYQALKETHPHLIMELWEKGSKKGLLPLSS

SEQ ID NO: 384 - protein, 700 aa, Homo sapiens
MGLPEPGPLRLLALLLLLLLLLLLQLQHLAAAAADPLLGGQGPAKDCEKDQFQCRNERCIPSVWRCDEDDDCLDHSDEDDCPKKTCADSDFTCDNGHCIHERWKCDGEEECPDGSDESEATCTKQVCPAEKLSCGPTSHKCVPASWRCDGEKDCEGGADEAGCATSLGTCRGDEFQCGDGTCVLAIKHCNQEQDCPDGSDEAGCLQGLNECLHNNGGCSHICTDLKIGFECTCPAGFQLLDQKTCGDIDECKDPDACSQICVNYKGYFKCECYPGYEMDLLTKNCKAAAGKSPSLIFTNRHEVRRIDLVKRNYSRLIPMLKNVVALDVEVATNRIYWCDLSYRKIYSAYMDKASDPKEQEVLIDEQLHSPEGLAVDWVHKHIYWTDSGNKTISVATVDGGRRRTLFSRNLSEPRAIAVDPLRGFMYWSDWGDQAKIEKSGLNGVDRQTLVSDNIEWPNGITLDLLSQRLYWVDSKLHQLSSIDFSGGNRKTLISSTDFLSHPFGIAVFEDKVFWTDLENEAIFSANRLNGLEISILAENLNNPHDIVIFHELKQPRAPDACELSVQPNGGCEYLCLPAPQISSHSPKYTCACPDTMWLGPDMKRCYRDANEDSKMGSTVTAAVIGIIVPIVVIALLCMSGYLIWRNWKRKNTKSMNFDNPVYRKTTEEEDEDELHIGRTAQIGHVYPARVALSLEDDGLP

SEQ ID NO: 385 - protein, 164 aa, Homo sapiens
MGLPEPKPKPGDLIEIFRLGYEHWALYIGDGYVIHLAPPSEYPGAGSSSVFSVLSNSAEVKRERLEDVVGGCCYRVNNSLDHEYQPRPVEVIISSAKEMVGQKMKYSIVSRNCEHFVTQLRYGKSRCKQVEKAKVEVGVATALGILVVAGCSFAIRRYQKKATA

SEQ ID NO: 386 - protein, 64 aa, Homo sapiens
MQDEERYMTLNVQSKKRSSAQTSQLTFKDYSVTLHWYKILLGISGTVNGILTLTLISLILLDSS

SEQ ID NO: 387 - protein, 350 aa, Homo sapiens
MDSFNYTTPDYGHYDDKDTLDLNTPVDKTSNTLRVPDILALVIFAVVFLVGVLGNALVVWVTAFEAKRTINAIWFLNLAVADFLSCLALPILFTSIVQHHHWPFGGAACSILPSLILLNMYASILLLATISADRFLLVFKPIWCQNFRGAGLAWIACAVAWGLALLLTIPSFLYRVVREEYFPPKVLCGVDYSHDKRRERAVAIVRLVLGFLWPLLTLTICYTFILLRTWSRRATRSTKTLKVVVAVVASFFIFWLPYQVTGIMMSFLEPSSPTFLLLKKLDSLCVSFAYINCCINPIIYVVAGQGFQGRLRKSLPSLLRNVLTEESVVRESKSFTRSTVDTMAQKTQAV

SEQ ID NO: 388 - protein, 135 aa, Homo sapiens
MSEPQPRGAERDLYRDTWVRYLGYANEVGEAFRSLVPAAVVWLSYGVASSYVLADAIDKGKKAGEVGGFPPGLQPAQALPNSGEAQLLLIILWYLACASASCFMSTSYSCQGMWTPGSLVSKDPGTWVGLSWTEA

SEQ ID NO: 389 - protein, 803 aa, Homo sapiens
MGCWGQLLVWFGAAGAILCSSPGSQETFLRSSPLPLASPSPRDPKVSAPPSILEPASPLNSPGTEGSWLFSTCGASGRHGPTQTQCDGAYAGTSVVVTVGAAGQLRGVQLWRVPGPGQYLISAYGAAGGKGAKNHLSRAHGVFVSAIFSLGLGESLYILVGQQGEDACPGGSPESQLVCLGESRAVEEHAAMDGSEGVPGSRRWAGGGGGGGGATYVFRVRAGELEPLLVAAGGGGRAYLRPRDRGRTQASPEKLENRSEAPGSGGRGGAAGGDASETDNLWADGEDGVSFIHPSSELFLQPLAVTENHGEVEIRRHLNCSHCPLRDCQWQAELQLAECLCPEGMELAVDNVTCMDLHKPPGPLVLMVAVVATSTLSLLMVCGVLILVKQKKWQGLQEMRLPSPELELSKLRTSAIRTAPNPYYCQVGLGPAQSWPLPPGVTEVSPANVTLLRALGHGAFGEVYEGLVIGLPGDSSPLQVAIKTLPELCSPQDELDFLMEALIISKFRHQNIVRCVGLSLRATPRLILLELMSGGDMKSFLRHSRPHLGQPSPLVMRDLLQLAQDIAQGCHYLEENHFIHRDIAARNCLLSCAGPSRVAKIGDFGMARDIYRASYYRRGDRALLPVKWMPPEAFLEGIFTSKTDSWSFGVLLWEIFSLGYMPYPGRTNQEVLDFVVGGGRMDPPRGCPGPVYRIMTQCWQHEPELRPSFASILERLQYCTQDPDVLNSLLPMELGPTPEEEGTSGLGNRSLECLRPPQPQELSPEKLKSWGGSPLGPWLSSGLKPLKSRGLQPQNLWNPTYRS

SEQ ID NO: 390 - protein, 475 aa, Homo sapiens
MAAKSQPNIPKAKSLDGVTNDRTASQGQWGRAWEVDWFSLASVIFLLLFAPFIVYYFIMACDQYSCALTGPVVDIVTGHARLSDIWAKTPPITRKAAQLYTLWVTFQVLLYTSLPDFCHKFLPGYVGGIQEGAVTPAGVVNKYQINGLQAWLLTHLLWFANAHLLSWFSPTIIFDNWIPLLWCANILGYAVSTFAMVKGYFFPTSARDCKFTGNFFYNYMMGIEFNPRIGKWFDFKLFFNGRPGIVAWTLINLSFAAKQRELHSHVTNAMVLVNVLQAIYVIDFFWNETWYLKTIDICHDHFGWYLGWGDCVWLPYLYTLQGLYLVYHPVQLSTPHAVGVLLLGLVGYYIFRVANHQKDLFRRTDGRCLIWGRKPKVIECSYTSADGQRHHSKLLVSGFWGVARHFNYVGDLMGSLAYCLACGGGHLLPYFYIIYMAILLTHRCLRDEHRCASKYGRDWERYTAAVPYRLLPGIF

SEQ ID NO: 391 - protein, 512 aa, Homo sapiens
MAGGMSAECPEPGPGGLQGQSPGPGRQCPPPITPTSWSLPPWRAYVAAAVLCYINLLNYMNWFIIAGVLLDIQEVFQISDNHAGLLQTVFVSCLLLSAPVFGYLGDRHSRKATMSFGILLWSGAGLSSSFISPRYSWLFFLSRGIVGTGSASYSTIAPTVLGDLFVRDQRTRVLAVFYIFIPVGSGLGYVLGSAVTMLTGNWRWALRVMPCLEAVALILLILLVPDPPRGAAETQGEGAVGGFRSSWCEDVRYLGKNWSFVWSTLGVTAMAFVTGALGFWAPKFLLEARVVHGLQPPCFQEPCSNPDSLIFGALTIMTGVIGVILGAEAARRYKKVIPGAEPLICASSLLATAPCLYLALVLAPTTLLASYVFLGLGELLLSCNWAVVADILLSVVVPRCRGTAEALQITVGHILGDAGSPYLTGLISSVLRARRPDSYLQRFRSLQQSFLCCAFVIALGGGCFLLTALYLERDETRAWQPVTGTPDSNDVDSNDLERQGLLSGAGASTEEP

SEQ ID NO: 392 - protein, 275 aa, Homo sapiens
MWIDFFTYSSMSEEVTYADLQFQNSSEMEKIPEIGKFGEKAPPAPSHVWRPAALFLTLLCLLLLIGLGVLASMFHVTLKIEMKKMNKLQNISEELQRNISLQLMSNMNISNKIRNLSTTLQTIATKLCRELYSKEQEHKCKPCPRRWIWHKDSCYFLSDDVQTWQESKMACAAQNASLLKINNKNALEFIKSQSRSYDYWLGLSPEEDSTRGMRVDNIINSSAWVIRNAPDLNNMYCGYINRLYVQYYHCTYKKRMICEKMANPVQLGSTYFREA

SEQ ID NO: 393 - protein, 338 aa, Homo sapiens
MTALSSENCSFQYQLRQTNQPLDVNYLLFLIILGKILLNILTLGMRRKNTCQNFMEYFCISLAFVDLLLLVNISIILYFRDFVLLSIRFTKYHICLFTQIISFTYGFLHYPVFLTACIDYCLNFSKTTKLSFKCQKLFYFFTVILIWISVLAYVLGDPAIYQSLKAQNAYSRHCPFYVSIQSYWLSFFMVMILFVAFITCWEEVTTLVQAIRITSYMNETILYFPFSSHSSYTVRSKKIFLSKLIVCFLSTWLPFVLLQVIIVLLKVQIPAYIEMNIPWLYFVNSFLIATVYWFNCHKLNLKDIGLPLDPFVNWKCCFIPLTIPNLEQIEKPISIMIC

SEQ ID NO: 394 - protein, 357 aa, Homo sapiens
MADDYGSESTSSMEDYVNFNFTDFYCEKNNVRQFASHFLPPLYWLVFIVGALGNSLVILVYWYCTRVKTMTDMFLLNLAIADLLFLVTLPFWAIAAADQWKFQTFMCKVVNSMYKMNFYSCVLLIMCISVDRYIAIAQAMRAHTWREKRLLYSKMVCFTIWVLAAALCIPEILYSQIKEESGIAICTMVYPSDESTKLKSAVLTLKVILGFFLPFVVMACCYTIIIHTLIQAKKSSKHKALKVTITVLTVFVLSQFPYNCILLVQTIDAYAMFISNCAVSTNIDICFQVTQTIAFFHSCLNPVLYVFVGERFRRDLVKTLKNLGCISQAQWVSFTRREGSLKLSSMLLETTSGALSL

SEQ ID NO: 395 - protein, 733 aa, Homo sapiens
MWSWKCLLFWAVLVTATLCTARPSPTLPEQDALPSSEDDDDDDDSSSEEKETDNTKPNRMPVAPYWTSPEKMEKKLHAVPAAKTVKFKCPSSGTPNPTLRWLKNGKEFKPDHRIGGYKVRYATWSIIMDSVVPSDKGNYTCIVENEYGSINHTYQLDVVERSPHRPILQAGLPANKTVALGSNVEFMCKVYSDPQPHIQWLKHIEVNGSKIGPDNLPYVQILKTAGVNTTDKEMEVLHLRNVSFEDAGEYTCLAGNSIGLSHHSAWLTVLEALEERPAVMTSPLYLEIIIYCTGAFLISCMVGSVIVYKMKSGTKKSDFHSQMAVHKLAKSIPLRRQVTVSADSSASMNSGVLLVRPSRLSSSGTPMLAGVSEYELPEDPRWELPRDRLVLGKPLGEGCFGQVVLAEAIGLDKDKPNRVTKVAVKMLKSDATEKDLSDLISEMEMMKMIGKHKNIINLLGACTQDGPLYVIVEYASKGNLREYLQARRPPGLEYCYNPSHNPEEQLSSKDLVSCAYQVARGMEYLASKKCIHRDLAARNVLVTEDNVMKIADFGLARDIHHIDYYKKTTNGRLPVKWMAPEALFDRIYTHQSDVWSFGVLLWEIFTLGGSPYPGVPVEELFKLLKEGHRMDKPSNCTNELYMMMRDCWHAVPSQRPTFKQLVEDLDRIVALTSNQEYLDLSMPLDQYSPSFPDTRSSTCSSGEDSVFSHEPLPEEPCLPRHPAQLANGGLKRR

SEQ ID NO: 396 - protein, 704 aa, Homo sapiens
MVSWGRFICLVVVTMATLSLARPSFSLVEDTTLEPEGAPYWTNTEKMEKRLHAVPAANTVKFRCPAGGNPMPTMRWLKNGKEFKQEHRIGGYKVRNQHWSLIMESVVPSDKGNYTCVVENEYGSINHTYHLDVVERSPHRPILQAGLPANASTVVGGDVEFVCKVYSDAQPHIQWIKHVEKNGSKYGPDGLPYLKVLKAAGVNTTDKEIEVLYIRNVTFEDAGEYTCLAGNSIGISFHSAWLTVLPAPGREKEITASPDYLEIAIYCIGVFLIACMVVTVILCRMKNTTKKPDFSSQPAVHKLTKRIPLRRQVSAESSSSMNSNTPLVRITTRLSSTADTPMLAGVSEYELPEDPKWEFPRDKLTLGKPLGEGCFGQVVMAEAVGIDKDKPKEAVTVAVKMLKDDATEKDLSDLVSEMEMMKMIGKHKNIINLLGACTQDGPLYVIVEYASKGNLREYLRARRPPGMEYSYDINRVPEEQMTFKDLVSCTYQLARGMEYLASQKCIHRDLAARNVLVTENNVMKIADFGLARDINNIDYYKKTTNGRLPVKWMAPEALFDRVYTHQSDVWSFGVLMWEIFTLGGSPYPGIPVEELFKLLKEGHRMDKPANCTNELYMMMRDCWHAVPSQRPTFKQLVEDLDRILTLTTNEEYLDLSQPLEQYSPSYPDTRSSCSSGDDSVFSPDPMPYEPCLPQYPHINGSVKT

SEQ ID NO: 397 - protein, 276 aa, Homo sapiens
MYRISQLMSTPVASSSRLEREYAGELSPTCIFPSFTCDSLDGYHSFECGSIDPLTGSHYTCRRSPRLLTNGYYIWTEDSFLCDKDGNITLNPSQTSVMYKENLVSTSKSWLHGSIFGDINSSPSEDNWLKGTRRLDTDHCNGNADDLDCSSLTDDWESGKMNAESVITSSSSHIISQPPGGNSHSLSLQSQLTASERFQENSSDHSETRLLQEVFFQAILLAVCLIISACARWFMGEILASVFTCSLMITVAYVKSLFLSLASYFKTTACARFVKI

SEQ ID NO: 398 - protein, 107 aa, Homo sapiens
MASASTTMHTTTIAEPDPGMSGWPDGRMETSTPTIMDIVVIAGVIAAVAIVLVSLLFVMLRYMYRHKGTYHTNEAKGTEFAESADAALQGDPALQDAGDSSRKEYFI

SEQ ID NO: 399 - protein, 189 aa, Homo sapiens
MTDSVIYSMLELPTATQAQNDYGPQQKSSSSRPSCSCLVAIALGLLTAVLLSVLLYQWILCQGSNYSTCASCPSCPDRWMKYGNHCYYFSVEEKDWNSSLEFCLARDSHLLVITDNQEMSLLQVFLSEAFCWIGLRNNSGWRWEDGSPLNFSRISSNSFVQTCGAINKNGLQASSCEVPLHWVCKKVRL

SEQ ID NO: 400 - protein, 383 aa, Homo sapiens
MPSGCRCLHLVCLLCILGAPGQPVRADDCSSHCDLAHGCCAPDGSCRCDPGWEGLHCERCVRMPGCQHGTCHQPWQCICHSGWAGKFCDKDEHICTTQSPCQNGGQCMYDGGGEYHCVCLPGFHGRDCERKAGPCEQAGSPCRNGGQCQDDQGFALNFTCRCLVGFVGARCEVNVDDCLMRPCANGATCLDGINRFSCLCPEGFAGRFCTINLDDCASRPCQRGARCRDRVHDFDCLCPSGYGGKTCELVLPVPDPPTTVDTPLGPTSAVVVPATGPAPHSAGAGLLRISVKEVVRRQEAGLGEPSLVALVVFGALTAALVLATVLLTLRAWRRGVCPPGPCCYPAPHYAPACQDQECQVSMLPAGLPLPRDLPPEPGKTTAL

SEQ ID NO: 401 - protein, 197 aa, Homo sapiens
MSSTLPALLCVEMYDTPTLSVHPGPEVISGEKVTFYCRLDTATSMFLLLKEGRSSHVQRGYGKVQAEFPLGPVTTAHRGTYRCFGSYNNHAWSFPSEPVKLLVTGDIENTSLAPEDPTFPADTWGTYLLTTETGLQKDHALWDHTAQNLLRMGLAFLVLVALVWFLVEDWLSRKRTRERASRASTWEGRRRLNTQTL

SEQ ID NO: 402 - protein, 355 aa, Homo sapiens
MTTSLDTVETFGTTSYYDDVGLLCEKADTRALMAQFVPPLYSLVFTVGLLGNVVVVMILIKYRRLRIMTNIYLLNLAISDLLFLVTLPFWIHYVRGHNWVFGHGMCKLLSGFYHTGLYSEIFFIILLTIDRYLAIVHAVFALRARTVTFGVITSIVTWGLAVLAALPEFIFYETEELFEETLCSALYPEDTVYSWRHFHTLRMTIFCLVLPLLVMAICYTGIIKTLLRCPSKKKYKAIRLIFVIMAVFFIFWTPYNVAILLSSYQSILFGNDCERSKHLDLVMLVTEVIAYSHCCMNPVIYAFVGERFRKYLRHFFHRHLLMHLGRYIPFLPSEKLERTSSVSPSTAEPELSIVF

SEQ ID NO: 403 - protein, 707 aa, Homo sapiens
MVSWGRFICLVVVTMATLSLARPSFSLVEDTTLEPEDAISSGDDEDDTDGAEDFVSENSNNKRAPYWTNTEKMEKRLHAVPAANTVKFRCPAGGNPMPTMRWLKNGKEFKQEHRIGGYKVRNQHWSLIMESVVPSDKGNYTCVVENEYGSINHTYHLDVVERSPHRPILQAGLPANASTVVGGDVEFVCKVYSDAQPHIQWIKHVEKNGSKYGPDGLPYLKVLKAAGVNTTDKEIEVLYIRNVTFEDAGEYTCLAGNSIGISFHSAWLTVLPAPGREKEITASPDYLEIAIYCIGVFLIACMVVTVILCRMKNTTKKPDFSSQPAVHKLTKRIPLRRQVTVSAESSSSMNSNTPLVRITTRLSSTADTPMLAGVSEYELPEDPKWEFPRDKLTLGKPLGEGCFGQVVMAEAVGIDKDKPKEAVTVAVKMLKDDATEKDLSDLVSEMEMMKMIGKHKNIINLLGACTQDGPLYVIVEYASKGNLREYLRARRPPGMEYSYDINRVPEEQMTFKDLVSCTYQLARGMEYLASQKCIHRDLAARNVLVTENNVMKIADFGLARDINNIDYYKKTTNGRLPVKWMAPEALFDRVYTHQSDVWSFGVLMWEIFTLGGSPYPGIPVEELFKLLKEGHRMDKPANCTNELYMMMRDCWHAVPSQRPTFKQLVEDLDRILTLTTNEEEKKVSGAVDCHKPPCNPSHLPCVLAVDQ

SEQ ID NO: 404 - protein, 369 aa, Homo sapiens
MTPTDFTSPIPNMADDYGSESTSSMEDYVNFNFTDFYCEKNNVRQFASHFLPPLYWLVFIVGALGNSLVILVYWYCTRVKTMTDMFLLNLAIADLLFLVTLPFWAIAAADQWKFQTFMCKVVNSMYKMNFYSCVLLIMCISVDRYIAIAQAMRAHTWREKRLLYSKMVCFTIWVLAAALCIPEILYSQIKEESGIAICTMVYPSDESTKLKSAVLTLKVILGFFLPFVVMACCYTIIIHTLIQAKKSSKHKALKVTITVLTVFVLSQFPYNCILLVQTIDAYAMFISNCAVSTNIDICFQVTQTIAFFHSCLNPVLYVFVGERFRRDLVKTLKNLGCISQAQWVSFTRREGSLKLSSMLLETTSGALSL

SEQ ID NO: 405 - protein, 652 aa, Homo sapiens
MSGGDTRAAIARPRMAAAHGPVAPSSPEQNGAVPSEATKRDQNLKRGNWGNQIEFVLTSVGYAVGLGNVWRFPYLCYRNGGGAFMFPYFIMLIFCGIPLFFMELSFGQFASQGCLGVWRISPMFKGVGYGMMVVSTYIGIYYNVVICIAFYYFFSSMTHVLPWAYCNNPWNTHDCAGVLDASNLTNGSRPAALPSNLSHLLNHSLQRTSPSEEYWRLYVLKLSDDIGNFGEVRLPLLGCLGVSWLVVFLCLIRGVKSSGKVVYFTATFPYVVLTILFVRGVTLEGAFDGIMYYLTPQWDKILEAKVWGDAASQIFYSLGCAWGGLITMASYNKFHNNCYRDSVIISITNCATSVYAGFVIFSILGFMANHLGVDVSRVADHGPGLAFVAYPEALTLLPISPLWSLLFFFMLILLGLGTQFCLLETLVTAIVDEVGNEWILQKKTYVTLGVAVAGFLLGIPLTSQAGIYWLLLMDNYAASFSLVVISCIMCVAIMYIYGHRNYFQDIQMMLGFPPPLFFQICWRFVSPAIIFFILVFTVIQYQPITYNHYQYPGWAVAIGFLMALSSVLCIPLYAMFRLCRTDGDTLLQRLKNATKPSRDWGPALLEHRTGRYAPTIAPSPEDGFEVQPLHPDKAQIPIVGSNGSSRLQDSRI

SEQ ID NO: 406 - protein, 414 aa, Homo sapiens
MKAQTALSFFLILITSLSGSQGIFPLAFFIYVPMNEQIVIGRLDEDIILPSSFERGSEVVIHWKYQDSYKVHSYYKGSDHLESQDPRYANRTSLFYNEIQNGNASLFFRRVSLLDEGIYTCYVGTAIQVITNKVVLKVGVFLTPVMKYEKRNTNSFLICSVLSVYPRPIITWKMDNTPISENNMEETGSLDSFSINSPLNITGSNSSYECTIENSLLKQTWTGRWTMKDGLHKMQSEHVSLSCQPVNDYFSPNQDFKVTWSRMKSGTFSVLAYYLSSSQNTIINESRFSWNKELINQSDFSMNLMDLNLSDSGEYLCNISSDEYTLLTIHTVHVEPSQETASHNKGLWILVPSAILAAFLLIWSVKCCRAQLEARRSRHPADGAQQERCCVPPGERCPSAPDNGEENVPLSGKV

SEQ ID NO: 407 - protein, 387 aa, Homo sapiens
MREPLEAFKLADLDFRKSSLASGWRMASGAFTMDQFPESVTENFEYDDLAEACYIGDIVVFGTVFLSIFYSVIFAIGLVGNLLVVFALTNSKKPKSVTDIYLLNLALSDLLFVATLPFWTHYLINEKGLHNAMCKFTTAFFFIGFFGSIFFITVISIDRYLAIVLAANSMNNRTVQHGVTISLGVWAAAILVAAPQFMFTKQKENECLGDYPEVLQEIWPVLRNVETNFLGFLLPLLIMSYCYFRIIQTLFSCKNHKKAKAIKLILLVVIVFFLFWTPYNVMIFLETLKLYDFFPSCDMRKDLRLALSVTETVAFSHCCLNPLIYAFAGEKFRRYLYHLYGKCLAVLCGRSVHVDFSSSESQRSRHGSVLSSNFTYHTSDGDALLLL

SEQ ID NO: 408 - protein, 2048 aa, Homo sapiens
MLRVIVESASNIPKTKFGKPDPIVSVIFKDEKKKTKKVDNELNPVWNEILEFDLRGIPLDFSSSLGIIVKDFETIGQNKLIGTATVALKDLTGDQSRSLPYKLISLLNEKGQDTGATIDLVIGYDPPSAPHPNDLSGPSVPGMGGDGEEDEGDEDRLDNAVRGPGPKGPVGTVSEAQLARRLTKVKNSRRMLSNKPQDFQIRVRVIEGRQLSGNNIRPVVKVHVCGQTHRTRIKRGNNPFFDELFFYNVNMTPSELMDEIISIRVYNSHSLRADCLMGEFKIDVGFVYDEPGHAVMRKWLLLNDPEDTSSGSKGYMKVSMFVLGTGDEPPPERRDRDNDSDDVESNLLLPAGIALRWVTFLLKIYRAEDIPQMDDAFSQTVKEIFGGNADKKNLVDPFVEVSFAGKKVCTNIIEKNANPEWNQVVNLQIKFPSVCEKIKLTIYDWDRLTKNDVVGTTYLHLSKIAASGGEVEVNTGETEVGFVPTFGPCYLNLYGSPREYTGFPDPYDELNTGKGEGVAYRGRILVELATFLEKTPPDKKLEPISNDDLLVVEKYQRRRKYSLSAVFHSATMLQDVGEAIQFEVSIGNYGNKFDTTCKPLASTTQYSRAVFDGNYYYYLPWAHTKPVVTLTSYWEDISHRLDAVNTLLAMAERLQTNIEALKSGIQGKIPANQLAELWLKLIDEVIEDTRYTLPLTEGKANVTVLDTQIRKLRSRSLSQIHEAAVRMRSEATDVKSTLAEIEDWLDKLMQLTEEPQNSMPDIIIWMIRGEKRLAYARIPAHQVLYSTSGENASGKYCGKTQTIFLKYPQEKNNGPKVPVELRVNIWLGLSAVEKKFNSFAEGTFTVFAEMYENQALMFGKWGTSGLVGRHKFSDVTGKIKLKREFFLPPKGWEWEGEWIVDPERSLLTEADAGHTEFTDEVYQNESRYPGGDWKPAEDTYTDANGDKAASPSELTCPPGWEWEDDAWSYDINRAVDEKGWEYGITIPPDHKPKSWVAAEKMYHTHRRRRLVRKRKKDLTQTASSTARAMEELQDQEGWEYASLIGWKFHWKQRSSDTFRRRRWRRKMAPSETHGAAAIFKLEGALGADTTEDGDEKSLEKQKHSATTVFGANTPIVSCNFDRVYIYHLRCYVYQARNLLALDKDSFSDPYAHICFLHRSKTTEIIHSTLNPTWDQTIIFDEVEIYGEPQTVLQNPPKVIMELFDNDQVGKDEFLGRSIFSPVVKLNSEMDITPKLLWHPVMNGDKACGDVLVTAELILRGKDGSNLPILPPQRAPNLYMVPQGIRPVVQLTAIEILAWGLRNMKNFQMASITSPSLVVECGGERVESVVIKNLKKTPNFPSSVLFMKVFLPKEELYMPPLVIKVIDHRQFGRKPVVGQCTIERLDRFRCDPYAGKEDIVPQLKASLLSAPPCRDIVIEMEDTKPLLASKLTEKEEEIVDWWSKFYASSGEHEKCGQYIQKGYSKLKIYNCELENVAEFEGLTDFSDTFKLYRGKSDENEDPSVVGEFKGSFRIYPLPDDPSVPAPPRQFRELPDSVPQECTVRIYIVRGLELQPQDNNGLCDPYIKITLGKKVIEDRDHYIPNTLNPVFGRMYELSCYLPQEKDLKISVYDYDTFTRDEKVGETIIDLENRFLSRFGSHCGIPEEYCVSGVNTWRDQLRPTQLLQNVARFKGFPQPILSEDGSRIRYGGRDYSLDEFEANKILHQHLGAPEERLALHILRTQGLVPEHVETRTLHSTFQPNISQGKLQMWVDVFPKSLGPPGPPFNITPRKAKKYYLRVIIWNTKDVILDEKSITGEEMSDIYVKGWIPGNEENKQKTDVHYRSLDGEGNFNWRFVFPFDYLPAEQLCIVAKKEHFWSIDQTEFRIPPRLIIQIWDNDKFSLDDYLGFLELDLRHTIIPAKSPEKCRLDMIPDLKAMNPLKAKTASLFEQKSMKGWWPCYAEKDGARVMAGKVEMTLEILNEKEADERPAGKGRDEPNMNPKLDLPNRPETSFLWFTNPCKTMKFIVWRRFKWVIIGLLFLLILLLFVAVLLYSLPNYLSMKIVKPNV

SEQ ID NO: 409 - protein, 1060 aa, Homo sapiens
MEQLNELELLMEKSFWEEAELPAELFQKKVVASFPRTVLSTGMDNRYLVLAVNTVQNKEGNCEKRLVITASQSLENKELCILRNDWCSVPVEPGDIIHLEGDCTSDTWIIDKDFGYLILYPDMLISGTSIASSIRCMRRAVLSETFRSSDPATRQMLIGTVLHEVFQKAINNSFAPEKLQELAFQTIQEIRHLKEMYRLNLSQDEIKQEVEDYLPSFCKWAGDFMHKNTSTDFPQMQLSLPSDNSKDNSTCNIEVVKPMDIEESIWSPRFGLKGKIDVTVGVKIHRGYKTKYKIMPLELKTGKESNSIEHRSQVVLYTLLSQERRADPEAGLLLYLKTGQMYPVPANHLDKRELLKLRNQMAFSLFHRISKSATRQKTQLASLPQIIEEEKTCKYCSQIGNCALYSRAVEQQMDCSSVPIVMLPKIEEETQHLKQTHLEYFSLWCLMLTLESQSKDNKKNHQNIWLMPASEMEKSGSCIGNLIRMEHVKIVCDGQYLHNFQCKHGAIPVTNLMAGDRVIVSGEERSLFALSRGYVKEINMTTVTCLLDRNLSVLPESTLFRLDQEEKNCDIDTPLGNLSKLMENTFVSKKLRDLIIDFREPQFISYLSSVLPHDAKDTVACILKGLNKPQRQAMKKVLLSKDYTLIVGMPGTGKTTTICTLVRILYACGFSVLLTSYTHSAVDNILLKLAKFKIGFLRLGQIQKVHPAIQQFTEQEICRSKSIKSLALLEELYNSQLIVATTCMGINHPIFSRKIFDFCIVDEASQISQPICLGPLFFSRRFVLVGDHQQLPPLVLNREARALGMSESLFKRLEQNKSAVVQLTVQYRMNSKIMSLSNKLTYEGKLECGSDKVANAVINLRHFKDVKLELEFYADYSDNPWLMGVFEPNNPVCFLNTDKVPAPEQVEKGGVSNVTEAKLIVFLTSIFVKAGCSPSDIGIIAPYRQQLKIINDLLARSIGMVEVNTVDKYQGRDKSIVLVSFVRSNKDGTVGELLKDWRRLNVAITRAKHKLILLGCVPSLNCYPPLEKLLNHLNSEKLIIDLPSREHESLCHILGDFQRE

SEQ ID NO: 410 - protein, 821 aa, Homo sapiens
MVSWGRFICLVVVTMATLSLARPSFSLVEDTTLEPEEPPTKYQISQPEVYVAAPGESLEVRCLLKDAAVISWTKDGVHLGPNNRTVLIGEYLQIKGATPRDSGLYACTASRTVDSETWYFMVNVTDAISSGDDEDDTDGAEDFVSENSNNKRAPYWTNTEKMEKRLHAVPAANTVKFRCPAGGNPMPTMRWLKNGKEFKQEHRIGGYKVRNQHWSLIMESVVPSDKGNYTCVVENEYGSINHTYHLDVVERSPHRPILQAGLPANASTVVGGDVEFVCKVYSDAQPHIQWIKHVEKNGSKYGPDGLPYLKVLKAAGVNTTDKEIEVLYIRNVTFEDAGEYTCLAGNSIGISFHSAWLTVLPAPGREKEITASPDYLEIAIYCIGVFLIACMVVTVILCRMKNTTKKPDFSSQPAVHKLTKRIPLRRQVTVSAESSSSMNSNTPLVRITTRLSSTADTPMLAGVSEYELPEDPKWEFPRDKLTLGKPLGEGCFGQVVMAEAVGIDKDKPKEAVTVAVKMLKDDATEKDLSDLVSEMEMMKMIGKHKNIINLLGACTQDGPLYVIVEYASKGNLREYLRARRPPGMEYSYDINRVPEEQMTFKDLVSCTYQLARGMEYLASQKCIHRDLAARNVLVTENNVMKIADFGLARDINNIDYYKKTTNGRLPVKWMAPEALFDRVYTHQSDVWSFGVLMWEIFTLGGSPYPGIPVEELFKLLKEGHRMDKPANCTNELYMMMRDCWHAVPSQRPTFKQLVEDLDRILTLTTNEEYLDLSQPLEQYSPSYPDTRSSCSSGDDSVFSPDPMPYEPCLPQYPHINGSVKT

SEQ ID NO: 411 - protein, 2578 aa, Homo sapiens
MPVTEKDLAEDAPWKKIQQNTFTRWCNEHLKCVNKRIGNLQTDLSDGLRLIALLEVLSQKRMYRKYHQRPTFRQMQLENVSVALEFLDRESIKLVSIDSKAIVDGNLKLILGLVWTLILHYSISMPVWEDEGDDDAKKQTPKQRLLGWIQNKIPYLPITNFNQNWQDGKALGALVDSCAPGLCPDWESWDPQKPVDNAREAMQQADDWLGVPQVITPEEIIHPDVDEHSVMTYLSQFPKAKLKPGAPLKPKLNPKKARAYGRGIEPTGNMVKQPAKFTVDTISAGQGDVMVFVEDPEGNKEEAQVTPDSDKNKTYSVEYLPKVTGLHKVTVLFAGQHISKSPFEVSVDKAQGDASKVTAKGPGLEAVGNIANKPTYFDIYTAGAGVGDIGVEVEDPQGKNTVELLVEDKGNQVYRCVYKPMQPGPHVVKIFFAGDTIPKSPFVVQVGEACNPNACRASGRGLQPKGVRIRETTDFKVDTKAAGSGELGVTMKGPKGLEELVKQKDFLDGVYAFEYYPSTPGRYSIAITWGGHHIPKSPFEVQVGPEAGMQKVRAWGPGLHGGIVGRSADFVVESIGSEVGSLGFAIEGPSQAKIEYNDQNDGSCDVKYWPKEPGEYAVHIMCDDEDIKDSPYMAFIHPATGGYNPDLVRAYGPGLEKSGCIVNNLAEFTVDPKDAGKAPLKIFAQDGEGQRIDIQMKNRMDGTYACSYTPVKAIKHTIAVVWGGVNIPHSPYRVNIGQGSHPQKVKVFGPGVERSGLKANEPTHFTVDCTEAGEGDVSVGIKCDARVLSEDEEDVDFDIIHNANDTFTVKYVPPAAGRYTIKVLFASQEIPASPFRVKVDPSHDASKVKAEGPGLSKAGVENGKPTHFTVYTKGAGKAPLNVQFNSPLPGDAVKDLDIIDNYDYSHTVKYTPTQQGNMQVLVTYGGDPIPKSPFTVGVAAPLDLSKIKLNGLENRVEVGKDQEFTVDTRGAGGQGKLDVTILSPSRKVVPCLVTPVTGRENSTAKFIPREEGLYAVDVTYDGHPVPGSPYTVEASLPPDPSKVKAHGPGLEGGLVGKPAEFTIDTKGAGTGGLGLTVEGPCEAKIECSDNGDGTCSVSYLPTKPGEYFVNILFEEVHIPGSPFKADIEMPFDPSKVVASGPGLEHGKVGEAGLLSVDCSEAGPGALGLEAVSDSGTKAEVSIQNNKDGTYAVTYVPLTAGMYTLTMKYGGELVPHFPARVKVEPAVDTSRIKVFGPGIEGKDVFREATTDFTVDSRPLTQVGGDHIKAHIANPSGASTECFVTDNADGTYQVEYTPFEKGLHVVEVTYDDVPIPNSPFKVAVTEGCQPSRVQAQGPGLKEAFTNKPNVFTVVTRGAGIGGLGITVEGPSESKINCRDNKDGSCSAEYIPFAPGDYDVNITYGGAHIPGSPFRVPVKDVVDPSKVKIAGPGLGSGVRARVLQSFTVDSSKAGLAPLEVRVLGPRGLVEPVNVVDNGDGTHTVTYTPSQEGPYMVSVKYADEEIPRSPFKVKVLPTYDASKVTASGPGLSSYGVPASLPVDFAIDARDAGEGLLAVQITDQEGKPKRAIVHDNKDGTYAVTYIPDKTGRYMIGVTYGGDDIPLSPYRIRATQTGDASKCLATGPGIASTVKTGEEVGFVVDAKTAGKGKVTCTVLTPDGTEAEADVIENEDGTYDIFYTAAKPGTYVIYVRFGGVDIPNSPFTVMVTEEAYVPVSDMNGLGFKPFDLVIPFAVRKGEITGEVHMPSGKTATPEIVDNKDGTVTVRYAPTEVGLHEMHIKYMGSHIPESPLQFYVNYPNSGSVSAYGPGLVYGVANKTATFTIVTEDAGEGGLDLAIEGPSKAEISCIDNKDGTCTVTYLPTLPGDYSILVKYNDKHIPGSPFTAKITDDSRRCSQVKLGSAADFLLDISETDLSSLTASIKAPSGRDEPCLLKRLPNNHIGISFIPREVGEHLVSIKKNGNHVANSPVSIMVVQSEIGDARRAKVYGRGLSEGRTFEMSDFIVDTRDAGYGGISLAVEGPSKVDIQTEDLEDGTCKVSYFPTVPGVYIVSTKFADEHVPGSPFTVKISGEGRVKESITRTSRAPSVATVGSICDLNLKIPEINSSDMSAHVTSPSGRVTEAEIVPMGKNSHCVRFVPQEMGVHTVSVKYRGQHVTGSPFQFTVGPLGEGGAHKVRAGGPGLERGEAGVPAEFSIWTREAGAGGLSIAVEGPSKAEITFDDHKNGSCGVSYIAQEPGNYEVSIKFNDEHIPESPYLVPVIAPSDDARRLTVMSLQESGLKVNQPASFAIRLNGAKGKIDAKVHSPSGAVEECHVSELEPDKYAVRFIPHENGVHTIDVKFNGSHVVGSPFKVRVGEPGQAGNPALVSAYGTGLEGGTTGIQSEFFINTTRAGPGTLSVTIEGPSKVKMDCQETPEGYKVMYTPMAPGNYLISVKYGGPNHIVGSPFKAKVTGQRLVSPGSANETSSILVESVTRSSTETCYSAIPKASSDASKVTSKGAGLSKAFVGQKSSFLVDCSKAGSNMLLIGVHGPTTPCEEVSMKHVGNQQYNVTYVVKERGDYVLAVKWGEEHIPGSPFHVTVP

SEQ ID NO: 412 - protein, 2347 aa, Homo sapiens
MTEGARAADEVRVPLGAPPPGPAALVGASPESPGAPGREAERGSELGVSPSESPAAERGAELGADEEQRVPYPALAATVFFCLGQTTRPRSWCLRLVCNPWFEHVSMLVIMLNCVTLGMFRPCEDVECGSERCNILEAFDAFIFAFFAVEMVIKMVALGLFGQKCYLGDTWNRLDFFIVVAGMMEYSLDGHNVSLSAIRTVRVLRPLRAINRVPSMRILVTLLLDTLPMLGNVLLLCFFVFFIFGIVGVQLWAGLLRNRCFLDSAFVRNNNLTFLRPYYQTEEGEENPFICSSRRDNGMQKCSHIPGRRELRMPCTLGWEAYTQPQAEGVGAARNACINWNQYYNVCRSGDSNPHNGAINFDNIGYAWIAIFQVITLEGWVDIMYYVMDAHSFYNFIYFILLIIVGSFFMINLCLVVIATQFSETKQRESQLMREQRARHLSNDSTLASFSEPGSCYEELLKYVGHIFRKVKRRSLRLYARWQSRWRKKVDPSAVQGQGPGHRQRRAGRHTASVHHLVYHHHHHHHHHYHFSHGSPRRPGPEPGACDTRLVRAGAPPSPPSPGRGPPDAESVHSIYHADCHIEGPQERARVAHAAATAAASLRLATGLGTMNYPTILPSGVGSGKGSTSPGPKGKWAGGPPGTGGHGPLSLNSPDPYEKIPHVVGEHGLGQAPGHLSGLSVPCPLPSPPAGTLTCELKSCPYCTRALEDPEGELSGSESGDSDGRGVYEFTQDVRHGDRWDPTRPPRATDTPGPGPGSPQRRAQQRAAPGEPGWMGRLWVTFSGKLRRIVDSKYFSRGIMMAILVNTLSMGVEYHEQPEELTNALEISNIVFTSMFALEMLLKLLACGPLGYIRNPYNIFDGIIVVISVWEIVGQADGGLSVLRTFRLLRVLKLVRFLPALRRQLVVLVKTMDNVATFCTLLMLFIFIFSILGMHLFGCKFSLKTDTGDTVPDRKNFDSLLWAIVTVFQILTQEDWNVVLYNGMASTSSWAALYFVALMTFGNYVLFNLLVAILVEGFQAEGDANRSDTDEDKTSVHFEEDFHKLRELQTTELKMCSLAVTPNGHLEGRGSLSPPLIMCTAATPMPTPKSSPFLDAAPSLPDSRRGSSSSGDPPLGDQKPPASLRSSPCAPWGPSGAWSSRRSSWSSLGRAPSLKRRGQCGERESLLSGEGKGSTDDEAEDGRAAPGPRATPLRRAESLDPRPLRPAALPPTKCRDRDGQVVALPSDFFLRIDSHREDAAELDDDSEDSCCLRLHKVLEPYKPQWCRSREAWALYLFSPQNRFRVSCQKVITHKMFDHVVLVFIFLNCVTIALERPDIDPGSTERVFLSVSNYIFTAIFVAEMMVKVVALGLLSGEHAYLQSSWNLLDGLLVLVSLVDIVVAMASAGGAKILGVLRVLRLLRTLRPLRVISRAPGLKLVVETLISSLRPIGNIVLICCAFFIIFGILGVQLFKGKFYYCEGPDTRNISTKAQCRAAHYRWVRRKYNFDNLGQALMSLFVLSSKDGWVNIMYDGLDAVGVDQQPVQNHNPWMLLYFISFLLIVSFFVLNMFVGVVVENFHKCRQHQEAEEARRREEKRLRRLERRRRKAQRRPYYADYSPTRRSIHSLCTSHYLDLFITFIICVNVITMSMEHYNQPKSLDEALKYCNYVFTIVFVFEAALKLVAFGFRRFFKDRWNQLDLAIVLLSLMGITLEEIEMSAALPINPTIIRIMRVLRIARVLKLLKMATGMRALLDTVVQALPQVGNLGLLFMLLFFIYAALGVELFGRLECSEDNPCEGLSRHATFSNFGMAFLTLFRVSTGDNWNGIMKDTLRECSREDKHCLSYLPALSPVYFVTFVLVAQFVLVNVVVAVLMKHLEESNKEAREDAELDAEIELEMAQGPGSARRVDADRPPLPQESPGARDAPNLVARKVSVSRMLSLPNDSYMFRPVVPASAPHPRPLQEVEMETYGAGTPLGSVASVHSPPAESCASLQIPLAVSSPARSGEPLHALSPRGTARSPSLSRLLCRQEAVHTDSLEGKIDSPRDTLDPAEPGEKTPVRPVTQGGSLQSPPRSPRPASVRTRKHTFGQRCVSSRPAAPGGEEAEASDPADEEVSHITSSACPWQPTAEPHGPEASPVAGGERDLRRLYSVDAQGFLDKPGRADEQWRPSAELGSGEPGEAKAWGPEAEPALGARRKKKMSPPCISVEPPAEDEGSARPSAAEGGSTTLRRRTPSCEATPHRDSLEPTEGSGAGGDPAAKGERWGQASCRAEHLTVPSFAFEPLDLGVPSGDPFLDGSHSVTPESRASSSGAIVPLEPPESEPPMPVGDPPEKRRGLYLTVPQCPLEKPGSPSATPAPGGGADDPV

SEQ ID NO: 413 - protein, 1019 aa, Homo sapiens
MKVKEEKAGVGKLDHTNHRRRFPDQKGSPAAEQLQDILGEEDEAPNPTLFTEMDTLQHDGDQMEWKESARWIKFEEKVEEGGERWSKPHVSTLSLHSLFELRTCLQTGTVLLDLDSGSLPQIIDDVIEKQIEDGLLRPELRERVSYVLLRRHRHQTKKPIHRSLADIGKSVSTTNRSPARSPGAGPSLHHSTEDLRMRQSANYGRLCHAQSRSMNDISLTPNTDQRKNKFMKKIPKDSEASNVLVGEVDFLDQPFIAFVRLIQSAMLGGVTEVPVPTRFLFILLGPSGRAKSYNEIGRAIATLMVDDLFSDVAYKARNREDLIAGIDEFLDEVIVLPPGEWDPNIRIEPPKKVPSADKRKSVFSLAELGQMNGSVGGGGGAPGGGNGGGGGGGSGGGAGSGGAGGTSSGDDGEMPAMHEIGEELIWTGRFFGGLCLDIKRKLPWFPSDFYDGFHIQSISAILFIYLGCITNAITFGGLLGDATDNYQGVMESFLGTAMAGSLFCLFSGQPLIILSSTGPILIFEKLLFDFSKGNGLDYMEFRLWIGLHSAVQCLILVATDASFIIKYITRFTEEGFSTLISFIFIYDAIKKMIGAFKYYPINMDFKPNFITTYKCECVAPDTVNTTVFNASAPLAPDTNASLYNLLNLTALDWSLLSKKECLSYGGRLLGNSCKFIPDLALMSFILFFGTYSMTLTLKKFKFSRYFPTKPTRPDRGWFVAPFGKNPWWVYPASILPALLVTILIFMDQQITAVIVNRKENKLKKAAGYHLDLFWVGILMALCSFMGLPWYVAATVISIAHIDSLKMETETSAPGEQPQFLGVREQRVTGIIVFILTGISVFLAPILKCIPLPVLYGVFLYMGVASLNGIQFWERCKLFLMPAKHQPDHAFLRHVPLRRIHLFTLVQILCLAVLWILKSTVAAIIFPVMILGLIIVRRLLDFIFSQHDLAWIDNILPEKEKKETDKKRKRKKGAHEDCDEEPQFPPPSVIKIPMESVQSDPQNGIHCIARKRSSSWSYSL

SEQ ID NO: 414 - protein, 738 aa, Homo sapiens
MDLRRRDYHMERPLLNQEHLEELGRWGSAPRTHQWRTWLQCSRARAYALLLQHLPVLVWLPRYPVRDWLLGDLLSGLSVAIMQLPQGLAYALLAGLPPVFGLYSSFYPVFIYFLFGTSRHISVGTFAVMSVMVGSVTESLAPQALNDSMINETARDAARVQVASTLSVLVGLFQVGLGLIHFGFVVTYLSEPLVRGYTTAAAVQVFVSQLKYVFGLHLSSHSGPLSLIYTVLEVCWKLPQSKVGTVVTAAVAGVVLVVVKLLNDKLQQQLPMPIPGELLTLIGATGISYGMGLKHRFEVDVVGNIPAGLVPPVAPNTQLFSKLVGSAFTIAVVGFAIAISLGKIFALRHGYRVDSNQELVALGLSNLIGGIFQCFPVSCSMSRSLVQESTGGNSQVAGAISSLFILLIIVKLGELFHDLPKAVLAAIIIVNLKGMLRQLSDMRSLWKANRADLLIWLVTFTATILLNLDLGLVVAVIFSLLLVVVRTQMPHYSVLGQVPDTDIYRDVAEYSEAKEVRGVKVFRSSATVYFANAEFYSDALKQRCGVDVDFLISQKKKLLKKQEQLKLKQLQKEEKLRKQAASPKGASVSINVNTSLEDMRSNNVEDCKMMQVSSGDKMEDATANGQEDSKAPDGSTLKALGLPQPDFHSLILDLGALSFVDTVCLKSLKNIFHDFREIEVEVYMAACHSPVVSQLEAGHFFDASITKKHLFASVHDAVTFALQHPRPVPDSPVSVTRL

SEQ ID NO: 415 - protein, 233 aa, Homo sapiens
MDNQGVIYSDLNLPPNPKRQQRKPKGNKNSILATEQEITYAELNLQKASQDFQGNDKTYHCKDLPSAPEKLIVGILGIICLILMASVVTIVVIPSTLIQRHNNSSLNTRTQKARHCGHCPEEWITYSNSCYYIGKERRTWEESLLACTSKNSSLLSIDNEEEMKFLSIISPSSWIGVFRNSSHHPWVTMNGLAFKHEIKDSDNAELNCAVLQVNRLKSAQCGSSIIYHCKHKL

SEQ ID NO: 416 - protein, 2061 aa, Homo sapiens
MLRVIVESASNIPKTKFGKPDPIVSVIFKDEKKKTKKVDNELNPVWNEILEFDLRGIPLDFSSSLGIIVKDFETIGQNKLIGTATVALKDLTGDQSRSLPYKLISLLNEKGQDTGATIDLVIGYDPPSAPHPNDLSGPSVPGMGGDGEEDEGDEDRLDNAVRGPGPKGPVGTVSEAQLARRLTKVKNSRRMLSNKPQDFQIRVRVIEGRQLSGNNIRPVVKVHVCGQTHRTRIKRGNNPFFDELFFYNVNMTPSELMDEIISIRVYNSHSLRADCLMGEFKIDVGFVYDEPGHAVMRKWLLLNDPEDTSSGSKGYMKVSMFVLGTGDEPPPERRDRDNDSDDVESNLLLPAGIALRWVTFLLKIYRAEDIPQMDDAFSQTVKEIFGGNADKKNLVDPFVEVSFAGKKVCTNIIEKNANPEWNQVVNLQIKFPSVCEKIKLTIYDWDRLTKNDVVGTTYLHLSKIAASGGEVEDFSSSGTGAASYTVNTGETEVGFVPTFGPCYLNLYGSPREYTGFPDPYDELNTGKGEGVAYRGRILVELATFLEKTPPDKKLEPISNDDLLVVEKYQRRRKYSLSAVFHSATMLQDVGEAIQFEVSIGNYGNKFDTTCKPLASTTQYSRAVFDGNYYYYLPWAHTKPVVTLTSYWEDISHRLDAVNTLLAMAERLQTNIEALKSGIQGKIPANQLAELWLKLIDEVIEDTRYTLPLTEGKANVTVLDTQIRKLRSRSLSQIHEAAVRMRSEATDVKSTLAEIEDWLDKLMQLTEEPQNSMPDIIIWMIRGEKRLAYARIPAHQVLYSTSGENASGKYCGKTQTIFLKYPQEKNNGPKVPVELRVNIWLGLSAVEKKFNSFAEGTFTVFAEMYENQALMFGKWGTSGLVGRHKFSDVTGKIKLKREFFLPPKGWEWEGEWIVDPERSLLTEADAGHTEFTDEVYQNESRYPGGDWKPAEDTYTDANGDKAASPSELTCPPGWEWEDDAWSYDINRAVDEKGWEYGITIPPDHKPKSWVAAEKMYHTHRRRRLVRKRKKDLTQTASSTARAMEELQDQEGWEYASLIGWKFHWKQRSSDTFRRRRWRRKMAPSETHGAAAIFKLEGALGADTTEDGDEKSLEKQKHSATTVFGANTPIVSCNFDRVYIYHLRCYVYQARNLLALDKDSFSDPYAHICFLHRSKTTEIIHSTLNPTWDQTIIFDEVEIYGEPQTVLQNPPKVIMELFDNDQVGKDEFLGRSIFSPVVKLNSEMDITPKLLWHPVMNGDKACGDVLVTAELILRGKDGSNLPILPPQRAPNLYMVPQGIRPVVQLTAIEILAWGLRNMKNFQMASITSPSLVVECGGERVESVVIKNLKKTPNFPSSVLFMKVFLPKEELYMPPLVIKVIDHRQFGRKPVVGQCTIERLDRFRCDPYAGKEDIVPQLKASLLSAPPCRDIVIEMEDTKPLLASKLTEKEEEIVDWWSKFYASSGEHEKCGQYIQKGYSKLKIYNCELENVAEFEGLTDFSDTFKLYRGKSDENEDPSVVGEFKGSFRIYPLPDDPSVPAPPRQFRELPDSVPQECTVRIYIVRGLELQPQDNNGLCDPYIKITLGKKVIEDRDHYIPNTLNPVFGRMYELSCYLPQEKDLKISVYDYDTFTRDEKVGETIIDLENRFLSRFGSHCGIPEEYCVSGVNTWRDQLRPTQLLQNVARFKGFPQPILSEDGSRIRYGGRDYSLDEFEANKILHQHLGAPEERLALHILRTQGLVPEHVETRTLHSTFQPNISQGKLQMWVDVFPKSLGPPGPPFNITPRKAKKYYLRVIIWNTKDVILDEKSITGEEMSDIYVKGWIPGNEENKQKTDVHYRSLDGEGNFNWRFVFPFDYLPAEQLCIVAKKEHFWSIDQTEFRIPPRLIIQIWDNDKFSLDDYLGFLELDLRHTIIPAKSPEKCRLDMIPDLKAMNPLKAKTASLFEQKSMKGWWPCYAEKDGARVMAGKVEMTLEILNEKEADERPAGKGRDEPNMNPKLDLPNRPETSFLWFTNPCKTMKFIVWRRFKWVIIGLLFLLILLLFVAVLLYSLPNYLSMKIVKPNV

SEQ ID NO: 417 - protein, 306 aa, Homo sapiens
MPEAGFQATNAFTECKFTCTSGKCLYLGSLVCNQQNDCGDNSDEENCLLVTEHPPPGIFNSELEFAQIIIIVVVVTVMVVVIVCLLNHYKVSTRSFINRPNQSRRREDGLPQEGCLWPSDSAAPRLGASEIMHAPRSRDRFTAPSFIQRDRFSRFQPTYPYVQHEIDLPPTISLSDGEEPPPYQGPCTLQLRDPEQQMELNRESVRAPPNRTIFDSDLIDIAMYSGGPCPPSSNSGISASTCSSNGRMEGPPPTYSEVMGHHPGASFLHHQRSNAHRGSRLQFQQNNAESTIVPIKGKDRKPGNLV

SEQ ID NO: 418 - protein, 269 aa, Homo sapiens
MAASAGAGAVIAAPDSRRWLWSVLAAALGLLTAGVSALEVYTPKEIFVANGTQGKLTCKFKSTSTTGGLTSVSWSFQPEGADTTVSFFHYSQGQVYLGNYPPFKDRISWAGDLDKKDASINIENMQFIHNGTYICDVKNPPDIVVQPGHIRLYVVEKENLPVFPVWVVVGIVTAVVLGLTLLISMILAVLYRRKNSKRDYTGCSTSESLSPVKQAPRKSPSDTEGLVKSLPSGSHQGPVIYAQLDHSGGHHSDKINKSESVVYADIRKN

SEQ ID NO: 419 - protein, 499 aa, Homo sapiens
MVDRGPLLTSAIIFYLAIGAAIFEVLEEPHWKEAKKNYYTQKLHLLKEFPCLGQEGLDKILEVVSDAAGQGVAITGNQTFNNWNWPNAMIFAATVITTIGYGNVAPKTPAGRLFCVFYGLFGVPLCLTWISALGKFFGGRAKRLGQFLTKRGVSLRKAQITCTVIFIVWGVLVHLVIPPFVFMVTEGWNYIEGLYYSFITISTIGFGDFVAGVNPSANYHALYRYFVELWIYLGLAWLSLFVNWKVSMFVEVHKAIKKRRRRRKESFESSPHSRKALQVKGSTASKDVNIFSFLSKKEETYNDLIKQIGKKAMKTSGGGETGPGPGLGPQGGGLPALPPSLVPLVVYSKNRVPTLEEVSQTLRSKGHVSRSPDEEAVARAPEDSSPAPEVFMNQLDRISEECEPWDAQDYHPLIFQDASITFVNTEAGLSDEETSKSSLEDNLAGEESPQQGAEAKAPLNMGEFPSSSESTFTSTESELSVPYEQLMNEYNKANSPKGT

SEQ ID NO: 420 - protein, 486 aa, Homo sapiens
MGPLSPARTLRLWGPRSLGVALGVFMTIGFALQLLGGPFQRRLPGLQLRQPSAPSLRPALPSCPPRQRLVFLKTHKSGSSSVLSLLHRYGDQHGLRFALPARYQFGYPKLFQASRVKGYRPQGGGTQLPFHILCHHMRFNLKEVLQVMPSDSFFFSIVRDPAALARSAFSYYKSTSSAFRKSPSLAAFLANPRGFYRPGARGDHYARNLLWFDFGLPFPPEKRAKRGNIHPPRDPNPPQLQVLPSGAGPRAQTLNPNALIHPVSTVTDHRSQISSPASFDLGSSSFIQWGLAWLDSVFDLVMVAEYFDESLVLLADALCWGLDDVVGFMHNAQAGHKQGLSTVSNSGLTAEDRQLTARARAWNNLDWALYVHFNRSLWARIEKYGQGRLQTAVAELRARREALAKHCLVGGEASDPKYITDRRFRPFQFGSAKVLGYILRSGLSPQDQEECERLATPELQYKDKLDAKQFPPTVSLPLKTSRPLSP

SEQ ID NO: 421 - protein, 760 aa, Homo sapiens
MMDQARSAFSNLFGGEPLSYTRFSLARQVDGDNSHVEMKLAVDEEENADNNTKANVTKPKRCSGSICYGTIAVIVFFLIGFMIGYLGYCKGVEPKTECERLAGTESPVREEPGEDFPAARRLYWDDLKRKLSEKLDSTDFTGTIKLLNENSYVPREAGSQKDENLALYVENQFREFKLSKVWRDQHFVKIQVKDSAQNSVIIVDKNGRLVYLVENPGGYVAYSKAATVTGKLVHANFGTKKDFEDLYTPVNGSIVIVRAGKITFAEKVANAESLNAIGVLIYMDQTKFPIVNAELSFFGHAHLGTGDPYTPGFPSFNHTQFPPSRSSGLPNIPVQTISRAAAEKLFGNMEGDCPSDWKTDSTCRMVTSESKNVKLTVSNVLKEIKILNIFGVIKGFVEPDHYVVVGAQRDAWGPGAAKSGVGTALLLKLAQMFSDMVLKDGFQPSRSIIFASWSAGDFGSVGATEWLEGYLSSLHLKAFTYINLDKAVLGTSNFKVSASPLLYTLIEKTMQNVKHPVTGQFLYQDSNWASKVEKLTLDNAAFPFLAYSGIPAVSFCFCEDTDYPYLGTTMDTYKELIERIPELNKVARAAAEVAGQFVIKLTHDVELNLDYERYNSQLLSFVRDLNQYRADIKEMGLSLQWLYSARGDFFRATSRLTTDFGNAEKTDRFVMKKLNDRVMRVEYHFLSPYVSPKESPFRHVFWGSGSHTLPALLENLKLRKQNNGAFNETLFRNQLALATWTIQGAANALSGDVWDIDNEF

SEQ ID NO: 422 - protein, 299 aa, Homo sapiens
MWLPWALLLLWVPGCFALSKCRTVAGPVGGSLSVQCPYEKEHRTLNKYWCRPPQIFLCDKIVETKGSAGKRNGRVSIRDSPANLSFTVTLENLTEEDAGTYWCGVDTPWLRDFHDPVVEVEVSVFPASTSMTPASITAAKTSTITTAFPPVSSTTLFAVGATHSASIQEETEEVVNSQLPLLLSLLALLLLLLVGASLLAWRMFQKWIKAGDHSELSQNPKQAATQSELHYANLELLMWPLQEKPAPPREVEVEYSTVASPREELHYASVVFDSNTNRIAAQRPREEEPDSDYSVIRKT

SEQ ID NO: 423 - protein, 680 aa, Homo sapiens
MVSWGRFICLVVVTMATLSLARPSFSLVEDTTLEPEDAISSGDDEDDTDGAEDFVSENSNNKRAPYWTNTEKMEKRLHAVPAANTVKFRCPAGGNPMPTMRWLKNGKEFKQEHRIGGYKVRNQHWSLIMESVVPSDKGNYTCVVENEYGSINHTYHLDVVERSPHRPILQAGLPANASTVVGGDVEFVCKVYSDAQPHIQWIKHVEKNGSKYGPDGLPYLKVLKHSGINSSNAEVLALFNVTEADAGEYICKVSNYIGQANQSAWLTVLPKQQAPGREKEITASPDYLEIAIYCIGVFLIACMVVTVILCRMKNTTKKPDFSSQPAVHKLTKRIPLRRQVTVSAESSSSMNSNTPLVRITTRLSSTADTPMLAGVSEYELPEDPKWEFPRDKLTLGKPLGEGCFGQVVMAEAVGIDKDKPKEAVTVAVKMLKDDATEKDLSDLVSEMEMMKMIGKHKNIINLLGACTQDGPLYVIVEYASKGNLREYLRARRPPGMEYSYDINRVPEEQMTFKDLVSCTYQLARGMEYLASQKCIHRDLAARNVLVTENNVMKIADFGLARDINNIDYYKKTTNGRLPVKWMAPEALFDRVYTHQSDVWSFGVLMWEIFTLGGSPYPGIPVEELFKLLKEGHRMDKPANCTNELYMMMRDCWHAVPSQRPTFKQLVEDLDRILTLTTNEI

SEQ ID NO: 424 - protein, 611 aa, Homo sapiens
MWLAKACWSIQSEMPCIQAQYGTPAPSPGPRDHLASDPLTPEFIKPTMDLASPEAAPAAPTALPSFSTFMDGYTGEFDTFLYQLPGTVQPCSSASSSASSTSSSSATSPASASFKFEDFQVYGCYPGPLSGPVDEALSSSGSDYYGSPCSAPSPSTPSFQPPQLSPWDGSFGHFSPSQTYEGLRAWTEQLPKASGPPQPPAFFSFSPPTGPSPSLAQSPLKLFPSQATHQLGEGESYSMPTAFPGLAPTSPHLEGSGILDTPVTSTKARSGAPGGSEGRCAVCGDNASCQHYGVRTCEGCKGFFKRTVQKNAKYICLANKDCPVDKRRRNRCQFCRFQKCLAVGMVKEVVRTDSLKGRRGRLPSKPKQPPDASPANLLTSLVRAHLDSGPSTAKLDYSKFQELVLPHFGKEDAGDVQQFYDLLSGSLEVIRKWAEKIPGFAELSPADQDLLLESAFLELFILRLAYRSKPGEGKLIFCSGLVLHRLQCARGFGDWIDSILAFSRSLHSLLVDVPAFACLSALVLITDRHGLQEPRRVEELQNRIASCLKEHVAAVAGEPQPASCLSRLLGKLPELRTLCTQGLQRIFYLKLEDLVPPPPIIDKIFMDTLPF

SEQ ID NO: 425 - protein, 338 aa, Homo sapiens
MVVMAPRTLFLLLSGALTLTETWAGSHSMRYFSAAVSRPGRGEPRFIAMGYVDDTQFVRFDSDSACPRMEPRAPWVEQEGPEYWEEETRNTKAHAQTDRMNLQTLRGYYNQSEASSHTLQWMIGCDLGSDGRLLRGYEQYAYDGKDYLALNEDLRSWTAADTAAQISKRKCEAANVAEQRRAYLEGTCVEWLHRYLENGKEMLQRADPPKTHVTHHPVFDYEATLRCWALGFYPAEIILTWQRDGEDQTQDVELVETRPAGDGTFQKWAAVVVPSGEEQRYTCHVQHEGLPEPLMLRWKQSSLPTIPIMGIVAGLVVLAAVVTGAAVAAVLWRKKSSD

SEQ ID NO: 426 - protein, 449 aa, Homo sapiens
MGRVGGMAQPMGRAGAPKPMGRAGSARRGRFKGCWSEGSPVHPVPAVLSWLLALLRCASTMLSLRVPLAPITDPQQLQLSPLKGLSLVDKENTPPALSGTRVLASKTARRIFQEPTEPKTKAAAPGVEDEPLLRENPRRFVIFPIEYHDIWQMYKKAEASFWTAEEVDLSKDIQHWESLKPEERYFISHVLAFFAASDGIVNENLVERFSQEVQITEARCFYGFQIAMENIHSEMYSLLIDTYIKDPKEREFLFNAIETMPCVKKKADWALRWIGDKEATYGERVVAFAAVEGIFFSGSFASIFWLKKRGLMPGLTFSNELISRDEGLHCDFACLMFKHLVHKPSEERVREIIINAVRIEQEFLTEALPVKLIGMNCTLMKQYIEFVADRLMLELGFSKVFRVENPFDFMENISLEGKTNFFEKRVGEYQRMGVMSSPTENSFTLDADF

SEQ ID NO: 427 - protein, 706 aa, Homo sapiens
MSGGDTRAAIARPRMAAAHGPVAPSSPEQVTLLPVQRSFFLPPFSGATPSTSLAESVLKVWHGAYNSGLLPQLMAQHSLAMAQNGAVPSEATKRDQNLKRGNWGNQIEFVLTSVGYAVGLGNVWRFPYLCYRNGGGAFMFPYFIMLIFCGIPLFFMELSFGQFASQGCLGVWRISPMFKGVGYGMMVVSTYIGIYYNVVICIAFYYFFSSMTHVLPWAYCNNPWNTHDCAGVLDASNLTNGSRPAALPSNLSHLLNHSLQRTSPSEEYWRLYVLKLSDDIGNFGEVRLPLLGCLGVSWLVVFLCLIRGVKSSGKVVYFTATFPYVVLTILFVRGVTLEGAFDGIMYYLTPQWDKILEAKVWGDAASQIFYSLGCAWGGLITMASYNKFHNNCYRDSVIISITNCATSVYAGFVIFSILGFMANHLGVDVSRVADHGPGLAFVAYPEALTLLPISPLWSLLFFFMLILLGLGTQFCLLETLVTAIVDEVGNEWILQKKTYVTLGVAVAGFLLGIPLTSQAGIYWLLLMDNYAASFSLVVISCIMCVAIMYIYGHRNYFQDIQMMLGFPPPLFFQICWRFVSPAIIFFILVFTVIQYQPITYNHYQYPGWAVAIGFLMALSSVLCIPLYAMFRLCRTDGDTLLQRLKNATKPSRDWGPALLEHRTGRYAPTIAPSPEDGFEVQPLHPDKAQIPIVGSNGSSRLQDSRI

SEQ ID NO: 428 - protein, 701 aa, Homo sapiens [sequence omitted]

SEQ ID NO: 429 - protein, 251 aa, Homo sapiens
MEGGAAAATPTALPYYVAFSQLLGLTLVAMTGAWLGLYRGGIAWESDLQFNAHPLCMVIGLIFLQGNALLVYRVFRNEAKRTTKVLHGLLHIFALVIALVGLVAVFDYHRKKGYADLYSLHSWCGILVFVLYFVQWLVGFSFFLFPGASFSLRSRYRPQHIFFGATIFLLSVGTALLGLKEALLFNLGGKYSAFEPEGVLANVLGLLLACFGGAVLYILTRADWKRPSQAEEQALSMDFKTLTEGDSPGSQ

SEQ ID NO: 430 - protein, 1076 aa, Homo sapiens
MQHWARRLEQEVDGVMRIFGGVQQLREIYKDNRNLFEVQENEPQKLVEKVAGDIESLLDRKVQALKRLADAAENFQKAHRWQDNIKEEDIVYYDAKADAELDDPESEDVERGSKASTLRLDFIEDPNFKNKVNYSYAAVQIPTDIYKGSTVILNELNWTEALENVFMENRRQDPTLLWQVFGSATGVTRYYPATPWRAPKKIDLYDVRRRPWYIQGASSPKDMVIIVDVSGSVSGLTLKLMKTSVCEMLDTLSDDDYVNVASFNEKAQPVSCFTHLVQANVRNKKVFKEAVQGMVAKGTTGYKAGFEYAFDQLQNSNITRANCNKMIMMFTDGGEDRVQDVFEKYNWPNRTVRVFTFSVGQHNYDVTPLQWMACANKGYYFEIPSIGAIRINTQEYLDVLGRPMVLAGKEAKQVQWTNVYEDALGLGLVVTGTLPVFNLTQDGPGEKKNQLILGVMGIDVALNDIKRLTPNYTLGANGYVFAIDLNGYVLLHPNLKPQTTNFREPVTLDFLDAELEDENKEEIRRSMIDGNKGHKQIRTLVKSLDERYIDEVTRNYTWVPIRSTNYSLGLVLPPYSTFYLQANLSDQILQVKYFEFLLPSSFESEGHVFIAPREYCKDLNASDNNTEFLKNFIELMEKVTPDSKQCNNFLLHNLILDTGITQQLVERVWRDQDLNTYSLLAVFAATDGGITRVFPNKAAEDWTENPEPFNASFYRRSLDNHGYVFKPPHQDALLRPLELENDTVGILVSTAVELSLGRRTLRPAVVGVKLDLEAWAEKFKVLASNRTHQDQPQKCGPNSHCEMDCEVNNEDLLCVLIDDGGFLVLSNQNHQWDQVGRFFSEVDANLMLALYNNSFYTRKESYDYQAACAPQPPGNLGAAPRGVFVPTVADFLNLAWWTSAAAWSLFQQLLYGLIYHSWFQADPAEAEGSPETRESSCVMKQTQYYFGSVNASYNAIIDCGNCSRLFHAQRLTNTNLLFVVAEKPLCSQCEAGRLLQKETHCPADGPEQCELVQRPRYRRGPHICFDYNATEDTSDCGRGASFPPSLGVLVSLQLLLLLGLPPRPQPQVLVHASRRL

SEQ ID NO: 431 - protein, 716 aa, Homo sapiens
MNNFRATILFWAAAAWAKSGKPSGEMDEVGVQKCKNALKLPVLEVLPGGGWDNLRNVDMGRVMELTYSNCRTTEDGQYIIPDEIFTIPQKQSNLEMNSEILESWANYQSSTSYSINTELSLFSKVNGKFSTEFQRMKTLQVKDQAITTRVQVRNLVYTVKINPTLELSSGFRKELLDISDRLENNQTRMATYLAELLVLNYGTHVTTSVDAGAALIQEDHLRASFLQDSQSSRSAVTASAGLAFQNTVNFKFEENYTSQNVLTKSYLSNRTNSRVQSIGGVPFYPGITLQAWQQGITNHLVAIDRSGLPLHFFINPNMLPDLPGPLVKKVSKTVETAVKRYYTFNTYPGCTDLNSPNFNFQANTDDGSCEGKMTNFSFGGVYQECTQLSGNRDVLLCQKLEQKNPLTGDFSCPSGYSPVHLLSQIHEEGYNHLECHRKCTLLVFCKTVCEDVFQVAKAEFRAFWCVASSQVPENSGLLFGGLFSSKSINPMTNAQSCPAGYFPLRLFENLKVCVSQDYELGSRFAVPFGGFFSCTVGNPLVDPAISRDLGAPSLKKCPGGFSQHPALISDGCQVSYCVKSGLFTGGSLPPARLPPFTRPPLMSQAATNTVIVTNSENARSWIKDSQTHQWRLGEPIELRRAMNVIHGDGGGLSGGAAAGVTVGVTTILAVVITLAIYGTRKFKKKAYQAIEERQSLVPGTAATGDTTYQEQGQSPA

SEQ ID NO: 432 - protein, 537 aa, Homo sapiens
MGDEDKRITYEDSEPSTGMNYTPSMHQEAQEETVMKLKGIDANEPTEGSILLKSSEKKLQETPTEANHVQRLRQMLACPPHGLLDRVITNVTIIVLLWAVVWSITGSECLPGGNLFGIIILFYCAIIGGKLLGLIKLPTLPPLPSLLGMLLAGFLIRNIPVINDNVQIKHKWSSSLRSIALSIILVRAGLGLDSKALKKLKGVCVRLSMGPCIVEACTSALLAHYLLGLPWQWGFILGFVLGAVSPAVVVPSMLLLQGGGYGVEKGVPTLLMAAGSFDDILAITGFNTCLGIAFSTGSTVFNVLRGVLEVVIGVATGSVLGFFIQYFPSRDQDKLVCKRTFLVLGLSVLAVFSSVHFGFPGSGGLCTLVMAFLAGMGWTSEKAEVEKIIAVAWDIFQPLLFGLIGAEVSIASLRPETVGLCVATVGIAVLIRILTTFLMVCFAGFNLKEKIFISFAWLPKATVQAAIGSVALDTARSHGEKQLEDYGMDVLTVAFLSILITAPIGSLLIGLLGPRLLQKVEHQNKDEEVQGETSVQV

SEQ ID NO: 433 - protein, 318 aa, Homo sapiens
MPMANLLLLIVPILIAMAFLMLTERKILGYMQLRKGPNVVGPYGLLQPFADAMKLFTKEPLKPATSTITLYITAPTLALTIALLLWTPLPMPNPLVNLNLGLLFILATSSLAVYSILWSGWASNSNYALIGALRAVAQTISYEVTLAIILLSTLLMSGSFNLSTLITTQEHLWLLLPSWPLAMMWFISTLAETNRTPFDLAEGESELVSGFNIEYAAGPFALFFMAEYTNIIMMNTLTTTIFLGTTYDALSPELYTTYFVTKTLLLTSLFLWIRTAYPRFRYDQLMHLLWKNFLPLTLALLMWYVSMPITISSIPPQT

SEQ ID NO: 434 - protein, 603 aa, Homo sapiens
MTMHTTMTTLTLTSLIPPILTTLVNPNKKNSYPHYVKSIVASTFIISLFPTTMFMCLDQEVIISNWHWATTQTTQLSLSFKLDYFSMMFIPVALFVTWSIMEFSLWYMNSDPNINQFFKYLLIFLITMLILVTANNLFQLFIGWEGVGIMSFLLISWWYARADANTAAIQAILYNRIGDIGFILALAWFILHSNSWDPQQMALLNANPSLTPLLGLLLAAAGKSAQLGLHPWLPSAMEGPTPVSALLHSSTMVVAGIFLLIRFHPLAENSPLIQTLTLCLGAITTLFAAVCALTQNDIKKIVAFSTSSQLGLMMVTIGINQPHLAFLHICTHAFFKAMLFMCSGSIIHNLNNEQDIRKMGGLLKTMPLTSTSLTIGSLALAGMPFLTGFYSKDHIIETANMSYTNAWALSITLIATSLTSAYSTRMILLTLTGQPRFPTLTNINENNPTLLNPIKRLAAGSLFAGFLITNNISPASPFQTTIPLYLKLTALAVTFLGLLTALDLNYLTNKLKMKSPLCTFYFSNMLGFYPSITHRTIPYLGLLTSQNLPLLLLDLTWLEKLLPKTISQHQISTSIITSTQKGMIKLYFLSFFFPLILTLLLIT

SEQ ID NO: 435 - protein, 459 aa, Homo sapiens
MLKLIVPTIMLLPLTWLSKKHMIWINTTTHSLIISIIPLLFFNQINNNLFSCSPTFSSDPLTTPLLMLTTWLLPLTIMASQRHLSSEPLSRKKLYLSMLISLQISLIMTFTATELIMFYIFFETTLIPTLAIITRWGNQPERLNAGTYFLFYTLVGSLPLLIALIYTHNTLGSLNILLLTLTAQELSNSWANNLMWLAYTMAFMVKMPLYGLHLWLPKAHVEAPIAGSMVLAAVLLKLGGYGMMRLTLILNPLTKHMAYPFLVLSLWGMIMTSSICLRQTDLKSLIAYSSISHMALVVTAILIQTPWSFTGAVILMIAHGLTSSLLFCLANSNYERTHSRIMILSQGLQTLLPLMAFWWLLASLANLALPPTINLLGELSVLVTTFSWSNITLLLTGLNMLVTALYSLYMFTTTQWGSLTHHINNMKPSFTRENTLMFMHLSPILLLSLNPDIITGFSS

SEQ ID NO: 436 - protein, 347 aa, Homo sapiens
INPLAQPVIYSTIFAGTLITALSSHWFFTWVGLEMNMLAFIPVLTKKMNPRSTEAAIKYFLTQATASMILLMAILFNNMLSGQWTMTNTTNQYSSLMIMMAMAMKLGMAPFHFWVPEVTQGTPLTSGLLLLTWQKLAPISIMYQISPSLNVSLLLTLSILSIMAGSWGGLNQTQLRKILAYSSITHMGWMMAVLPYNPNMTILNLTIYIILTTTAFLLLNLNSSTTTLLLSRTWNKLTWLTPLIPSTLLSLGGLPPLTGFLPKWAIIEEFTKNNSLIIPTIMATITLLNLYFYLRLIYSTSITLLPMSNNVKMKWQFEHTKPTPFLPTLIALTTLLLPISPFMLMIL

SEQ ID NO: 437 - protein, 117 aa, Homo sapiens
MSAPAQPPAEGTEGTAPGGGPPGPPPNMTSNRRLQQTQAQVEEVVDIIRVNVDKVLERDQKLSELDDRADALQAGASQFESSAAKLKRKYWWKNCKMMIMLGAICAIIVVVIVSKYR

SEQ ID NO: 438 - protein, 336 aa, Homo sapiens
MLQSLAGSSCVRLVERHRSAWCFGFLVLGYLLYLVFGAVVFSSVELPYEDLLRQELRKLKRRFLEEHECLSEQQLEQFLGRVLEASNYGVSVLSNASGNWNWDFTSALFFASTVLSTTGYGHTVPLSDGGKAFCIIYSVIGIPFTLLFLTAVVQRITVHVTRRPVLYFHIRWGFSKQVVAIVHAVLLGFVTVSCFFFIPAAVFSVLEDDWNFLESFYFCFISLSTIGLGDYVPGEGYNQKFRELYKIGITCYLLLGLIAMLVVLETFCELHELKKFRKMFYVKKDKDEDQVHIIEHDQLSFSSITDQAAGMKEDQKQNEPFVATQSSACVDGPANH

SEQ ID NO: 439 - protein, 159 aa, Homo sapiens
MDLAGLLKSQFLCHLVFCYVFIASGLIINTIQLFTLLLWPINKQLFRKINCRLSYCISSQLVMLLEWWSGTECTIFTDPRAYLKYGKENAIVVLNHKFEIDFLCGWSLSERFGLLGVSQKCIPPCLTHFSGSAPPLVFLLLVIQNLQKNQQSFYLMKWS

SEQ ID NO: 440 - protein, 555 aa, Homo sapiens
MARPDDEEGAAVAPGHPLAKGYLPLPRGAPVGKESVELQNGPKAGTFPVNGAPRDSLAAASGVLGGPQTPLAPEEETQARLLPAGAGAETPGAESSPLPLTALSPRRFVVLLIFSLYSLVNAFQWIQYSIISNVFEGFYGVTLLHIDWLSMVYMLAYVPLIFPATWLLDTRGLRLTALLGSGLNCLGAWIKCGSVQQHLFWVTMLGQCLCSVAQVFILGLPSRIASVWFGPKEVSTACATAVLGNQLGTAVGFLLPPVLVPNTQNDTNLLACNISTMFYGTSAVATLLFILTAIAFKEKPRYPPSQAQAALQDSPPEEYSYKKSIRNLFKNIPFVLLLITYGIMTGAFYSVSTLLNQMILTYYEGEEVNAGRIGLTLVVAGMVGSILCGLWLDYTKTYKQTTLIVYILSFIGMVIFTFTLDLRYIIIVFVTGGVLGFFMTGYLPLGFEFAVEITYPESEGTSSGLLNASAQIFGILFTLAQGKLTSDYGPKAGNIFLCVWMFIGIILTALIKSDLRRHNINIGITNVDVKAIPADSPTDQEPKTVMLSKQSESAI

SEQ ID NO: 441 - protein, 2489 aa, Homo sapiens
MGASSPRSPEPVGPPAPGLPFCCGGSLLAVVVLLALPVAWGQCNAPEWLPFARPTNLTDEFEFPIGTYLNYECRPGYSGRPFSIICLKNSVWTGAKDRCRRKSCRNPPDPVNGMVHVIKGIQFGSQIKYSCTKGYRLIGSSSATCIISGDTVIWDNETPICDRIPCGLPPTITNGDFISTNRENFHYGSVVTYRCNPGSGGRKVFELVGEPSIYCTSNDDQVGIWSGPAPQCIIPNKCTPPNVENGILVSDNRSLFSLNEVVEFRCQPGFVMKGPRRVKCQALNKWEPELPSCSRVCQPPPDVLHAERTQRDKDNFSPGQEVFYSCEPGYDLRGAASMRCTPQGDWSPAAPTCEVKSCDDFMGQLLNGRVLFPVNLQLGAKVDFVCDEGFQLKGSSASYCVLAGMESLWNSSVPVCEQIFCPSPPVIPNGRHTGKPLEVFPFGKTVNYTCDPHPDRGTSFDLIGESTIRCTSDPQGNGVWSSPAPRCGILGHCQAPDHFLFAKLKTQTNASDFPIGTSLKYECRPEYYGRPFSITCLDNLVWSSPKDVCKRKSCKTPPDPVNGMVHVITDIQVGSRINYSCTTGHRLIGHSSAECILSGNAAHWSTKPPICQRIPCGLPPTIANGDFISTNRENFHYGSVVTYRCNPGSGGRKVFELVGEPSIYCTSNDDQVGIWSGPAPQCIIPNKCTPPNVENGILVSDNRSLFSLNEVVEFRCQPGFVMKGPRRVKCQALNKWEPELPSCSRVCQPPPDVLHAERTQRDKDNFSPGQEVFYSCEPGYDLRGAASMRCTPQGDWSPAAPTCEVKSCDDFMGQLLNGRVLFPVNLQLGAKVDFVCDEGFQLKGSSASYCVLAGMESLWNSSVPVCEQIFCPSPPVIPNGRHTGKPLEVFPFGKTVNYTCDPHPDRGTSFDLIGESTIRCTSDPQGNGVWSSPAPRCGILGHCQAPDHFLFAKLKTQTNASDFPIGTSLKYECRPEYYGRPFSITCLDNLVWSSPKDVCKRKSCKTPPDPVNGMVHVITDIQVGSRINYSCTTGHRLIGHSSAECILSGNAAHWSTKPPICQRIPCGLPPTIANGDFISTNRENFHYGSVVTYRCNPGSGGRKVFELVGEPSIYCTSNDDQVGIWSGPAPQCIIPNKCTPPNVENGILVSDNRSLFSLNEVVEFRCQPGFVMKGPRRVKCQALNKWEPELPSCSRVCQPPPDVLHAERTQRDKDNFSPGQEVFYSCEPGYDLRGAASMRCTPQGDWSPAAPTCEVKSCDDFMGQLLNGRVLFPVNLQLGAKVDFVCDEGFQLKGSSASYCVLAGMESLWNSSVPVCEQIFCPSPPVIPNGRHTGKPLEVFPFGKAVNYTCDPHPDRGTSFDLIGESTIRCTSDPQGNGVWSSPAPRCGILGHCQAPDHFLFAKLKTQTNASDFPIGTSLKYECRPEYYGRPFSITCLDNLVWSSPKDVCKRKSCKTPPDPVNGMVHVITDIQVGSRINYSCTTGHRLIGHSSAECILSGNTAHWSTKPPICQRIPCGLPPTIANGDFISTNRENFHYGSVVTYRCNLGSRGRKVFELVGEPSIYCTSNDDQVGIWSGPAPQCIIPNKCTPPNVENGILVSDNRSLFSLNEVVEFRCQPGFVMKGPRRVKCQALNKWEPELPSCSRVCQPPPEILHGEHTPSHQDNFSPGQEVFYSCEPGYDLRGAASLHCTPQGDWSPEAPRCAVKSCDDFLGQLPHGRVLFPLNLQLGAKVSFVCDEGFRLKGSSVSHCVLVGMRSLWNNSVPVCEHIFCPNPPAILNGRHTGTPSGDIPYGKEISYTCDPHPDRGMTFNLIGESTIRCTSDPHGNGVWSSPAPRCELSVRAGHCKTPEQFPFASPTIPINDFEFPVGTSLNYECRPGYFGKMFSISCLENLVWSSVEDNCRRKSCGPPPEPFNGMVHINTDTQFGSTVNYSCNEGFRLIGSPSTTCLVSGNNVTWDKKAPICEIISCEPPPTISNGDFYSNNRTSFHNGTVVTYQCHTGPDGEQLFELVGERSIYCTSKDDQVGVWSSPPPRCISTNKCTAPEVENAIRVPGNRSFFTLTEIIRFRCQPGFVMVGSHTVQCQTNGRWGPKLPHCSRVCQPPPEILHGEHTLSHQDNFSPGQEVFYSCEPSYDLRGAASLHCTPQGDWSPEAPRCTVKSCDDFLGQLPHGRVLLPLNLQLGAKVSFVCDEGFRLKGRSASHCVLAGMKALWNSSVPVCEQIFCPNPPAILNGRHTGTPFGDIPYGKEISYACDTHPDRGMTFNLIGESSIRCTSDPQGNGVWSSPAPRCELSVPAACPHPPKIQNGHYIGGHVSLYLPGMTISYICDPGYLLVGKGFIFCTDQGIWSQLDHYCKEVNCSFPLFMNGISKELEMKKVYHYGDYVTLKCEDGYTLEGSPWSQCQADDRWDPPLAKCTSRTHDALIVGTLSGTIFFILLIIFLSWIILKHRKGNNAHENPKEVAIHLHSQGGSSVHPRTLQTNEENSRVLP

SEQ ID NO: 442 - protein, 2039 aa, Homo sapiens
MGASSPRSPEPVGPPAPGLPFCCGGSLLAVVVLLALPVAWGQCNAPEWLPFARPTNLTDEFEFPIGTYLNYECRPGYSGRPFSIICLKNSVWTGAKDRCRRKSCRNPPDPVNGMVHVIKGIQFGSQIKYSCTKGYRLIGSSSATCIISGDTVIWDNETPICDRIPCGLPPTIANGDFISTNRENFHYGSVVTYRCNPGSGGRKVFELVGEPSIYCTSNDDQVGIWSGPAPQCIIPNKCTPPNVENGILVSDNRSLFSLNEVVEFRCQPGFVMKGPRRVKCQALNKWEPELPSCSRVCQPPPDVLHAERTQRDKDNFSPGQEVFYSCEPGYDLRGAASMRCTPQGDWSPAAPTCEVKSCDDFMGQLLNGRVLFPVNLQLGAKVDFVCDEGFQLKGSSASYCVLAGMESLWNSSVPVCEQIFCPSPPVIPNGRHTGKPLEVFPFGKTVNYTCDPHPDRGTSFDLIGESTIRCTSDPQGNGVWSSPAPRCGILGHCQAPDHFLFAKLKTQTNASDFPIGTSLKYECRPEYYGRPFSITCLDNLVWSSPKDVCKRKSCKTPPDPVNGMVHVITDIQVGSRINYSCTTGHRLIGHSSAECILSGNAAHWSTKPPICQRIPCGLPPTIANGDFISTNRENFHYGSVVTYRCNPGSGGRKVFELVGEPSIYCTSNDDQVGIWSGPAPQCIIPNKCTPPNVENGILVSDNRSLFSLNEVVEFRCQPGFVMKGPRRVKCQALNKWEPELPSCSRVCQPPPDVLHAERTQRDKDNFSPGQEVFYSCEPGYDLRGAASMRCTPQGDWSPAAPTCEVKSCDDFMGQLLNGRVLFPVNLQLGAKVDFVCDEGFQLKGSSASYCVLAGMESLWNSSVPVCEQIFCPSPPVIPNGRHTGKPLEVFPFGKAVNYTCDPHPDRGTSFDLIGESTIRCTSDPQGNGVWSSPAPRCGILGHCQAPDHFLFAKLKTQTNASDFPIGTSLKYECRPEYYGRPFSITCLDNLVWSSPKDVCKRKSCKTPPDPVNGMVHVITDIQVGSRINYSCTTGHRLIGHSSAECILSGNTAHWSTKPPICQRIPCGLPPTIANGDFISTNRENFHYGSVVTYRCNLGSRGRKVFELVGEPSIYCTSNDDQVGIWSGPAPQCIIPNKCTPPNVENGILVSDNRSLFSLNEVVEFRCQPGFVMKGPRRVKCQALNKWEPELPSCSRVCQPPPEILHGEHTPSHQDNFSPGQEVFYSCEPGYDLRGAASLHCTPQGDWSPEAPRCAVKSCDDFLGQLPHGRVLFPLNLQLGAKVSFVCDEGFRLKGSSVSHCVLVGMRSLWNNSVPVCEHIFCPNPPAILNGRHTGTPSGDIPYGKEISYTCDPHPDRGMTFNLIGESTIRCTSDPHGNGVWSSPAPRCELSVRAGHCKTPEQFPFASPTIPINDFEFPVGTSLNYECRPGYFGKMFSISCLENLVWSSVEDNCRRKSCGPPPEPFNGMVHINTDTQFGSTVNYSCNEGFRLIGSPSTTCLVSGNNVTWDKKAPICEIISCEPPPTISNGDFYSNNRTSFHNGTVVTYQCHTGPDGEQLFELVGERSIYCTSKDDQVGVWSSPPPRCISTNKCTAPEVENAIRVPGNRSFFTLTEIIRFRCQPGFVMVGSHTVQCQTNGRWGPKLPHCSRVCQPPPEILHGEHTLSHQDNFSPGQEVFYSCEPSYDLRGAASLHCTPQGDWSPEAPRCTVKSCDDFLGQLPHGRVLLPLNLQLGAKVSFVCDEGFRLKGRSASHCVLAGMKALWNSSVPVCEQIFCPNPPAILNGRHTGTPFGDIPYGKEISYACDTHPDRGMTFNLIGESSIRCTSDPQGNGVWSSPAPRCELSVPAACPHPPKIQNGHYIGGHVSLYLPGMTISYICDPGYLLVGKGFIFCTDQGIWSQLDHYCKEVNCSFPLFMNGISKELEMKKVYHYGDYVTLKCEDGYTLEGSPWSQCQADDRWDPPLAKCTSRTHDALIVGTLSGTIFFILLIIFLSWIILKHRKGNNAHENPKEVAIHLHSQGGSSVHPRTLQTNEENSRVLP

SEQ ID NO: 443 - protein, 2039 aa, Homo sapiens
MGASSPRSPEPVGPPAPGLPFCCGGSLLAVVVLLALPVAWGQCNAPEWLPFARPTNLTDEFEFPIGTYLNYECRPGYSGRPFSIICLKNSVWTGAKDRCRRKSCRNPPDPVNGMVHVIKGIQFGSQIKYSCTKGYRLIGSSSATCIISGDTVIWDNETPICDRIPCGLPPTITNGDFISTNRENFHYGSVVTYRCNPGSGGRKVFELVGEPSIYCTSNDDQVGIWSGPAPQCIIPNKCTPPNVENGILVSDNRSLFSLNEVVEFRCQPGFVMKGPRRVKCQALNKWEPELPSCSRVCQPPPDVLHAERTQRDKDNFSPGQEVFYSCEPGYDLRGAASMRCTPQGDWSPAAPTCEVKSCDDFMGQLLNGRVLFPVNLQLGAKVDFVCDEGFQLKGSSASYCVLAGMESLWNSSVPVCEQIFCPSPPVIPNGRHTGKPLEVFPFGKTVNYTCDPHPDRGTSFDLIGESTIRCTSDPQGNGVWSSPAPRCGILGHCQAPDHFLFAKLKTQTNASDFPIGTSLKYECRPEYYGRPFSITCLDNLVWSSPKDVCKRKSCKTPPDPVNGMVHVITDIQVGSRINYSCTTGHRLIGHSSAECILSGNAAHWSTKPPICQRIPCGLPPTIANGDFISTNRENFHYGSVVTYRCNPGSGGRKVFELVGEPSIYCTSNDDQVGIWSGPAPQCIIPNKCTPPNVENGILVSDNRSLFSLNEVVEFRCQPGFVMKGPRRVKCQALNKWEPELPSCSRVCQPPPDVLHAERTQRDKDNFSPGQEVFYSCEPGYDLRGAASMRCTPQGDWSPAAPTCEVKSCDDFMGQLLNGRVLFPVNLQLGAKVDFVCDEGFQLKGSSASYCVLAGMESLWNSSVPVCEQIFCPSPPVIPNGRHTGKPLEVFPFGKTVNYTCDPHPDRGTSFDLIGESTIRCTSDPQGNGVWSSPAPRCGILGHCQAPDHFLFAKLKTQTNASDFPIGTSLKYECRPEYYGRPFSITCLDNLVWSSPKDVCKRKSCKTPPDPVNGMVHVITDIQVGSRINYSCTTGHRLIGHSSAECILSGNTAHWSTKPPICQRIPCGLPPTIANGDFISTNRENFHYGSVVTYRCNLGSRGRKVFELVGEPSIYCTSNDDQVGIWSGPAPQCIIPNKCTPPNVENGILVSDNRSLFSLNEVVEFRCQPGFVMKGPRRVKCQALNKWEPELPSCSRVCQPPPEILHGEHTPSHQDNFSPGQEVFYSCEPGYDLRGAASLHCTPQGDWSPEAPRCAVKSCDDFLGQLPHGRVLFPLNLQLGAKVSFVCDEGFRLKGSSVSHCVLVGMRSLWNNSVPVCEHIFCPNPPAILNGRHTGTPSGDIPYGKEISYTCDPHPDRGMTFNLIGESTIRCTSDPHGNGVWSSPAPRCELSVRAGHCKTPEQFPFASPTIPINDFEFPVGTSLNYECRPGYFGKMFSISCLENLVWSSVEDNCRRKSCGPPPEPFNGMVHINTDTQFGSTVNYSCNEGFRLIGSPSTTCLVSGNNVTWDKKAPICEIISCEPPPTISNGDFYSNNRTSFHNGTVVTYQCHTGPDGEQLFELVGERSIYCTSKDDQVGVWSSPPPRCISTNKCTAPEVENAIRVPGNRSFFTLTEIIRFRCQPGFVMVGSHTVQCQTNGRWGPKLPHCSRVCQPPPEILHGEHTLSHQDNFSPGQEVFYSCEPSYDLRGAASLHCTPQGDWSPEAPRCTVKSCDDFLGQLPHGRVLLPLNLQLGAKVSFVCDEGFRLKGRSASHCVLAGMKALWNSSVPVCEQIFCPNPPAILNGRHTGTPFGDIPYGKEISYACDTHPDRGMTFNLIGESSIRCTSDPQGNGVWSSPAPRCELSVPAACPHPPKIQNGHYIGGHVSLYLPGMTISYICDPGYLLVGKGFIFCTDQGIWSQLDHYCKEVNCSFPLFMNGISKELEMKKVYHYGDYVTLKCEDGYTLEGSPWSQCQADDRWDPPLAKCTSRTHDALIVGTLSGTIFFILLIIFLSWIILKHRKGNNAHENPKEVAIHLHSQGGSSVHPRTLQTNEENSRVLP

SEQ ID NO: 444 - protein, 2039 aa, Homo sapiens
MGASSPRSPEPVGPPAPGLPFCCGGSLLAVVVLLALPVAWGQCNAPEWLPFARPTNLTDEFEFPIGTYLNYECRPGYSGRPFSIICLKNSVWTGAKDRCRRKSCRNPPDPVNGMVHVIKGIQFGSQIKYSCTKGYRLIGSSSATCIISGDTVIWDNETPICDRIPCGLPPTITNGDFISTNRENFHYGSVVTYRCNPGSGGRKVFELVGEPSIYCTSNDDQVGIWSGPAPQCIIPNKCTPPNVENGILVSDNRSLFSLNEVVEFRCQPGFVMKGPRRVKCQALNKWEPELPSCSRVCQPPPDVLHAERTQRDKDNFSPGQEVFYSCEPGYDLRGAASMRCTPQGDWSPAAPTCEVKSCDDFMGQLLNGRVLFPVNLQLGAKVDFVCDEGFQLKGSSASYCVLAGMESLWNSSVPVCEQIFCPSPPVIPNGRHTGKPLEVFPFGKTVNYTCDPHPDRGTSFDLIGESTIRCTSDPQGNGVWSSPAPRCGILGHCQAPDHFLFAKLKTQTNASDFPIGTSLKYECRPEYYGRPFSITCLDNLVWSSPKDVCKRKSCKTPPDPVNGMVHVITDIQVGSRINYSCTTGHRLIGHSSAECILSGNAAHWSTKPPICQRIPCGLPPTIANGDFISTNRENFHYGSVVTYRCNPGSGGRKVFELVGEPSIYCTSNDDQVGIWSGPAPQCIIPNKCTPPNVENGILVSDNRSLFSLNEVVEFRCQPGFVMKGPRRVKCQALNKWEPELPSCSRVCQPPPDVLHAERTQRDKDNFSPGQEVFYSCEPGYDLRGAASMRCTPQGDWSPAAPTCEVKSCDDFMGQLLNGRVLFPVNLQLGAKVDFVCDEGFQLKGSSASYCVLAGMESLWNSSVPVCEQIFCPSPPVIPNGRHTGKPLEVFPFGKAVNYTCDPHPDRGTSFDLIGESTIRCTSDPQGNGVWSSPAPRCGILGHCQAPDHFLFAKLKTQTNASDFPIGTSLKYECRPEYYGRPFSITCLDNLVWSSPKDVCKRKSCKTPPDPVNGMVHVITDIQVGSRINYSCTTGHRLIGHSSAECILSGNTAHWSTKPPICQRIPCGLPPTIANGDFISTNRENFHYGSVVTYRCNLGSRGRKVFELVGEPSIYCTSNDDQVGIWSGPAPQCIIPNKCTPPNVENGILVSDNRSLFSLNEVVEFRCQPGFVMKGPRRVKCQALNKWEPELPSCSRVCQPPPEILHGEHTPSHQDNFSPGQEVFYSCEPGYDLRGAASLHCTPQGDWSPEAPRCAVKSCDDFLGQLPHGRVLFPLNLQLGAKVSFVCDEGFRLKGSSVSHCVLVGMRSLWNNSVPVCEHIFCPNPPAILNGRHTGTPSGDIPYGKEISYTCDPHPDRGMTFNLIGESTIRCTSDPHGNGVWSSPAPRCELSVRAGHCKTPEQFPFASPTIPINDFEFPVGTSLNYECRPGYFGKMFSISCLENLVWSSVEDNCRRKSCGPPPEPFNGMVHINTDTQFGSTVNYSCNEGFRLIGSPSTTCLVSGNNVTWDKKAPICEIISCEPPPTISNGDFYSNNRTSFHNGTVVTYQCHTGPDGEQLFELVGERSIYCTSKDDQVGVWSSPPPRCISTNKCTAPEVENAIRVPGNRSFFTLTEIIRFRCQPGFVMVGSHTVQCQTNGRWGPKLPHCSRVCQPPPEILHGEHTLSHQDNFSPGQEVFYSCEPSYDLRGAASLHCTPQGDWSPEAPRCTVKSCDDFLGQLPHGRVLLPLNLQLGAKVSFVCDEGFRLKGRSASHCVLAGMKALWNSSVPVCEQIFCPNPPAILNGRHTGTPFGDIPYGKEISYACDTHPDRGMTFNLIGESSIRCTSDPQGNGVWSSPAPRCELSVPAACPHPPKIQNGHYIGGHVSLYLPGMTISYICDPGYLLVGKGFIFCTDQGIWSQLDHYCKEVNCSFPLFMNGISKELEMKKVYHYGDYVTLKCEDGYTLEGSPWSQCQADDRWDPPLAKCTSRTHDALIVGTLSGTIFFILLIIFLSWIILKHRKGNNAHENPKEVAIHLHSQGGSSVHPRTLQTNEENSRVLP

SEQ ID NO: 445 - protein, 1092 aa, Homo sapiens
MGAAGLLGVFLALVAPGVLGISCGSPPPILNGRISYYSTPIAVGTVIRYSCSGTFRLIGEKSLLCITKDKVDGTWDKPAPKCEYFNKYSSCPEPIVPGGYKIRGSTPYRHGDSVTFACKTNFSMNGNKSVWCQANNMWGPTRLPTCVSVFPLECPALPMIHNGHHTSENVGSIAPGLSVTYSCESGYLLVGEKIINCLSSGKWSAVPPTCEEARCKSLGRFPNGKVKEPPILRVGVTANFFCDEGYRLQGPPSSRCVIAGQGVAWTKMPVCEEIFCPSPPPILNGRHIGNSLANVSYGSIVTYTCDPDPEEGVNFILIGESTLRCTVDSQKTGTWSGPAPRCELSTSAVQCPHPQILRGRMVSGQKDRYTYNDTVIFACMFGFTLKGSKQIRCNAQGTWEPSAPVCEKECQAPPNILNGQKEDRHMVRFDPGTSIKYSCNPGYVLVGEESIQCTSEGVWTPPVPQCKVAACEATGRQLLTKPQHQFVRPDVNSSCGEGYKLSGSVYQECQGTIPWFMEIRLCKEITCPPPPVIYNGAHTGSSLEDFPYGTTVTYTCNPGPERGVEFSLIGESTIRCTSNDQERGTWSGPAPLCKLSLLAVQCSHVHIANGYKISGKEAPYFYNDTVTFKCYSGFTLKGSSQIRCKADNTWDPEIPVCEKGCQSPPGLHHGRHTGGNTVFFVSGMTVDYTCDPGYLLVGNKSIHCMPSGNWSPSAPRCEETCQHVRQSLQELPAGSRVELVNTSCQDGYQLTGHAYQMCQDAENGIWFKKIPLCKVIHCHPPPVIVNGKHTGMMAENFLYGNEVSYECDQGFYLLGEKKLQCRSDSKGHGSWSGPSPQCLRSPPVTRCPNPEVKHGYKLNKTHSAYSHNDIVYVDCNPGFIMNGSRVIRCHTDNTWVPGVPTCIKKAFIGCPPPPKTPNGNHTGGNIARFSPGMSILYSCDQGYLLVGEALLLCTHEGTWSQPAPHCKEVNCSSPADMDGIQKGLEPRKMYQYGAVVTLECEDGYMLEGSPQSQCQSDHQWNPPLAVCRSRSLAPVLCGIAAGLILLTFLIVITLYVISKHRARNYYTDTSQKEAFHLEAREVYSVDPYNPAS

SEQ ID NO: 446 - protein, 1033 aa, Homo sapiens
MGAAGLLGVFLALVAPGVLGISCGSPPPILNGRISYYSTPIAVGTVIRYSCSGTFRLIGEKSLLCITKDKVDGTWDKPAPKCEYFNKYSSCPEPIVPGGYKIRGSTPYRHGDSVTFACKTNFSMNGNKSVWCQANNMWGPTRLPTCVSVFPLECPALPMIHNGHHTSENVGSIAPGLSVTYSCESGYLLVGEKIINCLSSGKWSAVPPTCEEARCKSLGRFPNGKVKEPPILRVGVTANFFCDEGYRLQGPPSSRCVIAGQGVAWTKMPVCEEIFCPSPPPILNGRHIGNSLANVSYGSIVTYTCDPDPEEGVNFILIGESTLRCTVDSQKTGTWSGPAPRCELSTSAVQCPHPQILRGRMVSGQKDRYTYNDTVIFACMFGFTLKGSKQIRCNAQGTWEPSAPVCEKECQAPPNILNGQKEDRHMVRFDPGTSIKYSCNPGYVLVGEESIQCTSEGVWTPPVPQCKVAACEATGRQLLTKPQHQFVRPDVNSSCGEGYKLSGSVYQECQGTIPWFMEIRLCKEITCPPPPVIYNGAHTGSSLEDFPYGTTVTYTCNPGPERGVEFSLIGESTIRCTSNDQERGTWSGPAPLCKLSLLAVQCSHVHIANGYKISGKEAPYFYNDTVTFKCYSGFTLKGSSQIRCKADNTWDPEIPVCEKETCQHVRQSLQELPAGSRVELVNTSCQDGYQLTGHAYQMCQDAENGIWFKKIPLCKVIHCHPPPVIVNGKHTGMMAENFLYGNEVSYECDQGFYLLGEKKLQCRSDSKGHGSWSGPSPQCLRSPPVTRCPNPEVKHGYKLNKTHSAYSHNDIVYVDCNPGFIMNGSRVIRCHTDNTWVPGVPTCIKKAFIGCPPPPKTPNGNHTGGNIARFSPGMSILYSCDQGYLLVGEALLLCTHEGTWSQPAPHCKEVNCSSPADMDGIQKGLEPRKMYQYGAVVTLECEDGYMLEGSPQSQCQSDHQWNPPLAVCRSRSLAPVLCGIAAGLILLTFLIVITLYVISKHRARNYYTDTSQKEAFHLEAREVYSVDPYNPAS

SEQ ID NO: 447 - protein, 971 aa, Homo sapiens
MGAAGLLGVFLALVAPGVLGISCGSPPPILNGRISYYSTPIAVGTVIRYSCSGTFRLIGEKSLLCITKDKVDGTWDKPAPKCEYFNKYSSCPEPIVPGGYKIRGSTPYRHGDSVTFACKTNFSMNGNKSVWCQANNMWGPTRLPTCVSVFPLECPALPMIHNGHHTSENVGSIAPGLSVTYSCESGYLLVGEKIINCLSSGKWSAVPPTCEEARCKSLGRFPNGKVKEPPILRVGVTANFFCDEGYRLQGPPSSRCVIAGQGVAWTKMPVCEEIFCPSPPPILNGRHIGNSLANVSYGSIVTYTCDPDPEEGVNFILIGESTLRCTVDSQKTGTWSGPAPRCELSTSAVQCPHPQILRGRMVSGQKDRYTYNDTVIFACMFGFTLKGSKQIRCNAQGTWEPSAPVCEKECQAPPNILNGQKEDRHMVRFDPGTSIKYSCNPGYVLVGEESIQCTSEGVWTPPVPQCKVAACEATGRQLLTKPQHQFVRPDVNSSCGEGYKLSGSVYQECQGTIPWFMEIRLCKEITCPPPPVIYNGAHTGSSLEDFPYGTTVTYTCNPGPERGVEFSLIGESTIRCTSNDQERGTWSGPAPLCKLSLLAVQCSHVHIANGYKISGKEAPYFYNDTVTFKCYSGFTLKGSSQIRCKADNTWDPEIPVCEKETCQHVRQSLQELPAGSRVELVNTSCQDGYQLTGHAYQMCQDAENGIWFKKIPLCKVIHCHPPPVIVNGKHTGMMAENFLYGNEVSYECDQGFYLLGEKKLQCRSDSKGHGSWSGPSPQCLRSPPVTRCPNPEVKHGYKLNKTHSAYSHNDIVYVDCNPGFIMNGSRVIRCHTDNTWVPGVPTCIKKEVNCSSPADMDGIQKGLEPRKMYQYGAVVTLECEDGYMLEGSPQSQCQSDHQWNPPLAVCRSRSLAPVLCGIAAGLILLTFLIVITLYVISKHRARNYYTDTSQKEAFHLEAREVYSVDPYNPAS

SEQ ID NO: 448 - protein, 390 aa, Homo sapiens
MDFWLWPLYFLPVSGALRILPEVKVEGELGGSVTIKCPLPEMHVRIYLCREMAGSGTCGTVVSTTNFIKAEYKGRVTLKQYPRKNLFLVEVTQLTESDSGVYACGAGMNTDRGKTQKVTLNVHSEYEPSWEEQPMPETPKWFHLPYLFQMPAYASSSKFVTRVTTPAQRGKVPPVHHSSPTTQITHRPRVSRASSVAGDKPRTFLPSTTASKISALEGLLKPQTPSYNHHTRLHRQRALDYGSQSGREGQGFHILIPTILGLFLLALLGLVVKRAVERRKALSRRARRLAVRMRALESSQRPRGSPRPRSQNNIYSACPRRARGADAAGTGEAPVPGPGAPLPPAPLQVSESPWLHAPSLKTSCEYVSLYHQPAAMMEDSDSDDYINVPA

SEQ ID NO: 449 - protein, 513 aa, Homo sapiens
MSSKPEPKDVHQLNGTGPSASPCSSDGPGREPLAGTSEFLGPDGAGVEVVIESRANAKGVREEDALLENGSQSNESDDVSTDRGPAPPSPLKETSFSIGLQVLFPFLLAGFGTVAAGMVLDIVQHWEVFQKVTEVFILVPALLGLKGNLEMTLASRLSTAANIGHMDTPKELWRMITGNMALIQVQATVVGFLASIAAVVFGWIPDGHFSIPHAFLLCASSVATAFIASLVLGMIMIGVIIGSRKIGINPDNVATPIAASLGDLITLALLSGISWGLYLELNHWRYIYPLVCAFFVALLPVWVVLARRSPATREVLYSGWEPVIIAMAISSVGGLILDKTVSDPNFAGMAVFTPVINGVGGNLVAVQASRISTFLHMNGMPGENSEQAPRRCPSPCTTFFSPDVNSRSARVLFLLVVPGHLVFLYTISCMQGGHTTLTLIFIIFYMTAALLQVLILLYIADWMVHWMWGRGLDPDNFSIPYLTALGDLLGTGLLALSFHVLWLIGDRDTDVGD

SEQ ID NO: 450 - protein, 1725 aa, Homo sapiens
MATSRGASRCPRDIANVMQRLQDEQEIVQKRTFTKWINSHLAKRKPPMVVDDLFEDMKDGVKLLALLEVLSGQKLPCEQGRRMKRIHAVANIGTALKFLEGRKIKLVNINSTDIADGRPSIVLGLMWTIILYFQIEELTSNLPQLQSLSSSASSVDSIVSSETPSPPSKRKVTTKIQGNAKKALLKWVQYTAGKQTGIEVKDFGKSWRSGVAFHSVIHAIRPELVDLETVKGRSNRENLEDAFTIAETELGIPRLLDPEDVDVDKPDEKSIMTYVAQFLKHYPDIHNASTDGQEDDEILPGFPSFANSVQNFKREDRVIFKEMKVWIEQFERDLTRAQMVESNLQDKYQSFKHFRVQYEMKRKQIEHLIQPLHRDGKLSLDQALVKQSWDRVTSRLFDWHIQLDKSLPAPLGTIGAWLYRAEVALREEITVQQVHEETANTIQRKLEQHKDLLQNTDAHKRAFHEIYRTRSVNGIPVPPDQLEDMAERFHFVSSTSELHLMKMEFLELKYRLLSLLVLAESKLKSWIIKYGRRESVEQLLQNYVSFIENSKFFEQYEVTYQILKQTAEMYVKADGSVEEAENVMKFMNETTAQWRNLSVEVRSVRSMLEEVISNWDRYGNTVASLQAWLEDAEKMLNQSENAKKDFFRNLPHWIQQHTAMNDAGNFLIETCDEMVSRDLKQQLLLLNGRWRELFMEVKQYAQADEMDRMKKEYTDCVVTLSAFATEAHKKLSEPLEVSFMNVKLLIQDLEDIEQRVPVMDAQYKIITKTAHLITKESPQEEGKEMFATMSKLKEQLTKVKECYSPLLYESQQLLIPLEELEKQMTSFYDSLGKINEIITVLEREAQSSALFKQKHQELLACQENCKKTLTLIEKGSQSVQKFVTLSNVLKHFDQTRLQRQIADIHVAFQSMVKKTGDWKKHVETNSRLMKKFEESRAELEKVLRIAQEGLEEKGDPEELLRRHTEFFSQLDQRVLNAFLKACDELTDILPEQEQQGLQEAVRKLHKQWKDLQGEAPYHLLHLKIDVEKNRFLASVEECRTELDRETKLMPQEGSEKIIKEHRVFFSDKGPHHLCEKRLQLIEELCVKLPVRDPVRDTPGTCHVTLKELRAAIDSTYRKLMEDPDKWKDYTSRFSEFSSWISTNETQLKGIKGEAIDTANHGEVKRAVEEIRNGVTKRGETLSWLKSRLKVLTEVSSENEAQKQGDELAKLSSSFKALVTLLSEVEKMLSNFGDCVQYKEIVKNSLEELISGSKEVQEQAEKILDTENLFEAQQLLLHHQQKTKRISAKKRDVQQQIAQAQQGEGGLPDRGHEELRKLESTLDGLERSRERQERRIQVTLRKWERFETNKETVVRYLFQTGSSHERFLSFSSLESLSSELEQTKEFSKRTESIAVQAENLVKEASEIPLGPQNKQLLQQQAKSIKEQVKKLEDTLEEDIKTMEMVKTKWDHFGSNFETLSVWITEKEKELNALETSSSAMDMQISQIKVTIQEIESKLSSIVGLEEEAQSFAQFVTTGESARIKAKLTQIRRYGEELREHAQCLEGTILGHLSQQQKFEENLRKIQQSVSEFEDKLAVPIKICSSATETYKVLQEHMDLCQALESLSSAITAFSASARKVVNRDSCVQEAAALQQQYEDILRRAKERQTALENLLAHWQRLEKELSSFLTWLERGEAKASSPEMDISADRVKVEGELQLIQASSRKCEEGKNKMLFVTVTLFKIIK

SEQ ID NO: 451 - protein, 8797 aa, Homo sapiens
MATSRGASRCPRDIANVMQRLQDEQEIVQKRTFTKWINSHLAKRKPPMVVDDLFEDMKDGVKLLALLEVLSGQKLPCEQGRRMKRIHAVANIGTALKFLEGRKIKLVNINSTDIADGRPSIVLGLMWTIILYFQIEELTSNLPQLQSLSSSASSVDSIVSSETPSPPSKRKVTTKIQGNAKKALLKWVQYTAGKQTGIEVKDFGKSWRSGVAFHSVIHAIRPELVDLETVKGRSNRENLEDAFTIAETELGIPRLLDPEDVDVDKPDEKSIMTYVAQFLKHYPDIHNASTDGQEDDEILPGFPSFANSVQNFKREDRVIFKEMKVWIEQFERDLTRAQMVESNLQDKYQSFKHFRVQYEMKRKQIEHLIQPLHRDGKLSLDQALVKQSWDRVTSRLFDWHIQLDKSLPAPLGTIGAWLYRAEVALREEITVQQVHEETANTIQRKLEQHKDLLQNTDAHKRAFHEIYRTRSVNGIPVPPDQLEDMAERFHFVSSTSELHLMKMEFLELKYRLLSLLVLAESKLKSWIIKYGRRESVEQLLQNYVSFIENSKFFEQYEVTYQILKQTAEMYVKADGSVEEAENVMKFMNETTAQWRNLSVEVRSVRSMLEEVISNWDRYGNTVASLQAWLEDAEKMLNQSENAKKDFFRNLPHWIQQHTAMNDAGNFLIETCDEMVSRDLKQQLLLLNGRWRELFMEVKQYAQADEMDRMKKEYTDCVVTLSAFATEAHKKLSEPLEVSFMNVKLLIQDLEDIEQRVPVMDAQYKIITKTAHLITKESPQEEGKEMFATMSKLKEQLTKVKECYSPLLYESQQLLIPLEELEKQMTSFYDSLGKINEIITVLEREAQSSALFKQKHQELLACQENCKKTLTLIEKGSQSVQKFVTLSNVLKHFDQTRLQRQIADIHVAFQSMVKKTGDWKKHVETNSRLMKKFEESRAELEKVLRIAQEGLEEKGDPEELLRRHTEFFSQLDQRVLNAFLKACDELTDILPEQEQQGLQEAVRKLHKQWKDLQGEAPYHLLHLKIDVEKNRFLASVEECRTELDRETKLMPQEGSEKIIKEHRVFFSDKGPHHLCEKRLQLIEELCVKLPVRDPVRDTPGTCHVTLKELRAAIDSTYRKLMEDPDKWKDYTSRFSEFSSWISTNETQLKGIKGEAIDTANHGEVKRAVEEIRNGVTKRGETLSWLKSRLKVLTEVSSENEAQKQGDELAKLSSSFKALVTLLSEVEKMLSNFGDCVQYKEIVKNSLEELISGSKEVQEQAEKILDTENLFEAQQLLLHHQQKTKRISAKKRDVQQQIAQAQQGEGGLPDRGHEELRKLESTLDGLERSRERQERRIQVTLRKWERFETNKETVVRYLFQTGSSHERFLSFSSLESLSSELEQTKEFSKRTESIAVQAENLVKEASEIPLGPQNKQLLQQQAKSIKEQVKKLEDTLEEDIKTMEMVKTKWDHFGSNFETLSVWITEKEKELNALETSSSAMDMQISQIKVTIQEIESKLSSIVGLEEEAQSFAQFVTTGESARIKAKLTQIRRYGEELREHAQCLEGTILGHLSQQQKFEENLRKIQQSVSEFEDKLAVPIKICSSATETYKVLQEHMDLCQALESLSSAITAFSASARKVVNRDSCVQEAAALQQQYEDILRRAKERQTALENLLAHWQRLEKELSSFLTWLERGEAKASSPEMDISADRVKVEGELQLIQALQNEVVSQASFYSKLLQLKESLFSVASKDDVKMMKLHLEQLDERWRDLPQIINKRINFLQSVVAEHQQFDELLLSFSVWIKLFLSELQTTSEISIMDHQVALTRHKDHAAEVESKKGELQSLQGHLAKLGSLGRAEDLHLLQGKAEDCFQLFEEASQVVERRQLALSHLAEFLQSHASLSGILRQLRQTVEATNSMNKNESDLIEKDLNDALQNAKALESAAVSLDGILSKAQYHLKIGSSEQRTSCRATADQLCGEVERIQNLLGTKQSEADALAVLKKAFQDQKEELLKSIEDIEERTDKERLKEPTRQALQQRLRVFNQLEDELNSHEHELCWLKDKAKQIAQKDVAFAPEVDREINRLEVTWDDTKRLIHENQGQCCGLIDLMREYQNLKSAVSKVLENASSVIVTRTTIKDQEDLKWAFSKHETAKNKMNYKQKDLDNFTSKGKHLLSELKKIHSSDFSLVKTDMESTVDKWLDVSEKLEENMDRLRVSLSIWDDVLSTRDEIEGWSNNCVPQMAENISNLDNHLRAEELLKEFESEVKNKALRLEELHSKVNDLKELTKNLETPPDLQFIEADLMQKLEHAKEITEVAKGTLKDFTAQSTQVEKFINDITTWFTKVEESLMNCAQNETCEALKKVKDIQKELQSQQSNISSTQENLNSLCRKYHSAELESLGRAMTGLIKKHEAVSQLCSKTQASLQESLEKHFSESMQEFQEWFLGAKAAAKESSDRTGDSKVLEAKLHDLQNILDSVSDGQSKLDAVTQEGQTLYAHLSKQIVSSIQEQITKANEEFQAFLKQCLKDKQALQDCASELGSFEDQHRKLNLWIHEMEERFNTENLGESKQHIPEKKNEVHKVEMFLGELLAARESLDKLSQRGQLLSEEGHGAGQEGRLCSQLLTSHQNLLRMTKEKLRSCQVALQEHEALEEALQSMWFWVKAIQDRLACAESTLGSKDTLEKRLSQIQDILLMKGEGEVKLNMAIGKGEQALRSSNKEGQRVIQTQLETLKEVWADIMSSSVHAQSTLESVISQWNDYVERKNQLEQWMESVDQKIEHPLQPQPGLKEKFVLLDHLQSILSEAEDHTRALHRLIAKSRELYEKTEDESFKDTAQEELKTQFNDIMTVAKEKMRKVEEIVKDHLMYLDAVHEFTDWLHSAKEELHRWSDMSGDSSATQKKLSKIKELIDSREIGASRLSRVESLAPEVKQNTTASGCELMHTEMQALRADWKQWEDSVFQTQSCLENLVSQMALSEQEFSGQVAQLEQALEQFSALLKTWAQQLTLLEGKNTDEEIVECWHKGQEILDALQKAEPRTEDLKSQLNELCRFSRDLSTYSGKVSGLIKEYNCLCLQASKGCQNKEQILQQRFRKAFRDFQQWLVNAKITTAKCFDIPQNISEVSTSLQKIQEFLSESENGQHKLNMMLSKGELLSTLLTKEKAKGIQAKVTAAKEDWKNFHSNLHQKESALENLKIQMKDFEVSAEPIQDWLSKTEKMVHESSNRLYDLPAKRREQQKLQSVLEEIHCYEPQLNRLKEKAQQLWEGQAASKSFRHRVSQLSSQYLALSNLTKEKVSRLDRIVAEHNQFSLGIKELQDWMTDAIHMLDSYCHPTSDKSVLDSRTLKLEALLSVKQEKEIQMKMIVTRGESVLQNTSPEGIPTIQQQLQSVKDMWASLLSAGIRCKSQLEGALSKWTSYQDGVRQFSGWMDSMEANLNESERQHAELRDKTTMLGKAKLLNEEVLSYSSLLETIEVKGAGMTEHYVTQLELQDLQERYRAIQERAKEAVTKSEKLVRLHQEYQRDLKAFEVWLGQEQEKLDQYSVLEGDAHTHETTLRDLQELQVHCAEGQALLNSVLHTREDVIPSGIPQAEDRALESLRQDWQAYQHRLSETRTQFNNVVNKLRLMEQKFQQVDEWLKTAEEKVSPRTRRQSNRATKEIQLHQMKKWHEEVTAYRDEVEEVGARAQEILDESHVNSRMGCQATQLTSRYQALLLQVLEQIKFLEEEIQSLEESESSLSSYSDWYGSTHKNFKNVATKIDKVDTVMMGKKLKTLEVLLKDMEKGHSLLKSAREKGERAVKYLEEGEAERLRKEIHDHMEQLKELTSTVRKEHMTLEKGLHLAKEFSDKCKALTQWIAEYQEILHVPEEPKMELYEKKAQLSKYKSLQQTVLSHEPSVKSVREKGEALLELVQDVTLKDKIDQLQSDYQDLCSIGKEHVFSLEAKVKDHEDYNSELQEVEKWLLQMSGRLVAPDLLETSSLETITQQLAHHKAMMEEIAGFEDRLNNLQMKGDTLIGQCADHLQAKLKQNVHAHLQGTKDSYSAICSTAQRMYQSLEHELQKHVSRQDTLQQCQAWLSAVQPDLEPSPQPPLSRAEAIKQVKHFRALQEQARTYLDLLCSMCDLSNASVKTTAKDIQQTEQTIEQKLVQAQNLTQGWEEIKHLKSELWIYLQDADQQLQNMKRRHSELELNIAQNMVSQVKDFVKKLQSKQASVNTIIEKVNKLTKKEESPEHKEINHLNDQWLDLCRQSNNLCLQREEDLQRTRDYHDCMNVVEVFLEKFTTEWDNLARSDAESTAVHLEALKKLALALQERKYAIEDLKDQKQKMIEHLNLDDKELVKEQTSHLEQRWFQLEDLIKRKIQVSVTNLEELNVVQSRFQELMEWAEEQQPNIAEALKQSPPPDMAQNLLMDHLAICSELEAKQMLLKSLIKDADRVMADLGLNERQVIQKALSDAQSHVNCLSDLVGQRRKYLNKALSEKTQFLMAVFQATSQIQQHERKIMFREHICLLPDDVSKQVKTCKSAQASLKTYQNEVTGLWAQGRELMKEVTEQEKSEVLGKLQELQSVYDSVLQKCSHRLQELEKNLVSRKHFKEDFDKACHWLKQADIVTFPEINLMNESSELHTQLAKYQNILEQSPEYENLLLTLQRTGQTILPSLNEVDHSYLSEKLNALPRQFNVIVALAKDKFYKVQEAILARKEYASLIELTTQSLSELEAQFLRMSKVPTDLAVEEALSLQDGCRAILDEVAGLGEAVDELNQKKEGFRSTGQPWQPDKMLHLVTLYHRLKRQTEQRVSLLEDTTSAYQEHEKMCQQLERQLKSVKEEQSKVNEETLPAEEKLKMYHSLAGSLQDSGIVLKRVTIHLEDLAPHLDPLAYEKARHQIQSWQGELKLLTSAIGETVTECESRMVQSIDFQTEMSRSLDWLRRVKAELSGPVYLDLNLQDIQEEIRKIQIHQEEVQSSLRIMNALSHKEKEKFTKAKELISADLEHSLAELSELDGDIQEALRTRQATLTEIYSQCQRYYQVFQAANDWLEDAQELLQLAGNGLDVESAEENLKSHMEFFSTEDQFHSNLEELHSLVATLDPLIKPTGKEDLEQKVASLELRSQRMSRDSGAQVDLLQRCTAQWHDYQKAREEVIELMNDTEKKLSEFSLLKTSSSHEAEEKLSEHKALVSVVNSFHEKIVALEEKASQLEKTGNDASKATLSRSMTTVWQRWTRLRAVAQDQEKILEDAVDEWTGFNNKVKKATEMIDQLQDKLPGSSAEKASKAELLTLLEYHDTFVLELEQQQSALGMLRQQTLSMLQDGAAPTPGEEPPLMQEITAMQDRCLNMQEKVKTNGKLVKQELKDREMVETQINSVKCWVQETKEYLGNPTIEIDAQLEELQILLTEATNHRQNIEKMAEEQKEKYLGLYTILPSELSLQLAEVALDLKIRDQIQDKIKEVEQSKATSQELSRQIQKLAKDLTTILTKLKAKTDNVVQAKTDQKVLGEELDGCNSKLMELDAAVQKFLEQNGQLGKPLAKKIGKLTELHQQTIRQAENRLSKLNQAASHLEEYNEMLELILKWIEKAKVLAHGTIAWNSASQLREQYILHQTLLEESKEIDSELEAMTEKLQYLTSVYCTEKMSQQVAELGRETEELRQMIKIRLQNLQDAAKDMKKFEAELKKLQAALEQAQATLTSPEVGRLSLKEQLSHRQHLLSEMESLKPKVQAVQLCQSALRIPEDVVASLPLCHAALRLQEEASRLQHTAIQQCNIMQEAVVQYEQYEQEMKHLQQLIEGAHREIEDKPVATSNIQELQAQISRHEELAQKIKGYQEQIASLNSKCKMLTMKAKHATMLLTVTEVEGLAEGTEDLDGELLPTPSAHPSVVMMTAGRCHTLLSPVTEESGEEGTNSEISSPPACRSPSPVANTDASVNQDIAYYQALSAERLQTDAAKIHPSTSASQEFYEPGLEPSATAKLGDLQRSWETLKNVISEKQRTLYEALERQQKYQDSLQSISTKMEAIELKLSESPEPGRSPESQMAEHQALMDEILMLQDEINELQSSLAEELVSESCEADPAEQLALQSTLTVLAERMSTIRMKASGKRQLLEEKLNDQLEEQRQEQALQRYRCEADELDSWLLSTKATLDTALSPPKEPMDMEAQLMDCQNMLVEIEQKVVALSELSVHNENLLLEGKAHTKDEAEQLAGKLRRLKGSLLELQRALHDKQLNMQGTAQEKEESDVDLTATQSPGVQEWLAQARTTWTQQRQSSLQQQKELEQELAEQKSLLRSVASRGEEILIQHSAAETSGDAGEKPDVLSQELGMEGEKSSAEDQMRMKWESLHQEFSTKQKLLQNVLEQEQEQVLYSRPNRLLSGVPLYKGDVPTQDKSAVTSLLDGLNQAFEEVSSQSGGAKRQSIHLEQKLYDGVSATSTWLDDVEERLFVATALLPEETETCLFNQEILAKDIKEMSEEMDKNKNLFSQAFPENGDNRDVIEDTLGCLLGRLSLLDSVVNQRCHQMKERLQQILNFQNDLKVLFTSLADNKYIILQKLANVFEQPVAEQIEAIQQAEDGLKEFDAGIIELKRRGDKLQVEQPSMQELSKLQDMYDELMMIIGSRRSGLNQNLTLKSQYERALQDLADLLETGQEKMAGDQKIIVSSKEEIQQLLDKHKEYFQGLESHMILTETLFRKIISFAVQKETQFHTELMAQASAVLKRAHKRGVELEYILETWSHLDEDQQELSRQLEVVESSIPSVGLVEENEDRLIDRITLYQHLKSSLNEYQPKLYQVLDDGKRLLISISCSDLESQLNQLGECWLSNTNKMSKELHRLETILKHWTRYQSESADLIHWLQSAKDRLEFWTQQSVTVPQELEMVRDHLNAFLEFSKEVDAQSSLKSSVLSTGNQLLRLKKVDTATLRSELSRIDSQWTDLLTNIPAVQEKLHQLQMDKLPSRHAISEVMSWISLMENVIQKDEDNIKNSIGYKAIHEYLQKYKGFKIDINCKQLTVDFVNQSVLQISSQDVESKRSDKTDFAEQLGAMNKSWQILQGLVTEKIQLLEGLLESWSEYENNVQCLKTWFETQEKRLKQQHRIGDQASVQNALKDCQDLEDLIKAKEKEVEKIEQNGLALIQNKKEDVSSIVMSTLRELGQTWANLDHMVGQLKILLKSVLDQWSSHKVAFDKINSYLMEARYSLSRFRLLTGSLEAVQVQVDNLQNLQDDLEKQERSLQKFGSITNQLLKECHPPVTETLTNTLKEVNMRWNNLLEEIAEQLQSSKALLQLWQRYKDYSKQCASTVQQQEDRTNELLKAATNKDIADDEVATWIQDCNDLLKGLGTVKDSLFFLHELGEQLKQQVDASAASAIQSDQLSLSQHLCALEQALCKQQTSLQAGVLDYETFAKSLEALEAWIVEAEEILQGQDPSHSSDLSTIQERMEELKGQMLKFSSMAPDLDRLNELGYRLPLNDKEIKRMQNLNRHWSLISSQTTERFSKLQSFLLQHQTFLEKCETWMEFLVQTEQKLAVEISGNYQHLLEQQRAHELFQAEMFSRQQILHSIIIDGQRLLEQGQVDDRDEFNLKLTLLSNQWQGVIRRAQQRRGIIDSQIRQWQRYREMAEKLRKWLVEVSYLPMSGLGSVPIPLQQARTLFDEVQFKEKVFLRQQGSYILTVEAGKQLLLSADSGAEAALQAELAEIQEKWKSASMRLEEQKKKLAFLLKDWEKCEKGIADSLEKLRTFKKKLSQSLPDHHEELHAEQMRCKELENAVGSWTDDLTQLSLLKDTLSAYISADDISILNERVELLQRQWEELCHQLSLRRQQIGERLNEWAVFSEKNKELCEWLTQMESKVSQNGDILIEEMIEKLKKDYQEEIAIAQENKIQLQQMGERLAKASHESKASEIEYKLGKVNDRWQHLLDLIAARVKKLKETLVAVQQLDKNMSSLRTWLAHIESELAKPIVYDSCNSEEIQRKLNEQQELQRDIEKHSTGVASVLNLCEVLLHDCDACATDAECDSIQQATRNLDRRWRNICAMSMERRLKIEETWRLWQKFLDDYSRFEDWLKSSERTAAFPSSSGVIYTVAKEELKKFEAFQRQVHECLTQLELINKQYRRLARENRTDSACSLKQMVHEGNQRWDNLQKRVTSILRRLKHFIGQREEFETARDSILVWLTEMDLQLTNIEHFSECDVQAKIKQLKAFQQEISLNHNKIEQIIAQGEQLIEKSEPLDAAIIEEELDELRRYCQEVFGRVERYHKKLIRLPLPDDEHDLSDRELELEDSAALSDLHWHDRSADSLLSPQPSSNLSLSLAQPLRSERSGRDTPASVDSIPLEWDHDYDLSRDLESAMSRALPSEDEEGQDDKDFYLRGAVGLSGDHSALESQIRQLGKALDDSRFQIQQTENIIRSKTPTGPELDTSYKGYMKLLGECSSSIDSVKRLEHKLKEEEESLPGFVNLHSTETQTAGVIDRWELLQAQALSKELRMKQNLQKWQQFNSDLNSIWAWLGDTEEELEQLQRLELSTDIQTIELQIKKLKELQKAVDHRKAIILSINLCSPEFTQADSKESRDLQDRLSQMNGRWDRVCSLLEEWRGLLQDALMQCQGFHEMSHGLLLMLENIDRRKNEIVPIDSNLDAEILQDHHKQLMQIKHELLESQLRVASLQDMSCQLLVNAEGTDCLEAKEKVHVIGNRLKLLLKEVSRHIKELEKLLDVSSSQQDLSSWSSADELDTSGSVSPTSGRSTPNRQKTPRGKCSLSQPGPSVSSPHSRSTKGGSDSSLSEPGPGRSGRGFLFRVLRAALPLQLLLLLLIGLACLVPMSEEDYSCALSNNFARSFHPMLRYTNGPPPL

SEQ ID NO: 452 - protein, 967 aa, Homo sapiens
MPSPPGLRALWLCAALCASRRAGGAPQPGPGPTACPAPCHCQEDGIMLSADCSELGLSAVPGDLDPLTAYLDLSMNNLTELQPGLFHHLRFLEELRLSGNHLSHIPGQAFSGLYSLKILMLQNNQLGGIPAEALWELPSLQSLRLDANLISLVPERSFEGLSSLRHLWLDDNALTEIPVRALNNLPALQAMTLALNRISHIPDYAFQNLTSLVVLHLHNNRIQHLGTHSFEGLHNLETLDLNYNKLQEFPVAIRTLGRLQELGFHNNNIKAIPEKAFMGNPLLQTIHFYDNPIQFVGRSAFQYLPKLHTLSLNGAMDIQEFPDLKGTTSLEILTLTRAGIRLLPSGMCQQLPRLRVLELSHNQIEELPSLHRCQKLEEIGLQHNRIWEIGADTFSQLSSLQALDLSWNAIRSIHPEAFSTLHSLVKLDLTDNQLTTLPLAGLGGLMHLKLKGNLALSQAFSKDSFPKLRILEVPYAYQCCPYGMCASFFKASGQWEAEDLHLDDEESSKRPLGLLARQAENHYDQDLDELQLEMEDSKPHPSVQCSPTPGPFKPCEYLFESWGIRLAVWAIVLLSVLCNGLVLLTVFAGGPVPLPPVKFVVGAIAGANTLTGISCGLLASVDALTFGQFSEYGARWETGLGCRATGFLAVLGSEASVLLLTLAAVQCSVSVSCVRAYGKSPSLGSVRAGVLGCLALAGLAAALPLASVGEYGASPLCLPYAPPEGQPAALGFTVALVMMNSFCFLVVAGAYIKLYCDLPRGDFEAVWDCAMVRHVAWLIFADGLLYCPVAFLSFASMLGLFPVTPEAVKSVLLVVLPLPACLNPLLYLLFNPHFRDDLRRLRPRAGDSGPLAYAAAGELEKSSCDSTQALVAFSDVDLILEASEAGRPPGLETYGFPSVTLISCQQPGAPRLEGSHCVEPEGNHFGNPQPSMDGELLLRAEGSTPAGGGLSGGGGFQPSGLAFASHV

SEQ ID NO: 453 - protein, 422 aa, Homo sapiens
MLQWRRRHCCFAKMTWNAKRSLFRTHLIGVLSLVFLFAMFLFFNHHDWLPGRAGFKENPVTYTFRGFRSTKSETNHSSLRNIWKETVPQTLRPQTATNSNNTDLSPQGVTGLENTLSANGSIYNEKGTGHPNSYHFKYIINEPEKCQEKSPFLILLIAAEPGQIEARRAIRQTWGNESLAPGIQITRIFLLGLSIKLNGYLQRAILEESRQYHDIIQQEYLDTYYNLTIKTLMGMNWVATYCPHIPYVMKTDSDMFVNTEYLINKLLKPDLPPRHNYFTGYLMRGYAPNRNKDSKWYMPPDLYPSERYPVFCSGTGYVFSGDLAEKIFKVSLGIRRLHLEDVYVGICLAKLRIDPVPPPNEFVFNHWRVSYSSCKYSHLITSHQFQPSELIKYWNHLQQNKHNACANAAKEKAGRYRHRKLH

SEQ ID NO: 454 - protein, 281 aa, Homo sapiens
MQQPFNYPYPQIYWVDSSASSPWAPPGTVLPCPTSVPRRPGQRRPPPPPPPPPLPPPPPPPPLPPLPLPPLKKRGNHSTGLCLLVMFFMVLVALVGLGLGMFQLFHLQKELAELRESTSQMHTASSLEKQIGHPSPPPEKKELRKVAHLTGKSNSRSMPLEWEDTYGIVLLSGVKYKKGGLVINETGLYFVYSKVYFRGQSCNNLPLSHKVYMRNSKYPQDLVMMEGKMMSYCTTGQMWARSSYLGAVFNLTSADHLYVNVSELSLVNFEESQTFFGLYKL

SEQ ID NO: 455 - protein, 303 aa, Homo sapiens
MARGKAKEEGSWKKFIWNSEKKEFLGRTGGSWFKILLFYVIFYGCLAGIFIGTIQVMLLTISEFKPTYQDRVAPPGLTQIPQIQKTEISFRPNDPKSYEAYVLNIVRFLEKYKDSAQRDDMIFEDCGDVPSEPKERGDFNHERGERKVCRFKLEWLGNCSGLNDETYGYKEGKPCIIIKLNRVLGFKPKPPKNESLETYPVMKYNPNVLPVQCTGKRDEDKDKVGNVEYFGLGNSPGFPLQYYPYYGKLLQPKYLQPLLAVQFTNLTMDTEIRIECKAYGENIGYSEKDRFQGRFDVKIEVKS

SEQ ID NO: 456 - protein, 183 aa, Homo sapiens
PFSSVTAGVSALEVYTPKEIFVANGTQGKLTCKFKSTSTTGGLTSVSWSFQPEGADTTVSFFHYSQGQVYLGNYPPFKDRISWAGDLDKKDASINIENMQFIHNGTYICDVKNPPDIVVQPGHIRLYVVEKENLPVFPVWVVVGIVTAVVLGLTLLISMILAVLYRRKNSKRDYTGAQSYMHS

SEQ ID NO: 457 - protein, 319 aa, Homo sapiens
MVGKMWPVLWTLCAVRVTVDAISVETPQDVLRASQGKSVTLPCTYHTSTSSREGLIQWDKLLLTHTERVVIWPFSNKNYIHGELYKNRVSISNNAEQSDASITIDQLTMADNGTYECSVSLMSDLEGNTKSRVRLLVLVPPSKPECGIEGETIIGNNIQLTCQSKEGSPTPQYSWKRYNILNQEQPLAQPASGQPVSLKNISTDTSGYYICTSSNEEGTQFCNITVAVRSPSMNVALYVGIAVGVVAALIIIGIIIYCCCCRGKDDNTEDKEDARPNREAYEEPPEQLRELSREREEEDDYRQEEQRSTGRESPDHLDQ

SEQ ID NO: 458 - protein, 233 aa, Homo sapiens
MWQLLLPTALLLLVSAGMRTEDLPKAVVFLEPQWYSVLEKDSVTLKCQGAYSPEDNSTQWFHNENLISSQASSYFIDAATVNDSGEYRCQTNLSTLSDPVQLEVHIGWLLLQAPRWVFKEEDPIHLRCHSWKNTALHKVTYLQNGKDRKYFHHNSDFHIPKATLKDSGSYFCRGLVGSKNVSSETVNITITQGLAVSTISSFSPPGYQVSFCLVMVLLFAVDTGLYFSVKTNI

SEQ ID NO: 459 - protein, 254 aa, Homo sapiens
MWQLLLPTALLLLVSAGMRTEDLPKAVVFLEPQWYRVLEKDSVTLKCQGAYSPEDNSTQWFHNESLISSQASSYFIDAATVDDSGEYRCQTNLSTLSDPVQLEVHIGWLLLQAPRWVFKEEDPIHLRCHSWKNTALHKVTYLQNGKGRKYFHHNSDFYIPKATLKDSGSYFCRGLFGSKNVSSETVNITITQGLAVSTISSFFPPGYQVSFCLVMVLLFAVDTGLYFSVKTNIRSSTRDWKDHKFKWRKDPQDK

SEQ ID NO: 460 - protein, 359 aa, Homo sapiens
MAEGTLWQILCVSSDAQPQTFEGVKGADPPTLPPGSFLPGPVLWWGSLARLQTEKSDEVSRKGNWWVTEMGGGAGERLFTSSCLVGLVPLGLRISLVTCPLQCGIMWQLLLPTALLLLVSAGMRTEDLPKAVVFLEPQWYRVLEKDSVTLKCQGAYSPEDNSTQWFHNESLISSQASSYFIDAATVDDSGEYRCQTNLSTLSDPVQLEVHIGWLLLQAPRWVFKEEDPIHLRCHSWKNTALHKVTYLQNGKGRKYFHHNSDFYIPKATLKDSGSYFCRGLFGSKNVSSETVNITITQGLAVSTISSFFPPGYQVSFCLVMVLLFAVDTGLYFSVKTNIRSSTRDWKDHKFKWRKDPQDK

SEQ ID NO: 461 - protein, 112 aa, Homo sapiens
MIPAVVLLLLLLVEQAAALGEPQLCYILDAILFLYGIVLTLLYCRLKIQVRKAAITSYEKSDGVYTMESPSITRLECSGMIWAHCNLCLLGSRDSRASPSRVAKTTGTTMPS

SEQ ID NO: 462 - protein, 370 aa, Homo sapiens
MLGQVVTLILLLLLKVYQGKGCQGSADHVVSISGVPLQLQPNSIQTKVDSIAWKKLLPSQNGFHHILKWENGSLPSNTSNDRFSFIVKNLSLLIKAAQQQDSGLYCLEVTSISGKVQTATFQVFVFESLLPDKVEKPRLQGQGKILDRGRCQVALSCLVSRDGNVSYAWYRGSKLIQTAGNLTYLDEEVDINGTHTYTCNVSNPVSWESHTLNLTQDCQNAHQEFRFWPFLVIIVILSALFLGTLACFCVWRRKRKEKQSETSPKEFLTIYEDVKDLKTRRNHEQEQTFPGGGSTIYSMIQSQSSAPTSQEPAYTLYSLIQPSRKSGSRKRNHSPSFNSTIYEVIGKSQPKAQNPARLSRKELENFDVYS

SEQ ID NO: 463 - protein, 365 aa, Homo sapiens
MLGQVVTLILLLLLKVYQGKGCQGSADHVVSISGVPLQLQPNSIQTKVDSIAWKKLLPSQNGFHHILKWENGSLPSNTSNDRFSFIVKNLSLLIKAAQQQDSGLYCLEVTSISGKVQTATFQVFVFDKVEKPRLQGQGKILDRGRCQVALSCLVSRDGNVSYAWYRGSKLIQTAGNLTYLDEEVDINGTHTYTCNVSNPVSWESHTLNLTQDCQNAHQEFRFWPFLVIIVILSALFLGTLACFCVWRRKRKEKQSETSPKEFLTIYEDVKDLKTRRNHEQEQTFPGGGSTIYSMIQSQSSAPTSQEPAYTLYSLIQPSRKSGSRKRNHSPSFNSTIYEVIGKSQPKAQNPARLSRKELENFDVYS

SEQ ID NO: 464 - protein, 340 aa, Homo sapiens
KVVWLFNTSIISKEREEAATADPLIKSRDPYKNRVWVSSQDCSLKISQLKIEDAGPYHAYVCSEASSVTSMTHVTLLIYRRLRKPKITWSLRHSEDGICRISLTCSVEDGGNTVMYTWTPLQKEAVVSQGESHLNVSWRSSENHPNLTCTASNPVSRSSHQFLSENICSGPERNTKLWIGLFLMVCLLCVGIFSWCIWKRKGRCSVPAFCSSQAEAPADTPGYEKLDTPLRPARQQPTPTSDSSSDSNLTTEEDEDRPEVHKPISGRYEVFDQVTQEGAGHDPAPEGQADYDPVTPYVTEVESVVGENTMYAQVFNLQVVPPPQQNDLEIPESPTYENFT

SEQ ID NO: 465 - protein, 641 aa, Homo sapiens
MVAPKSHTDDWAPGPFSSKPQRSQLQIFSSVLQTSLLFLLMGLRASGKDSAPTVVSGILGGSVTLPLNISVDTEIENVIWIGPKNALAFARPKENVTIMVKSYLGRLDITKWSYSLCISNLTLNDAGSYKAQINQRNFEVTTEEEFTLFVYEQLQEPQVTMKSVKVSENFSCNITLMCSVKGAEKSVLYSWTPREPHASESNGGSILTVSRTPCDPDLPYICTAQNPVSQRSSLPVHVGQFCTDPGASRGGTTGETVVGVLGEPVTLPLALPACRDTEKVVWLFNTSIISKEREEAATADPLIKSRDPYKNRVWVSSQDCSLKISQLKIEDAGPYHAYVCSEASSVTSMTHVTLLIYRRLRKPKITWSLRHSEDGICRISLTCSVEDGGNTVMYTWTPLQKEAVVSQGESHLNVSWRSSENHPNLTCTASNPVSRSSHQFLSENICSGPERNTKLWIGLFLMVCLLCVGIFSWCIWKRKGRCSVPAFCSSQAEAPADTPGYEKLDTPLRPARQQPTPTSDSSSDSNLTTEEDEDRPEVHKPISGRYEVFDQVTQEGAGHDPAPEGQADYDPVTPYVTEVESVVGENTMYAQVFNLQGKTPVSQKEESSATIYCSIRKPQVVPPPQQNDLEIPESPTYENFT

SEQ ID NO: 466 - protein, 228 aa, Homo sapiens
MAGSPTCLTLIYILWQLTEHLSKPKVTMGLQSNKNGTCVTNLTCCMEHGEEDVIYTWKALGQAANESHNGSILPISWRWGESDMTFICVARNPVSRNFSSPILARKLCEGAADDPDSSMVLLCLLLVPLLLSLFVLGLFLWFLKRERQEEYIEEKKRVDICRETPNICPHSGENTEYDTIPHTNRTILKEDPANTVYSTVEIPKKMENPHSLLTMPDTPRLFAYENVI

SEQ ID NO: 467 - protein, 221 aa, Homo sapiens
MLWLFQSLLFVFCFGPGQLRNIQVTNHSQLFQNMTCELHLTCSVEDADDNVSFRWEALGNTLSSQPNLTVSWDPRISSEQDYTCIAENAVSNLSFSVSAQKLCEDVKIQYTDTKMILFMVSGICIVFGFIILLLLVLRKRRDSLSLSTQRTQGPAESARNLEYVSVSPTNNTVYASVTHSNRETEIWTPRENDTITIYSTINHSKESKPTFSRATALDNVV

SEQ ID NO: 468 - protein, 332 aa, Homo sapiens
MLWLFQSLLFVFCFGPGNVVSQSSLTPLMVNGILGESVTLPLEFPAGEKVNFITWLFNETSLAFIVPHETKSPEIHVTNPKQGKRLNFTQSYSLQLSNLKMEDTGSYRAQISTKTSAKLSSYTLRILRQLRNIQVTNHSQLFQNMTCELHLTCSVEDADDNVSFRWEALGNTLSSQPNLTVSWDPRISSEQDYTCIAENAVSNLSFSVSAQKLCEDVKIQYTDTKMILFMVSGICIVFGFIILLLLVLRKRRDSLSLSTQRTQGPAESARNLEYVSVSPTNNTVYASVTHSNRETEIWTPRENDTITIYSTINHSKESKPTFSRATALDNVV

SEQ ID NO: 469 - protein, 331 aa, Homo sapiens
MLWLFQSLLFVFCFGPGNVVSQSSLTPLMVNGILGESVTLPLEFPAGEKVNFITWLFNETSLAFIVPHETKSPEIHVTNPKQGKRLNFTQSYSLQLSNLKMEDTGSYRAQISTKTSAKLSSYTLRILRQLRNIQVTNHSQLFQNMTCELHLTCSVEDADDNVSFRWEALGNTLSSQPNLTVSWDPRISSEQDYTCIAENAVSNLSFSVSAQKLCEDVKIQYTDTKMILFMVSGICIVFGFIILLLLVLRKRRDSLSLSTQRTQGPESARNLEYVSVSPTNNTVYASVTHSNRETEIWTPRENDTITIYSTINHSKESKPTFSRATALDNVV

SEQ ID NO: 470 - protein, 434 aa, Homo sapiens
MLLWTAVLLFVPCVGKTVWLYLQAWPNPVFEGDALTLRCQGWKNTPLSQVKFYRDGKFLHFSKENQTLSMGAATVQSRGQYSCSGQVMYIPQTFTQTSETAMVQVQELFPPPVLSAIPSPEPREGSLVTLRCQTKLHPLRSALRLLFSFHKDGHTLQDRGPHPELCIPGAKEGDSGLYWCEVAPEGGQVQKQSPQLEVRVQAPVSRPVLTLHHGPADPAVGDMVQLLCEAQRGSPPILYSFYLDEKIVGNHSAPCGGTTSLLFPVKSEQDAGNYSCEAENSVSRERSEPKKLSLKGSQVLFTPASNWLVPWLPASLLGLMVIAAALLVYVRSWRKAGPLPSQIPPTAPGGEQCPLYANVHHQKGKDEGVVYSVVHRTSKRSEARSAEFTVGRKDSSIICAEVRCLQPSEVSSTEVNMRSRTLQEPLSDCEEVLC

SEQ ID NO: 471 - protein, 224 aa, Homo sapiens
MAPAMESPTLLCVALLFFAPDGVLAVSSTKWFHNGSLSEETNSSLNIVNAKFEDSGEYKCQHQQVNESEPVYLEVFSDWLLLQASAEVVMEGQPLFLRCHGWRNWDVYKVIYYKDGEALKYWYENHNISITNATVEDSGTYYCTGKVWQLDYESEPLNITVIKAPREKYWLQFFIPLLVVILFAVDTGLFISTQQQVTFLLKIKRTRKGFRLLNPHPKPNPKNN

SEQ ID NO: 472 - protein, 257 aa, Homo sapiens
MAPAMESPTLLCVALLFFAPDGVLAVPQKPKVSLNPPWNRIFKGENVTLTCNGNNFFEVSSTKWFHNGSLSEETNSSLNIVNAKFEDSGEYKCQHQQVNESEPVYLEVFSDWLLLQASAEVVMEGQPLFLRCHGWRNWDVYKVIYYKDGEALKYWYENHNISITNATVEDSGTYYCTGKVWQLDYESEPLNITVIKAPREKYWLQFFIPLLVVILFAVDTGLFISTQQQVTFLLKIKRTRKGFRLLNPHPKPNPKNN

SEQ ID NO: 473 - protein, 734 aa, Homo sapiens
MLLWLLLLILTPGREQSGVAPKAVLLLNPPWSTAFKGEKVALICSSISHSLAQGDTYWYHDEKLLKIKHDKIQITEPGNYQCKTRGSSLSDAVHVEFSPDWLILQALHPVFEGDNVILRCQGKDNKNTHQKVYYKDGKQLPNSYNLEKITVNSVSRDNSKYHCTAYRKFYILDIEVTSKPLNIQVQELFLHPVLRASSSTPIEGSPMTLTCETQLSPQRPDVQLQFSLFRDSQTLGLGWSRSPRLQIPAMWTEDSGSYWCEVETVTHSIKKRSLRSQIRVQRVPVSNVNLEIRPTGGQLIEGENMVLICSVAQGSGTVTFSWHKEGRVRSLGRKTQRSLLAELHVLTVKESDAGRYYCAADNVHSPILSTWIRVTVRIPVSHPVLTFRAPRAHTVVGDLLELHCESLRGSPPILYRFYHEDVTLGNSSAPSGGGASFNLSLTAEHSGNYSCDADNGLGAQHSHGVSLRVTVPVSRPVLTLRAPGAQAVVGDLLELHCESLRGSFPILYWFYHEDDTLGNISAHSGGGASFNLSLTTEHSGNYSCEADNGLGAQHSKVVTLNVTGTSRNRTGLTAAGITGLVLSILVLAAAAALLHYARARRKPGGLSATGTSSHSPSECQEPSSSRPSRIDPQEPTHSKPLAPMELEPMYSNVNPGDSNPIYSQIWSIQHTKENSANCPMMHQEHEELTVLYSELKKTHPDDSAGEASSRGRAHEEDDEENYENVPRVLLASDH

SEQ ID NO: 474 - protein, 742 aa, Homo sapiens
MLLWLLLLILTPGREQSGVAPKAVLLLNPPWSTAFKGEKVALICSSISHSLAQGDTYWYHDEKLLKIKHDKIQITEPGNYQCKTRGSSLSDAVHVEFSPDWLILQALHPVFEGDNVILRCQGKDNKNTHQKVYYKDGKQLPNSYNLEKITVNSVSRDNSKYHCTAYRKFYILDIEVTSKPLNIQVQELFLHPVLRASSSTPIEGSPMTLTCETQLSPQRPDVQLQFSLFRDSQTLGLGWSRSPRLQIPAMWTEDSGSYWCEVETVTHSIKKRSLRSQIRVQRVPVSNVNLEIRPTGGQLIEGENMVLICSVAQGSGTVTFSWHKEGRVRSLGRKTQRSLLAELHVLTVKESDAGRYYCAADNVHSPILSTWIRVTVRIPVSHPVLTFRAPRAHTVVGDLLELHCESLRGSPPILYRFYHEDVTLGNSSAPSGGGASFNLSLTAEHSGNYSCDADNGLGAQHSHGVSLRVTVPVSRPVLTLRAPGAQAVVGDLLELHCESLRGSFPILYWFYHEDDTLGNISAHSGGGASFNLSLTTEHSGNYSCEADNGLGAQHSKVVTLNVTGTSRNRTGLTAAGITGLVLSILVLAAAAALLHYARARRKPGGLSATGTSSHSPSECQEPSSSRPSRIDPQEPTHSKPLAPMELEPMYSNVNPGDSNPIYSQIWSIQHTKENSANCPMMHQEHEELTVLYSELKKTHPDDSAGEASSRGRAHEEDDEENYENILNPRKNKVQDFPCLCNT

SEQ ID NO: 475 - protein, 731 aa, Homo sapiens
MASCPDSDNSWVLAGSESLPVETLGPASRMDPESERALQAPHSPSKTDGKELAGTMDGEGTLFQTESPQSGSILTEETEVKGTLEGDVCGVEPPGPGDTVVQGDLQETTVVTGLGPDTQDLEGQSPPQSLPSTPKAAWIREEGRCSSSDDDTDVDMEGLRRRRGREAGPPQPMVPLAVENQAGGEGAGGELGISLNMCLLGALVLLGLGVLLFSGGLSESETGPMEEVERQVLPDPEVLEAVGDRQDGLREQLQAPVPPDSVPSLQNMGLLLDKLAKENQDIRLLQAQLQAQKEELQSLMHQPKGLEEENAQLRGALQQGEAFQRALESELQQLRARLQGLEADCVRGPDGVCLSGGRGPQGDKAIREQGPREQEPELSFLKQKEQLEAEAQALRQELERQRRLLGSVQQDLERSLQDASRGDPAHAGLAELGHRLAQKLQGLENWGQDPGVSANASKAWHQKSHFQNSREWSGKEKWWDGQRDRKAEHWKHKKEESGRERKKNWGGQEDREPAGRWKEGRPRVEESGSKKEGKRQGPKEPPRKSGSFHSSGEKQKQPRWREGTKDSHDPLPSWAELLRPKYRAPQGCSGVDECARQEGLTFFGTELAPVRQQELASLLRTYLARLPWAGQLTKELPLSPAFFGEDGIFRHDRLRFRDFVDALEDSLEEVAVQQTGDDDEVDDFEDFIFSHFFGDKALKKRSGKKDKHSQSPRAAGPREGHSHSHHHHHRG

SEQ ID NO: 476 - protein, 702 aa, Homo sapiens
MDPESERALQAPHSPSKTDGKELAGTMDGEGTLFQTESPQSGSILTEETEVKGTLEGDVCGVEPPGPGDTVVQGDLQETTVVTGLGPDTQDLEGQSPPQSLPSTPKAAWIREEGRCSSSDDDTDVDMEGLRRRRGREAGPPQPMVPLAVENQAGGEGAGGELGISLNMCLLGALVLLGLGVLLFSGGLSESETGPMEEVERQVLPDPEVLEAVGDRQDGLREQLQAPVPPDSVPSLQNMGLLLDKLAKENQDIRLLQAQLQAQKEELQSLMHQPKGLEEENAQLRGALQQGEAFQRALESELQQLRARLQGLEADCVRGPDGVCLSGGRGPQGDKAIREQGPREQEPELSFLKQKEQLEAEAQALRQELERQRRLLGSVQQDLERSLQDASRGDPAHAGLAELGHRLAQKLQGLENWGQDPGVSANASKAWHQKSHFQNSREWSGKEKWWDGQRDRKAEHWKHKKEESGRERKKNWGGQEDREPAGRWKEGRPRVEESGSKKEGKRQGPKEPPRKSGSFHSSGEKQKQPRWREGTKDSHDPLPSWAELLRPKYRAPQGCSGVDECARQEGLTFFGTELAPVRQQELASLLRTYLARLPWAGQLTKELPLSPAFFGEDGIFRHDRLRFRDFVDALEDSLEEVAVQQTGDDDEVDDFEDFIFSHFFGDKALKKRSGKKDKHSQSPRAAGPREGHSHSHHHHHRG

SEQ ID NO: 477 - protein, 468 aa, Homo sapiens
MLAVGCALLAALLAAPGAALAPRRCPAQEVARGVLTSLPGDSVTLTCPGVEPEDNATVHWVLRKPAAGSHPSRWAGMGRRLLLRSVQLHDSGNYSCYRAGRPAGTVHLLVDVPPEEPQLSCFRKSPLSNVVCEWGPRSTPSLTTKAVLLVRKFQNSPAEDFQEPCQYSQESQKFSCQLAVPEGDSSFYIVSMCVASSVGSKFSKTQTFQGCGILQPDPPANITVTAVARNPRWLSVTWQDPHSWNSSFYRLRFELRYRAERSKTFTTWMVKDLQHHCVIHDAWSGLRHVVQLRAQEEFGQGEWSEWSPEAMGTPWTESRSPPAENEVSTPMQALTTNKDDDNILFRDSANATSLPVQDSSSVPLPTFLVAGGSLAFGTLLCIAIVLRFKKTWKLRALKEGKTSMHPPYSLGQLVPERPRPTPVLVPLISPPVSPSSLGSDNTSSHNRPDARDPRSPYDISNTDYFFPR

SEQ ID NO: 478 - protein, 1190 aa, Homo sapiens
MAVCAKKRPPEEERRARANDREYNEKFQYASNCIKTSKYNILTFLPVNLFEQFQEVANTYFLFLLILQLIPQISSLSWFTTIVPLVLVLTITAVKDATDDYFRHKSDNQVNNRQSQVLINGILQQEQWMNVCVGDIIKLENNQFVAADLLLLSSSEPHGLCYIETAELDGETNMKVRQAIPVTSELGDISKLAKFDGEVICEPPNNKLDKFSGTLYWKENKFPLSNQNMLLRGCVLRNTEWCFGLVIFAGPDTKLMQNSGRTKFKRTSIDRLMNTLVLWIFGFLVCMGVILAIGNAIWEHEVGMRFQVYLPWDEAVDSAFFSGFLSFWSYIIILNTVVPISLYVSVEVIRLGHSYFINWDKKMFCMKKRTPAEARTTTLNEELGQVEYIFSDKTGTLTQNIMVFNKCSINGHSYGDVFDVLGHKAELGERPEPVDFSFNPLADKKFLFWDPSLLEAVKIGDPHTHEFFRLLSLCHTVMSEEKNEGELYYKAQSPDEGALVTAARNFGFVFRSRTPKTITVHEMGTAITYQLLAILDFNNIRKRMSVIVRNPEGKIRLYCKGADTILLDRLHHSTQELLNTTMDHLNEYAGEGLRTLVLAYKDLDEEYYEEWAERRLQASLAQDSREDRLASIYEEVENNMMLLGATAIEDKLQQGVPETIALLTLANIKIWVLTGDKQETAVNIGYSCKMLTDDMTEVFIVTGHTVLEVREELRKAREKMMDSSRSVGNGFTYQDKLSSSKLTSVLEAVAGEYALVINGHSLAHALEADMELEFLETACACKAVICCRVTPLQKAQVVELVKKYKKAVTLAIGDGANDVSMIKTAHIGVGISGQEGIQAVLASDYSFSQFKFLQRLLLVHGRWSYLRMCKFLCYFFYKNFAFTMVHFWFGFFCGFSAQTVYDQYFITLYNIVYTSLPVLAMGVFDQDVPEQRSMEYPKLYEPGQLNLLFNKREFFICIAQGIYTSVLMFFIPYGVFADATRDDGTQLADYQSFAVTVATSLVIVVSVQIGLDTGYWTAINHFFIWGSLAVYFAILFAMHSNGLFDMFPNQFRFVGNAQNTLAQPTVWLTIVLTTVVCIMPVVAFRFLRLNLKPDLSDTVRYTQLVRKKQKAQHRCMRRVGRTGSRRSGYAFSHQEGFGELIMSGKNMRLSSLALSSFTTRSSSSWIESLRRKKSDSASSPSGGADKPLKG

SEQ ID NO: 479 - protein, 315 aa, Homo sapiens
MEKFRAVLDLHVKHHSALGYGLVTLLTAGGERIFSAVAFQCPCSAAWNLPYGLVFLLVPALALFLLGYVLSARTWRLLTGCCSSARASCGSALRGSLVCTQISAAAALAPLTWVAVALLGGAFYECAATGSAAFAQRLCLGRNRSCAAELPLVPCNQAKASDVQDLLKDLKAQSQVLGWILIAVVIIILLIFTSVTRCLSPVSFLQLKFWKIYLEQEQQILKSKATEHATELAKENIKCFFEGSHPKEYNTPSMKEWQQISSLYTFNPKGQYYSMLHKYVNRKEKTHSIRSTEGDTVIPVLGFVDSSGINSTPEL

SEQ ID NO: 480 - protein, 769 aa, Homo sapiens
MVSWGRFICLVVVTMATLSLARPSFSLVEDTTLEPEEPPTKYQISQPEVYVAAPGESLEVRCLLKDAAVISWTKDGVHLGPNNRTVLIGEYLQIKGATPRDSGLYACTASRTVDSETWYFMVNVTDAISSGDDEDDTDGAEDFVSENSNNKRAPYWTNTEKMEKRLHAVPAANTVKFRCPAGGNPMPTMRWLKNGKEFKQEHRIGGYKVRNQHWSLIMESVVPSDKGNYTCVVENEYGSINHTYHLDVVERSPHRPILQAGLPANASTVVGGDVEFVCKVYSDAQPHIQWIKHVEKNGSKYGPDGLPYLKVLKHSGINSSNAEVLALFNVTEADAGEYICKVSNYIGQANQSAWLTVLPKQQAPGREKEITASPDYLEIAIYCIGVFLIACMVVTVILCRMKNTTKKPDFSSQPAVHKLTKRIPLRRQVTVSAESSSSMNSNTPLVRITTRLSSTADTPMLAGVSEYELPEDPKWEFPRDKLTLGKPLGEGCFGQVVMAEAVGIDKDKPKEAVTVAVKMLKDDATEKDLSDLVSEMEMMKMIGKHKNIINLLGACTQDGPLYVIVEYASKGNLREYLRARRPPGMEYSYDINRVPEEQMTFKDLVSCTYQLARGMEYLASQKCIHRDLAARNVLVTENNVMKIADFGLARDINNIDYYKKTTNGRLPVKWMAPEALFDRVYTHQSDVWSFGVLMWEIFTLGGSPYPGIPVEELFKLLKEGHRMDKPANCTNELYMMMRDCWHAVPSQRPTFKQLVEDLDRILTLTTNEI

SEQ ID NO: 481 - protein, 768 aa, Homo sapiens
MVSWGRFICLVVVTMATLSLARPSFSLVEDTTLEPEEPPTKYQISQPEVYVAAPGESLEVRCLLKDAAVISWTKDGVHLGPNNRTVLIGEYLQIKGATPRDSGLYACTASRTVDSETWYFMVNVTDAISSGDDEDDTDGAEDFVSENSNNKRAPYWTNTEKMEKRLHAVPAANTVKFRCPAGGNPMPTMRWLKNGKEFKQEHRIGGYKVRNQHWSLIMESVVPSDKGNYTCVVENEYGSINHTYHLDVVERSPHRPILQAGLPANASTVVGGDVEFVCKVYSDAQPHIQWIKHVEKNGSKYGPDGLPYLKVLKHSGINSSNAEVLALFNVTEADAGEYICKVSNYIGQANQSAWLTVLPKQQAPGREKEITASPDYLEIAIYCIGVFLIACMVVTVILCRMKNTTKKPDFSSQPAVHKLTKRIPLRRQVTVSAESSSSMNSNTPLVRITTRLSSTADTPMLAGVSEYELPEDPKWEFPRDKLTLGKPLGEGCFGQVVMAEAVGIDKDKPKEAVTVAVKMLKDDATEKDLSDLVSEMEMMKMIGKHKNIINLLGACTQDGPLYVIVEYASKGNLREYLRARRPPGMEYSYDINRVPEEQMTFKDLVSCTYQLARGMEYLASQKCIHRDLAARNVLVTENNVMKIADFGLARDINNIDYYKKTTNGRLPVKWMAPEALFDRVYTHQSDVWSFGVLMWEIFTLGGSPYPGIPVEELFKLLKEGHRMDKPANCTNELYMMMRDCWHAVPSQRPTFKQLVEDLDRILTLTTNE

SEQ ID NO: 482 - protein, 707 aa, Homo sapiens
MVSWGRFICLVVVTMATLSLARPSFSLVEDTTLEPEGAPYWTNTEKMEKRLHAVPAANTVKFRCPAGGNPMPTMRWLKNGKEFKQEHRIGGYKVRNQHWSLIMESVVPSDKGNYTCVVENEYGSINHTYHLDVVERSPHRPILQAGLPANASTVVGGDVEFVCKVYSDAQPHIQWIKHVEKNGSKYGPDGLPYLKVLKHSGINSSNAEVLALFNVTEADAGEYICKVSNYIGQANQSAWLTVLPKQQAPGREKEITASPDYLEIAIYCIGVFLIACMVVTVILCRMKNTTKKPDFSSQPAVHKLTKRIPLRRQVTVSAESSSSMNSNTPLVRITTRLSSTADTPMLAGVSEYELPEDPKWEFPRDKLTLGKPLGEGCFGQVVMAEAVGIDKDKPKEAVTVAVKMLKDDATEKDLSDLVSEMEMMKMIGKHKNIINLLGACTQDGPLYVIVEYASKGNLREYLRARRPPGMEYSYDINRVPEEQMTFKDLVSCTYQLARGMEYLASQKCIHRDLAARNVLVTENNVMKIADFGLARDINNIDYYKKTTNGRLPVKWMAPEALFDRVYTHQSDVWSFGVLMWEIFTLGGSPYPGIPVEELFKLLKEGHRMDKPANCTNELYMMMRDCWHAVPSQRPTFKQLVEDLDRILTLTTNEEYLDLSQPLEQYSPSYPDTRSSCSSGDDSVFSPDPMPYEPCLPQYPHINGSVKT

SEQ ID NO: 483 - protein, 682 aa, Homo sapiens
MEEGFRDRAAFIRGAKDIAKEVKKHAAKKVVKGLDRVQDEYSRRSYSRFEEEDDDDDFPAPSDGYYRGEGTQDEEEGGASSDATEGHDEDDEIYEGEYQGIPRAESGGKGERMADGAPLAGVRGGLSDGEGPPGGRGEAQRRKEREELAQQYEAILRECGHGRFQWTLYFVLGLALMADGVEVFVVGFVLPSAEKDMCLSDSNKGMLGLIVYLGMMVGAFLWGGLADRLGRRQCLLISLSVNSVFAFFSSFVQGYGTFLFCRLLSGVGIGGSIPIVFSYFSEFLAQEKRGEHLSWLCMFWMIGGVYAAAMAWAIIPHYGWSFQMGSAYQFHSWRVFVLVCAFPSVFAIGALTTQPESPRFFLENGKHDEAWMVLKQVHDTNMRAKGHPERVFSVTHIKTIHQEDELIEIQSDTGTWYQRWGVRALSLGGQVWGNFLSCFGPEYRRITLMMMGVWFTMSFSYYGLTVWFPDMIRHLQAVDYASRTKVFPGERVEHVTFNFTLENQIHRGGQYFNDKFIGLRLKSVSFEDSLFEECYFEDVTSSNTFFRNCTFINTVFYNTDLFEYKFVNSRLINSTFLHNKEGCPLDVTGTGEGAYMVYFVSFLGTLAVLPGNIVSALLMDKIGRLRMLAGSSVMSCVSCFFLSFGNSESAMIALLCLFGGVSIASWNALDVLTVELYPSDKR

SEQ ID NO: 484 - protein, 742 aa, Homo sapiens
MEEGFRDRAAFIRGAKDIAKEVKKHAAKKVVKGLDRVQDEYSRRSYSRFEEEDDDDDFPAPSDGYYRGEGTQDEEEGGASSDATEGHDEDDEIYEGEYQGIPRAESGGKGERMADGAPLAGVRGGLSDGEGPPGGRGEAQRRKEREELAQQYEAILRECGHGRFQWTLYFVLGLALMADGVEVFVVGFVLPSAEKDMCLSDSNKGMLGLIVYLGMMVGAFLWGGLADRLGRRQCLLISLSVNSVFAFFSSFVQGYGTFLFCRLLSGVGIGGSIPIVFSYFSEFLAQEKRGEHLSWLCMFWMIGGVYAAAMAWAIIPHYGWSFQMGSAYQFHSWRVFVLVCAFPSVFAIGALTTQPESPRFFLENGKHDEAWMVLKQVHDTNMRAKGHPERVFSVTHIKTIHQEDELIEIQSDTGTWYQRWGVRALSLGGQVWGNFLSCFGPEYRRITLMMMGVWFTMSFSYYGLTVWFPDMIRHLQAVDYASRTKVFPGERVEHVTFNFTLENQIHRGGQYFNDKFIGLRLKSVSFEDSLFEECYFEDVTSSNTFFRNCTFINTVFYNTDLFEYKFVNSRLINSTFLHNKEGCPLDVTGTGEGAYMVYFVSFLGTLAVLPGNIVSALLMDKIGRLRMLAGSSVMSCVSCFFLSFGNSESAMIALLCLFGGVSIASWNALDVLTVELYPSDKRTTAFGFLNALCKLAAVLGISIFTSFVGITKAAPILFASAALALGSSLALKLPETRGQVLQ

SEQ ID NO: 485 - protein, 342 aa, Homo sapiens
MPQTCDGTGQMHLGSNCCKNGQTLLQRTCHGVSCCGWWFQAARSILGKGPSAQSLAGWTLESEALRRDMGTWLLACICICTCVCLGVSVTGEGQGPRSRTFTCLTNNILRIDCHWSAPELGQGSSPWLLFTRLLAAHISASCGAVSAPSCCHLRQCSCHLTISPSLSTTACLGGSRSAWWTRSTCPGDTSNISSGHCILTWSISPALEPMTTLLSYELAFKKQEEAWEQAQHRDHIVGVTWLILEAFELDPGFIHEARLRVQMATLEDDVVEEERYTGQWSEWSQPVCFQAPQRQGPLIPPWGWPGNTLVAVSIFLLLTGPTYLLFKLSPRLGWGPTGPVCC

SEQ ID NO: 486 - protein, 522 aa, Homo sapiens
MDTESTYSGYSYYSSHSKKSHRQGERTRERHKSPRNKDGRGSEKSVTIQPPTGEPLLGNDSTRTEEDDNWGETTTAITGTSEHSISQEDIARISKDMEDSVGLDCKRYLGLTVASFLGLLVFLTPIAFILLPPILWRDELEPCGTICEGLFISMAFKLLILLIGTWALFFRKRRADMPRVFVFRALLLVLIFLFVVSYWLFYGVRILDSRDRNYQGIVQYAVSLVDALLFIHYLAIVLLELRQLQPMFTLQVVRSTDGESRFYSLGHLSIQRAALVVLENYYKDFTIYNPNLLTASKFRAAKHMAGLKVYNVDGPSNNATGQSRAMIAAAARRRDSSHNELYYEEAEHERRVKKRKARLVVAVEEAFIHIQRLQAEEQQKAPGEVMDPREAAQAIFPSMARALQKYLRITRQQNYHSMESILQHLAFCITNGMTPKAFLERYLSAGPTLQYDKDRWLSTQWRLVSDEAVTNGLRDGIVFVLKCLDFSLVVNVKKIPFIILSEEFIDPKSHKFVLRLQSETSV

SEQ ID NO: 487 - protein, 196 aa, Homo sapiens
MGRFRGGLRCIKYLLLGFNLLFWLAGSAVIAFGLWFRFGGAIKELSSEDKSPEYFYVGLYVLVGAGALMMAVGFFGCCGAMRESQCVLGSAIRHVQTMYEEAYNDYLKDRGKGNGTLITFHSTFQCCGKESSEQVQPTCPKELLGHKNCIDEIETIISVKLQLIGIVGIGIAGLTIFGMIFSMVLCCAIRNSRDVI

SEQ ID NO: 488 - protein, 221 aa, Homo sapiens
MGRFRGGLRCIKYLLLGFNLLFWLAGSAVIAFGLWFRFGGAIKELSSEDKSPEYFYVGLYVLVGAGALMMAVGFFGCCGAMRESQCVLGSFFTCLLVIFAAEVTTGVFAFIGKGVAIRHVQTMYEEAYNDYLKDRGKGNGTLITFHSTFQCCGKESSEQVQPTCPKELLGHKNCIDEIETIISVKLQLIGIVGIGIAGLTIFGMIFSMVLCCAIRNSRDVI

SEQ ID NO: 489 - protein, 229 aa, Homo sapiens
MSPFLFRDDMKDLTVFLNSLTPKFYVALTGTSSLISGLIFIFEWWYFHKHGTSFIEQVSVSHLQPLMGGTESSISEPGSPSRNRENETSRQNLSECKVWRNPLNLFRGAEYRRYTWVTGKEPLTYYDMNLSAQDHQTFFTCDTDFLRPSDTVMQKAWRERNPPARIKAAYQALELNNDCATAYVLLAEEEATTIVDAERLFKQALKAGETIYRQSQQCQHQSPQHEAQL

SEQ ID NO: 490 - protein, 130 aa, Homo sapiens
MGGNGSTCKPDTERQGTLSTAAPTTSPAPCLSNHHNKKHLILAFCAGVLLTLLLIAFIFLIIKSYRKYHSKPQAPDPHSDPPAKLSSIPGESLTYASTTFKLSEEKSNHLAENHSADFDPIVYAQIKVTN

SEQ ID NO: 491 - protein, 420 aa, Homo sapiens
MPGGCSRGPAAGDGRLRLARLALVLLGWVSSSSPTSSASSFSSSAPFLASAVSAQPPLPDQCPALCECSEAARTVKCVNRNLTEVPTDLPAYVRNLFLTGNQLAVLPAGAFARRPPLAELAALNLSGSRLDEVRAGAFEHLPSLRQLDLSHNPLADLSPFAFSGSNASVSAPSPLVELILNHIVPPEDERQNRSFEGMVVAALLAGRALQGLRRLELASNHFLYLPRDVLAQLPSLRHLDLSNNSLVSLTYVSFRNLTHLESLHLEDNALKVLHNGTLAELQGLPHIRVFLDNNPWVCDCHMADMVTWLKETEVVQGKDRLTCAYPEKMRNRVLLELNSADLDCDPILPPSLQTSYVFLGIVLALIGAIFLLVLYLNRKGIKKWMHNIRDACRDHMEGYHYRYEINADPRLTNLSSNSDV

SEQ ID NO: 492 - protein, 438 aa, Homo sapiens
MTAPGAAGRCPPTTWLGSLLLLVCLLASRSITEEVSEYCSHMIGSGHLQSLQRLIDSQMETSCQITFEFVDQEQLKDPVCYLKKAFLLVQDIMEDTMRFRDNTPNAIAIVQLQELSLRLKSCFTKDYEEHDKACVRTFYETPLQLLEKVKNVFNETKNLLDKDWNIFSKNCNNSFAECSSQDVVTKPDCNCLYPKAIPSSDPASVSPHQPLAPSMAPVAGLTWEDSEGTEGSSLLPGEQPLHTVDPGSAKQRPPRSTCQSFEPPETPVVKDSTIGGSPQPRPSVGAFNPGMEDILDSAMGTNWVPEEASGEASEIPVPQGTELSPSRPGGGSMQTEPARPSNFLSASSPLPASAKGQQPADVTGHERQSEGSFSPQLQESVFHLLVPSVILVLLAVGGLLFYRWRRRSHQEPQRADSPLEQPEGSPLTQDDRQVELPV

SEQ ID NO: 493 - protein, 493 aa, Homo sapiens
MHPHRDPRGLWLLLPSLSLLLFEVARAGRAVVSCPAACLCASNILSCSKQQLPNVPHSLPSYTALLDLSHNNLSRLRAEWTPTRLTQLHSLLLSHNHLNFISSEAFSPVPNLRYLDLSSNQLRTLDEFLFSDLQVLEVLLLYNNHIMAVDRCAFDDMAQLQKLYLSQNQISRFPLELVKEGAKLPKLTLLDLSSNKLKNLPLPDLQKLPAWIKNGLYLHNNPLNCDCELYQLFSHWQYRQLSSVMDFQEDLYCMNSKKLHNVFNLSFLNCGEYKERAWEAHLGDTLIIKCDTKQQGMTKVWVTPSNERVLDEVTNGTVSVSKDGSLLFQQVQVEDGGVYTCYAMGETFNETLSVELKVHNFTLHGHHDTLNTAYTTLVGCILSVVLVLIYLYLTPCRCWCRGVEKPSSHQGDSLSSSMLSTTPNHDPMAGGDKDDGFDRRVAFLEPAGPGQGQNGKLKPGNTLPVPEATGKGQRRMSDPESVSSVFSDTPIVV

SEQ ID NO: 494 - protein, 540 aa, Homo sapiens
MPGKMVVILGASNILWIMFAASQAFKIETTPESRYLAQIGDSVSLTCSTTGCESPFFSWRTQIDSPLNGKVTNEGTTSTLTMNPVSFGNEHSYLCTATCESRKLEKGIQVEIYSFPKDPEIHLSGPLEAGKPITVKCSVADVYPFDRLEIDLLKGDHLMKSQEFLEDADRKSLETKSLEVTFTPVIEDIGKVLVCRAKLHIDEMDSVPTVRQAVKELQVYISPKNTVISVNPSTKLQEGGSVTMTCSSEGLPAPEIFWSKKLDNGNLQHLSGNATLTLIAMRMEDSGIYVCEGVNLIGKNRKEVELIVQVAPRDTTVLVSPSSILEEGSSVNMTCLSQGFPAPKILWSRQLPNGELQPLSENATLTLISTKMEDSGVYLCEGINQAGRSRKEVELIIQVTPKDIKLTAFPSESVKEGDTVIISCTCGNVPETWIILKKKAETGDTVLKSIDGAYTIRKAQLKDAGVYECESKNKVGSQLRSLTLDVQGRENNKDYFSPELLVLYFASSLIIPAIGMIIYFARKANMKGSYSLVEAQKSKV

SEQ ID NO: 495 - protein, 677 aa, Homo sapiens
MPGKMVVILGASNILWIMFAASQAFKIETTPESRYLAQIGDSVSLTCSTTGSFPKDPEIHLSGPLEAGKPITVKCSVADVYPFDRLEIDLLKGDHLMKSQEFLEDADRKSLETKSLEVTFTPVIEDIGKVLVCRAKLHIDEMDSVPTVRQAVKELQVYISPKNTVISVNPSTKLQEGGSVTMTCSSEGLPAPEIFWSKKLDNGNLQHLSGNATLTLIAMRMEDSGIYVCEGVNLIGKNRKEVELIVQEKPFTVEISPGPRIAAQIGDSVMLTCSVMGCESPSFSWRTQIDSPLSGKVRSEGTNSTLTLSPVSFENEHSYLCTVTCGHKKLEKGIQVELYSFPRDPEIEMSGGLVNGSSVTVSCKVPSVYPLDRLEIELLKGETILENIEFLEDTDMKSLENKSLEMTFIPTIEDTGKALVCQAKLHIDDMEFEPKQRQSTQTLYVNVAPRDTTVLVSPSSILEEGSSVNMTCLSQGFPAPKILWSRQLPNGELQPLSENATLTLISTKMEDSGVYLCEGINQAGRSRKEVELIIQVTPKDIKLTAFPSESVKEGDTVIISCTCGNVPETWIILKKKAETGDTVLKSIDGAYTIRKAQLKDAGVYECESKNKVGSQLRSLTLDVQGRENNKDYFSPELLVLYFASSLIIPAIGMIIYFARKANMKGSYSLVEAQKSKV

SEQ ID NO: 496 - protein, 430 aa, Homo sapiens
MTLTSRRQDSQEARPECQAWTGTLLLGTCLLYCARSSMPICTVSMSQDFGWNKKEAGIVLSSFFWGYCLTQVVGGHLGDRIGGEKVILLSASAWGSITAVTPLLAHLSSAHLAFMTFSRILMGLLQGVYFPALTSLLSQKVRESERAFTYSIVGAGSQFGTLLTGAVGSLLLEWYGWQSIFYFSGGLTLLWVWYVYRYLLSEKDLILALGVLAQSRPVSRHNRVPWRRLFRKPAVWAAVVSQLSAACSFFILLSWLPTFFEETFPDAKGWIFNVVPWLVAIPASLFSGFLSDHLINQGYRAITVRKLMQGMGLGLSSVFALCLGHTSSFCESVVFASASIGLQTFNHSGISVNIQDLAPSCAGFLFGVANTAGALAGVVGVCLGGYLMETTGSWTCLFNLVAIISNLGLCTFLVFGQAQRVDLSSTHEDL

SEQ ID NO: 497 - protein, 436 aa, Homo sapiens
MQPPPDEARRDMAGDTQWSRPECQAWTGTLLLGTCLLYCARSSMPICTVSMSQDFGWNKKEAGIVLSSFFWGYCLTQVVGGHLGDRIGGEKVILLSASAWGSITAVTPLLAHLSSAHLAFMTFSRILMGLLQGVYFPALTSLLSQKVRESERAFTYSIVGAGSQFGTLLTGAVGSLLLEWYGWQSIFYFSGGLTLLWVWYVYRYLLSEKDLILALGVLAQSRPVSRHNRVPWRRLFRKPAVWAAVVSQLSAACSFFILLSWLPTFFEETFPDAKGWIFNVVPWLVAIPASLFSGFLSDHLINQGYRAITVRKLMQGMGLGLSSVFALCLGHTSSFCESVVFASASIGLQTFNHSGISVNIQDLAPSCAGFLFGVANTAGALAGVVGVCLGGYLMETTGSWTCLFNLVAIISNLGLCTFLVFGQAQRVDLSSTHEDL

SEQ ID NO: 498 - protein, 359 aa, Homo sapiens
MPAHLLQDDISSSYTTTTTITAPPSRVLQNGGDKLETMPLYLEDDIRPDIKDDIYDPTYKDKEGPSPKVEYVWRNIILMSLLHLGALYGITLIPTCKFYTWLWGVFYYFVSALGITAGAHRLWSHRSYKARLPLRLFLIIANTMAFQNDVYEWARDHRAHHKFSETHADPHNSRRGFFFSHVGWLLVRKHPAVKEKGSTLDLSDLEAEKLVMFQRRYYKPGLLMMCFILPTLVPWYFWGETFQNSVFVATFLRYAVVLNATWLVNSAAHLFGYRPYDKNISPRENILVSLGAVGEGFHNYHHSFPYDYSASEYRWHINFTTFFIDCMAALGLAYDRKKVSKAAILARIKRTGDGNYKSG

SEQ ID NO: 499 - protein, 633 aa, Homo sapiens
MESGPKMLAPVCLVENNNEQLLVNQQAIQILEKISQPVVVVAIVGLYRTGKSYLMNHLAGQNHGFPLGSTVQSETKGIWMWCVPHPSKPNHTLVLLDTEGLGDVEKGDPKNDSWIFALAVLLCSTFVYNSMSTINHQALEQLHYVTELTELIKAKSSPRPDGVEDSTEFVSFFPDFLWTVRDFTLELKLNGHPITEDEYLENALKLIQGNNPRVQTSNFPRECIRRFFPKRKCFVFDRPTNDKDLLANIEKVSEKQLDPKFQEQTNIFCSYIFTHARTKTLREGITVTGNRLGTLAVTYVEAINSGAVPCLENAVITLAQRENSAAVQRAADYYSQQMAQRVKLPTDTLQELLDMHAACEREAIAIFMEHSFKDENQEFQKKFMETTMNKKGDFLLQNEESSVQYCQAKLNELSKGLMESISAGSFSVPGGHKLYMETKERIEQDYWQVPRKGVKAKEVFQRFLESQMVIEESILQSDKALTDREKAVAVDRAKKEAAEKEQELLKQKLQEQQQQMEAQDKSRKENIAQLKEKLQMEREHLLREQIMMLEHTQKVQNDWLHEGFKKKYEEMNAEISQFKRMIDTTKNDDTPWIARTLDNLADELTAILSAPAKLIGHGVKGVSSLFKKHKLPF

SEQ ID NO: 500 - protein, 640 aa, Homo sapiens
MGERTLHAAVPTPGYPESESIMMAPICLVENQEEQLTVNSKALEILDKISQPVVVVAIVGLYRTGKSYLMNRLAGKRNGFPLGSTVQSETKGIWMWCVPHLSKPNHTLVLLDTEGLGDVEKSNPKNDSWIFALAVLLSSSFVYNSVSTINHQALEQLHYVTELAELIRAKSCPRPDEAEDSSEFASFFPDFIWTVRDFTLELKLDGNPITEDEYLENALKLIPGKNPKIQNSNMPRECIRHFFRKRKCFVFDRPTNDKQYLNHMDEVPEENLERHFLMQSDNFCSYIFTHAKTKTLREGIIVTGKRLGTLVVTYVDAINSGAVPCLENAVTALAQLENPAAVQRAADHYSQQMAQQLRLPTDTLQELLDVHAACEREAIAVFMEHSFKDENHEFQKKLVDTIEKKKGDFVLQNEEASAKYCQAELKRLSEHLTESILRGIFSVPGGHNLYLEEKKQVEWDYKLVPRKGVKANEVLQNFLQSQVVVEESILQSDKALTAGEKAIAAERAMKEAAEKEQELLREKQKEQQQMMEAQERSFQEYMAQMEKKLEEERENLLREHERLLKHKLKVQEEMLKEEFQKKSEQLNKEINQLKEKIESTKNEQLRLLKILDMASNIMIVTLPGASKLLGVGTKYLGSRI

SEQ ID NO: 501 - protein, 591 aa, Homo sapiens
MAPEINLPGPMSLIDNTKGQLVVNPEALKILSAITQPVVVVAIVGLYRTGKSYLMNKLAGKKNGFSLGSTVKSHTKGIWMWCVPHPKKPEHTLVLLDTEGLGDIEKGDNENDSWIFALAILLSSTFVYNSMGTINQQAMDQLHYVTELTDRIKANSSPGNNSVDDSADFVSFFPAFVWTLRDFTLELEVDGEPITADDYLELSLKLRKGTDKKSKSFNDPRLCIRKFFPKRKCFVFDWPAPKKYLAHLEQLKEEELNPDFIEQVAEFCSYILSHSNVKTLSGGIPVNGPRLESLVLTYVNAISSGDLPCMENAVLALAQIENSAAVEKAIAHYEQQMGQKVQLPTETLQELLDLHRDSEREAIEVFMKNSFKDVDQMFQRKLGAQLEARRDDFCKQNSKASSDCCMALLQDIFGPLEEDVKQGTFSKPGGYRLFTQKLQELKNKYYQVPRKGIQAKEVLKKYLESKEDVADALLQTDQSLSEKEKAIEVERIKAESAEAAKKMLEEIQKKNEEMMEQKEKSYQEHVKQLTEKMERDRAQLMAEQEKTLALKLQEQERLLKEGFENESKRLQKDIWDIQMRSKSLEPICNIL

SEQ ID NO: 502 - protein, 592 aa, Homo sapiens
MASEIHMTGPMCLIENTNGRLMANPEALKILSAITQPMVVVAIVGLYRTGKSYLMNKLAGKKKGFSLGSTVQSHTKGIWMWCVPHPKKPGHILVLLDTEGLGDVEKGDNQNDSWIFALAVLLSSTFVYNSIGTINQQAMDQLYYVTELTHRIRSKSSPDENENEVEDSADFVSFFPDFVWTLRDFSLDLEADGQPLTPDEYLTYSLKLKKGTSQKDETFNLPRLCIRKFFPKKKCFVFDRPVHRRKLAQLEKLQDEELDPEFVQQVADFCSYIFSNSKTKTLSGGIQVNGPRLESLVLTYVNAISSGDLPCMENAVLALAQIENSAAVQKAIAHYEQQMGQKVQLPTETLQELLDLHRDSEREAIEVFIRSSFKDVDHLFQKELAAQLEKKRDDFCKQNQEASSDRCSALLQVIFSPLEEEVKAGIYSKPGGYRLFVQKLQDLKKKYYEEPRKGIQAEEILQTYLKSKESMTDAILQTDQTLTEKEKEIEVERVKAESAQASAKMLQEMQRKNEQMMEQKERSYQEHLKQLTEKMENDRVQLLKEQERTLALKLQEQEQLLKEGFQKESRIMKNEIQDLQTKMRRRKACTIS

SEQ ID NO: 503 - protein, 321 aa, Homo sapiens
MADPEVVVSSCSSHEEENRCNFNQQTSPSEELLLEDQMRRKLKFFFMNPCEKFWARGRKPWKLAIQILKIAMVTIQLVLFGLSNQMVVAFKEENTIAFKHLFLKGYMDRMDDTYAVYTQSDVYDQLIFAVNQYLQLYNVSVGNHAYENKGTKQSAMAICQHFYKRGNIYPGNDTFDIDPEIETECFFVEPDEPFHIGTPAENKLNLTLDFHRLLTVELQFKLKAINLQTVRHQELPDCYDFTLTITFDNKAHSGRIKISLDNDISIRECKDWHVSGSIQKNTHYMMIFDAFVILTCLVSLILCIRSVIRGLQLQQVGNVAF

SEQ ID NO: 504 - protein, 553 aa, Homo sapiens
MADPEVVVSSCSSHEEENRCNFNQQTSPSEELLLEDQMRRKLKFFFMNPCEKFWARGRKPWKLAIQILKIAMVTIQLVLFGLSNQMVVAFKEENTIAFKHLFLKGYMDRMDDTYAVYTQSDVYDQLIFAVNQYLQLYNVSVGNHAYENKGTKQSAMAICQHFYKRGNIYPGNDTFDIDPEIETECFFVEPDEPFHIGTPAENKLNLTLDFHRLLTVELQFKLKAINLQTVRHQELPDCYDFTLTITFDNKAHSGRIKISLDNDISIRECKDWHVSGSIQKNTHYMMIFDAFVILTCLVSLILCIRSVIRGLQLQQEFVNFFLLHYKKEVSVSDQMEFVNGWYIMIIISDILTIIGSILKMEIQAKSLTSYDVCSILLGTSTMLVWLGVIRYLGFFAKYNLLILTLQAALPNVIRFCCCAAMIYLGYCFCGWIVLGPYHDKFRSLNMVSECLFSLINGDDMFATFAKMQQKSYLVWLFSRIYLYSFISLFIYMILSLFIALITDTYETIKQYQQDGFPETELRTFISECKDLPNSGKYRLEDDPPVSLFCCCKK

SEQ ID NO: 505 - protein, 377 aa, Homo sapiens
MRGQRSLLLGPARLCLRLLLLLGYRRRCPPLLRGLVQRWRYGKVCLRSLLYNSFGGSDTAVDAAFEPVYWLVDNVIRWFGVVFVVLVIVLTGSIVAIAYLCVLPLILRTYSVPRLCWHFFYSHWNLILIVFHYYQAITTPPGYPPQGRNDIATVSICKKCIYPKPARTHHCSICNRCVLKMDHHCPWLNNCVGHYNHRYFFSFCFFMTLGCVYCSYGSWDLFREAYAAIEKMKQLDKNKLQAVANQTYHQTPPPTFSFRERMTHKSLVYLWFLCSSVALALGALTVWHAVLISRGETSIERHINKKERRRLQAKGRVFRNPYNYGCLDNWKVFLGVDTGRHWLTRVLLPSSHLPHGNGMSWEPPPWVTAHSASVMAV

SEQ ID NO: 506 - protein, 659 aa, Homo sapiens
MAHTFRGCSLAFMFIITWLLIKAKIDACKRGDVTVKPSHVILLGSTVNITCSLKPRQGCFHYSRRNKLILYKFDRRINFHHGHSLNSQVTGLPLGTTLFVCKLACINSDEIQICGAEIFVGVAPEQPQNLSCIQKGEQGTVACTWERGRDTHLYTEYTLQLSGPKNLTWQKQCKDIYCDYLDFGINLTPESPESNFTAKVTAVNSLGSSSSLPSTFTFLDIVRPLPPWDIRIKFQKASVSRCTLYWRDEGLVLLNRLRYRPSNSRLWNMVNVTKAKGRHDLLDLKPFTEYEFQISSKLHLYKGSWSDWSESLRAQTPEEEPTGMLDVWYMKRHIDYSRQQISLFWKNLSVSEARGKILHYQVTLQELTGGKAMTQNITGHTSWTTVIPRTGNWAVAVSAANSKGSSLPTRINIMNLCEAGLLAPRQVSANSEGMDNILVTWQPPRKDPSAVQEYVVEWRELHPGGDTQVPLNWLRSRPYNVSALISENIKSYICYEIRVYALSGDQGGCSSILGNSKHKAPLSGPHINAITEEKGSILISWNSIPVQEQMGCLLHYRIYWKERDSNSQPQLCEIPYRVSQNSHPINSLQPRVTYVLWMTALTAAGESSHGNEREFCLQGKANWMAFVAPSICIAIIMVGIFSTHYFQQKRRHSCPWTGS

SEQ ID NO: 507 - protein, 674 aa, Homo sapiens
MARAHWGCCPWLVLLCACAWGHTKPVDLGGQDVRNCSTNPPYLPVTVVNTTMSLTALRQQMQTQNLSAYIIPGTDAHMNEYIGQHDERRAWITGFTGSAGTAVVTMKKAAVWTDSRYWTQAERQMDCNWELHKEVGTTPIVTWLLTEIPAGGRVGFDPFLLSIDTWESYDLALQGSNRQLVSITTNLVDLVWGSERPPVPNQPIYALQEAFTGSTWQEKVSGVRSQMQKHQKVPTAVLLSALEETAWLFNLRASDIPYNPFFYSYTLLTDSSIRLFANKSRFSSETLSYLNSSCTGPMCVQIEDYSQVRDSIQAYSLGDVRIWIGTSYTMYGIYEMIPKEKLVTDTYSPVMMTKAVKNSKEQALLKASHVRDAVAVIRYLVWLEKNVPKGTVDEFSGAEIVDKFRGEEQFSSGPSFETISASGLNAALAHYSPTKELNRKLSSDEMYLLDSGGQYWDGTTDITRTVHWGTPSAFQKEAYTRVLIGNIDLSRLIFPAATSGRMVEAFARRALWDAGLNYGHGTGHGIGNFLCVHEWPVGFQSNNIAMAKGMFTSIEPGYYKDGEFGIRLEDVALVVEAKTKYPGSYLTFEVVSFVPYDRNLIDVSLLSPEHLQYLNRYYQTIREKVGPELQRRQLLEEFEWLQQHTEPLAARAPDTASWASVLVVSTLAILGWSV

SEQ ID NO: 508 - protein, 2725 aa, Homo sapiens
MEQTDCKPYQPLPKVKHEMDLAYTSSSDESEDGRKPRQSYNSRETLHEYNQELRMNYNSQSRKRKEVEKSTQEMEFCETSHTLCSGYQTDMHSVSRHGYQLEMGSDVDTETEGAASPDHALRMWIRGMKSEHSSCLSSRANSALSLTDTDHERKSDGENGFKFSPVCCDMEAQAGSTQDVQSSPHNQFTFRPLPPPPPPPHACTCARKPPPAADSLQRRSMTTRSQPSPAAPAPPTSTQDSVHLHNSWVLNSNIPLETRHFLFKHGSGSSAIFSAASQNYPLTSNTVYSPPPRPLPRSTFSRPAFTFNKPYRCCNWKCTALSATAITVTLALLLAYVIAVHLFGLTWQLQPVEGELYANGVSKGNRGTESMDTTYSPIGGKVSDKSEKKVFQKGRAIDTGEVDIGAQVMQTIPPGLFWRFQITIHHPIYLKFNISLAKDSLLGIYGRRNIPPTHTQFDFVKLMDGKQLVKQDSKGSDDTQHSPRNLILTSLQETGFIEYMDQGPWYLAFYNDGKKMEQVFVLTTAIEIMDDCSTNCNGNGECISGHCHCFPGFLGPDCARDSCPVLCGGNGEYEKGHCVCRHGWKGPECDVPEEQCIDPTCFGHGTCIMGVCICVPGYKGEICEEEDCLDPMCSNHGICVKGECHCSTGWGGVNCETPLPVCQEQCSGHGTFLLDAGVCSCDPKWTGSDCSTELCTMECGSHGVCSRGICQCEEGWVGPTCEERSCHSHCTEHGQCKDGKCECSPGWEGDHCTIAHYLDAVRDGCPGLCFGNGRCTLDQNGWHCVCQVGWSGTGCNVVMEMLCGDNLDNDGDGLTDCVDPDCCQQSNCYISPLCQGSPDPLDLIQQSQTLFSQHTSRLFYDRIKFLIGKDSTHVIPPEVSFDSRRACVIRGQVVAIDGTPLVGVNVSFLHHSDYGFTISRQDGSFDLVAIGGISVILIFDRSPFLPEKRTLWLPWNQFIVVEKVTMQRVVSDPPSCDISNFISPNPIVLPSPLTSFGGSCPERGTIVPELQVVQEEIPIPSSFVRLSYLSSRTPGYKTLLRILLTHSTIPVGMIKVHLTVAVEGRLTQKWFPAAINLVYTFAWNKTDIYGQKVWGLAEALVSVGYEYETCPDFILWEQRTVVLQGFEMDASNLGGWSLNKHHILNPQSGIIHKGNGENMFISQQPPVISTIMGNGHQRSVACTNCNGPAHNNKLFAPVALASGPDGSVYVGDFNFVRRIFPSGNSVSILELSTSPAHKYYLAMDPVSESLYLSDTNTRKVYKLKSLVETKDLSKNFEVVAGTGDQCLPFDQSHCGDGGRASEASLNSPRGITVDRHGFIYFVDGTMIRKIDENAVITTVIGSNGLTSTQPLSCDSGMDITQVRLEWPTDLAVNPMDNSLYVLDNNIVLQISENRRVRIIAGRPIHCQVPGIDHFLVSKVAIHSTLESARAISVSHSGLLFIAETDERKVNRIQQVTTNGEIYIIAGAPTDCDCKIDPNCDCFSGDGGYAKDAKMKAPSSLAVSPDGTLYVADLGNVRIRTISRNQAHLNDMNIYEIASPADQELYQFTVNGTHLHTLNLITRDYVYNFTYNSEGDLGAITSSNGNSVHIRRDAGGMPLWLVVPGGQVYWLTISSNGVLKRVSAQGYNLALMTYPGNTGLLATKSNENGWTTVYEYDPEGHLTNATFPTGEVSSFHSDLEKLTKVELDTSNRENVLMSTNLTATSTIYILKQENTQSTYRVNPDGSLRVTFASGMEIGLSSEPHILAGAVNPTLGKCNISLPGEHNANLIEWRQRKEQNKGNVSAFERRLRAHNRNLLSIDFDHITRTGKIYDDHRKFTLRILYDQTGRPILWSPVSRYNEVNITYSPSGLVTFIQRGTWNEKMEYDQSGKIISRTWADGKIWSYTYLEKSVMLLLHSQRRYIFEYDQPDCLLSVTMPSMVRHSLQTMLSVGYYRNIYTPPDSSTSFIQDYSRDGRLLQTLHLGTGRRVLYKYTKQARLSEVLYDTTQVTLTYEESSGVIKTIHLMHDGFICTIRYRQTGPLIGRQIFRFSEEGLVNARFDYSYNNFRVTSMQAVINETPLPIDLYRYVDVSGRTEQFGKFSVINYDLNQVITTTVMKHTKIFSANGQVIEVQYEILKAIAYWMTIQYDNVGRMVICDIRVGVDANITRYFYEYDADGQLQTVSVNDKTQWRYSYDLNGNINLLSHGKSARLTPLRYDLRDRITRLGEIQYKMDEDGFLRQRGNDIFEYNSNGLLQKAYNKASGWTVQYYYDGLGRRVASKSSLGQHLQFFYADLTNPIRVTHLYNHTSSEITSLYYDLQGHLIAMELSSGEEYYVACDNTGTPLAVFSSRGQVIKEILYTPYGDIYHDTYPDFQVIIGFHGGLYDFLTKLVHLGQRDYDVVAGRWTTPNHHIWKQLNLLPKPFNLYSFENNYPVGKIQDVAKYTTDIRSWLELFGFQLHNVLPGFPKPELENLELTYELLRLQTKTQEWDPGKTILGIQCELQKQLRNFISLDQLPMTPRYNDGRCLEGGKQPRFAAVPSVFGKGIKFAIKDGIVTADIIGVANEDSRRLAAILNNAHYLENLHFTIEGRDTHYFIKLGSLEEDLVLIGNTGGRRILENGVNVTVSQMTSVLNGRTRRFADIQLQHGALCFNIRYGTTVEEEKNHVLEIARQRAVAQAWTKEQRRLQEGEEGIRAWTEGEKQQLLSTGRVQGYDGYFVLSVEQYLELSDSANNIHFMRQSEIGRR

SEQ ID NO: 509 - protein, 516 aa, Homo sapiens
MEPAVSLAVCALLFLLWVRLKGLEFVLIHQRWVFVCLFLLPLSLIFDIYYYVRAWVVFKLSSAPRLHEQRVRDIQKQVREWKEQGSKTFMCTGRPGWLTVSLRVGKYKKTHKNIMINLMDILEVDTKKQIVRVEPLVTMGQVTALLTSIGWTLPVLPELDDLTVGGLIMGTGIESSSHKYGLFQHICTAYELVLADGSFVRCTPSENSDLFYAVPWSCGTLGFLVAAEIRIIPAKKYVKLRFEPVRGLEAICAKFTHESQRQENHFVEGLLYSLDEAVIMTGVMTDEAEPSKLNSIGNYYKPWFFKHVENYLKTNREGLEYIPLRHYYHRHTRSIFWELQDIIPFGNNPIFRYLFGWMVPPKISLLKLTQGETLRKLYEQHHVVQDMLVPMKCLQQALHTFQNDIHVYPIWLCPFILPSQPGLVHPKGNEAELYIDIGAYGEPRVKHFEARSCMRQLEKFVRSVHGFQMLYADCYMNREEFWEMFDGSLYHKLREKLGCQDAFPEVYDKICKAARH

SEQ ID NO: 510 - protein, 904 aa, Homo sapiens
MGLPEPGPLRLLALLLLLLLLLLLQLQHLAAAAADPLLGGQGPAKDCEKDQFQCRNERCIPSVWRCDEDDDCLDHSDEDDCPKKTCADSDFTCDNGHCIHERWKCDGEEECPDGSDESEATCTKQVCPAEKLSCGPTSHKCVPASWRCDGEKDCEGGADEAGCATLCAPHEFQCGNRSCLAAVFVCDGDDDCGDGSDERGCADPACGPREFRCGGDGGGACIPERWVCDRQFDCEDRSDEAAELCGRPGPGATSAPAACATASQFACRSGECVHLGWRCDGDRDCKDKSDEADCPLGTCRGDEFQCGDGTCVLAIKHCNQEQDCPDGSDEAGCLQGLNECLHNNGGCSHICTDLKIGFECTCPAGFQLLDQKTCGDIDECKDPDACSQICVNYKGYFKCECYPGYEMDLLTKNCKAAAGKSPSLIFTNRHEVRRIDLVKRNYSRLIPMLKNVVALDVEVATNRIYWCDLSYRKIYSAYMDKASDPKEQEVLIDEQLHSPEGLAVDWVHKHIYWTDSGNKTISVATVDGGRRRTLFSRNLSEPRAIAVDPLRGFMYWSDWGDQAKIEKSGLNGVDRQTLVSDNIEWPNGITLDLLSQRLYWVDSKLHQLSSIDFSGGNRKTLISSTDFLSHPFGIAVFEDKVFWTDLENEAIFSANRLNGLEISILAENLNNPHDIVIFHELKQPRAPDACELSVQPNGGCEYLCLPAPQISSHSPKYTCACPDTMWLGPDMKRCYRAPQSTSTTTLASTMTRTVPATTRAPGTTVHRSTYQNHSTETPSLTAAVPSSVSVPRAPSISPSTLSPATSNHSQHYANEDSKMGSTVTAAVIGIIVPIVVIALLCMSGYLIWRNWKRKNTKSMNFDNPVYRKTTEEEDEDELHIGRTAQIGHVYPARVALSLEDDGLP

SEQ ID NO: 511 - protein, 2435 aa, Homo sapiens
MGFLHQLQLLLWKNVTLKRRSPWVLAFEIFIPLVLFFILLGLRQKKPTISVKEAFYTAAPLTSAGILPVMQSLCPDGQRDEFGFLQYANSTVTQLLERLDRVVEEGNLFDPARPSLGSELEALRQHLEALSAGPGTSGSHLDRSTVSSFSLDSVARNPQELWRFLTQNLSLPNSTAQALLAARVDPPEVYHLLFGPSSALDSQSGLHKGQEPWSRLGGNPLFRMEELLLAPALLEQLTCTPGSGELGRILTVPESQKGALQGYRDAVCSGQAAARARRFSGLSAELRNQLDVAKVSQQLGLDAPNGSDSSPQAPPPRRLQALLGDLLDAQKVLQDVDVLSALALLLPQGACTGRTPGPPASGAGGAANGTGAGAVMGPNATAEEGAPSAAALATPDTLQGQCSAFVQLWAGLQPILCGNNRTIEPEALRRGNMSSLGFTSKEQRNLGLLVHLMTSNPKILYAPAGSEVDRVILKANETFAFVGNVTHYAQVWLNISAEIRSFLEQGRLQQHLRWLQQYVAELRLHPEALNLSLDELPPALRQDNFSLPSGMALLQQLDTIDNAACGWIQFMSKVSVDIFKGFPDEESIVNYTLNQAYQDNVTVFASVIFQTRKDGSLPPHVHYKIRQNSSFTEKTNEIRRAYWRPGPNTGGRFYFLYGFVWIQDMMERAIIDTFVGHDVVEPGSYVQMFPYPCYTRDDFLFVIEHMMPLCMVISWVYSVAMTIQHIVAEKEHRLKEVMKTMGLNNAVHWVAWFITGFVQLSISVTALTAILKYGQVLMHSHVVIIWLFLAVYAVATIMFCFLVSVLYSKAKLASACGGIIYFLSYVPYMYVAIREEVAHDKITAFEKCIASLMSTTAFGLGSKYFALYEVAGVGIQWHTFSQSPVEGDDFNLLLAVTMLMVDAVVYGILTWYIEAVHPGMYGLPRPWYFPLQKSYWLGSGRTEAWEWSWPWARTPRLSVMEEDQACAMESRRFEETRGMEEEPTHLPLVVCVDKLTKVYKDDKKLALNKLSLNLYENQVVSFLGHNGAGKTTTMSILTGLFPPTSGSATIYGHDIRTEMDEIRKNLGMCPQHNVLFDRLTVEEHLWFYSRLKSMAQEEIRREMDKMIEDLELSNKRHSLVQTLSGGMKRKLSVAIAFVGGSRAIILDEPTAGVDPYARRAIWDLILKYKPGRTILLSTHHMDEADLLGDRIAIISHGKLKCCGSPLFLKGTYGDGYRLTLVKRPAEPGGPQEPGLASSPPGRAPLSSCSELQVSQFIRKHVASCLLVSDTSTELSYILPSEAAKKGAFERLFQHLERSLDALHLSSFGLMDTTLEEVFLKVSEEDQSLENSEADVKESRKDVLPGAEGPASGEGHAGNLARCSELTQSQASLQSASSVGSARGDEGAGYTDVYGDYRPLFDNPQDPDNVSLQEVEAEALSRVGQGSRKLDGGWLKVRQFHGLLVKRFHCARRNSKALFSQILLPAFFVCVAMTVALSVPEIGDLPPLVLSPSQYHNYTQPRGNFIPYANEERREYRLRLSPDASPQQLVSTFRLPSGVGATCVLKSPANGSLGPTLNLSSGESRLLAARFFDSMCLESFTQGLPLSNFVPPPPSPAPSDSPASPDEDLQAWNVSLPPTAGPEMWTSAPSLPRLVREPVRCTCSAQGTGFSCPSSVGGHPPQMRVVTGDILTDITGHNVSEYLLFTSDRFRLHRYGAITFGNVLKSIPASFGTRAPPMVRKIAVRRAAQVFYNNKGYHSMPTYLNSLNNAILRANLPKSKGNPAAYGITVTNHPMNKTSASLSLDYLLQGTDVVIAIFIIVAMSFVPASFVVFLVAEKSTKAKHLQFVSGCNPIIYWLANYVWDMLNYLVPATCCVIILFVFDLPAYTSPTNFPAVLSLFLLYGWSITPIMYPASFWFEVPSSAYVFLIVINLFIGITATVATFLLQLFEHDKDLKVVNSYLKSCFLIFPNYNLGHGLMEMAYNEYINEYYAKIGQFDKMKSPFEWDIVTRGLVAMAVEGVVGFLLTIMCQYNFLRRPQRMPVSTKPVEDDVDVASERQRVLRGDADNDMVKIENLTKVYKSRKIGRILAVDRLCLGVRPGECFGLLGVNGAGKTSTFKMLTGDESTTGGEAFVNGHSVLKELLQVQQSLGYCPQCDALFDELTAREHLQLYTRLRGISWKDEARVVKWALEKLELTKYADKPAGTYSGGNKRKLSTAIALIGYPAFIFLDEPTTGMDPKARRFLWNLILDLIKTGRSVVLTSHSMEECEALCTRLAIMVNGRLRCLGSIQHLKNRFGDGYMITVRTKSSQSVKDVVRFFNRNFPEAMLKERHHTKVQYQLKSEHISLAQVFSKMEQVSGVLGIEDYSVSQTTLDNVFVNFAKKQSDNLEQQETEPPSALQSPLGCLLSLLRPRSAPTELRALVADEPEDLDTEDEGLISFEEERAQLSFNTDTLC

SEQ ID NO: 512 - protein, 246 aa, Homo sapiens
MELWPCLAAALLLLLLLVQLSRAAEFYAKVALYCALCFTVSAVASLVCLLRHGGRTVENMSIIGWFVRSFKYFYGLRFEVRDPRRLQEARPCVIVSNHQSILDMMGLMEVLPERCVQIAKRELLFLGPVGLIMYLGGVFFINRQRSSTAMTVMADLGERMVRENVPIVPVVYSSFSSFYNTKKKFFTSGTVTVQVLEAIPTSGLTAADVPALVDTCHRAMRTTFLHISKTPQENGATAGSGVQPAQ

SEQ ID NO: 513 - protein, 278 aa, Homo sapiens
MELWPCLAAALLLLLLLVQLSRAAEFYAKVALYCALCFTVSAVASLVCLLRHGGRTVENMSIIGWFVRSFKYFYGLRFEVRDPRRLQEARPCVIVSNHQSILDMMGLMEVLPERCVQIAKRELLFLGPVGLIMYLGGVFFINRQRSSTAMTVMADLGERMVRENLKVWIYPEGTRNDNGDLLPFKKGAFYLAVQAQVPIVPVVYSSFSSFYNTKKKFFTSGTVTVQVLEAIPTSGLTAADVPALVDTCHRAMRTTFLHISKTPQENGATAGSGVQPAQ

SEQ ID NO: 514 - protein, 456 aa, Homo sapiens [sequence omitted]

SEQ ID NO: 515 - protein, 210 aa, Homo sapiens
MTTSHQPQDRYKAVWLIFFMLGLGTLLPWNFFMTATQYFTNRLDMSQNVSLVTAELSKDAQASAAPAAPLPERNSLSAIFNNVMTLCAMLPLLLFTYLNSFLHQRIPQSVRILGSLVAILLVFLITAILVKVQLDALPFFVITMIKIVLINSFGAILQGSLFGLAGLLPASYTAPIMSGQGLAGFFASVAMICAIASGSELSESAFGYFI

SEQ ID NO: 516 - protein, 229 aa, Homo sapiens
MTTSHQPQDRYKAVWLIFFMLGLGTLLPWNFFMTATQYFTNRLDMSQNVSLVTAELSKDAQASAAPAAPLPERNSLSAIFNNVMTLCAMLPLLLFTYLNSFLHQRIPQSVRILGSLVAILLVFLITAILVKVQLDALPFFVITMIKIVLINSFGAILQGSLFGLAGLLPASYTAPIMSGQGLAGFFASVAMICAIASGSELSESAFGYFITACAVIILTIICYLGLPRL

SEQ ID NO: 517 - protein, 270 aa, Homo sapiens
MHYYRYSNAKVSCWYKYLLFSYNIIFWLAGVVFLGVGLWAWSEKGVLSDLTKVTRMHGIDPVVLVLMVGVVMFTLGFAGCVGALRENICLLNFFCGTIVLIFFLELAVAVLAFLFQDWVRDRFREFFESNIKSYRDDIDLQNLIDSLQKANQCCGAYGPEDWDLNVYFNCSGASYSREKCGVPFSCCVPDPAQKVVNTQCGYDVRIQLKSKWDESIFTKGCIQALESWLPRNIYIVAGVFIAISLLQIFGIFLARTLISDIEAVKAGHHF

SEQ ID NO: 518 - protein, 223 aa, Homo sapiens
MERKVLPCFLCLFQGVLSDLTKVTRMHGIDPVVLVLMVGVVMFTLGFAGCVGALRENICLLNFFCGTIVLIFFLELAVAVLAFLFQDWVRDRFREFFESNIKSYRDDIDLQNLIDSLQKANQCCGAYGPEDWDLNVYFNCSGASYSREKCGVPFSCCVPDPAQKVVNTQCGYDVRIQLKSKWDESIFTKGCIQALESWLPRNIYIVAGVFIAISLLQIFGIFL

SEQ ID NO: 519 - protein, 253 aa, Homo sapiens
MHYYRYSNAKVSCWYKYLLFSYNIIFWGVLSDLTKVTRMHGIDPVVLVLMVGVVMFTLGFAGCVGALRENICLLNFFCGTIVLIFFLELAVAVLAFLFQDWVRDRFREFFESNIKSYRDDIDLQNLIDSLQKANQCCGAYGPEDWDLNVYFNCSGASYSREKCGVPFSCCVPDPAQKVVNTQCGYDVRIQLKSKWDESIFTKGCIQALESWLPRNIYIVAGVFIAISLLQIFGIFLARTLISDIEAVKAGHHF

SEQ ID NO: 520 - protein, 277 aa, Homo sapiens
MVRLPLQCVLWGCLLTAVHPEPPTACREKQYLINSQCCSLCQPGQKLVSDCTEFTETECLPCGESEFLDTWNRETHCHQHKYCDPNLGLRVQQKGTSETDTICTCEEGWHCTSEACESCVLHRSCSPGFGVKQIATGVSDTICEPCPVGFFSNVSSAFEKCHPWTSCETKDLVVQQAGTNKTDVVCGPQDRLRALVVIPIIFGILFAILLVLVFIKKVAKKPTNKAPHPKQEPQEINFPDDLPGSNTAAPVQETLHGCQPVTQEDGKESRISVQERQ

SEQ ID NO: 521 - protein, 579 aa, Homo sapiens
MVGKGAKGMLNGAVPSEATKRDQNLKRGNWGNQIEFVLTSVGYAVGLGNVWRFPYLCYRNGGGAFMFPYFIMLIFCGIPLFFMELSFGQFASQGCLGVWRISPMFKGVGYGMMVVSTYIGIYYNVVICIAFYYFFSSMTHVLPWAYCNNPWNTHDCAGVLDASNLTNGSRPAALPSNLSHLLNHSLQRTSPSEEYWRLYVLKLSDDIGNFGEVRLPLLGCLGVSWLVVFLCLIRGVKSSGKVVYFTATFPYVVLTILFVRGVTLEGAFDGIMYYLTPQWDKILEAKVWGDAASQIFYSLGCAWGGLITMASYNKFHNNCYRDSVIISITNCATSVYAGFVIFSILGFMANHLGVDVSRVADHGPGLAFVAYPEALTLLPISPLWSLLFFFMLILLGLGTQFCLLETLVTAIVDEVGNEWILQKKTYVTLGVAVAGFLLGIPLTSQAGIYWLLLMDNYAASFSLVVISCIMCVAIMYIYGEHSSLRPPATRPLARPLCPAGLLTPHLSRAPELLPGHPDDAGIPTTPLLSDLLALRLSRHHLPPGSGPPPPPPESSSLRVAPGAERAPPPAPTARGSAGA

SEQ ID NO: 522 - protein, 574 aa, Homo sapiens
MFPYFIMLIFCGIPLFFMELSFGQFASQGCLGVWRISPMFKGVGYGMMVVSTYIGIYYNVVICIAFYYFFSSMTHVLPWAYCNNPWNTHDCAGVLDASNLTNGSRPAALPSNLSHLLNHSLQRTSPSEEYWRLYVLKLSDDIGNFGEVRLPLLGCLGVSWLVVFLCLIRGVKSSGKVVYFTATFPYVVLTILFVRGVTLEGAFDGIMYYLTPQWDKILEAKVWGDAASQIFYSLGCAWGGLITMASYNKFHNNCYRDSVIISITNCATSVYAGFVIFSILGFMANHLGVDVSRVADHGPGLAFVAYPEALTLLPISPLWSLLFFFMLILLGLGTQFCLLETLVTAIVDEVGNEWILQKKTYVTLGVAVAGFLLGIPLTSQAGIYWLLLMDNYAASFSLVVISCIMCVAIMYIYGHRNYFQDIQMMLGFPPPLFFQICWRFVSPAIIFLQAQVHRRLPQNPLHFASLPERNVLLHQLPQRGGVPEHDPPTPPSPARTYGPQVRVREVPRARRQRSPNPAPLWAPPSPKPHPCSAAGPLGWDCPFRNCQSLALSSARLLADSDAGGPETRQWEPGP

SEQ ID NO: 523 - protein, 633 aa, Homo sapiens
MVGKGAKGMLNGAVPSEATKRDQNLKRGNWGNQIEFVLTSVGYAVGLGNVWRFPYLCYRNGGGAFMFPYFIMLIFCGIPLFFMELSFGQFASQGCLGVWRISPMFKGVGYGMMVVSTYIGIYYNVVICIAFYYFFSSMTHVLPWAYCNNPWNTHDCAGVLDASNLTNGSRPAALPSNLSHLLNHSLQRTSPSEEYWRLYVLKLSDDIGNFGEVRLPLLGCLGVSWLVVFLCLIRGVKSSGKVVYFTATFPYVVLTILFVRGVTLEGAFDGIMYYLTPQWDKILEAKVWGDAASQIFYSLGCAWGGLITMASYNKFHNNCYRDSVIISITNCATSVYAGFVIFSILGFMANHLGVDVSRVADHGPGLAFVAYPEALTLLPISPLWSLLFFFMLILLGLGTQFCLLETLVTAIVDEVGNEWILQKKTYVTLGVAVAGFLLGIPLTSQAGIYWLLLMDNYAASFSLVVISCIMCVAIMYIYGHRNYFQDIQMMLGFPPPLFFQICWRFVSPAIIFFILVFTVIQYQPITYNHYQYPGWAVAIGFLMALSSVLCIPLYAMFRLCRTDGDTLLQRLKNATKPSRDWGPALLEHRTGRYAPTIAPSPEDGFEVQPLHPDKAQIPIVGSNGSSRLQDSRI

SEQ ID NO: 524 - protein, 377 aa, Homo sapiens
MPSGCRCLHLVCLLCILGAPGQPVRADDCSSHCDLAHGCCAPDGSCRCDPGWEGLHCERCVRMPGCQHGTCHQPWQCICHSGWADEHICTTQSPCQNGGQCMYDGGGEYHCVCLPGFHGRDCERKAGPCEQAGSPCRNGGQCQDDQGFALNFTCRCLVGFVGARCEVNVDDCLMRPCANGATCLDGINRFSCLCPEGFAGRFCTINLDDCASRPCQRGARCRDRVHDFDCLCPSGYGGKTCELVLPVPDPPTTVDTPLGPTSAVVVPATGPAPHSAGAGLLRISVKEVVRRQEAGLGEPSLVALVVFGALTAALVLATVLLTLRAWRRGVCPPGPCCYPAPHYAPACQDQECQVSMLPAGLPLPRDLPPEPGKTTAL

SEQ ID NO: 525 - protein, 198 aa, Homo sapiens
MAPARLFALLLFFVGGVAESIRETEVIDPQDLLEGRYFSGALPDDEDVVGPGQESDDFELSGSGDLDDLEDSMIGPEVVHPLVPLDNHIPERAGSGSQVPTEPKKLEENEVIPKRISPVEESEDVSNKVSMSSTVQGSNIFERTEVLAALIVGGIVGILFAVFLILLLMYRMKKKDEGSYDLGKKPIYKKAPTNEFYA

SEQ ID NO: 526 - protein, 543 aa, Homo sapiens
MAKGEGAESGSAAGLLPTSILQSTERPAQVKKEPKKKKQQLSVCNKLCYALGGAPYQVTGCALGFFLQIYLLDVAQKDEEVVFCFSSFQVGPFSASIILFVGRAWDAITDPLVGLCISKSPWTCLGRLMPWIIFSTPLAVIAYFLIWFVPDFPHGQTYWYLLFYCLFETMVTCFHVPYSALTMFISTEQTERDSATAYRMTVEVLGTVLGTAIQGQIVGQADTPCFQDLNSSTVASQSANHTHGTTSHRETQKAYLLAAGVIVCIYIICAVILILGVREQREPYEAQQSEPIAYFRGLRLVMSHGPYIKLITGFLFTSLAFMLVEGNFVLFCTYTLGFRNEFQNLLLAIMLSATLTIPIWQWFLTRFGKKTAVYVGISSAVPFLILVALMESNLIITYAVAVAAGISVAAAFLLPWSMLPDVIDDFHLKQPHFHGTEPIFFSFYVFFTKFASGVSLGISTLSLDFAGYQTRGCSQPERVKFTLNMLVTMAPIVLILLGLLLFKMYPIDEERRRQNKKALQALRDEASSSGCSETDSTELASIL

SEQ ID NO: 527 - protein, 530 aa, Homo sapiens
MAKGEGAESGSAAGLLPTSILQSTERPAQVKKEPKKKKQQLSVCNKLCYALGGAPYQVTGCALGFFLQIYLLDVAQVGPFSASIILFVGRAWDAITDPLVGLCISKSPWTCLGRLMPWIIFSTPLAVIAYFLIWFVPDFPHGQTYWYLLFYCLFETMVTCFHVPYSALTMFISTEQTERDSATAYRMTVEVLGTVLGTAIQGQIVGQADTPCFQDLNSSTVASQSANHTHGTTSHRETQKAYLLAAGVIVCIYIICAVILILGVREQREPYEAQQSEPIAYFRGLRLVMSHGPYIKLITGFLFTSLAFMLVEGNFVLFCTYTLGFRNEFQNLLLAIMLSATLTIPIWQWFLTRFGKKTAVYVGISSAVPFLILVALMESNLIITYAVAVAAGISVAAAFLLPWSMLPDVIDDFHLKQPHFHGTEPIFFSFYVFFTKFASGVSLGISTLSLDFAGYQTRGCSQPERVKFTLNMLVTMAPIVLILLGLLLFKMYPIDEERRRQNKKALQALRDEASSSGCSETDSTELASIL

SEQ ID NO: 528 - protein, 245 aa, Homo sapiens
MASPSRRLQTKPVITCFKSVLLIYTFIFWITGVILLAVGIWGKVSLENYFSLLNEKATNVPFVLIATGTVIILLGTFGCFATCRASAWMLKLYAMFLTLVFLVELVAAIVGFVFRHEIKNSFKNNYEKALKQYNSTGDYRSHAVDKIQNTLHCCGVTDYRDWTDTNYYSEKGFPKSCCKLEDCTPQRDADKVNNEGCFIKVMTIIESEMGVVAGISFGVACFQLIGIFLAYCLSRAITNNQYEIV

SEQ ID NO: 529 - protein, 214 aa, Homo sapiens
MAFQQLSGVNAVMFYAETIFEEAKFKDSSLASVVVGVIQVLFTAVAALIMDRAGRRLLLVLSGVVMVFSTSAFGAYFKLTQGGPGNSSHVAISAPVSAQPVDASVGLAWLAVGSMCLFIAGFAVGWGPIPWLLMSEIFPLHVKGVATGICVLTNWLMAFLVTKEFSSLMEVLRPYGAFWLASAFCIFSVLFTLFCVPETKGKTLEQITAHFEGR

SEQ ID NO: 530 - protein, 411 aa, Homo sapiens
MTPEDPEETQPLLGPPGGSAPRGRRVFLAAFAAALGPLSFGFALGYSSPAIPSLQRAAPPAPRLDDAAASWFGAVVTLGAAAGGVLGGWLVDRAGRKLSLLLCSVPFVAGFAVITAAQDVWMLLGGRLLTGLACGVASLVAPVYISEIAYPAVRGLLGSCVQLMVVVGILLAYLAGWVLEWRWLAVLGCVPPSLMLLLMCFMPETPRFLLTQHRRQEAMAALRFLWGSEQGWEDPPIGAEQSFHLALLRQPGIYKPFIIGVSLMAFQQLSGVNAVMFYAETIFEEAKFKDSSLASVVVGVIQVLFTAVAALIMDRAGRRLLLVLSGVVMVFSTSAFGAYFKLTQGGPGNSSHVAISAPVSAQPVDASVGLAWLAVGSMCLFIAGGPQALWSLLACLRFLHLQCPFHFVLCP

SEQ ID NO: 531 - protein, 477 aa, Homo sapiens
MTPEDPEETQPLLGPPGGSAPRGRRVFLAAFAAALGPLSFGFALGYSSPAIPSLQRAAPPAPRLDDAAASWFGAVVTLGAAAGGVLGGWLVDRAGRKLSLLLCSVPFVAGFAVITAAQDVWMLLGGRLLTGLACGVASLVAPVYISEIAYPAVRGLLGSCVQLMVVVGILLAYLAGWVLEWRWLAVLGCVPPSLMLLLMCFMPETPRFLLTQHRRQEAMAALRFLWGSEQGWEDPPIGAEQSFHLALLRQPGIYKPFIIGVSLMAFQQLSGVNAVMFYAETIFEEAKFKDSSLASVVVGVIQVLFTAVAALIMDRAGRRLLLVLSGVVMVFSTSAFGAYFKLTQGGPGNSSHVAISAPVSAQPVDASVGLAWLAVGSMCLFIAGFAVGWGPIPWLLMSEIFPLHVKGVATGICVLTNWLMAFLVTKEFSSLMEVLRPYGAFWLASAFCIFSVLFTLFCVPETKGKTLEQITAHFEGR

SEQ ID NO: 532 - protein, 224 aa, Homo sapiens
MSILLPNMAEFDTISELEEEEEEEAATSSSSPSSSSSVSGPDDDEEDEEEEEEEEEEEEEEEEEEEEEAPPPPRVVSEEHLRRYAPDPVLVRGAGHITVFGLSNKFDTEFPSVLTGKVAPEEFKTSIGRVNACLKKALPVNVKWLLCGCLCCCCTLGCSLWPVICLNKRTRRSIQKLIEWENNRLYHKLALHWKLTKRKCETSNMMEYVILIEFLPKYPIFRPD

SEQ ID NO: 533 - protein, 204 aa, Homo sapiens
MSILLPNMAEFDTISELEEEEEEEAATSSSSPSSSSSVSGPDDDEEDEEEEEEEEEEEEEEEEEEEEEAPPPPRVVSEEHLRRYAPDPVLVRGAGHITVFGLSNKFDTEFPSVLTGKVAPEEFKTSIGRVNACLKKALPVNVKWLLCGCLCCCCTLGCSLWPVICLNKRTRRSIQKLIEWENNRLYHKVILIEFLPKYPIFRPD

SEQ ID NO: 534 - protein, 463 aa, Homo sapiens
MHGSCSFLMLLLPLLLLLVATTGPVGALTDEEKRLMVELHNLYRAQVSPTASDMLHMRWDEELAAFAKAYARQCVWGHNKERGRRGENLFAITDEGMDVPLAMEEWHHEREHYNLSAATCSPGQMCGHYTQVVWAKTERIGCGSHFCEKLQGVEETNIELLVCNYEPPGNVKGKRPYQEGTPCSQCPSGYHCKNSLCEPIGSPEDAQDLPYLVTEAPSFRATEASDSRKMGTPSSLATGIPAFLVTEVSGSLATKALPAVETQAPTSLATKDPPSMATEAPPCVTTEVPSILAAHSLPSLDEEPVTFPKSTHVPIPKSADKVTDKTKVPSRSPENSLDPKMSLTGARELLPHAQEEAEAEAELPPSSEVLASVFPAQDKPGELQATLDHTGHTSSKSLPNFPNTSATANATGGRALALQSSLPGAEGPDKPSVVSGLNSGPGHVWGPLLGLLLLPPLVLAGIF

SEQ ID NO: 535 - protein, 108 aa, Homo sapiens
MSLTSSSSVRVEWIAAVTIAAGTAAIGYLAYKRFYVKDHRNKAMINLHIQKDNPKIVHAFDMEDLGDKAVYCRCWRSKKFPFCDGAHTKHNEETGDNVGPLIIKKKET

SEQ ID NO: 536 - protein, 747 aa, Homo sapiens
MGRGPWDAGPSRRLLPLLLLLGLARGAAGAPGPDGLDVCATCHEHATCQQREGKKICICNYGFVGNGRTQCVDKNECQFGATLVCGNHTSCHNTPGGFYCICLEGYRATNNNKTFIPNDGTFCTDIDECEVSGLCRHGGRCVNTHGSFECYCMDGYLPRNGPEPFHPTTDATSCTEIDCGTPPEVPDGYIIGNYTSSLGSQVRYACREGFFSVPEDTVSSCTGLGTWESPKLHCQEINCGNPPEMRHAILVGNHSSRLGGVARYVCQEGFESPGGKITSVCTEKGTWRESTLTCTEILTKINDVSLFNDTCVRWQINSRRINPKISYVISIKGQRLDPMESVREETVNLTTDSRTPEVCLALYPGTNYTVNISTAPPRRSMPAVIGFQTAEVDLLEDDGSFNISIFNETCLKLNRRSRKVGSEHMYQFTVLGQRWYLANFSHATSFNFTTREQVPVVCLDLYPTTDYTVNVTLLRSPKRHSVQITIATPPAVKQTISNISGFNETCLRWRSIKTADMEEMYLFHIWGQRWYQKEFAQEMTFNISSSSRDPEVCLDLRPGTNYNVSLRALSSELPVVISLTTQITEPPLPEVEFFTVHRGPLPRLRLRKAKEKNGPISSYQVLVLPLALQSTFSCDSEGASSFFSNASDADGYVAAELLAKDVPDDAMEIPIGDRLYYGEYYNAPLKRGSDYCIILRITSEWNKVRRHSCAVWAQVKDSSLMLLQMAGVGLGSLAVVIILTFLSFSAV

SEQ ID NO: 537 - protein, 556 aa, Homo sapiens
MGRARPGQRGPPSPGPAAQPPAPPRRRARSLALLGALLAAAAAAAVRVCARHAEAQAAARQELALKTLGTDGLFLFSSLDTDGDMYISPEEFKPIAEKLTGSTPAASCEEEELPPDPSEETLTIEARFQPLLPETMTKSKDGFLGVSRLALSGLRNWTAAASPSAVFATRHFQPFLPPPGQELGEPWWIIPSELSMFTGYLSNNRFYPPPPKGKEVIIHRLLSMFHPRPFVKTRFAPQGAVACLTAISDFYYTVMFRIHAEFQLSEPPDFPFWFSPAQFTGHIILSKDATHVRDFRLFVPNHRSLNVDMEWLYGASESSNMEVDIGYIPQMELEATGPSVPSVILDEDGSMIDSHLPSGEPLQFVFEEIKWQQELSWEEAARRLEVAMYPFKKVSYLPFTEAFDRAKAENKLVHSILLWGALDDQSCUGSGRTLRETVLESSPILTLLNESFISTWSLVKELEELQNNQENSSHQKLAGLHLEKYSFPVEMMICLPNGTVVHHINANYFLDITSVKPEEIESNLFSFSSTFEDPSTATYMQFLKEGLRRGLPLLQP

SEQ ID NO: 538 - protein, 530 aa, Homo sapiens
MTSSLQRPWRVPWLPWTILLVSTAAASQNQERLCAFKDPYQQDLGIGESRISHENGTILCSKGSTCYGLWEKSKGDINLVKQGCWSHIGDPQECHYEECVVTTTPPSIQNGTYRFCCCSTDLCNVNFTENFPPPDTTPLSPPHSFNRDETIIIALASVSVLAVLIVALCFGYRMLTGDRKQGLHSMNMMEAAASEPSLDLDNLKLLELIGRGRYGAVYKGSLDERPVAVKVFSFANRQNFINEKNIYRVPLMEHDNIARFIVGDERVTADGRMEYLLVMEYYPNGSLCKYLSLHTSDWVSSCRLAHSVTRGLAYLHTELPRGDHYKPAISHRDLNSRNVLVKNDGTCVISDFGLSMRLTGNRLVRPGEEDNAAISEVGTIRYMAPEVLEGAVNLRDCESALKQVDMYALGLIYWEIFMRCTDLFPGESVPEYQMAFQTEVGNHPTFEDMQVLVSREKQRPKFPEAWKENSLAVRSLKETIEDCWDQDAEARLTAQCAEERMAELMMIWERNKSVSPTVNPMSTAMQNERR

SEQ ID NO: 539 - protein, 1038 aa, Homo sapiens
MTSSLQRPWRVPWLPWTILLVSTAAASQNQERLCAFKDPYQQDLGIGESRISHENGTILCSKGSTCYGLWEKSKGDINLVKQGCWSHIGDPQECHYEECVVTTTPPSIQNGTYRFCCCSTDLCNVNFTENFPPPDTTPLSPPHSFNRDETIIIALASVSVLAVLIVALCFGYRMLTGDRKQGLHSMNMMEAAASEPSLDLDNLKLLELIGRGRYGAVYKGSLDERPVAVKVFSFANRQNFINEKNIYRVPLMEHDNIARFIVGDERVTADGRMEYLLVMEYYPNGSLCKYLSLHTSDWVSSCRLAHSVTRGLAYLHTELPRGDHYKPAISHRDLNSRNVLVKNDGTCVISDFGLSMRLTGNRLVRPGEEDNAAISEVGTIRYMAPEVLEGAVNLRDCESALKQVDMYALGLIYWEIFMRCTDLFPGESVPEYQMAFQTEVGNHPTFEDMQVLVSREKQRPKFPEAWKENSLAVRSLKETIEDCWDQDAEARLTAQCAEERMAELMMIWERNKSVSPTVNPMSTAMQNERNLSHNRRVPKIGPYPDYSSSSYIEDSIHHTDSIVKNISSEHSMSSTPLTIGEKNRNSINYERQQAQARIPSPETSVTSLSTNTTTTNTTGLTPSTGMTTISEMPYPDETNLHTTNVAQSIGPTPVCLQLTEEDLETNKLDPKEVDKNLKESSDENLMEHSLKQFSGPDPLSSTSSSLLYPLIKLAVEATGQQDFTQTANGQACLIPDVLPTQIYPLPKQQNLPKRPTSLPLNTKNSTKEPRLKFGSKHKSNLKQVETGVAKMNTINAAEPHVVTVTMNGVAGRNHSVNSHAATTQYANGTVLSGQTTNIVTHRAQEMLQNQFIGEDTRLNINSSPDEHEPLLRREQQAGHDEGVLDRLVDRRERPLEGGRTNSNNNNSNPCSEQDVLAQGVPSTAADPGPSKPRRAQRPNSLDLSATNVLDGSSIQIGESTQDGKSGSGEKIKKRVKTPYSLKRWRPSTWVISTESLDCEVNNNGSNRAVHSKSSTAVYLAEGGTATTMVSKDIGMNCL

SEQ ID NO: 540 - protein, 2261 aa, Homo sapiens
MACWPQLRLLLWKNLTFRRRQTCQLLLEVAWPLFIFLILISVRLSYPPYEQHECHFPNKAMPSAGTLPWVQGIICNANNPCFRYPTPGEAPGVVGNFNKSIVARLFSDARRLLLYSQKDTSMKDMRKVLRTLQQIKKSSSNLKLQDFLVDNETFSGFLYHNLSLPKSTVDKMLRADVILHKVFLQGYQLHLTSLCNGSKSEEMIQLGDQEVSELCGLPREKLAAAERVLRSNMDILKPILRTLNSTSPFPSKELAEATKTLLHSLGTLAQELFSMRSWSDMRQEVMFLTNVNSSSSSTQIYQAVSRIVCGHPEGGGLKIKSLNWYEDNNYKALFGGNGTEEDAETFYDNSTTPYCNDLMKNLESSPLSRIIWKALKPLLVGKILYTPDTPATRQVMAEVNKTFQELAVFHDLEGMWEELSPKIWTFMENSQEMDLVRMLLDSRDNDHFWEQQLDGLDWTAQDIVAFLAKHPEDVQSSNGSVYTWREAFNETNQAIRTISRFMECVNLNKLEPIATEVWLINKSMELLDERKFWAGIVFTGITPGSIELPHHVKYKIRMDIDNVERTNKIKDGYWDPGPRADPFEDMRYVWGGFAYLQDVVEQAIIRVLTGTEKKTGVYMQQMPYPCYVDDIFLRVMSRSMPLFMTLAWIYSVAVIIKGIVYEKEARLKETMRIMGLDNSILWFSWFISSLIPLLVSAGLLVVILKLGNLLPYSDPSVVFVFLSVFAVVTILQCFLISTLFSRANLAAACGGIIYFTLYLPYVLCVAWQDYVGFTLKIFASLLSPVAFGFGCEYFALFEEQGIGVQWDNLFESPVEEDGFNLTTSVSMMLFDTFLYGVMTWYIEAVFPGQYGIPRPWYFPCTKSYWFGEESDEKSHPGSNQKRISEICMEEEPTHLKLGVSIQNLVKVYRDGMKVAVDGLALNFYEGQITSFLGHNGAGKTTTMSILTGLFPPTSGTAYILGKDIRSEMSTIRQNLGVCPQHNVLFDMLTVEEHIWFYARLKGLSEKHVKAEMEQMALDVGLPSSKLKSKTSQLSGGMQRKLSVALAFVGGSKVVILDEPTAGVDPYSRRGIWELLLKYRQGRTIILSTHHMDEADVLGDRIAIISHGKLCCVGSSLFLKNQLGTGYYLTLVKKDVESSLSSCRNSSSTVSYLKKEDSVSQSSSDAGLGSDHESDTLTIDVSAISNLIRKHVSEARLVEDIGHELTYVLPYEAAKEGAFVELFHEIDDRLSDLGISSYGISETTLEEIFLKVAEESGVDAETSDGTLPARRNRRAFGDKQSCLRPFTEDDAADPNDSDIDPESRETDLLSGMDGKGSYQVKGWKLTQQQFVALLWKRLLIARRSRKGFFAQIVLPAVFVCIALVFSLIVPPFGKYPSLELQPWMYNEQYTFVSNDAPEDTGTLELLNALTKDPGFGTRCMEGNPIPDTPCQAGEEEWTTAPVPQTIMDLFQNGNWTMQNPSPACQCSSDKIKKMLPVCPPGAGGLPPPQRKQNTADILQDLTGRNISDYLVKTYVQIIAKSLKNKIWVNEFRYGGFSLGVSNTQALPPSQEVNDAIKQMKKHLKLAKDSSADRFLNSLGRFMTGLDTKNNVKVWFNNKGWHAISSFLNVINNAILRANLQKGENPSHYGITAFNHPLNLTKQQLSEVALMTTSVDVLVSICVIFAMSFVPASFVVFLIQERVSKAKHLQFISGVKPVIYWLSNFVWDMCNYVVPATLVIIIFICFQQKSYVSSTNLPVLALLLLLYGWSITPLMYPASFVFKIPSTAYVVLTSVNLFIGINGSVATFVLELFTDNKLNNINDILKSVFLIFPHFCLGRGLIDMVKNQAMADALERFGENRFVSPLSWDLVGRNLFAMAVEGVVFFLITVLIQYRFFIRPRPVNAKLSPLNDEDEDVRRERQRILDGGGQNDILEIKELTKIYRRKRKPAVDRICVGIPPGECFGLLGVNGAGKSSTFKMLTGDTTVTRGDAFLNKNSILSNIHEVHQNMGYCPQFDAITELLTGREHVEFFALLRGVPEKEVGKVGEWAIRKLGLVKYGEKYAGNYSGGNKRKLSTAMALIGGPPVVFLDEPTTGMDPKARRFLWNCALSVVKEGRSVVLTSHSMEECEALCTRMAIMVNGRFRCLGSVQHLKNRFGDGYTIVVRIAGSNPDLKPVQDFFGLAFPGSVLKEKHRNMLQYQLPSSLSSLARIFSILSQSKKRLHIEDYSVSQTTLDQVFVNFAKDQSDDDHLKDLSLHKNQTVVDVAVLTSFLQDEKVKESYV

SEQ ID NO: 541 - protein, 261 aa, Homo sapiens
MGHEQNQGAALLQMLPLLWLLPHSWAVPEAPTPMWPDDLQNHTFLHTVYCQDGSPSVGLSEAYDEDQLFFFDFSQNTRVPRLPEFADWAQEQGDAPAILFDKEFCEWMIQQIGPKLDGKIPVSRGFPIAEVFTLKPLEFGKPNTLVCFVSNLFPPMLTVNWQHHSVPVEGFGPTFVSAVDGLSFQAFSYLNFTPEPSDIFSCIVTHEIDRYTAIAYWVPRNALPSDLLENVLCGVAFGLGVLGIIVGIVLIIYFRKPCSGD

SEQ ID NO: 542 - protein, 532 aa, Homo sapiens
MAPSFTARIQLFLLRALGFLIGLVGRAALVLGGPKFASKTPRPVTEPLLLLSGMQLAKLIRQRKVKCIDVVQAYINRIKDVNPMINGIVKYRFEEAMKEAHAVDQKLAEKQEDEATLENKWPFLGVPLTVKEAFQLQGMPNSSGLMNRRDAIAKTDATVVALLKGAGAIPLGITNCSELCMWYESSNKIYGRSNNPYDLQHIVGGSSGGEGCTLAAACSVIGVGSDIGGSIRMPAFFNGIFGHKPSPGVVPNKGQFPLAVGAQELFLCTGPMCRYAEDLAPMLKVMAGPGIKRLKLDTKVHLKDLKFYWMEHDGGSFLMSKVDQDLIMTQKKVVVHLETILGASVQHVKLKKMKYSFQLWIAMMSAKGHDGKEPVKFVDLLGDHGKHVSPLWELIKWCLGLSVYTIPSIGLALLEEKLRYSNEKYQKFKAVEESLRKELVDMLGDDGVFLYPSHPTVAPKHHVPLTRPFNFAYTGVFSALGLPVTQCPLGLNAKGLPLGIQVVAGPFNDHLTLAVAQYLEKTFGGWVCPGKF

SEQ ID NO: 543 - protein, 269 aa, Homo sapiens
MSWKKALRIPGDLRVATVTLMLAMLSSLLAEGRDSPEDFVFQFKGMCYFTNGTERVRLVTRYIYNREEYARFDSDVGVYRAVTPQGRPDAEYWNSQKEVLEGTRAELDTVCRHNYEVAFRGILQRRVEPTVTISPSRTEALNHHNLLVCSVTDFYPGQIKVRWFRNDQEETAGVVSTPLIRNGDWTFQILVMLEMTPQRGDVYTCHVEHPSLQSPITVEWRAQSESAQSKMLSGVGGFVLGLIFLGLGLIIRQRSQKGPQGPPPAGLLH

SEQ ID NO: 544 - protein, 229 aa, Homo sapiens
MAISGVPVLGFFIIAVLMSAQESWAIKEEHVIIQAEFYLNPDQSGEFMFDFDGDEIFHVDMAKKETVWRLEEFGRFASFEAQGALANIAVDKANLEIMTKRSNYTPITNDKFTPPVVNVTWLRNGKPVTTGVSETVFLPREDHLFRKFHYLPFLPSTEDVYDCRVEHWGLDEPLLKHWEFDAPSPLPETTENVVCALGLTVGLVGIIIGTIFIIKGLRKSNAAERRGPL

SEQ ID NO: 545 - protein, 503 aa, Homo sapiens
MEAAVAAPRPRLLLLVLAAAAAAAAALLPGATALQCFCHLCTKDNFTCVTDGLCFVSVTETTDKVIHNSMCIAEIDLIPRDRPFVCAPSSKTGSVTTTYCCNQDHCNKIELPTTVKSSPGLGPVELAAVIAGPVCFVCISLMLMVYICHNRTVIHHRVPNEEDPSLDRPFISEGTTLKDLIYDMTTSGSGSGLPLLVQRTIARTIVLQESIGKGRFGEVWRGKWRGEEVAVKIFSSREERSWFREAEIYQTVMLRHENILGFIAADNKDNGTWTQLWLVSDYHEHGSLFDYLNRYTVTVEGMIKLALSTASGLAHLHMEIVGTQGKPAIAHRDLKSKNILVKKNGTCCIADLGLAVRHDSATDTIDIAPNHRVGTKRYMAPEVLDDSINMKHFESFKRADIYAMGLVFWEIARRCSIGGIHEDYQLPYYDLVPSDPSVEEMRKVVCEQKLRPNIPNRWQSCEALRVMAKIMRECWYANGAARLTALRIKKTLSQLSQQEGIKM

SEQ ID NO: 546 - protein, 343 aa, Homo sapiens
MWPNGSSLGPCFRPTNITLEERRLIASPWFAASFCVVGLASNLLALSVLAGARQGGSHTRSSFLTFLCGLVLTDFLGLLVTGTIVVSQHAALFEWHAVDPGCRLCRFMGVVMIFFGLSPLLLGAAMASERYLGITRPFSRPAVASQRRAWATVGLVWAAALALGLLPLLGVGRYTVQYPGSWCFLTLGAESGDVAFGLLFSMLGGLSVGLSFLLNTVSVATLCHVYHGQEAAQQRPRDSEVEMMAQLLGIMVVASVCWLPLLVFIAQTVLRNPPAMSPAGQLSRTTEKELLIYLRVATWNQILDPWVYILFRRAVLRRLQPRLSTRPRSLSLQPQLTQRSGLQ

SEQ ID NO: 547 - protein, 352 aa, Homo sapiens
KAEVGHGYMDRPCLNPADPDCPATAPNKNSTKPLDMALVLNGGCHGLSRKYMHWQEELIVGGTVKNSTGKLVSAHALQTMFQLMTPKQMYEHFKGYEYVSHINWNEDKAAAILEAWQRTYVEVVHQSVAQNSTQKVLSFTTTTLDDILKSFSDVSVIRVASGYLLMVLPFLALGVGVDDVFLLAHAFSETGQNKRIPFEDRTGECLKRTGASVALTSISNVTAFFMAALIPIPALRAFSLQAAVVVVFNFAMVLLIFPAILSMDLYRREDRRLDIFCCFTSPCVSRVIQVEPQAYTDTHDNTRYSPPPPYSSHSFAHETQITMQSTVQLRTEYDPHTHVYYTTAEPRSEISV

SEQ ID NO: 548 - protein, 183 aa, Homo sapiens
MTDQTYCDRLVQDTPFLTGHGRLSEQQVDRIILQLNRYYPQILTNKEAEKFRNPKASLRVRLCDLLSHLQRSGERDCQEFYRALYIHAQPLHSRLPSRHALQNSDCTELDSGSQSGELSNRGPMSFLAGLGLAVGLALLLYCYPPDPKGLPGTRRVLGFSPVIIDRHVSRYLLAFLADDLGGL

SEQ ID NO: 549 - protein, 242 aa, Homo sapiens
MKNIGLVMEWEIPEIICTCAKLRLPPQATFQVLRGNGASVGTVLMFRCPSNHQMVGSGLLTCTWKGSIAEWSSGSPVCKLVPPHETFGFKVAVIASIVSCAIILLMSMAFLTCCLLKCVKKSKRRRSNRSAQLWSQLKDEDLETVQAAYLGLKHFNKPVSGPSQAHDNHSFTTDHGESTSKLASVTRSVDKDPGIPRALSLSGSSSSPQAQVMVHMANPRQPLPASGLATGMPQQPAAYALG

SEQ ID NO: 550 - protein, 255 aa, Homo sapiens
MRWAAATLRGKARPRGRAGVTTPAPGNRTGTCAKLRLPPQATFQVLRGNGASVGTVLMFRCPSNHQMVGSGLLTCTWKGSIAEWSSGSPVCKLVPPHETFGFKVAVIASIVSCAIILLMSMAFLTCCLLKCVKKSKRRRSNRSAQLWSQLKDEDLETVQAAYLGLKHFNKPVSGPSQAHDNHSFTTDHGESTSKLASVTRSVDKDPGIPRALSLSGSSSSPQAQVMVHMANPRQPLPASGLATGMPQQPAAYALG

SEQ ID NO: 551 - protein, 1099 aa, Homo sapiens
MQSLGVSGNRKVMQSGTCEPFQSLSHQRNDEEAVVDRGGTRSILKTHFEKEDLEGHRTLFIGVHVPLGGRKSHRRHRHRGHKHRKRDRERDSGLEDGRESPSFDTPSQRVQFILGTEDDDEEHIPHDLFTELDEICWREGEDAEWRETARWLKFEEDVEDGGERWSKPYVATLSLHSLFELRSCILNGTVLLDMHANTLEEIADMVLDQQVSSGQLNEDVRHRVHEALMKQHHHQNQKKLTNRIPIVRSFADIGKKQSEPNSMDKNAGQVVSPQSAPACVENKNDVSRENSTVDFSKVDLHFMKKIPPGAEASNILVGELEFLDRTVVAFVRLSPAVLLQGLAEVPIPTRFLFILLGPLGKGQQYHEIGRSIATLMTDEVFHDVAYKAKDRNDLVSGIDEFLDQVTVLPPGEWDPSIRIEPPKNVPSQEKRKIPAVPNGTAAHGEAEPHGGHSGPELQRTGRIFGGLILDIKRKAPYFWSDFRDAFSLQCLASFLFLYCACMSPVITFGGLLGEATEGRISAIESLFGASMTGIAYSLFGGQPLTILGSTGPVLVFEKILFKFCKEYGLSYLSLRASIGLWTATLCIILVATDASSLVCYITRFTEEAFASLICIIFIYEALEKLFELSEAYPINMHNDLELLTQYSCNCVEPHNPSNGTLKEWRESNISASDIIWENLTVSECKSLHGEYVGRACGHDHPYVPDVLFWSVILFFSTVTLSATLKQFKTSRYFPTKVRSIVSDFAVFLTILCMVLIDYAIGIPSPKLQVPSVFKPTRDDRGWFVTPLGPNPWWTVIAAIIPALLCTILIFMDQQITAVIINRKEHKLKKGCGYHLDLLMVAVMLGVCSIMGLPWFVAATVLSITHVNSLKLESECSAPGEQPKFLGIREQRVTGLMIFILMGSSVFMTSILKFIPMPVLYGVFLYMGASSLKGIQFFDRIKLFWMPAKHQPDFIYLRHVPLRKVHLFTIIQMSCLGLLWIIKVSRAAIVFPMMVLALVFVRKLMDLLFTKRELSWLDDLMPESKKKKLEDAEKEEEQSMLAMEDEGTVQLPLEGHYRDDPSVINISDEMSKTALWRNLLITADNSKDKESSFPSKSSPS

SEQ ID NO: 552 - protein, 170 aa, Homo sapiens
MSQSNRELVVDFLSYKLSQKGYSWSQFSDVEENRTEAPEGTESEMETPSAINGNPSWHLADSPAVNGATGHSSSLDAREVIPMAAVKQALREAGDEFELRYRRAFSDLTSQLHITPGTAYQSFEQDTFVELYGNNAAAESRKGQERFNRWFLTGMTVAGVVLLGSLFSRK

SEQ ID NO: 553 - protein, 361 aa, Homo sapiens [sequence omitted]

SEQ ID NO: 554 - protein, 203 aa, Homo sapiens
MAPALLLIPAALASFILAFGTGVEFVRFTSLRPLLGGIPESGGPDARQGWLAALQDRSILAPLAWDLGLLLLFVGQHSLMAAERVKAWTSRYFGVLQRSLYVACTALALQVYYHVLGLGEPLALKSPRALRLFSHLRHPVCVELLTVLWVVPTLGTDRLLLAFLLTLYLGLAHGLDQQDLRYLRAQLQRKLHLLSRPQDGEAE

SEQ ID NO: 555 - protein, 756 aa, Homo sapiens
MAEAHQAVAFQFTVTPDGIDLRLSHEALRQIYLSGLHSWKKKFIRFKNGIITGVYPASPSSWLIVVVGVMTTMYAKIDPSLGIIAKINRTLETANCMSSQTKNVVSGVLFGTGLWVALIVTMRYSLKVLLSYHGWMFTEHGKMSRATKIWMGMVKIFSGRKPMLYSFQTSLPRLPVPAVKDTVNRYLQSVRPLMKEEDFKRMTALAQDFAVGLGPRLQWYLKLKSWWATNYVSDWWEEYIYLRGRGPLMVNSNYYAMDLLYILPTHIQAARAGNAIHAILLYRRKLDREEIKPIRLLGSTIPLCSAQWERMFNTSRIPGEETDTIQHMRDSKHIVVYHRGRYFKVWLYHDGRLLKPREMEQQMQRILDNTSEPQPGEARLAALTAGDRVPWARCRQAYFGRGKNKQSLDAVEKAAFFVTLDETEEGYRSEDPDTSMDSYAKSLLHGRCYDRWFDKSFTFVVFKNGKMGLNAEHSWADAPIVAHLWEYVMSIDSLQLGYAEDGHCKGDINPNIPYPTRLQWDIPGECQEVIETSLNTANLLANDVDFHSFPFVAFGKGIIKKCRTSPDAFVQLALQLAHYKDMGKFCLTYEASMTRLFREGRTETVRSCTTESCDFVRAMVDPAQTVEQRLKLFKLASEKHQHMYRLAMTGSGIDRHLFCLYVVSKYLAVESPFLKEVLSEPWRLSTSQTPQQQVELFDLENNPEYVSSGGGFGPVADDGYGVSYILVGENLINFHISSKFSCPETGIISQGPSSDT

SEQ ID NO: 556 - protein, 152 aa, Homo sapiens
MELPAVNLKVILLGHWLLTTWGCIVFSGSYAWANFTILALGVWAVAQRDSIDAISMFLGGLLATIFLDIVHISIFYPRVSLTDTGRFGVGMAILSLLLKPLSCCFVYHMYRERGGFLGSSQDRSAYQTIDSAEAPADPFAVPEGRSQDARGY

SEQ ID NO: 557 - protein, 480 aa, Homo sapiens
MAHVGDCTQTPWLPVLVVSLMCSARAEYSNCGENEYYNQTTGLCQECPPCGPGEEPYLSCGYGTKDEDYGCVPCPAEKFSKGGYQICRRHKDCEGFFRATVLTPGDMENDAECGPCLPGYYMLENRPRNIYGMVCYSCLLAPPNTKECVGATSGASANFPGTSGSSTLSPFQHAHKELSGQGHLATALIIAMSTIFIMAIAIVLIIMFYILKTKPSAPGDGPHAPVPCFLDSPSTPPVGEPGCSLPPLSPACCTSHPGKSVEAQVSKDEEKKEAPDNVVMFSEKDEFEKLTATPAKPTKSENDASSENEQLLSRSVDSDEEPAPDKQGSPELCLLSLVHLAREKSATSNKSAGIQSRRKKILDVYANVCGVVEGLSPTELPFDCLEKTSRMLSSTYNSEKAVVKTWRHLAESFGLKRDEIGGMTDGMQLFDRISTAGYSIPELLTKLVQIERLDAVESLCADILEWAGVVPPASQPHAAS

SEQ ID NO: 558 - protein, 343 aa, Homo sapiens
MKTPRMVVMAPRTLFLLLSGALTLTETWAGSHSMRYFSAAVSRPGRGEPRFIAMGYVDDTQFVRFDSDSACPRMEPRAPWVEQEGPEYWEEETRNTKAHAQTDRMNLQTLRGYYNQSEASSHTLQWMIGCDLGSDGRLLRGYEQYAYDGKDYLALNEDLRSWTAADTAAQISKRKCEAANVAEQRRAYLEGTCVEWLHRYLENGKEMLQRADPPKTHVTHHPVFDYEATLRCWALGFYPAEIILTWQRDGEDQTQDVELVETRPAGDGTFQKWAAVVVPSGEEQRYTCHVQHEGLPEPLMLRWKQSSLPTIPIMGIVAGLVVLAAVVTGAAVAAVLWRKKSSD

SEQ ID NO: 559 - protein, 397 aa, Homo sapiens
MAPNGTASSFCLDSTACKITITVVLAVLILITVAGNVVVCLAVGLNRRLRNLTNCFIVSLAITDLLLGLLVLPFSAIYQLSCKWSFGKVFCNIYTSLDVMLCTASILNLFMISLDRYCAVMDPLRYPVLVTPVRVAISLVLIWVISITLSFLSIHLGWNSRNETSKGNHTTSKCKVQVNEVYGLVDGLVTFYLPLLIMCITYYRIFKVARDQAKRINHISSWKAATIREHKATVTLAAVMGAFIICWFPYFTAFVYRGLRGDDAINEVLEAIVLWLGYANSALNPILYAALNRDFRTGYQQLFCCRLANRNSHKTSLRSNASQLSRTQSREPRQQEEKPLKLQVWSGTEVTAPQGATDRPWLCLPECWSVELTHSFIHLFIHSFANIHPIPTTCQEL

SEQ ID NO: 560 - protein, 378 aa, Homo sapiens
MRTKAAGCAERRPLQPRTEAAAAPAGRAMPSEYTYVKLRSDCSRPSLQWYTRAQSKMRRPSLLLKDILKCTLLVFGVWILYILKLNYTTEECDMKKMHYVDPDHVKKAPKDSEAESKYDPPFGFRKFSSKVQTLLELLPEHDLPEHLKAKTCRRCVVIGSGGILHGLELGHTLNQFDVVIRLNSAPVEGYSEHVGNKTTIRMTYPEGAPLSDLEYYSNDLFVAVLFKSVDFNWLQAMVKKETLPFWVRLFFWKQVAEKIPLQPKHFRILNPVIIKETAFDILQYSEPQSRFWGRDKNVPTIGVIAVVLATHLCDEVSLAGFGYDLNQPRTPLHYFDSQCMAAMNFQTMHNVTTETKFLLKLVKEGVVKDLSGGIDREF

SEQ ID NO: 561 - protein, 255 aa, Homo sapiens
MGNSCYNIVATLLLVLNFERTRSLQDPCSNCPAGTFCDNNRNQICSPCPPNSFSSAGGQRTCDICRQCKGVFRTRKECSSTSNAECDCTPGFHCLGAGCSMCEQDCKQGQELTKKGCKDCCFGTFNDQKRGICRPWTNCSLDGKSVLVNGTKERDVVCGPSPADLSPGASSVTPPAPAREPGHSPQIISFFLALTSTALLFLLFFLTLRFSVVKRGRKKLLYIFKQPFMRPVQTTQEEDGCSCRFPEEEEGGCEL

SEQ ID NO: 562 - protein, 346 aa, Homo sapiens
MESNLSGLVPAAGLVPALPPAVTLGLTAAYTTLYALLFFSVYAQLWLVLLYGHKRLSYQTVFLALCLLWAALRTTLFSFYFRDTPRANRLGPLPFWLLYCCPVCLQFFTLTLMNLYFAQVVFKAKVKRRPEMSRGLLAVRGAFVGASLLFLLVNVLCAVLSHRRRAQPWALLLVRVLVSDSLFVICALSLAACLCLVARRAPSTSIYLEAKADLVNDLGNKGYLVFGLILFVWELLPTTLLVGFFRVHRPPQDLSTSHILNGQVFASRSYFFDRAGHCEDEGCSWEHSRGESTSMSGSLGSGSWYGAIGREPGWYGGSQTKTTPLLFSQVPGPGGHHHSLYSTPQT

SEQ ID NO: 563 - protein, 232 aa, Homo sapiens
MYRISQLMSTPVASSSRLEREYAGELSPTCIFPSFTCDSLDGYHSFECGSIDPLTGSHYTCRRSPRLLTNGYYIWTEDSFLCDKDGNITLNPSQTSVMYKENLVRIFRKKKRICHSFSSLFNLSTSKSWLHGSIFGDINSSPSEDNWLKGTRRLDTDHCNGNETRLLQEVFFQAILLAVCLIISACARWFMGEILASVFTCSLMITVAYVKSLFLSLASYFKTTACARFVKI

SEQ ID NO: 564 - protein, 1070 aa, Homo sapiens
MSPVRRWGSPCLFPLQLFSLCWVLSVAQSKTVRYSTFEEDAPGTVIGTLAEDLHMKVSGDTSFRLMKQFNSSLLRVREGDGQLTVGDAGLDRERLCGQAPQCVLAFDVVSFSQEQFRLVHVEVEVRDVNDHAPRFPRAQIPVEVSEGAAVGTRIPLEVPVDEDVGANGLQTVRLAEPHSPFRVELQTRADGAQCADLVLLQELDRESQAAYSLELVAQDGGRPPRSATAALSVRVLDANDHSPAFPQGAVAEVELAEDAPVGSLLLDLDAADPDEGPNGDVVFAFGARTPPEARRLFRLDPRSGRLTLAGPVDYERQDTYELDVRAQDRGPGPRAATCKVIVRIRDVNDNAPDIAITPLAAPGAPATSPFAAAAAAAALGGADASSPAGAGTPEAGATSLVPEGAARESLVALVSTSDRDSGANGQVRCALYGHEHFRLQPAYAGSYLVVTAASLDRERIAEYNLTLVAEDRGAPPLRTVRPYTVRVGDENDNAPLFTRPVYEVSVRENNPPGAYLATVAARDRDLGRNGQVTYRLLEAEVGRAGGAVSTYVSVDPATGAIYALRSFDYETLRQLDVRIQASDGGSPQLSSSALVQVRVLDQNDHAPVLVHPAPANGSLEVAVPGRTAKDTVVARVQARDADEGANGELAFELQQQEPREAFAIGRRTGEILLTGDLSQEPPGRVFRALLVISDGGRPPLTTTATVSFVVTAGGGRGPAAPASAGSPERSRPPGSRLGVSGSVLQWDTPLIVIIVLAGSCTLLLAAIIAIATTCNRRKKEVRKGGALREERPGAAGGGASAPGSPEEAARGAGPRPNMFDVLTFPGTGKAPFGSPAADAPPPAVAAAEVPGSEGGSATGESACHFEGQQRLRGAHAEPYGASPGFGKEPAPPVAVWKGHSFNTISGREAEKFSGKDSGKGDSDFNDSDSDISGDALKKDLINHMQSGLWACTAECKILGHSDRCWSPSCSGPNAHPSPHPPAQMSTFCKSTSLPRDPLRRDNYYQAQLPKTVGLQSVYEKVLHRDYDRTVTLLSPPRPGRLPDLQEIGVPLYQSPPGRYLSPKKGANENV

SEQ ID NO: 565 - protein, 602 aa, Homo sapiens
MPSAKQRGSKGGHGAASPSEKGAHPSGGADDVAKKPPPAPQQPPPPPAPHPQQHPQQHPQNQAHGKGGHRGGGGGGGKSSSSSSASAAAAAAAASSSASCSRRLGRALNFLFYLALVAAAAFSGWCVHHVLEEVQQVRRSHQDFSRQREELGQGLQGVEQKVQSLQATFGTFESILRSSQHKQDLTEKAVKQGESEVSRISEVLQKLQNEILKDLSDGIHVVKDARERDFTSLENTVEERLTELTKSINDNIAIFTEVQKRSQKEINDMKAKVASLEESEGNKQDLKALKEAVKEIQTSAKSREWDMEALRSTLQTMESDIYTEVRELVSLKQEQQAFKEAADTERLALQALTEKLLRSEESVSRLPEEIRRLEEELRQLKSDSHGPKEDGGFRHSEAFEALQQKSQGLDSRLQHVEDGVLSMQVASARQTESLESLLSKSQEHEQRLAALQGRLEGLGSSEADQDGLASTVRSLGETQLVLYGDVEELKRSVGELPSTVESLQKVQEQVHTLLSQDQAQAARLPPQDFLDRLSSLDNLKASVSQVEADLKMLRTAVDSLVAYSVKIETNENNLESAKGLLDDLRNDLDRLFVKVEKIHEKV

SEQ ID NO: 566 - protein, 890 aa, Homo sapiens
MSRSATLLLCLLGCHVWKAVTKTLREPGAGAQEVTLKVHISDASTHQPVADALIEIFTNQASIASGTSGTDGVAFIKFQYKLGSQLIVTASKHAYVPNSAPWKPIRLPVFSSLSLGLLPERSATLMVYEDVVQIVSGFQGARPQPRVHFQRRALRLPENTSYSDLTAFLTAASSPSEVDSFPYLRGLDGNGTGNSTRHDLTPVTAVSVHLLSSNGTPVLVDGPIYVTVPLATQSSLRHNAYVAAWRFDQKLGTWLKSGLGLVHQEGSQLTWTYIAPQLGYWVAAMSPPIPGPVVTQDITTYHTVFLLAILGGMAFILLVLLCLLLYYCRRKCLKPRQHHRKLQLPAGLESSKRDQSTSMSHINLLFSRRASEFPGPLSVTSHGRPEAPGTKELMSGVHLEMMSPGGEGDLHTPMLKLSYSTSQEFSSREELLSCKEEDKSQISFDNLTPSGTLGKDYHKSVEVFPLKARKSMEREGYESSGNDDYRGSYNTVLSQPLFEKQDREGPASTGSKLTIQEHLYPAPSSPEKEQLLDRRPTECMMSRSVDHLERPTSFPRPGQLICCSSVDQVNDSVYRKVLPALVIPAHYMKLPGDHSYVSQPLVVPADQQLEIERLQAELSNPHAGIFPHPSSQIQPQPLSSQAISQQHLQDAGTREWSPQNASMSESLSIPASLNDAALAQMNSEVQLLTEKALMELGGGKPLPHPRAWFVSLDGRSNAHVRHSYIDLQRAGRNGSNDASLDSGVDMNEPKSARKGRGDALSLQQNYPPVQEHQQKEPRAPDSTAYTQLVYLDDVEQSGSECGTTVCTPEDSALRCLLEGSSRRSGGQLPSLQEETTRRTADAPSEPAASPHQRRSAHEEEEDDDDDDQGEDKKSPWQKREERPLMAFNIK

SEQ ID NO: 567 - protein, 570 aa, Homo sapiens
MGNWAVNEGLSIFVILVWLGLNVFLFVWYYRVYDIPPKFFYTRKLLGSALALARAPAACLNFNCMLILLPVCRNLLSFLRGSSACCSTRVRRQLDRNLTFHKMVAWMIALHSAIHTIAHLFNVEWCVNARVNNSDPYSVALSELGDRQNESYLNFARKRIKNPEGGLYLAVTLLAGITGVVITLCLILIITSSTKTIRRSYFEVFWYTHHLFVIFFIGLAIHGAERIVRGQTAESLAVHNITVCEQKISEWGKIKECPIPQFAGNPPMTWKWIVGPMFLYLCERLVRFWRSQQKVVITKVVTHPFKTIELQMKKKGFKMEVGQYIFVKCPKVSKLEWHPFTLTSAPEEDFFSIHIRIVGDWTEGLFNACGCDKQEFQDAWKLPKIAVDGPFGTASEDVFSYEVVMLVGAGIGVTPFASILKSVWYKYCNNATNLKLKKIYFYWLCRDTHAFEWFADLLQLLESQMQERNNAGFLSYNIYLTGWDESQANHFAVHHDEEKDVITGLKQKTLYGRPNWDNEFKTIASQHPNTRIGVFLCGPEALAETLSKQSISNSESGPRGVHFIFNKENF

SEQ ID NO: 568 - protein, 525 aa, Homo sapiens
MAGLWLGLVWQKLLLWGAASALSLAGASLVLSLLQRVASYARKWQQMRPIPTVARAYPLVGHALLMKPDGREFFQQIIEYTEEYRHMPLLKLWVGPVPMVALYNAENVEVILTSSKQIDKSSMYKFLEPWLGLGLLTSTGNKWRSRRKMLTPTFHFTILEDFLDIMNEQANILVKKLEKHINQEAFNCFFYITLCALDIICETAMGKNIGAQSNDDSEYVRAVYRMSEMIFRRIKMPWLWLDLWYLMFKEGWEHKKSLQILHTFTNSVIAERANEMNANEDCRGDGRGSAPSKNKRRAFLDLLLSVTDDEGNRLSHEDIREEVDTFMFEGHDTTAAAINWSLYLLGSNPEVQKKVDHELDDVFGKSDRPATVEDLKKLRYLECVIKETLRLFPSVPLFARSVSEDCEVAGYRVLKGTEAVIIPYALHRDPRYFPNPEEFQPERFFPENAQGRHPYAYVPFSAGPRNCIGQKFAVMEEKTILSCILRHFWIESNQKREELGLEGQLILRPSNGIWIKLKRRNADER

SEQ ID NO: 569 - protein, 1299 aa, Homo sapiens
MPKKKRLSAGRVPLILFLCQMISALEVPLDPKLLEDLVQPPTITQQSPKDYIIDPRENIVIQCEAKGKPPPSFSWTRNGTHFDIDKDPLVTMKPGTGTLIINIMSEGKAETYEGVYQCTARNERGAAVSNNIVVRPSRSPLWTKEKLEPITLQSGQSLVLPCRPPIGLPPPIIFWMDNSFQRLPQSERVSQGLNGDLYFSNVLPEDTREDYICYARFNHTQTIQQKQPISVKVISVDELNDTIAANLSDTEFYGAKSSRERPPTFLTPEGNASNKEELRGNVLSLECIAEGLPTPIIYWAKEDGMLPKNRTVYKNFEKTLQIIHVSEADSGNYQCIAKNALGAIHHTISVRVKAAPYWITAPQNLVLSPGEDGTLICRANGNPKPRISWLTNGVPIEIAPDDPSRKIDGDTIIFSNVQERSSAVYQCNASNEYGYLLANAFVNVLAEPPRILTPANTLYQVIANRPALLDCAFFGSPLPTIEWFKGAKGSALHEDIYVLHENGTLEIPVAQKDSTGTYTCVARNKLGMAKNEVHLEIKDPTWIVKQPEYAVVQRGSMVSFECKVKHDHTLSLTVLWLKDNRELPSDERFTVDKDHLVVADVSDDDSGTYTCVANTTLDSVSASAVLSVVAPTPTPAPVYDVPNPPFDLELTDQLDKSVQLSWTPGDDNNSPITRIHHEYEDAMHKPGLWHHQTEVSGTQTTAQLKLSPYVNYSFRVMAVNSIGKSLPSEASEQYLTKASEPDKNPTAVEGLGSEPDNLVITWKPLNGFESNGPGLQYKVSWRQKDGDDEWTSVVVANVSKYIVSGTPTFVPYLIKVQALNDMGFAPEPAVVMGHSGEDLPMVAPGNVRVNVVNSTLAEVHWDPVPLKSIRGHLQGYRIYYWKTQSSSKRNRRHIEKKILTFQGSKTHGMLPGLEPFSHYTLNVRVVNGKGEGPASPDRVFNTPEGVPSAPSSLKIVNPTLDSLTLEWDPPSHPNGILTEYTLKYQPINSTHELGPLVDLKIPANKTRWTLKNLNFSTRYKFYFYAQTSAGSGSQITEEAVTTVDEAGILPPDVGAGKVQAVNPRISNLTAAAAETYANISWEYEGPEHVNFYVEYGVAGSKEEWRKEIVNGSRSFFGLKGLMPGTAYKVRVGAVGDSGFVSSEDVFETGPAMASRQVDIATQGWFIGLMCAVALLILILLIVCFIRRNKGGKYPVKEKEDAHADPEIQPMKEDDGTFGEYSDAEDHKPLKKGSRTPSDRTVKKEDSDDSLVDYGEGVNGQFNEDGSFIGQYSGKKEKEPAEGNESSEAPSPVNAMNSFV

SEQ ID NO: 570 - protein, 1192 aa, Homo sapiens
MQLKIMPKKKRLSAGRVPLILFLCQMISALEVPLDPKLLEDLVQPPTITQQSPKDYIIDPRENIVIQCEAKGKPPPSFSWTRNGTHFDIDKDPLVTMKPGTGTLIINIMSEGKAETYEGVYQCTARNERGAAVSNNIVVRPSRSPLWTKEKLEPITLQSGQSLVLPCRPPIGLPPPIIFWMDNSFQRLPQSERVSQGLNGDLYFSNVLPEDTREDYICYARFNHTQTIQQKQPISVKVISAKSSRERPPTFLTPEGNASNKEELRGNVLSLECIAEGLPTPIIYWAKEDGMLPKNRTVYKNFEKTLQIIHVSEADSGNYQCIAKNALGAIHHTISVRVKAAPYWITAPQNLVLSPGEDGTLICRANGNPKPRISWLTNGVPIEIAPDDPSRKIDGDTIIFSNVQERSSAVYQCNASNEYGYLLANAFVNVLAEPPRILTPANTLYQVIANRPALLDCAFFGSPLPTIEWFKGAKGSALHEDIYVLHENGTLEIPVAQKDSTGTYTCVARNKLGMAKNEVHLEIKDPTWIVKQPEYAVVQRGSMVSFECKVKHDHTLSLTVLWLKDNRELPSDERFTVDKDHLVVADVSDDDSGTYTCVANTTLDSVSASAVLSVVAPTPTPAPVYDVPNPPFDLELTDQLDKSVQLSWTPGDDNNSPITKFIIEYEDAMHKPGLWHHQTEVSGTQTTAQLKLSPYVNYSFRVMAVNSIGKSLPSEASEQYLTKASEPDKNPTAVEGLGSEPDNLVITWKPLNGFESNGPGLQYKVSWRQKDGDDEWTSVVVANVSKYIVSGTPTFVPYLIKVQALNDMGFAPEPAVVMGHSGEDLPMVAPGNVRVNVVNSTLAEVHWDPVPLKSIRGHLQGYRIYYWKTQSSSKRNRRHIEKKILTFQGSKTHGMLPGLEPFSHYTLNVRVVNGKGEGPASPDRVFNTPEGVPSAPSSLKIVNPTLDSLTLEWDPPSHPNGILTEYTLKYQPINSTHELGPLVDLKIPANKTRWTLKNLNFSTRYKFYFYAQTSAGSGSQITEEAVTTVDEAGILPPDVGAGKAMASRQVDIATQGWFIGLMCAVALLILILLIVCFIRRNKGGKYPVKEKEDAHADPEIQPMKEDDGTFGEYSDAEDHKPLKKGSRTPSDRTVKKEDSDDSLVDYGEGVNGQFNEDGSFIGQYSGKKEKEPAEGNESSEAPSPVNAMNSFV

SEQ ID NO: 571 - protein, 1304 aa, Homo sapiens
MQLKIMPKKKRLSAGRVPLILFLCQMISALEVPLDPKLLEDLVQPPTITQQSPKDYIIDPRENIVIQCEAKGKPPPSFSWTRNGTHFDIDKDPLVTMKPGTGTLIINIMSEGKAETYEGVYQCTARNERGAAVSNNIVVRPSRSPLWTKEKLEPITLQSGQSLVLPCRPPIGLPPPIIFWMDNSFQRLPQSERVSQGLNGDLYFSNVLPEDTREDYICYARFNHTQTIQQKQPISVKVISVDELNDTIAANLSDTEFYGAKSSRERPPTFLTPEGNASNKEELRGNVLSLECIAEGLPTPIIYWAKEDGMLPKNRTVYKNFEKTLQIIHVSEADSGNYQCIAKNALGAIHHTISVRVKAAPYWITAPQNLVLSPGEDGTLICRANGNPKPRISWLTNGVPIEIAPDDPSRKIDGDTIIFSNVQERSSAVYQCNASNEYGYLLANAFVNVLAEPPRILTPANTLYQVIANRPALLDCAFFGSPLPTIEWFKGAKGSALHEDIYVLHENGTLEIPVAQKDSTGTYTCVARNKLGMAKNEVHLEIKDPTWIVKQPEYAVVQRGSMVSFECKVKHDHTLSLTVLWLKDNRELPSDERFTVDKDHLVVADVSDDDSGTYTCVANTTLDSVSASAVLSVVAPTPTPAPVYDVPNPPFDLELTDQLDKSVQLSWTPGDDNNSPITKFIIEYEDAMHKPGLWHHQTEVSGTQTTAQLKLSPYVNYSFRVMAVNSIGKSLPSEASEQYLTKASEPDKNPTAVEGLGSEPDNLVITWKPLNGFESNGPGLQYKVSWRQKDGDDEWTSVVVANVSKYIVSGTPTFVPYLIKVQALNDMGFAPEPAVVMGHSGEDLPMVAPGNVRVNVVNSTLAEVHWDPVPLKSIRGHLQGYRIYYWKTQSSSKRNRRHIEKKILTFQGSKTHGMLPGLEPFSHYTLNVRVVNGKGEGPASPDRVFNTPEGVPSAPSSLKIVNPTLDSLTLEWDPPSHPNGILTEYTLKYQPINSTHELGPLVDLKIPANKTRWTLKNLNFSTRYKFYFYAQTSAGSGSQITEEAVTTVDEAGILPPDVGAGKVQAVNPRISNLTAAAAETYANISWEYEGPEHVNFYVEYGVAGSKEEWRKEIVNGSRSFFGLKGLMPGTAYKVRVGAVGDSGFVSSEDVFETGPAMASRQVDIATQGWFIGLMCAVALLILILLIVCFIRRNKGGKYPVKEKEDAHADPEIQPMKEDDGTFGEYSDAEDHKPLKKGSRTPSDRTVKKEDSDDSLVDYGEGVNGQFNEDGSFIGQYSGKKEKEPAEGNESSEAPSPVNAMNSFV

SEQ ID NO: 572 - protein, 160 aa, Homo sapiens
FLPDNFSPAKPKPSKDLKPLLGSAVLGLLLVLAAVVAWCYYSVSLRKAERLRAELLDLKAGGFSIRNQKGEQEPQPFVTSDVYSSDAAFGGILERYWLSSRAAAIKVNDSVPFHLGWNSTERSLRLQARYHDTPYKPPAGRAAAPELSYRVCVGSDVTSI

SEQ ID NO: 573 - protein, 205 aa, Homo sapiens
MSRGLQLLLLSCAYSLAPATPEVKVACSEDVDLPCTAPWDPQVPYTVSWVKLLEGGEERMETPQEDHLRGQHYHQKGQNGSFDAPNERPYSLKIRNTTSCNSGTYRCTLQDPDGQRNLSGKVILRVTGCPAQRKEETFKKYRAEIVLLLALVIFYLTLIIFTCKFARLQSIFPDFSKAGMERAFLPVTSPNKHLGLVTPHKTELV

SEQ ID NO: 574 - protein, 277 aa, Homo sapiens
MCVGARRLGRGPCAALLLLGLGLSTVTGLHCVGDTYPSNDRCCHECRPGNGMVSRCSRSQNTVCRPCGPGFYNDVVSSKPCKPCTWCNLRSGSERKQLCTATQDTVCRCRAGTQPLDSYKPGVDCAPCPPGHFSPGDNQACKPWTNCTLAGKHTLQPASNSSDAICEDRDPPATQPQETQGPPARPITVQPTEAWPRTSQGPSTRPVEVPGGRAVAAILGLGLVLGLLGPLAILLALYLLRRDQRLPPDAHKPPGGGSFRTPIQEEQADAHSTLAKI

SEQ ID NO: 575 - protein, 697 aa, Homo sapiens
MQTQEILRILRLPELGDLGQFFRSLSATTLVSMGALAAILAYWFTHRPKALQPPCNLLMQSEEVEDSGGARRSVIGSGPQLLTHYYDDARTMYQVFRRGLSISGNGPCLGFRKPKQPYQWLSYQEVADRAEFLGSGLLQHNCKACTDQFIGVFAQNRPEWIIVELACYTYSMVVVPLYDTLGPGAIRYIINTADISTVIVDKPQKAVLLLEHVERKETPGLKLIILMDPFEEALKERGQKCGVVIKSMQAVEDCGQENHQAPVPPQPDDLSIVCFTSGTTGNPKGAMLTHGNVVADFSGFLKVTEKVIFPRQDDVLISFLPLAHMFERVIQSVVYCHGGRVGFFQGDIRLLSDDMKALCPTIFPVVPRLLNRMYDKIFSQANTPLKRWLLEFAAKRKQAEVRSGIIRNDSIWDELFFNKIQASLGGCVRMIVTGAAPASPTVLGFLRAALGCQVYEGYGQTECTAGCTFTTPGDWTSGHVGAPLPCNHIKLVDVEELNYWACKGEGEICVRGPNVFKGYLKDPDRTKEALDSDGWLHTGDIGKWLPAGTLKIIDRKKHIFKLAQGEYVAPEKIENIYIRSQPVAQIYVHGDSLKAFLVGIVVPDPEVMPSWAQKRGIEGTYADLCTNKDLKKAILEDMVRLGKESGLHSFEQVKAIHIHSDMFSVQNGLLTPTLKAKRPELREYFKKQIEELYSISM

SEQ ID NO: 576 - protein, 697 aa, Homo sapiens
MQTQEILRILRLPELGDLGQFFRSLSATTLVSMGALAAILAYWFTHRPKALQPPCNLLMQSEEVEDSGGARRSVIGSGPQLLTHYYDDARTMYQVFRRGLSISGNGPCLGFRKPKQPYQWLSYQEVADRAEFLGSGLLQHNCKACTDQFIGVFAQNRPEWIIVELACYTYSMVVVPLYDTLGPGAIRYIINTADISTVIVDKPQKAVLLLEHVERKETPGLKLIILMDPFEEALKERGQKCGVVIKSMQAVEDCGQENHQAPVPPQPDDLSIVCFTSGTTGNPKGAMLTHGNVVADFSGFLKVTESQWAPTCADVHISYLPLAHMFERMVQSVVYCHGGRVGFFQGDIRLLSDDMKALCPTIFPVVPRLLNRMYDKIFSQANTPLKRWLLEFAAKRKQAEVRSGIIRNDSIWDELFFNKIQASLGGCVRMIVTGAAPASPTVLGFLRAALGCQVYEGYGQTECTAGCTFTTPGDWTSGHVGAPLPCNHIKLVDVEELNYWACKGEGEICVRGPNVFKGYLKDPDRTKEALDSDGWLHTGDIGKWLPAGTLKIIDRKKHIFKLAQGEYVAPEKIENIYIRSQPVAQIYVHGDSLKAFLVGIVVPDPEVMPSWAQKRGIEGTYADLCTNKDLKKAILEDMVRLGKESGLHSFEQVKAIHIHSDMFSVQNGLLTPTLKAKRPELREYFKKQIEELYSISM

SEQ ID NO: 577 - protein, 708 aa, Homo sapiens
MPEFVLSLLEKMQTQEILRILRLPELGDLGQFFRSLSATTLVSMGALAAILAYWFTHRPKALQPPCNLLMQSEEVEDSGGARRSVIGSGPQLLTHYYDDARTMYQVFRRGLSISGNGPCLGFRKPKQPYQWLSYQEVADRAEFLGSGLLQHNCKACTDQFIGVFAQNRPEWIIVELACYTYSMVVVPLYDTLGPGAIRYIINTADISTVIVDKPQKAVLLLEHVERKETPGLKLIILMDPFEEALKERGQKCGVVIKSMQAVEDCGQENHQAPVPPQPDDLSIVCFTSGTTGNPKGAMLTHGNVVADFSGFLKVTEKVIFPRQDDVLISFLPLAHMFERVIQSVVYCHGGRVGFFQGDIRLLSDDMKALCPTIFPVVPRLLNRMYDKIFSQANTPLKRWLLEFAAKRKQAEVRSGIIRNDSIWDELFFNKIQASLGGCVRMIVTGAAPASPTVLGFLRAALGCQVYEGYGQTECTAGCTFTTPGDWTSGHVGAPLPCNHIKLVDVEELNYWACKGEGEICVRGPNVFKGYLKDPDRTKEALDSDGWLHTGDIGKWLPAGTLKIIDRKKHIFKLAQGEYVAPEKIENIYIRSQPVAQIYVHGDSLKAFLVGIVVPDPEVMPSWAQKRGIEGTYADLCTNKDLKKAILEDMVRLGKESGLHSFEQVKAIHIHSDMFSVQNGLLTPTLKAKRPELREYFKKQIEELYSISM

SEQ ID NO: 578 - protein, 234 aa, Homo sapiens
MAQHGAMGAFRALCGLALLCALSLGQRPTGGPGCGPGRLLLGTGTDARCCRVHTTRCCRDYPGEECCSEWDCMCVQPEFHCGDPCCTTCRHHPCPPGQGVQSQGKFSFGFQCIDCASGTFSGGHEGHCKPWTDCTQFGFLTVFPGNKTHNAVCVPGSPPAEPLGWLTVVLLAVAACVLLLTSAQLGLHIWQLRKTQLLLEVPPSTEDARSCQFPEEERGERSAEEKGRLGDLWV

SEQ ID NO: 579 - protein, 241 aa, Homo sapiens
MAQHGAMGAFRALCGLALLCALSLGQRPTGGPGCGPGRLLLGTGTDARCCRVHTTRCCRDYPGEECCSEWDCMCVQPEFHCGDPCCTTCRHHPCPPGQGVQSQGKFSFGFQCIDCASGTFSGGHEGHCKPWTDCTQFGFLTVFPGNKTHNAVCVPGSPPAEPLGWLTVVLLAVAACVLLLTSAQLGLHIWQLRSQCMWPRETQLLLEVPPSTEDARSCQFPEEERGERSAEEKGRLGDLWV

SEQ ID NO: 580 - protein, 749 aa, Homo sapiens
MEAETGSSVETGKKANRGTRIALVVFVGGTLVLGTILFLVSQGLLSLQAKQEYCLKPECIEAAAAILSKVNLSVDPCDNFFRFACDGWISNNPIPEDMPSYGVYPWLRHNVDLKLKELLEKSISRRRDTEAIQKAKILYSSCMNEKAIEKADAKPLLHILRHSPFRWPVLESNIGPEGVWSERKFSLLQTLATFRGQYSNSVFIRLYVSPDDKASNEHILKLDQATLSLAVREDYLDNSTEAKSYRDALYKFMVDTAVLLGANSSRAEHDMKSVLRLEIKIAEIMIPHENRTSEAMYNKMNISELSAMIPQFDWLGYIKKVIDTRLYPHLKDISPSENVVVRVPQYFKDLFRILGSERKKTIANYLVWRMVYSRIPNLSRRFQYRWLEFSRVIQGTTTLLPQWDKCVNFIESALPYVVGKMFVDVYFQEDKKEMMEELVEGVRWAFIDMLEKENEWMDAGTKRKAKEKARAVLAKVGYPEFIMNDTHVNEDLKAIKFSEADYFGNVLQTRKYLAQSDFFWLRKAVPKTEWFTNPTTVNAFYSASTNQIRFPAGELQKPFFWGTEYPRSLSYGAIGVIVGHEFTHGFDNNGRKYDKNGNLDPWWSTESEEKFKEKTKCMINQYSNYYWKKAGLNVKGKRTLGENIADNGGLREAFRAYRKWINDRRQGLEEPLLPGITFTNNQLFFLSYAHVRCNSYRPEAAREQVQIGAHSPPQFRVNGAISNFEEFQKAFNCPPNSTMNRGMDSCRLW

SEQ ID NO: 581 - protein, 133 aa, Homo sapiens
MSASAATGVFVLSLSAIPVTYVFNHLAAQHDSWTIVGVAALILFLVALLARVLVKRKPPRDPLFYVYAVFGFTSVVNLIIGLEQDGIIDGFMTHYLREGEPYLNTAYGHMICYWDGSAHYLMYLVMVAAIAWE

SEQ ID NO: 582 - protein, 188 aa, Homo sapiens
MSASAATGVFVLSLSAIPVTYVFNHLAAQHDSWTIVGVAALILFLVALLARVLVKRKPPRDPLFYVYAVFGFTSVVNLIIGLEQDGIIDGFMTHYLREGEPYLNTAYGHMICYWDGSAHYLMYLVMVAAIAWEETYRTIGLYWVGSIIMSVVVFVPGNIVDAGIYVLFCSLLCDCTVWLSGSWMFLDA

SEQ ID NO: 583 - protein, 512 aa, Homo sapiens [sequence omitted]

SEQ ID NO: 584 - protein, 200 aa, Homo sapiens
MDSYLLMWGLLTFIMVPGCQAELCDDDPPEIPHATFKAMAYKEGTMLNCECKRGFRRIKSGSLYMLCTGNSSHSSWDNQCQCTSSATRNTTKQVTPQPEEQKERKTTEMQSPMQPVDQASLPGEEKPQASPEGRPESETSCLVTTTDFQIQTEMAATMETSIFTTEYQVAVAGCVFLLISVLLLSGLTWQRRQRKSRRTI

SEQ ID NO: 585 - protein, 272 aa, Homo sapiens
MDSYLLMWGLLTFIMVPGCQAELCDDDPPEIPHATFKAMAYKEGTMLNCECKRGFRRIKSGSLYMLCTGNSSHSSWDNQCQCTSSATRNTTKQVTPQPEEQKERKTTEMQSPMQPVDQASLPGHCREPPPWENEATERIYHFVVGQMVYYQCVQGYRALHRGPAESVCKMTHGKTRWTQPQLICTGEMETSQFPGEEKPQASPEGRPESETSCLVTTTDFQIQTEMAATMETSIFTTEYQVAVAGCVFLLISVLLLSGLTWQRRQRKSRRTI

SEQ ID NO: 586 - protein, 489 aa, Homo sapiens
MVPSSPAVEKQVPVEPGPDPELRSWRHLVCYLCFYGFMAQIRPGESFITPYLLGPDKNFTREQVTNEITPVLSYSYLAVLVPVFLLTDYLRYTPVLLLQGLSFVSVWLLLLLGHSVAHMQLMELFYSVTMAARIAYSSYIFSLVRPARYQRVAGYSRAAVLLGVFTSSVLGQLLVTVGRVSFSTLNYISLAFLTFSVVLALFLKRPKRSLFFNRDDRGRCETSASELERMNPGPGGKLGHALRVACGDSVLARMLRELGDSLRRPQLRLWSLWWVFNSAGYYLVVYYVHILWNEVDPTTNSARVYNGAADAASTLLGAITSFAAGFVKIRWARWSKLLIAGVTATQAGLVFLLAHTRHPSSIWLCYAAFVLFRGSYQFLVPIATFQIASSLSKELCALVFGVNTFFATIVKTIITFIVSDVRGLGLPVRKQNEELHVASLSLWKSHLRLAADTLSSEGSSGSGPRSWFLSPTLRAALHGPVCPSEVCPS

SEQ ID NO: 587 - protein, 891 aa, Homo sapiens
MSQVGGRGDRCTQEVQGLVHGAGDLSASLAENSPTMSQNGYFEDSSYYKCDTDDTFEAREEILGDEAFDTANSSIVSGESIRFFVNVNLEMQATNTENEATSGGCVLLHTSRKYLKLKNFKEEIRAHRDLDGFLAQASIVLNETATSLDNVLRTMLRRFARDPDNNEPNCNLDLLMAMLFTDAGAPMRGKVHLLSDTIQGVTATVTGVRYQQSWLCIICTMKALQKRHVCISRLVRPQNWGENSCEVRFVILVLAPPKMKSTKTAMEVARTFATMFSDIAFRQKLLETRTEEEFKEALVHQRQLLTMVSHGPVAPRTKERSTVSLPAHRHPEPPKCKDFVPFGKGIREDIARRFPLYPLDFTDGIIGKNKAVGKYITTTLFLYFACLLPTIAFGSLNDENTDGAIDVQKTIAGQSIGGLLYALFSGQPLVILLTTAPLALYIQVIRVICDDYDLDFNSFYAWTGLWNSFFLALYAFFNLSLVMSLFKRSTEEIIALFISITFVLDAVKGTVKIFWKYYYGHYLDDYHTKRTSSLVSLSGLGASLNASLHTALNASFLASPTELPSATHSGQATAVLSLLIMLGTLWLGYTLYQFKKSPYLHPCVREILSDCALPIAVLAFSLISSHGFREIEMSKFRYNPSESPFAMAQIQSLSLRAVSGAMGLGFLLSMLFFIEQNLVAALVNAPENRLVKGTAYHWDLLLLAIINTGLSLFGLPWIHAAYPHSPLHVRALALVEERVENGHIYDTIVNVKETRLTSLGASVLVGLSLLLLPVPLQWIPKPVLYGLFLYIALTSLDGNQLVQRVALLLKEQTAYPPTHYIRRVPQRKIHYFTGLQVLQLLLLCAFGMSSLPYMKMIFPLIMIAMIPIRYILLPRIIEAKYLDVMDAEHRP

SEQ ID NO: 588 - protein, 918 aa, Homo sapiens
MGVYGPQDRSESEKRDVQRDPPPWHPRREGERPARARSLPLAAAGQGFLRKTWISEHENSPTMSQNGYFEDSSYYKCDTDDTFEAREEILGDEAFDTANSSIVSGESIRFFVNVNLEMQATNTENEATSGGCVLLHTSRKYLKLKNFKEEIRAHRDLDGFLAQASIVLNETATSLDNVLRTMLRRFARDPDNNEPNCNLDLLMAMLFTDAGAPMRGKVHLLSDTIQGVTATVTGVRYQQSWLCIICTMKALQKRHVCISRLVRPQNWGENSCEVRFVILVLAPPKMKSTKTAMEVARTFATMFSDIAFRQKLLETRTEEEFKEALVHQRQLLTMVSHGPVAPRTKERSTVSLPAHRHPEPPKCKDFVPFGKGIREDIARRFPLYPLDFTDGIIGKNKAVGKYITTTLFLYFACLLPTIAFGSLNDENTDGAIDVQKTIAGQSIGGLLYALFSGQPLVILLTTAPLALYIQVIRVICDDYDLDFNSFYAWTGLWNSFFLALYAFFNLSLVMSLFKRSTEEIIALFISITFVLDAVKGTVKIFWKYYYGHYLDDYHTKRTSSLVSLSGLGASLNASLHTALNASFLASPTELPSATHSGQATAVLSLLIMLGTLWLGYTLYQFKKSPYLHPCVREILSDCALPIAVLAFSLISSHGFREIEMSKFRYNPSESPFAMAQIQSLSLRAVSGAMGLGFLLSMLFFIEQNLVAALVNAPENRLVKGTAYHWDLLLLAIINTGLSLFGLPWIHAAYPHSPLHVRALALVEERVENGHIYDTIVNVKETRLTSLGASVLVGLSLLLLPVPLQWIPKPVLYGLFLYIALTSLDGNQLVQRVALLLKEQTAYPPTHYIRRVPQRKIHYFTGLQVLQLLLLCAFGMSSLPYMKMIFPLIMIAMIPIRYILLPRIIEAKYLDVMDAEHRP

SEQ ID NO: 589 - protein, 3012 aa, Homo sapiens
MASQQDSGFFEISIKYLLKSWSNTSPVGNGYIKPPVPPASGTHREKGPPTMLPINVDPDSKPGEYVLKSLFVNFTTQAERKIRIIMAEPLEKPLTKSLQRGEDPQFDQVISSMSSLSEYCLPSILRTLFDWYKRQNGIEDESHEYRPRTSNKSKSDEQQRDYLMERRDLAIDFIFSLVLIEVLKQIPLHPVIDSLIHDVINLAFKHFKYKEGYLGPNTGNMHIVADLYAEVIGVLAQAKFPAVKKKFMAELKELRHKEQNPYVVQSIISLIMGMKFFRIKMYPVEDFEASLQFMQECAHYFLEVKDKDIKHALAGLFVEILVPVAAAVKNEVNVPCLRNFVESLYDTTLELSSRKKHSLALYPLVTCLLCVSQKQLFLNRWHIFLNNCLSNLKNKDPKMARVALESLYRLLWVYMIRIKCESNTATQSRLITIITTLFPKGSRGVVPRDMPLNIFVKIIQFIAQERLDFAMKEIIFDFLCVGKPAKAFSLNPERMNIGLRAFLVIADSLQQKDGEPPMPVTGAVLPSGNTLRVKKTYLSKTLTEEEAKMIGMSLYYSQVRKAVDNILRHLDKEVGRCMMLTNVQMLNKEPEDMITGERKPKIDLFRTCVAAIPRLLPDGMSKLELIDLLARLSIHMDDELRHIAQNSLQGLLVDFSDWREDVLFGFTNFLLREVNDMHHTLLDSSLKLLLQLLTQWKLVIQTQGKVYEQANKIRNSELIANGSSHRIQSERGPHCSVLHAVEGFALVLLCSFQVATRKLSVLILKEIRALFIALGQPEDDDRPMIDVMDQLSSSILESFIHVAVSDSATLPLTHNVDLQWLVEWNAVLVNSHYDVKSPSHVWIFAQSVKDPWVLCLFSFLRQENLPKHCPTALSYAWPYAFTRLQSVMPLVDPNSPINAKKTSTAGSGDNYVTLWRNYLILCFGVAKPSIMSPGHLRASTPEIMATTPDGTVSYDNKAIGTPSVGVLLKQLVPLMRLESIEITESLVLGFGRTNSLVFRELVEELHPLMKEALERRPENKKRRERRDLLRLQLLRIFELLADAGVISDSTNGALERDTLALGALFLEYVDLTRMLLEAENDKEVEILKDIRAHFSAMVANLIQCVPVHHRRFLFPQQSLRHHLFILFSQWAGPFSIMFTPLDRYSDRNHQITRYQYCALKAMSAVLCCGPVFDNVGLSPDGYLYKWLDNILACQDLRVHQLGCEVVVLLLELNPDQINLFNWAIDRCYTGSYQLASGCFKAIATVCGSRNYPFDIVTLLNLVLFKASDTNREIYEISMQLMQILEAKLFVYSKKVAEQRPGSILYGTHGPLPPLYSVSLALLSCELARMYPELTLPLFSGKPAIPHNTPQRAPDHAYLPAALAAQHRAGGQQAPPPGSSPSSPEDEVKDREGDVTASHGLRGNGWGSPEATSLVLNNLMYMTAKYGDEVPGPEMENAWNALANNEKWSNNLRITLQFLISLCGVSSDTVLLPYIKKVAIYLCRNNTIQTMEELLFELQQTEPVNPIVQHCDNPPFYRFTASSKASAAASGTTSSSNTVVAGQENFPDAEENKILKESDERFSNVIRAHTRLESRYSNSSGGSYDEDKNDPISPYTGWLLTITETKQPQPLPMPCTGGCWAPLVDYLPETITPRGPLHRCNIAVIFMTEMVVDHSVREDWALHLPLLLHAVFLGLDHYRPEVFEHSKKLLLHLLIALSCNSNFHSIASVLLQTREMGEAKTLTVQPAYQPEYLYTGGFDFLREDQSSPVPDSGLSSSSTSSSISLGGSSGNLPQMTQEVEDVDTAAETDEKANKLIEFLTTRAFGPLWCHEDITPKNQNSKSAEQLTNFLRHVVSVFKDSKSGFHLEHQLSEVALQTALASSSRHYAGRSFQIFRALKQPLSAHALSDLLSRLVEVIGEHGDEIQGYVMEALLTLEAAVDNLSDCLKNSDLLTVLSRSSSPDLSSSSKLTASRKSTGQLNMNPGTTSGNTATAERSRHQRSFSVPKKFGVIDRSSDPPRSATLDRIQACTQQGLSSKTRSSSSLKDSLTDPSHINHPTNLLATIFWVTVALMESDFEFEYLMALRLLSRLLAHMPLDKAENREKLEKLQAQLKWADFSGLQQLLLKGFTSLTTTDLTLQLFSLLTPVSKISMVDASHAIGFPLNVLCLLPQLIQHFENPNQFCKDIAERIAQVCLEEKNPKLSNLAHVMTLYKTHSYTRDCATWVNVVCRYLHEAYADITLNMVTYLAELLEKGLPSVQQPLLQVIYSLLSYMDLSVVPVKQFNVEVLKTIEKYVQSVHWREALNILKLVVSRSASLVLPSYQHSDLSKIEIHRVWTSASKELPGKTLDFHFDISETPIIGRRYDELQNSSGRDGKPRAMAVTRSTSSTSSGSNSNVLVPVSWKRPQYSQKRTKEKLVHVLSLCGQEVGLSKNPSVIFSSCGDLDLLEHQTSLVSSEDGAREQENMDDTNSEQQFRVFRDFDFLDVELEDGEGESMDNFNWGVRRRSLDSLDKCDMQILEERQLSGSTPSLNKMHHEDSDESSEEEDLTASQILEHSDLIMTLSPSEETNPMELLTTACDSTPAEPHSFNTRMSSFDASLPDMNNLQISEGSKAEAVREEEDTTVHEDDLSSSINELPAAFECSDSFSLDMTEGEEKGNRALDQFTLASFGEGDRGVSPPPSPFFSAILAAFQPAACDDAEEAWRSHINQLMCDSDGSCAVYTFHVFSSLFKNIQKRFCFLTCDAASYLGDNLRGIGSKFVSSSQMLTSCSECPTLFVDAETLLSCGLLDKLKFSVLELQEYLDTYNNRKEATLSWLANCKATFAGGSRDGVITCQPGDSEEKQLELCQRLYKLHFQLLLLFQSYCKLIGQVHEVSSMPELLNMSRELSDLKKHLKEASAVIAADPLYSDGAWSEPTFTSTEAAIQSMLECLKNNELGKALRQIRECRSLWPNDIFGSSSDDEVQTLLNIYFRHQTLGQTGTYALVGSNQSLTEICTKLMELNMEIRDMIRRAQSYRVLTTFLPDSSVSGTSL

SEQ ID NO: 590 - protein, 161 aa, Homo sapiens
MDQETVGNVVLLAIVTLISVVQNGFFAHKVEHESRTQNGRSFQRTGTLAFERVYTANQNCVDAYPTFLAVLWSAGLLCSQVPAAFAGLMYLFVRQKYFVGYLGERTQSTPGYIFGKRIILFLFLMSVAGIFNYYLIFFFGSDFENYIKTISTTISPLLLIP

SEQ ID NO: 591 - protein, 327 aa, Homo sapiens
MRLAVLFSGALLGLLAESTGTTSHRTTKSHKTTTHRTTTTGTTSHGPTTATHNPTTTSHGNVTVHPTSNSTATSQGPSTATHSPATTSHGNATVHPTSNSTATSPGFTSSAHPEPPPPSPSPSPTSKETIGDYTWTNGSQPCVHLQAQIQIRVMYTTQGGGEAWGISVLNPNKTKVQGSCEGAHPHLLLSFPYGHLSFGFMQDLQQKVVYLSYMAVEYNVSFPHAAQWTFSAQNASLRDLQAPLGQSFSCSNSSIILSPAVHLDLLSLRLQAAQLPHTGVFGQSFSCPSDRSILLPLIIGLILLGLLALVLIAFCIIRRRPSAYQAL

SEQ ID NO: 592 - protein, 271 aa, Homo sapiens
MGSLFPLSLLFFLAAAYPGVGSALGRRTKRAQSPKGSPLAPSGTSVPFWVRMSPEFVAVQPGKSVQLNCSNSCPQPQNSSLRTPLRQGKTLRGPGWVSYQLLDVRAWSSLAHCLVTCAGKTRWATSRITAYKPPHSVILEPPVLKGRKYTLRCHVTQVFPVGYLVVTLRHGSRVIYSESLERFTGLDLANVTLTYEFAAGPRDFWQPVICHARLNLDGLVVRNSSAPITLMLAWSPAPTALASGSIAALVGILLTVGAAYLCKCLAMKSQA

SEQ ID NO: 593 - protein, 265 aa, Homo sapiens
MVTLTYFGAHFAVIRRASLEKNPYQAVHQWAFSAGLSLVGLLTLGAVLSAAATVREAQGLMAGVEDAMLDTYDLVYEQAMKGTSHVRRQELAAIQDVFLCCGKKSPFSRLGSTEADLCQGEEAAREDCLQGIRSFLRTHQQVASSLTSIGLALTVSALLFSSFLWFAIRCGCSLDRKGKYTLTPRACGRQPQEPSLLRCSQGGPTHCLHSEAVAIGPRGCSGSLRWLQESDAAPLPLSCHLAAHRALQGRSRGGLSGCPERGLSD

SEQ ID NO: 594 - protein, 253 aa, Homo sapiens
MGPWSRVRVAKCQMLVTCFFILLLGLSVATMVTLTYFGAHFAVIRRASLEKNPYQAVHQWAFSAGLSLVGLLTLGAVLSAAATVREAQGLMAGGFLCFSLAFCAQVQVVFWRLHSPTQVEDAMLDTYDLVYEQAMKGTSHVRRQELAAIQDVFLCCGKKSPFSRLGSTEADLCQGEEAAREDCLQGIRSFLRTHQQVASSLTSIGLALTVSALLFSSFLWFAIRCGCSLDRKGKYTLTPRSPGQKSRWAQWVP

SEQ ID NO: 595 - protein, 359 aa, Homo sapiens
MQVPNSTGPDNATLQMLRNPAIAVALPVVYSLVAAVSIPGNLFSLWVLCRRMGPRSPSVIFMINLSVTDLMLASVLPFQIYYHCNRHHWVFGVLLCNVVTVAFYANMYSSILTMTCISVERFLGVLYPLSSKRWRRRRYAVAACAGTWLLLLTALSPLARTDLTYPVHALGIITCFDVLKWTMLPSVAMWAVFLFTIFILLFLIPFVITVACYTATILKLLRTEEAHGREQRRRAVGLAAVVLLAFVTCFAPNNFVLLAHIVSRLFYGKSYYHVYKLTLCLSCLNNCLDPFVYYFASREFQLRLREYLGCRRVPRDTLDTRRESLFSARTTSVRSEAGAHPEGMEGATRPGLQRQESVF

SEQ ID NO: 596 - protein, 300 aa, Homo sapiens
MVLLWLTLLLIALPCLLQTKEGGKPWAGAENLTCWIHDVDFLSCSWAVGPGAPADVQYDLYLNVANRRQQYECLHYKTDAQGTRIGCRFDDISRLSSGSQSSHILVRGRSAAFGIPCTDKFVVFSQIEILTPPNMTAKCNKTHSFMHWKMRSHFNRKFRYELQIQKRMQPVITEQVRDRTSFQLLNPGTYTVQIRARERVYEFLSAWSTPQRFECDQEEGANTRAWRTSLLIALGTLLALVCVFVICRRYLVMQRLFPRIPHMKDPIGDSFQNDKLVVWEAGKAGLEECLVTEVQVVQKT

SEQ ID NO: 597 - protein, 176 aa, Homo sapiens
MRIFAVFIFMTYWHLLNAPYNKINQRILVVDPVTSEHELTCQAEGYPKAEVIWTSSDHQVLSGKTTTTNSKREEKLFNVTSTLRINTTTNEIFYCTFRRLDPEENHTAELVIPELPLAHPPNERTHLVILGAILLCLGVALTFIFRLRKGRMMDVKKCGIQDTNSKKQSDTHLEET

SEQ ID NO: 598 - protein, 290 aa, Homo sapiens
MRIFAVFIFMTYWHLLNAFTVTVPKDLYVVEYGSNMTIECKFPVEKQLDLAALIVYWEMEDKNIIQFVHGEEDLKVQHSSYRQRARLLKDQLSLGNAALQITDVKLQDAGVYRCMISYGGADYKRITVKVNAPYNKINQRILVVDPVTSEHELTCQAEGYPKAEVIWTSSDHQVLSGKTTTTNSKREEKLFNVTSTLRINTTTNEIFYCTFRRLDPEENHTAELVIPELPLAHPPNERTHLVILGAILLCLGVALTFIFRLRKGRMMDVKKCGIQDTNSKKQSDTHLEET

SEQ ID NO: 599 - protein, 354 aa, Homo sapiens
MIQPEKLLLVTVGKTATLHCTVTSLLPVGPVLWFRGVGPGRELIYNQKEGHFPRVTTVSDLTKRNNMDFSIRISSITPADVGTYYCVKFRKGSPENVEFKSGPGTEMALGAKPSAPVVLGPAARTTPEHTVSFTCESHGFSPRDITLKWFKNGNELSDFQTNVDPTGQSVAYSIRSTARVVLDPWDVRSQVICEVAHVTLQGDPLRGTANLSEAIRVPPTLEVTQQPMRVGNQVNVTCQVRKFYPQSLQLTWSENGNVCQRETASTLTENKDGTYNWTSWFLVNISDQRDDVVLTCQVKHDGQLAVSKRLALEVTVHQKDQSSDATPGPASSLTALLLIAVLLGPIYVPWKQKT

SEQ ID NO: 600 - protein, 356 aa, Homo sapiens
MRPTLLWSLLLLLGVFAAAAAAPPAQLTLETYQEWCNDSAATHDPLSQLPAPQHPKIRLYNAEQVLSWEPVALSNSTRPVVYQVQFKYTDSKWFTADIMSIGVNCTQITATECDFTAASPSAGFPMDFNVTLRLRAELGALHSAWVTMPWFQHYRNVTVGPPENIEVTPGEGSLIIRFSSPFDIADTSTAFFCYYVHYWEKGGIQQVKGPFRSNSISLDNLKPSRVYCLQVQAQLLWNKSNIFRVGHLSNISCYETMADASTELQQVILISVGTFSLLSVLAGACFFLVLKYRGLIKYWFHTPPSIPLQIEEYLKDPTQPILEALDKDSSPKDDVWDSVSIISFPEKEQEDVLQTL

SEQ ID NO: 601 - protein, 197 aa, Homo sapiens
MLLSQNAFIFRSLNLVLMVYISLVFGISYDSPDYTDESCTFKISLRNFRSILSWELKNHSIVPTHYTLLYTIMSKPEDLKVVKNCANTTRSFCDLTDEWRSTHEAYVTVLEGFSGNTTLFSCSHNFWLAIDMSFEPPEFEIVGFTNHINVMVKFPSIVEEELQFDLSLVIEEQSEGIVKKGEDEKLDISQFCHRQAL

SEQ ID NO: 602 - protein, 447 aa, Homo sapiens
MPMPTEGTPPPLSGTPIPVPAYFRHAEPGFSLKRPRGLSRSLPPPPPAKGSIPISRLFPPRTPGWHQLQPRRVSFRGEASETLQSPGYDPSRPESFFQQSFQRLSRLGHGSYGEVFKVRSKEDGRLYAVKRSMSPFRGPKDRARKLAEVGSHEKVGQHPCCVRLEQAWEEGGILYLQTELCGPSLQQHCEAWGASLPEAQVWGYLRDTLLALAHLHSQGLVHLDVKPANIFLGPRGRCKLGDFGLLVELGTAGAGEVQEGDPRYMAPELLQGSYGTAADVFSLGLTILEVACNMELPHGGEGWQQLRQGYLPPEFTAGLSSELRSVLVMMLEPDPKLRATAEALLALPVLRQPRAWGVLWCMAAEALSRGWALWQALLALLCWLWHGLAHPASWLQPLGPPATPPGSPPCSLLLDSSLSSNWDDDSLGPCVLKRTEGALECSQMEGL

SEQ ID NO: 603 - protein, 159 aa, Homo sapiens
MMLVGFLGCCGAVQESQCMLGLFFGFLLVIFAIEIAAAIWGYSHKDEVIKEVQEFYKDTYNKLKTKDEPQRETLKAIHYALNCCGLAGGVEQFISDICPKKDVLETFTVKSCPDAIKEVFDNKFHIIGAVGIGIAVVMIFGMIFSMILCCAIRRNREMV

SEQ ID NO: 604 - protein, 251 aa, Homo sapiens
MPVKGGTKCIKYLLFGFNFIFWLAGIAVLAIGLWLRFDSQTKSIFEQETNNNNSSFYTGVYILIGAGALMMLVGFLGCCGAVQESQCMLGLATKRTMFPPFLEDHVCFFSLNPQFFGFLLVIFAIEIAAAIWGYSHKDEVIKEVQEFYKDTYNKLKTKDEPQRETLKAIHYALNCCGLAGGVEQFISDICPKKDVLETFTVKSCPDAIKEVFDNKFHIIGAVGIGIAVVMIFGMIFSMILCCAIRRNREMV

SEQ ID NO: 605 - protein, 586 aa, Homo sapiens
MSRESDVEAQQSHGSSACSQPHGSVTQSQGSSSQSQGISSSSTSTMPNSSQSSHSSSGTLSSLETVSTQELYSIPEDQEPEDQEPEEPTPAPWARLWALQDGFANLETESGHVTQSDLELLLSSDPPASASQSAGIRGVRHHPRPVCSLKCVNDNYWFGRDKSCEYCFDEPLLKRTDKYRTYSKKHFRIFREVGPKNSYIAYIEDHSGNGTFVNTELVGKGKRRPLNNNSEIALSLSRNKVFVFFDLTVDDQSVYPKALRDEYIMSKTLGSGACGEVKLAFERKTCKKVAIKIISKRKFAIGSAREADPALNVETEIEILKKLNHPCIIKIKNFFDAEDYYIVLELMEGGELFDKVVGNKRLKEATCKLYFYQMLLAVQYLHENGIIHRDLKPENVLLSSQEEDCLIKITDFGHSKILGETSLMRTLCGTPTYLAPEVLVSVGTAGYNRAVDCWSLGVILFICLSGYPPFSEHRTQVSLKDQITSGKYNFIPEVWAEVSEKALDLVKKLLVVDPKARFTTEEALRHPWLQDEDMKRKFQDLLSEENESTALPQVLAQPSTSRKRPREGEAEGAETTKRPAVCAAVL

SEQ ID NO: 606 - protein, 226 aa, Homo sapiens
MDWGTLQTILGGVNKHSTSIGKIWLTVLFIFRIMILVVAAKEVWGDEQADFVCNTLQPGCKNVCYDHYFPISHIRLWALQLIFVSTPALLVAMHVAYRRHEKKRKFIKGEIKSEFKDIEEIKTQKVRIEGSLWWTYTSSIFFRVIFEAAFMYVFYVMYDGFSMQRLVKCNAWPCPNTVDCFVSRPTEKTVFTVFMIAVSGICILLNVTELCYLLIRYCSGKSKKPV

SEQ ID NO: 607 - protein, 244 aa, Homo sapiens
MRWCLLLIWAQGLRQAPLASGMMTGTIETTGNISAEKGGSIILQCHLSSTTAQVTQVNWEQQDQLLAICNADLGWHISPSFKDRVAPGPGLGLTLQSLTVNDTGEYFCIYHTYPDGTYTGRIFLEVLESSVAEHGARFQIPLLGAMAATLVVICTAVIVVVALTRKKKALRIHSVEGDLRRKSAGQEEWSPSAPSPPGSCVQAEAAPAGLCGEQRGEDCAELHDYFNVLSYRSLGNCSFFTETG

SEQ ID NO: 608 - protein, 195 aa, Homo sapiens
MVTFSENHGVVIQPAYKDKINITQLGLQNSTITFWNITLEDEGCYMCLFNTFGFGKISGTACLTVYVQPIVSLHYKFSEDHLNITCSATARPAPMVFWKVPRSGIENSTVTLSHPNGTTSVTSILHIKDPKNQVGKEVICQVLHLGTVTDFKQTVNKGYWFSVPLLLSIVSLVILLVLISILLYWKRHRNQDREP

SEQ ID NO: 609 - protein, 740 aa, Homo sapiens
MGLADASGPRDTQALLSATQAMDLRRRDYHMERPLLNQEHLEELGRWGSAPRTHQWRTWLQCSRARAYALLLQHLPVLVWLPRYPVRDWLLGDLLSGLSVAIMQLPQGLAYALLAGLPPVFGLYSSFYPVFIYFLFGTSRHISVGTFAVMSVMVGSVTESLAPQALNDSMINETARDAARVQVASTLSVLVGLFQVGLGLIHFGFVVTYLSEPLVRGYTTAAAVQVFVSQLKYVFGLHLSSHSGPLSLIYTVLEVCWKLPQSKVGTVVTAAVAGVVLVVVKLLNDKLQQQLPMPIPGELLTLIGATGISYGMGLKHRFEVDVVGNIPAGLVPPVAPNTQLFSKLVGSAFTIAVVGFAIAISLGKIFALRHGYRVDSNQELVALGLSNLIGGIFQCFPVSCSMSRSLVQESTGGNSQVAGAISSLFILLIIVKLGELFHDLPKAVLAAIIIVNLKGMLRQLSDMRSLWKANRADLLIWLVTFTATILLNLDLGLVVAVIFSLLLVVVRTQMPHYSVLGQVPDTDIYRDVAEYSEAKEVRGVKVFRSSATVYFANAEFYSDALKQRCGVDVDFLISQKKKLLKKQEQLKLKQLQKEEKLRKQAGPLLSACLAPQQVSSGDKMEDATANGQEDSKAPDGSTLKALGLPQPDFHSLILDLGALSFVDTVCLKSLKNIFHDFREIEVEVYMAACHSPVVSQLEAGHFFDASITKKHLFASVHDAVTFALQHPRPVPDSPVSVTRL

SEQ ID NO: 610 - protein, 421 aa, Homo sapiens
MVVLNPMTLGIYLQLFFLSIVSQPTFINSVLPISAALPSLDQKKRGGHKACCLLTPPPPPLFPPPFFRGGRSPGPPGLPGKTGPKGEKGELGRPGRKGRPGPPGVPGMPGPIGWPGPEGPRGEKGDLGMMGLPGSRGPMGSKGYPGSRGEKGSRGEKGDLGPKGEKGFPGFPGMLGQKGEMGPKGEPGIAGHRGPTGRPGKRGKQGQKGDSGVMGPPGKPGPSGQPGRPGPPGPPPAGQLIMGPKGERGFPGPPGRCLCGPTMNVNNPSYGESVYGPSSPRVPVIFVVNNQEELERLNTQNAIAFRRDQRSLYFKDSLGWLPIQLTPFYPVDYTADQHGTCGDGLLQPGEECDDGNSDVGDDCIRCHRAYCGDGHRHEGVEDCDGSDFGYLTCETYLPGSYGDLQCTQYCYIDSTPCRYFT

SEQ ID NO: 611 - protein, 455 aa, Homo sapiens
MVVLNPMTLGIYLQLFFLSIVSQPTFINSVLPISAALPSLDQKKRGGHKACCLLTPPPPPLFPPPFFRGGRSPLLSPDMKNLMLELETSQSPCMQGSLGSPGPPGPQGPPGLPGKTGPKGEKGELGRPGRKGRPGPPGVPGMPGPIGWPGPEGPRGEKGDLGMMGLPGSRGPMGSKGYPGSRGEKGSRGEKGDLGPKGEKGFPGFPGMLGQKGEMGPKGEPGIAGHRGPTGRPGKRGKQGQKGDSGVMGPPGKPGPSGQPGRPGPPGPPPAGQLIMGPKGERGFPGPPGRCLCGPTMNVNNPSYGESVYGPSSPRVPVIFVVNNQEELERLNTQNAIAFRRDQRSLYFKDSLGWLPIQLTPFYPVDYTADQHGTCGDGLLQPGEECDDGNSDVGDDCIRCHRAYCGDGHRHEGVEDCDGSDFGYLTCETYLPGSYGDLQCTQYCYIDSTPCRYFT

SEQ ID NO: 612 - protein, 402 aa, Homo sapiens
MPLQLLLLLILLGPGNSLQLWDTWADEAEKALGPLLARDRRQATEYEYLDYDFLPETEPPEMLRNSTDTTPLTGPGTPESTTVEPAARRSTGLDAGGAVTELTTELANMGNLSTDSAAMEIQTTQPAATEAQTTPLAATEAQTTRLTATEAQTTPLAATEAQTTPPAATEAQTTQPTGLEAQTTAPAAMEAQTTAPAAMEAQTTPPAAMEAQTTQTTAMEAQTTAPEATEAQTTQPTATEAQTTPLAAMEALSTEPSATEALSMEPTTKRGLFIPFSVSSVTHKGIPMAASNLSVNYPVGAPDHISVKQCLLAILILALVATIFFVCTVVLAVRLSRKGHMYPVRNYSPTEMVCISSLLPDGGEGPSATANGGLSKAKSPGLTPEPREDREGDDLTLHSFLP

SEQ ID NO: 613 - protein, 355 aa, Homo sapiens
MKKFSRMPKSEGGSGGGAAGGGAGGAGAGAGCGSGGSSVGVRVFAVGRHQVTLEESLAEGGFSTVFLVRTHGGIRCALKRMYVNNMPDLNVCKREITIMKELSGHKNIVGYLDCAVNSISDNVWEVLILMEYCRAGQVVNQMNKKLQTGFTEPEVLQIFCDTCEAVARLHQCKTPIIHRDLKVENILLNDGGNYVLCDFGSATNKFLNPQKDGVNVVEEEIKKYTTLSYRAPEMINLYGGKPITTKADIWALGCLLYKLCFFTLPFGESQVAICDGNFTIPDNSRYSRNIHCLIRFMLEPDPEHRPDIFQVSYFAFKFAKKDCPVSNINKCCKQLLRHGALLTEILLFLQLFLNR

SEQ ID NO: 614 - protein, 1161 aa, Homo sapiens
MTFGTVLLLSVLASYHGFNLDVEEPTIFQEDAGGFGQSVVQFGGSRLVVGAPLEVVAANQTGRLYDCAAATGMCQPIPLHIRPEAVNMSLGLTLAASTNGSRLLACGPTLHRVCGENSYSKGSCLLLGSRWEIIQTVPDATPECPHQEMDIVFLIDGSGSIDQNDFNQMKGFVQAVMGQFEGTDTLFALMQYSNLLKIHFTFTQFRTSPSQQSLVDPIVQLKGLTFTATGILTVVTQLFHHKNGARKSAKKILIVITDGQKYKDPLEYSDVIPQAEKAGIIRYAIGVGHAFQGPTARQELNTISSAPPQDHVFKVDNFAALGSIQKQLQEKIYAVEGTQSRASSSFQHEMSQEGFSTALTMDGLFLGAVGSFSWSGGAFLYPPNMSPTFINMSQENVDMRDSYLGYSTELALWKGVQNLVLGAPRYQHTGKAVIFTQVSRQWRKKAEVTGTQIGSYFGASLCSVDVDSDGSTDLILIGAPHYYEQTRGGQVSVCPLPRGRVQWQCDAVLRGEQGHPWGRFGAALTVLGDVNEDKLIDVAIGAPGEQENRGAVYLFHGASESGISPSHSQRIASSQLSPRLQYFGQALSGGQDLTQDGLMDLAVGARGQVLLLRSLPVLKVGVAMRFSPVEVAKAVYRCWEEKPSALEAGDATVCLTIQKSSLDQLGDIQSSVRFDLALDPGRLTSRAIFNETKNPTLTRRKTLGLGIHCETLKLLLPDCVEDVVSPIILHLNFSLVREPIPSPQNLRPVLAVGSQDLFTASLPFEKNCGQDGLCEGDLGVTLSFSGLQTLTVGSSLELNVIVTVWNAGEDSYGTVVSLYYPAGLSHRRVSGAQKQPHQSALRLACETVPTEDEGLRSSRCSVNHPIFHEGSNGTFIVTFDVSYKATLGDRMLMRASASSENNKASSSKATFQLELPVKYAVYTMISRQEESTKYFNFATSDEKKMKEAEHRYRVNNLSQRDLAISINFWVPVLLNGVAVWDVVMEAPSQSLPCVSERKPPQHSDFLTQISRSPMLDCSIADCLQFRCDVPSFSVQEELDFTLKGNLSFGWVRETLQKKVLVVSVAEITFDTSVYSQLPGQEAFMRAQMEMVLEEDEVYNAIPIIMGSSVGALLLLALITATLYKLGFFKRHYKEMLEDKPEDTATFSGDDFSCVAPNVPLS

SEQ ID NO: 615 - protein, 326 aa, Homo sapiens
MSENDNVFCAQLQCFHFPTLRHHDLHSWHAESCYEKSSFLCKRSQTCVDIKDNVVDEGFYFTPKGDDPCLSCTCHGGEPEMCVAALCERPQGCQQYRKDPKECCKFMCLDPDGNSLFDSMASGMRLVVSCISSFLILSLLLFMVHRLRQRRRERIESLIGANLHHFNLGRRIPGFDYGPDGFGTGLTPLHLSDDGEGGTFHFHDPPPPYTAYKYPDIGQPDDPPPPYEASIHPDSVFYDPADDDAFEPVEVSLPAPGDGGSEGALLRRLEQPLPTAGASLADLEDSADSSSALLVPPDPAQSGSTPAAEALPGGGRHSRSSLNTVV

SEQ ID NO: 616 - protein, 986 aa, Homo sapiens
MGPPLPLLLLLLLLLPPRVLPAAPSSVPRGRQLPGRLGCLLEEGLCGASEACVNDGVFGRCQKVPAMDFYRYEVSPVALQRLRVALQKLSGTGFTWQDDYTQYVMDQELADLPKTYLRRPEASSPARPSKHSVGSERRYSREGGAALANALRRHLPFLEALSQAPASDVLARTHTAQDRPPAEGDDRFSESILTYVAHTSALTYPPGSRTQLREDLLPRTLGQLQPDELSPKVDSGVDRHHLMAALSAYAAQRPPAPPGEGSLEPQYLLRAPSRMPRPLLAPAAPQKWPSPLGDSEDPSSTGDGARIHTLLKDLQRQPAEVRGLSGLELDGMAELMAGLMQGVDHGVARGSPGRAALGESGEQADGPKATLRGDSFPDDGVQDDDDRLYQEVHRLSATLGGLLQDHGSRLLPGALPFARPLDMERKKSEHPESSLSSEEETAGVENVKSQTYSKDLLGQQPHSEPGAAAFGELQNQMPGPSKEEQSLPAGAQEALSDGLQLEVQPSEEEARGYIVTDREVLGPAVTFKVSANVQNVTTEDVEKATVDNKDKLEETSGLKILQTGVGSKSKLKFLPPQAEQEDSTKFIALTLVSLACILGVLLASGLIYCLRHSSQHRLKEKLSGLGGDPGADATAAYQELCRQRMATRPPDRPEGPHTSRISSVSSQFSDGPIPSPSARSSASSWSEEPVQSNMDISTGHMILSYMEDHLKNKNRLEKEWEALCAYQAEPNSSFVAQREENVPKNRSLAVLTYDHSRVLLKAENSHSHSDYINASPIMDHDPRNPAYIATQGPLPATVADFWQMVWESGCVVIVMLTPLAENGVRQCYHYWPDEGSNLYHIYEVNLVSEHIWCEDFLVRSFYLKNLQTNETRTVTQFHFLSWYDRGVPSSSRSLLDFRRKVNKCYRGRSCPIIVHCSDGAGRSGTYVLIDMVLNKMAKGAKEIDIAATLEHLRDQRPGMVQTKEQFEFALTAVAEEVNAILKALPQ

SEQ ID NO: 617 - protein, 998 aa, Homo sapiens
MGPPLPLLLLLLLLLPPRVLPAAPSSVPRGRQLPGRLDGVFGRCQKVPAMDFYRYEVSPVALQRLRVALQKLSGTGFTWQDDYTQYVMDQELADLPKTYLRRPEASSPARPSKHSVGSERRYSREGGAALANALRRHLPFLEALSQAPASDVLARTHTAQDRPPAEGDDRFSESILTYVAHTSALTYPPGSRTQLREDLLPRTLGQLQPDELSPKVDSGVDRHHLMAALSAYAAQRPPAPPGEGSLEPQYLLRAPSRMPRPLLAPAAPQKWPSPLGDSEDPSSTGDGARIHTLLKDLQRQPAEVRGLSGLELDGMAELMAGLMQGVDHGVARGSPGRAALGESGEQADGPKATLRGDSFPDDGVQDDDDRLYQEVHRLSATLGGLLQDHGSRLLPGALPFARPLDMERKKSEHPESSLSSEEETAGVENVKSQTYSKDLLGQQPHSEPGAAAFGELQNQMPGPSKEEQSLPAGAQEALSDGLQLEVQPSEEEARGYIVTDRDPLRPEEGRRLVEDVARLLQVPSSAFADVEVLGPAVTFKVSANVQNVTTEDVEKATVDNKDKLEETSGLKILQTGVGSKSKLKFLPPQAEQEDSTKFIALTLVSLACILGVLLASGLIYCLRHSSQHRLKEKLSGLGGDPGADATAAYQELCRQRMATRPPDRPEGPHTSRISSVSSQFSDGPIPSPSARSSASSWSEEPVQSNMDISTGHMILSYMEDHLKNKNRLEKEWEALCAYQAEPNSSFVAQREENVPKNRSLAVLTYDHSRVLLKAENSHSHSDYINASPIMDHDPRNPAYIATQGPLPATVADFWQMVWESGCVVIVMLTPLAENGVRQCYHYWPDEGSNLYHIYEVNLVSEHIWCEDFLVRSFYLKNLQTNETRTVTQFHFLSWYDRGVPSSSRSLLDFRRKVNKCYRGRSCPIIVHCSDGAGRSGTYVLIDMVLNKMAKGAKEIDIAATLEHLRDQRPGMVQTKEQFEFALTAVAEEVNAILKALPQ

SEQ ID NO: 618 - protein, 1015 aa, Homo sapiens
MGPPLPLLLLLLLLLPPRVLPAAPSSVPRGRQLPGRLGCLLEEGLCGASEACVNDGVFGRCQKVPAMDFYRYEVSPVALQRLRVALQKLSGTGFTWQDDYTQYVMDQELADLPKTYLRRPEASSPARPSKHSVGSERRYSREGGAALANALRRHLPFLEALSQAPASDVLARTHTAQDRPPAEGDDRFSESILTYVAHTSALTYPPGSRTQLREDLLPRTLGQLQPDELSPKVDSGVDRHHLMAALSAYAAQRPPAPPGEGSLEPQYLLRAPSRMPRPLLAPAAPQKWPSPLGDSEDPSSTGDGARIHTLLKDLQRQPAEVRGLSGLELDGMAELMAGLMQGVDHGVARGSPGRAALGESGEQADGPKATLRGDSFPDDGVQDDDDRLYQEVHRLSATLGGLLQDHGSRLLPGALPFARPLDMERKKSEHPESSLSSEEETAGVENVKSQTYSKDLLGQQPHSEPGAAAFGELQNQMPGPSKEEQSLPAGAQEALSDGLQLEVQPSEEEARGYIVTDRDPLRPEEGRRLVEDVARLLQVPSSAFADVEVLGPAVTFKVSANVQNVTTEDVEKATVDNKDKLEETSGLKILQTGVGSKSKLKFLPPQAEQEDSTKFIALTLVSLACILGVLLASGLIYCLRHSSQHRLKEKLSGLGGDPGADATAAYQELCRQRMATRPPDRPEGPHTSRISSVSSQFSDGPIPSPSARSSASSWSEEPVQSNMDISTGHMILSYMEDHLKNKNRLEKEWEALCAYQAEPNSSFVAQREENVPKNRSLAVLTYDHSRVLLKAENSHSHSDYINASPIMDHDPRNPAYIATQGPLPATVADFWQMVWESGCVVIVMLTPLAENGVRQCYHYWPDEGSNLYHIYEVNLVSEHIWCEDFLVRSFYLKNLQTNETRTVTQFHFLSWYDRGVPSSSRSLLDFRRKVNKCYRGRSCPIIVHCSDGAGRSGTYVLIDMVLNKMAKGAKEIDIAATLEHLRDQRPGMVQTKEQFEFALTAVAEEVNAILKALPQ

SEQ ID NO: 619 - protein, 399 aa, Homo sapiens
ASTKGPSVFPLAPSSKSTSGGTAALGCLVKDYFPEPVTVSWNSGALTSGVHTFPAVLQSSGLYSLSSVVTVPSSSLGTQTYICNVNHKPSNTKVDKKVEPKSCDKTHTCPPCPAPELLGGPSVFLFPPKPKDTLMISRTPEVTCVVVDVSHEDPEVKFNWYVDGVEVHNAKTKPREEQYNSTYRVVSVLTVLHQDWLNGKEYKCKVSNKALPAPIEKTISKAKGQPREPQVYTLPPSRDELTKNQVSLTCLVKGFYPSDIAVEWESNGQPENNYKTTPPVLDSDGSFFLYSKLTVDKSRWQQGNVFSCSVMHEALHNHYTQKSLSLSPELQLEESCAEAQDGELDGLWTTITIFITLFLLSVCYSATVTFFKVKWIFSSVVDLKQTIIPDYRNMIGQGA

SEQ ID NO: 620 - protein, 429 aa, Homo sapiens
PTKAPDVFPIISGCRHPKDNSPVVLACLITGYHPTSVTVTWYMGTQSQPQRTFPEIQRRDSYYMTSSQLSTPLQQWRQGEYKCVVQHTASKSKKEIFRWPESPKAQASSVPTAQPQAEGSLAKATTAPATTRNTGRGGEEKKKEKEKEEQEERETKTPECPSHTQPLGVYLLTPAVQDLWLRDKATFTCFVVGSDLKDAHLTWEVAGKVPTGGVEEGLLERHSNGSQSQHSRLTLPRSLWNAGTSVTCTLNHPSLPPQRLMALREPAAQAPVKLSLNLLASSDPPEAASWLLCEVSGFSPPNILLMWLEDQREVNTSGFAPARPPPQPRSTTFWAWSVLRVPAPPSPQPATYTCVVSHEDSRTLLNASRSLEVSYLAMTPLIPQSKDENSDDYTTFDDVGSLWTTLSTFVALFILTLLYSGIVTFIKVK

SEQ ID NO: 621 - protein, 287 aa, Homo sapiens
MSPHPTALLGLVLCLAQTIHTQEEDLPRPSISAEPGTVIPLGSHVTFVCRGPVGVQTFRLERDSRSTYNDTEDVSQASPSESEARFRIDSVREGNAGLYRCIYYKPPKWSEQSDYLELLVKESSGGPDSPDTEPGSSAGPTQRPSDNSHNEHAPASQGLKAEHLYILIGVSVVFLFCLLLLVLFCLHRQNQIKQGPPRSKDEEQKPQQRPDLAVDVLERTADKATVNGLPEKDRETDTSALAAGSSQEVTYAQLDHWALTQRTARAVSPQSTKPMAESITYAAVARH

SEQ ID NO: 622 - protein, 269 aa, Homo sapiens
MEREMEDLPRPSISAEPGTVIPLGSHVTFVCRGPVGVQTFRLERDSRSTYNDTEDVSQASPSESEARFRIDSVREGNAGLYRCIYYKPPKWSEQSDYLELLVKESSGGPDSPDTEPGSSAGPTQRPSDNSHNEHAPASQGLKAEHLYILIGVSVVFLFCLLLLVLFCLHRQNQIKQGPPRSKDEEQKPQQRPDLAVDVLERTADKATVNGLPEKDRETDTSALAAGSSQEVTYAQLDHWALTQRTARAVSPQSTKPMAESITYAAVARH

SEQ ID NO: 623 - protein, 565 aa, Homo sapiens
MVAPKSHTDDWAPGPFSSKPQRSQLQIFSSVLQTSLLFLLMGLRASGKDSAPTVVSGILGGSVTLPLNISVDTEIENVIWIGPKNALAFARPKENVTIMVKSYLGRLDITKWSYSLCISNLTLNDAGSYKAQINQRNFEVTTEEEFTLFVYEQLQEPQVTMKSVKVSENFSCNITLMCSVKGAEKSVLYSWTPREPHASESNGGSILTVSRTPCDPDLPYICTAQNPVSQRSSLPVHVGQFCTDPGASRGGTTGETVVGVLGEPVTLPLALPACRDTEKVVWLFNTSIISKEREEAATADPLIKSRDPYKNRVWVSSQDCSLKISQLKIEDAGPYHAYVCSEASSVTSMTHVTLLIYRPERNTKLWIGLFLMVCLLCVGIFSWCIWKRKGRCSVPAFCSSQAEAPADTPEPTAGHTLYSVLSQGYEKLDTPLRPARQQPTPTSDSSSDSNLTTEEDEDRPEVHKPISGRYEVFDQVTQEGAGHDPAPEGQADYDPVTPYVTEVESVVGENTMYAQVFNLQGKTPVSQKEESSATIYCSIRKPQVVPPPQQNDLEIPESPTYENFT

SEQ ID NO: 624 - protein, 311 aa, Homo sapiens
MLLWTAVLLFVPCVGKTVWLYLQAWPNPVFEGDALTLRCQGWKNTPLSQVKFYRDGKFLHFSKENQTLSMGAATVQSRGQYSCSGQVMYIPQTFTQTSETAMVQVQAPVSRPVLTLHHGPADPAVGDMVQLLCEAQRGSPPILYSFYLDEKIVGNHSAPCGGTTSLLFPVKSEQDAGNYSCEAENSVSRERSEPKKLSLKGSQVLFTPASNWLVPWLPASLLGLMVIAAALLVYVRSWRKAGPLPSQIPPTAPGGEQCPLYANVHHQKGKDEGVVYSVVHRTSKRSEARSAEFTVGRKFYHLCGGEMPAAQ

SEQ ID NO: 625 - protein, 465 aa, Homo sapiens
MGGAVVDEGPTGVKAPDGGWGWAVLFGCFVITGFSYAFPKAVSVFFKELIQEFGIGYSDTAWISSILLAMLYGTGPLCSVCVNRFGCRPVMLVGGLFASLGMVAASFCRSIIQVYLTTGVITGLGLALNFQPSLIMLNRYFSKRRPMANGLAAAGSPVFLCALSPLGQLLQDRYGWRGGFLILGGLLLNCCVCAALMRPLVVTAQPGSGPPRPSRRLLDLSVFRDRGFVLYAVAASVMVLGLFVPPVFVVSYAKDLGVPDTKAAFLLTILGFIDIFARPAAGFVAGLGKVRPYSVYLFSFSMFFNGLADLAGSTAGDYGGLVVFCIFFGISYGMVGALQFEVLMAIVGTHKFSSAIGLVLLMEAVAVLVGPPSGGKLLDATHVYMYVFILAGAEVLTSSLILLLGNFFCIRKKPKEPQPEVAAAEEEKLHKPPADSGVDLREVEHFLKAEPEKNGEVVHTPETSV

SEQ ID NO: 626 - protein, 290 aa, Homo sapiens
MVTSSFPISVAVFALITLQVGTQDSFIAAVYEHAVILPNKTETPVSQEDALNLMNENIDILETAIKQAAEQGARIIVTPEDALYGWKFTRETVFPYLEDIPDPQVNWIPCQDPHRFGHTPVQARLSCLAKDNSIYVLANLGDKKPCNSRDSTCPPNGYFQYNTNVVYNTEGKLVARYHKYHLYSEPQFNVPEKPELVTFNTAFGRFGIFTCFDIFFYDPGVTLVKDFHVDTILFPTAWMNVLPLLTAIEFHSAWAMGMGVNLLVANTHHVSLNMTVVFMHQMVPKCIIMT

SEQ ID NO: 627 - protein, 150 aa, Homo sapiens
MWLPWALLLLWVPASTSMTPASITAAKTSTITTAFPPVSSTTLFAVGATHSASIQEETEEVVNSQLPLLLSLLALLLLLLVGASLLAWRMFQKWIKAGDHSELSQNPKQASPREELHYASVVFDSNTNRIAAQRPREEEPDSDYSVIRKT

SEQ ID NO: 628 - protein, 179 aa, Homo sapiens
MPSKSLVMEYLAHPSTLGLAVGVACGMCLGWSLRVCFGMLPKSKTSKTHTDTESEASILGDSGEYKMILVVRNDLKMGKGKVAAQCSHAAVSAYKQIQRRNPEMLKQWEYCGQPKVVVKAPDEETLIALLAHAKMLGLTVSLIQDAGRTQIAPGSQTVLGIGPGPADLIDKVTGHLKLY

SEQ ID NO: 629 - protein, 879 aa, Homo sapiens
MGRLASRPLLLALLSLALCRGRVVRVPTATLVRVVGTELVIPCNVSDYDGPSEQNFDWSFSSLGSSFVELASTWEVGFPAQLYQERLQRGEILLRRTANDAVELHIKNVQPSDQGHYKCSTPSTDATVQGNYEDTVQVKVLADSLHVGPSARPPPSLSLREGEPFELRCTAASASPLHTHLALLWEVHRGPARRSVLALTHEGRFHPGLGYEQRYHSGDVRLDTVGSDAYRLSVSRALSADQGSYRCIVSEWIAEQGNWQEIQEKAVEVATVVIQPSVLRAAVPKNVSVAEGKELDLTCNITTDRADDVRPEVTWSFSRMPDSTLPGSRVLARLDRDSLVHSSPHVALSHVDARSYHLLVRDVSKENSGYYYCHVSLWAPGHNRSWHKVAEAVSSPAGVGVTWLEPDYQVYLNASKVPGFADDPTELACRVVDTKSGEANVRFTVSWYYRMNRRSDNVVTSELLAVMDGDWTLKYGERSKQRAQDGDFIFSKEHTDTFNFRIQRTTEEDRGNYYCVVSAWTKQRNNSWVKSKDVFSKPVNIFWALEDSVLVVKARQPKPFFAAGNTFEMTCKVSSKNIKSPRYSVLIMAEKPVGDLSSPNETKYIISLDQDSVVKLENWTDASRVDGVVLEKVQEDEFRYRMYQTQVSDAGLYRCMVTAWSPVRGSLWREAATSLSNPIEIDFQTSGPIFNASVHSDTPSVIRGDLIKLFCIITVEGAALDPDDMAFDVSWFAVHSFGLDKAPVLLSSLDRKGIVTTSRRDWKSDLSLERVSVLEFLLQVHGSEDQDFGNYYCSVTPWVKSPTGSWQKEAEIHSKPVFITVKMDVLNAFKYPLLIGVGLSTVIGLLSCLIGYCSSHWCCKKEVQETRRERRRLMSMEMD

SEQ ID NO: 630 - protein, 1298 aa, Homo sapiens
MQRGAALCLRLWLCLGLLDGLVSGYSMTPPTLNITEESHVIDTGDSLSISCRGQHPLEWAWPGAQEAPATGDKDSEDTGVVRDCEGTDARPYCKVLLLHEVHANDTGSYVCYYKYIKARIEGTTAASSYVFVRDFEQPFINKPDTLLVNRKDAMWVPCLVSIPGLNVTLRSQSSVLWPDGQEVVWDDRRGMLVSTPLLHDALYLQCETTWGDQDFLSNPFLVHITGNELYDIQLLPRKSLELLVGEKLVLNCTVWAEFNSGVTFDWDYPGKQAERGKWVPERRSQQTHTELSSILTIHNVSQHDLGSYVCKANNGIQRFRESTEVIVHENPFISVEWLKGPILEATAGDELVKLPVKLAAYPPPEFQWYKDGKALSGRHSPHALVLKEVTEASTGTYTLALWNSAAGLRRNISLELVVNVPPQIHEKEASSPSIYSRHSRQALTCTAYGVPLPLSIQWHWRPWTPCKMFAQRSLRRRQQQDLMPQCRDWRAVTTQDAVNPIESLDTWTEFVEGKNKTVSKLVIQNANVSAMYKCVVSNKVGQDERLIYFYVTTIPDGFTIESKPSEELLEGQPVLLSCQADSYKYEHLRWYRLNLSTLHDAHGNPLLLDCKNVHLFATPLAASLEEVAPGARHATLSLSIPRVAPEHEGHYVCEVQDRRSHDKHCHKKYLSVQALEAPRLTQNLTDLLVNVSDSLEMQCLVAGAHAPSIVWYKDERLLEEKSGVDLADSNQKLSIQRVREEDAGRYLCSVCNAKGCVNSSASVAVEGSEDKGSMEIVILVGTGVIAVFFWVLLLLIFCNMRRPAHADIKTGYLSIIMDPGEVPLEEQCEYLSYDASQWEFPRERLHLGRVLGYGAFGKVVEASAFGIHKGSSCDTVAVKMLKEGATASEHRALMSELKILIHIGNHLNVVNLLGACTKPQGPLMVIVEFCKYGNLSNFLRAKRDAFSPCAEKSPEQRGRFRAMVELARLDRRRPGSSDRVLFARFSKTEGGARRASPDQEAEDLWLSPLTMEDLVCYSFQVARGMEFLASRKCIHRDLAARNILLSESDVVKICDFGLARDIYKDPDYVRKGSARLPLKWMAPESIFDKVYTTQSDVWSFGVLLWEIFSLGASPYPGVQINEEFCQRLRDGTRMRAPELATPAIRRIMLNCWSGDPKARPAFSELVEILGDLLQGRGLQEEEEVCMAPRSSQSSEEGSFSQVSTMALHIAQADAEDSPPSLQRHSLAARYYNWVSFPGCLARGAETRGSSRMKTFEEFPMTPTTYKGSVDNQTDSGMVLASEEFEQIESRHRQESGFR

SEQ ID NO: 631 - protein, 1896 aa, Homo sapiens
MPLPPRSLQVLLLLLLLLLLLPGMWAEAGLPRAGGGSQPPFRTFSASDWGLTHLVVHEQTGEVYVGAVNRIYKLSGNLTLLRAHVTGPVEDNEKCYPPPSVQSCPHGLGSTDNVNKLLLLDYAANRLLACGSASQGICQFLRLDDLFKLGEPHHRKEHYLSSVQEAGSMAGVLIAGPPGQGQAKLFVGTPIDGKSEYFPTLSSRRLMANEEDADMFGFVYQDEFVSSQLKIPSDTLSKFPAFDIYYVYSFRSEQFVYYLTLQLDTQLTSPDAAGEHFFTSKIVRLCVDDPKFYSYVEFPIGCEQAGVEYRLVQDAYLSRPGRALAHQLGLAEDEDVLFTVFAQGQKNRVKPPKESALCLFTLRAIKEKIKERIQSCYRGEGKLSLPWLLNKELGCINSPLQIDDDFCGQDFNQPLGGTVTIEGTPLFVDKDDGLTAVAAYDYRGRTVVFAGTRSGRIRKILVDLSNPGGRPALAYESVVAQEGSPILRDLVLSPNHQYLYAMTEKQVTRVPVESCVQYTSCELCLGSRDPHCGWCVLHSICSRRDACERADEPQRFAADLLQCVQLTVQPRNVSVTMSQVPLVLQAWNVPDLSAGVNCSFEDFTESESVLEDGRIHCRSPSAREVAPITRGQGDQRVVKLYLKSKETGKKFASVDFVFYNCSVHQSCLSCVNGSFPCHWCKYRHVCTHNVADCAFLEGRVNVSEDCPQILPSTQIYVPVGVVKPITLAARNLPQPQSGQRGYECLFHIPGSPARVTALRFNSSSLQCQNSSYSYEGNDVSDLPVNLSVVWNGNFVIDNPQNIQAHLYKCPALRESCGLCLKADPRFECGWCVAERRCSLRHHCAADTPASWMHARHGSSRCTDPKILKLSPETGPRQGGTRLTITGENLGLRFEDVRLGVRVGKVLCSPVESEYISAEQIVCEIGDASSVRAHDALVEVCVRDCSPHYRALSPKRFTFVTPTFYRVSPSRGPLSGGTWIGIEGSHLNAGSDVAVSVGGRPCSFSWRNSREIRCLTPPGQSPGSAPIIININRAQLTNPEVKYNYTEDPTILRIDPEWSINSGGTLLTVTGTNLATVREPRIRAKYGGIERENGCLVYNDTTMVCRAPSVANPVRSPPELGERPDELGFVMDNVRSLLVLNSTSFLYYPDPVLEPLSPTGLLELKPSSPLILKGRNLLPPAPGNSRLNYTVLIGSTPCTLTVSETQLLCEAPNLTGQHKVTVRAGGFEFSPGTLQVYSDSLLTLPAIVGIGGGGGLLLLVIVAVLIAYKRKSRDADRTLKRLQLQMDNLESRVALECKEAFAELQTDIHELTNDLDGAGIPFLDYRTYAMRVLFPGIEDHPVLKEMEVQANVEKSLTLFGQLLTKKHFLLTFIRTLEAQRSFSMRDRGNVASLIMTALQGEMEYATGVLKQLLSDLIEKNLESKNHPKLLLRRTESVAEKMLTNWFTFLLYKFLKECAGEPLFMLYCAIKQQMEKGPIDAITGEARYSLSEDKLIRQQIDYKTLTLNCVNPENENAPEVPVKGLDCDTVTQAKEKLLDAAYKGVPYSQRPKAADMDLEWRQGRMARIILQDEDVTTKIDNDWKRLNTLAHYQVTDGSSVALVPKQTSAYNISNSSTFTKSLSRYESMLRTASSPDSLRSRTPMITPDLESGTKLWHLVKNHDHLDQREGDRGSKMVSEIYLTRLLATKGTLQKFVDDLFETIFSTAHRGSALPLAIKYMFDFLDEQADKHQIHDADVRHTWKSNCLPLRFWVNVIKNPQFVFDIHKNSITDACLSVVAQTFMDSCSTSEHKLGKDSPSNKLLYAKDIPNYKSWVERYYADIAKMPAISDQDMSAYLAEQSRLHLSQFNSMSALHEIYSYITKYKDEILAALEKDEQARRQRLRSKLEQVVDTMALSS

SEQ ID NO: 632 - protein, 323 aa, Homo sapiens
MGLSNILFVMAFLLSGAAPLKIQAYFNETADLPCQFANSQNQSLSELVVFWQDQENLVLNEVYLGKEKFDSVHSKYMGRTSFDSDSWTLRLHNLQIKDKGLYQCIIHHKKPTGMIRIHQMNSELSVLANFSQPEIVPISNITENVYINLTCSSIHGYPEPKKMSVLLRTKNSTIEYDGVMQKSQDNVTELYDVSISLSVSFPDVTSNMTIFCILETDKTRLLSSPFSIELEDPQPPPDHIPWITAVLPTVIICVMVFCLILWKWKKKKRPRNSYKCGTNTMEREESEQTKKREKIHIPERSDEAQRVFKSSKTSSCDKSDTCF

SEQ ID NO: 633 - protein, 237 aa, Homo sapiens
MGSLFPLSLLFFLAAAYPGVGSALGRRTKRAQSPKGSPLAPSGTSVPFWVRMSPEFVAVQPGKSVQLNCSNSCPQPQNSSLRTPLRQGKTLRGPGWVSYQLLDVRAWSSLAHCLVTCAGKTRWATSRITAYKPPHSVILEPPVLKGRKYTLRCHVTQVFPVGYLVVTLRHGSRVIYSESLERFTGLDLANVTLTYEFAAGPRDFWQPVICHARLNLDGLVVRNSSAPITLMLGEAPL

SEQ ID NO: 634 - protein, 162 aa, Homo sapiens
MPRWYFLLARCFGCAVIEDTWHYFLHRLLHHKRIYKYIHKVHHEFQAPFGMEAEYAHPLETLILGTGFFIGIVLLCDHVILLWAWVTIRLLETIDVHSGYDIPLNPLNLIPFYAGSRHHDFHHMNFIGNYASTFTWWDRIFGTDSQYNAYNEKRKKFEKKTE

SEQ ID NO: 635 - protein, 794 aa, Homo sapiens
MGQSGRSRHQKRARAQAQLRNLEAYAANPHSFVFTRGCTGRNIRQLSLDVRRVMEPLTASRLQVRKKNSLKDCVAVAGPLGVTHFLILSKTETNVYFKLMRLPGGPTLTFQVKKYSLVRDVVSSLRRHRMHEQQFAHPPLLVLNSFGPHGMHVKLMATMFQNLFPSINVHKVNLNTIKRCLLIDYNPDSQELDFRHYSIKVVPVGASRGMKKLLQEKFPNMSRLQDISELLATGAGLSESEAEPDGDHNITELPQAVAGRGNMRAQQSAVRLTEIGPRMTLQLIKVQEGVGEGKVMFHSFVSKTEEELQAILEAKEKKLRLKAQRQAQQAQNVQRKQEQREAHRKKSLEGMKKARVGGSDEEASGIPSRTASLELGEDDDEQEDDDIEYFCQAVGEAPSEDLFPEAKQKRLAKSPGRKRKRWEMDRGAKSCPANFLAAADDKLSGFQGDFLWPILVVEFLVAVASNGLALYRFSIRKQRPWHPAVVFSVQLAVSDLLCALTLPPLAAYLYPPKHWRYGEAACRLERFLFTCNLLGSVIFITCISLNRYLGIVHPFFARSHLRPKHAWAVSAAGWVLAALLAMPTLSFSHLKRPQQGAGNCSVARPEACIKCLGTADHGLAAYRAYSLVLAGLGCGLPLLLTLAAYGALGRAVLRSPGMTVAEKLRVAALVASGVALYASSYVPYHIMRVLNVDARRRWSTRCPSFADIAQATAALELGPYVGYQVMRGLMPLAFCVHPLLYMAAVPSLGCCCRHCPGYRDSWNPEDAKSTGQALPLNATAAPKPSEPQSRELSQ

SEQ ID NO: 636 - protein, 390 aa, Homo sapiens
MPSEYTYVKLRSDCSRPSLQWYTRAQSKMRRPSLLLKDILKCTLLVFGVWILYILKLNYTTEECDMKKMHYVDPDHVKRAQKYAQQVLQKECRPKFAKTSMALLFEHRYSVDLLPFVQKAPKDSEAESKYDPPFGFRKFSSKVQTLLELLPEHDLPEHLKAKTCRRCVVIGSGGILHGLELGHTLNQFDVVIRLNSAPVEGYSEHVGNKTTIRMTYPEGAPLSDLEYYSNDLFVAVLFKSVDFNWLQAMVKKETLPFWVRLFFWKQVAEKIPLQPKHFRILNPVIIKETAFDILQYSEPQSRFWGRDKNVPTIGVIAVVLATHLCDEVSLAGFGYDLNQPRTPLHYFDSQCMAAMNFQTMHNVTTETKFLLKLVKEGVVKDLSGGIDREF

SEQ ID NO: 637 - protein, 395 aa, Homo sapiens
MASVPMPSEYTYVKLRSDCSRPSLQWYTRAQSKMRRPSLLLKDILKCTLLVFGVWILYILKLNYTTEECDMKKMHYVDPDHVKRAQKYAQQVLQKECRPKFAKTSMALLFEHRYSVDLLPFVQKAPKDSEAESKYDPPFGFRKFSSKVQTLLELLPEHDLPEHLKAKTCRRCVVIGSGGILHGLELGHTLNQFDVVIRLNSAPVEGYSEHVGNKTTIRMTYPEGAPLSDLEYYSNDLFVAVLFKSVDFNWLQAMVKKETLPFWVRLFFWKQVAEKIPLQPKHFRILNPVIIKETAFDILQYSEPQSRFWGRDKNVPTIGVIAVVLATHLCDEVSLAGFGYDLNQPRTPLHYFDSQCMAAMNFQTMHNVTTETKFLLKLVKEGVVKDLSGGIDREF

SEQ ID NO: 638 - protein, 94 aa, Homo sapiens
MDARWWAVVVLAAFPSLGAGGETPEAPPESWTQLWFFRFVVNAAGYASFMVPGYLLVQYFRRKNYLETGVLSDLGCAAGKSDDPQLWGHSHITG

SEQ ID NO: 639 - protein, 177 aa, Homo sapiens
MTTSHQPQDRYKAVWLIFFMLGLGTLLPWNFFMTATQYFTNRLDMSQNVSLVTAELSKDAQASAAPAAPLPERNSLSAIFNNVMTLCAMLPLLLFTYLNSFLHQRIPQSVRILGSLVAILLVFLITAILVKVQLDALPFFVITMIKIVLINSFGAILQGSLFGLAGLLPASYTAPIM

SEQ ID NO: 640 - protein, 486 aa, Homo sapiens
MQPSGLEGPGTFGRWPLLSLLLLLLLLQPVTCAYTTPGPPRALTTLGAPRAHTMPGTYAPSTTLSSPSTQGLQEQARALMRDFPLVDGHNDLPLVLRQVYQKGLQDVNLRNFSYGQTSLDRLRDGLVGAQFWSAYVPCQTQDRDALRLTLEQIDLIRRMCASYSELELVTSAKALNDTQKLACLIGVEGGHSLDNSLSILRTFYMLGVRYLTLTHTCNTPWAESSAKGVHSFYNNISGLTDFGEKVVAEMNRLGMMVDLSHVSDAVARRALEVSQAPVIFSHSAARGVCNSARNVPDDILQLLKKNGGVVMVSLSMGVIQCNPSANVSTVADHFDHIKAVIGSKFIGIGGDYDGAGKFPQGLEDVSTYPVLIEELLSRGWSEEELQGVLRGNLLRVFRQVEKVQEENKWQSPLEDKFPDEQLSSSCHSDLSRLRQRQSLTSGQELTEIPIHWTAKLPAKWSVSESSPHMAPVLAVVATFPVLILWL

SEQ ID NO: 641 - protein, 1121 aa, Homo sapiens
MKVKEEKAGVGKLDHTNHRRRFPDQKECPPIHIGLPVPTYPQRKTDQKGHLSGLQKVHWGLRPDQPQQELTGPGSGASSQDSSMDLISRTRSPAAEQLQDILGEEDEAPNPTLFTEMDTLQHDGDQMEWKESARWIKFEEKVEEGGERWSKPHVSTLSLHSLFELRTCLQTGTVLLDLDSGSLPQIIDDVIEKQIEDGLLRPELRERVSYVLLRRHRHQTKKPIHRSLADIGKSVSTTNRSPARSPGAGPSLHHSTEDLRMRQSANYGRLCHAQSRSMNDISLTPNTDQRKNKFMKKIPKDSEASNVLVGEVDFLDQPFIAFVRLIQSAMLGGVTEVPVPTRFLFILLGPSGRAKSYNEIGRAIATLMVDDLFSDVAYKARNREDLIAGIDEFLDEVIVLPPGEWDPNIRIEPPKKVPSADKRKSVFSLAELGQMNGSVGGGGGAPGGGNGGGGGGGSGGGAGSGGAGGTSSGDDGEMPAMHEIGEELIWTGRFFGGLCLDIKRKLPWFPSDFYDGFHIQSISAILFIYLGCITNAITFGGLLGDATDNYQGVMESFLGTAMAGSLFCLFSGQPLIILSSTGPILIFEKLLFDFSKGNGLDYMEFRLWIGLHSAVQCLILVATDASFIIKYITRFTEEGFSTLISFIFIYDAIKKMIGAFKYYPINMDFKPNFITTYKCECVAPDTVNTTVFNASAPLAPDTNASLYNLLNLTALDWSLLSKKECLSYGGRLLGNSCKFIPDLALMSFILFFGTYSMTLTLKKFKFSRYFPTKVRALVADFSIVFSILMFCGIDACFGLETPKLHVPSVIKPTRPDRGWFVAPFGKNPWWVYPASILPALLVTILIFMDQQITAVIVNRKENKLKKAAGYHLDLFWVGILMALCSFMGLPWYVAATVISIAHIDSLKMETETSAPGEQPQFLGVREQRVTGIIVFILTGISVFLAPILKCIPLPVLYGVFLYMGVASLNGIQFWERCKLFLMPAKHQPDHAFLRHVPLRRIHLFTLVQILCLAVLWILKSTVAAIIFPVMILGLIIVRRLLDFIFSQHDLAWIDNILPEKEKKETDKKRKRKKGAHEDCDEEPQFPPPSVIKIPMESVQSDPQNGIHCIARKRSSSWSYSL

SEQ ID NO: 642 - protein, 2081 aa, Homo sapiens
MLCCLLVRASNLPSAKKDRRSDPVASLTFRGVKKRTKVIKNSVNPVWNEGFEWDLKGIPLDQGSELHVVVKDHETMGRNRFLGEAKVPLREVLATPSLSASFNAPLLDTKKQPTGASLVLQVSYTPLPGAVPLFPPPTPLEPSPTLPDLDVVADTGGEEDTEDQGLTGDEAEPFLDQSGGPGAPTTPRKLPSRPPPHYPGIKRKRSAPTSRKLLSDKPQDFQIRVQVIEGRQLPGVNIKPVVKVTAAGQTKRTRIHKGNSPLFNETLFFNLFDSPGELFDEPIFITVVDSRSLRTDALLGEFRMDVGTIYREPRHAYLRKWLLLSDPDDFSAGARGYLKTSLCVLGPGDEAPLERKDPSEDKEDIESNLLRPTGVALRGAHFCLKVFRAEDLPQMDDAVMDNVKQIFGFESNKKNLVDPFVEVSFAGKMLCSKILEKTANPQWNQNITLPAMFPSMCEKMRIRIIDWDRLTHNDIVATTYLSMSKISAPGGEIEEEPAGAVKPSKASDLDDYLGFLPTFGPCYINLYGSPREFTGFPDPYTELNTGKGEGVAYRGRLLLSLETKLVEHSEQKVEDLPADDILRVEKYLRRRKYSLFAAFYSATMLQDVDDAIQFEVSIGNYGNKFDMTCLPLASTTQYSRAVFDGCHYYYLPWGNVKPVVVLSSYWEDISHRIETQNQLLGIADRLEAGLEQVHLALKAQCSTEDVDSLVAQLTDELIAGCSQPLGDIHETPSATHLDQYLYQLRTHHLSQITEAALALKLGHSELPAALEQAEDWLLRLRALAEEPQNSLPDIVIWMLQGDKRVAYQRVPAHQVLFSRRGANYCGKNCGKLQTIFLKYPMEKVPGARMPVQIRVKLWFGLSVDEKEFNQFAEGKLSVFAETYENETKLALVGNWGTTGLTYPKFSDVTGKIKLPKDSFRPSAGWTWAGDWFVCPEKTLLHDMDAGHLSFVEEVFENQTRLPGGQWIYMSDNYTDVNGEKVLPKDDIECPLGWKWEDEEWSTDLNRAVDEQGWEYSITIPPERKPKHWVPAEKMYYTHRRRRWVRLRRRDLSQMEALKRHRQAEAEGEGWEYASLFGWKFHLEYRKTDAFRRRRWRRRMEPLEKTGPAAVFALEGALGGVMDDKSEDSMSVSTLSFGVNRPTISCIFDYGNRYHLRCYMYQARDLAAMDKDSFSDPYAIVSFLHQSQKTVVVKNTLNPTWDQTLIFYEIEIFGEPATVAEQPPSIVVELYDHDTYGADEFMGRCICQPSLERMPRLAWFPLTRGSQPSGELLASFELIQREKPAIHHIPGFEVQETSRILDESEDTDLPYPPPQREANIYMVPQNIKPALQRTAIEILAWGLRNMKSYQLANISSPSLVVECGGQTVQSCVIRNLRKNPNFDICTLFMEVMLPREELYCPPITVKVIDNRQFGRRPVVGQCTIRSLESFLCDPYSAESPSPQGGPDDVSLLSPGEDVLIDIDDKEPLIPIQEEEFIDWWSKFFASIGEREKCGSYLEKDFDTLKVYDTQLENVEAFEGLSDFCNTFKLYRGKTQEETEDPSVIGEFKGLFKIYPLPEDPAIPMPPRQFHQLAAQGPQECLVRIYIVRAFGLQPKDPNGKCDPYIKISIGKKSVSDQDNYIPCTLEPVFGKMFELTCTLPLEKDLKITLYDYDLLSKDEKIGETVVDLENRLLSKFGARCGLPQTYCVSGPNQWRDQLRPSQLLHLFCQQHRVKAPVYRTDRVMFQDKEYSIEEIEAGRIPNPHLGPVEERLALHVLQQQGLVPEHVESRPLYSPLQPDIEQGKLQMWVDLFPKALGRPGPPFNITPRRARRFFLRCIIWNTRDVILDDLSLTGEKMSDIYVKGWMIGFEEHKQKTDVHYRSLGGEGNFNWRFIFPFDYLPAEQVCTIAKKDAFWRLDKTESKIPARVVFQIWDNDKFSFDDFLGSLQLDLNRMPKPAKTAKKCSLDQLDDAFHPEWFVSLFEQKTVKGWWPCVAEEGEKKILAGKLEMTLEIVAESEHEERPAGQGRDEPNMNPKLEDPRRPDTSFLWFTSPYKTMKFILWRRFRWAIILFIILFILLLFLAIFIYAFPNYAAMKLVKPFS

SEQ ID NO: 643 - protein, 1060 aa, Homo sapiens
MDSGAGGRRCPEAALLILGPPRMEHLRHSPGPGGQRLLLPSMLLALLLLLAPSPGHATRVVYKVPEEQPPNTLIGSLAADYGFPDVGHLYKLEVGAPYLRVDGKTGDIFTTETSIDREGLRECQNQLPGDPCILEFEVSITDLVQNGSPRLLEGQIEVQDINDNTPNFASPVITLAIPENTNIGSLFPIPLASDRDAGPNGVASYELQAGPEAQELFGLQVAEDQEEKQPQLIVMGNLDRERWDSYDLTIKVQDGGSPPRASSALLRVTVLDTNDNAPKFERPSYEAELSENSPIGHSVIQVKANDSDQGANAEIEYTFHQAPEVVRRLLRLDRNTGLITVQGPVDREDLSTLRFSVLAKDRGTNPKSARAQVVVTVKDMNDNAPTIEIRGIGLVTHQDGMANISEDVAEETAVALVQVSDRDEGENAAVTCVVAGDVPFQLRQASETGSDSKKKYFLQTTTPLDYEKVKDYTIEIVAVDSGNPPLSSTNSLKVQVVDVNDNAPVFTQSVTEVAFPENNKPGEVIAEITASDADSGSNAELVYSLEPEPAAKGLFTISPETGEIQVKTSLDREQRESYELKVVAADRGSPSLQGTATVLVNVLDCNDNDPKFMLSGYNFSVMENMPALSPVGMVTVIDGDKGENAQVQLSVEQDNGDFVIQNGTGTILSSLSFDREQQSTYTFQLKAVDGGVPPRSAYVGVTINVLDENDNAPYITAPSNTSHKLLTPQTRLGETVSQVAAEDFDSGVNAELIYSIAGGNPYGLFQIGSHSGAITLEKEIERRHHGLHRLVVKVSDRGKPPRYGTALVHLYVNETLANRTLLETLLGHSLDTPLDIDIAGDPEYERSKQRGNILFGVVAGVVAVALLIALAVLVRYCRQREAKSGYQAGKKETKDLYAPKPSGKASKGNKSKGKKSKSPKPVKPVEDEDEAGLQKSLKFNLMSDAPGDSPRIHLPLNYPPGSPDLGRHYRSNSPLPSIQLQPQSPSASKKHQVVQDLPPANTFVGTGDTTSTGSEQYSDYSYRTNPPKYPSKQVGQPFQLSTPQPLPHPYHGAIWTEVWE

SEQ ID NO: 644 - protein, 200 aa, Homo sapiens
MGYSAVPKCPPRGRGRDSVWQTPDMLVEIETAWSLSGYLLVCFSAGYFIHDTVDIVASGQTRASWEYLVHHVMAMGAFFSGIFWSSFVGGGVLTLLVEVSNIFLTIRMMMKISNAQDHLLYRVNKYVNLVMYFLFRLAPQAYLTHFFLRYVNQRTLGTFLLGILLMLDVMIIIYFSRLLRSDFCPEHVPKKQHKDKFLTE

SEQ ID NO: 645 - protein, 483 aa, Homo sapiens
MLFPISMSATEFLLASVIFCLVFWVIRASRPQVPKGLKNPPGPWGWPLIGHMLTLGKNPHLALSRMSQQYGDVLQIRIGSTPVVVLSGLDTIRQALVRQGDDFKGRPDLYTFTLISNGQSMSFSPDSGPVWAARRRLAQNGLKSFSIASDPASSTSCYLEEHVSKEAEVLISTLQELMAGPGHFNPYRYVVVSVTNVICAICFGRRYDHNHQELLSLVNLNNNFGEVVGSGNPADFIPILRYLPNPSLNAFKDLNEKFYSFMQKMVKEHYKTFEKGHIRDITDSLIEHCQEKQLDENANVQLSDEKIINIVLDLFGAGFDTVTTAISWSLMYLVMNPRVQRKIQEELDTVIGRSRRPRLSDRSHLPYMEAFILETFRHSSFVPFTIPHRKLWVNPSEFLPERFLTPDGAIDKVLSEKVIIFGMGKRKCIGETIARWEVFLFLAILLQRVEFSVPLGVKVDMTPIYGLTMKHACCEHFQMQLRS

SEQ ID NO: 646 - protein, 278 aa, Homo sapiens
MDASSSPWNPTPAPVSSPPLLLPIPAIVFIAVGIYLLLLGLVLLTRNCLLAQGCCADGSSPCRKQGSSGPPDCCWTCAEACNFPLPSPAHFLDACCPQPTRAGFHSGDGEREITRPLQQRVRNDVLWSSGCSALHAIRSRTGHLAAPAAAHSATVPVRASSPTARASTVSASRSSSDEDPGPLPSGERPAPRAHVPSSLKSLSPRHWNHRWPAEHPGLGTGSGSAGPGSLQGRTLGRLDGSSSGGPEKRGASARVPGQRFISLDNQGPPSGFPRKNFL

SEQ ID NO: 647 - protein, 227 aa, Homo sapiens
MGHEQNQGAALLQMLPLLWLLPHSWAVPEAPTPMWPDDLQNHTFLHTVYCQDGSPSVGLSEAYDEDQLFFFDFSQNTRVPRLPEFADWAQEQGDAPAILFDKEFCEWMIQQIGPKLDGKIPVSRVNWQHHSVPVEGFGPTFVSAVDGLSFQAFSYLNFTPEPSDIFSCIVTHEIDRYTAIAYWVPRNALPSDLLENVLCGVAFGLGVLGIIVGIVLIIYFRKPCSGD

SEQ ID NO: 648 - protein, 166 aa, Homo sapiens
MGHEQNQGAALLQMLPLLWLLPHSWAVPEGFPIAEVFTLKPLEFGKPNTLVCFVSNLFPPMLTVNWQHHSVPVEGFGPTFVSAVDGLSFQAFSYLNFTPEPSDIFSCIVTHEIDRYTAIAYWVPRNALPSDLLENVLCGVAFGLGVLGIIVGIVLIIYFRKPCSGD

SEQ ID NO: 649 - protein, 254 aa, Homo sapiens
MAISGVPVLGFFIIAVLMSAQESWAIKEEHVIIQAEFYLNPDQSGEFMFDFDGDEIFHVDMAKKETVWRLEEFGRFASFEAQGALANIAVDKANLEIMTKRSNYTPITNVPPEVTVLTNSPVELREPNVLICFIDKFTPPVVNVTWLRNGKPVTTGVSETVFLPREDHLFRKFHYLPFLPSTEDVYDCRVEHWGLDEPLLKHWEFDAPSPLPETTENVVCALGLTVGLVGIIIGTIFIIKGLRKSNAAERRGPL

SEQ ID NO: 650 - protein, 759 aa, Homo sapiens
MGLADASGPRDTQALLSATQAMDLRRRDYHMERPLLNQEHLEELGRWGSAPRTHQWRTWLQCSRARAYALLLQHLPVLVWLPRYPVRDWLLGDLLSGLSVAIMQLPQGLAYALLAGLPPVFGLYSSFYPVFIYFLFGTSRHISVGTFAVMSVMVGSVTESLAPQALNDSMINETARDAARVQVASTLSVLVGLFQVGLGLIHFGFVVTYLSEPLVRGYTTAAAVQVFVSQLKYVFGLHLSSHSGPLSLIYTVLEVCWKLPQSKVGTVVTAAVAGVVLVVVKLLNDKLQQQLPMPIPGELLTLIGATGISYGMGLKHRFEVDVVGNIPAGLVPPVAPNTQLFSKLVGSAFTIAVVGFAIAISLGKIFALRHGYRVDSNQELVALGLSNLIGGIFQCFPVSCSMSRSLVQESTGGNSQVAGAISSLFILLIIVKLGELFHDLPKAVLAAIIIVNLKGMLRQLSDMRSLWKANRADLLIWLVTFTATILLNLDLGLVVAVIFSLLLVVVRTQMPHYSVLGQVPDTDIYRDVAEYSEAKEVRGVKVFRSSATVYFANAEFYSDALKQRCGVDVDFLISQKKKLLKKQEQLKLKQLQKEEKLRKQAASPKGASVSINVNTSLEDMRSNNVEDCKMMQVSSGDKMEDATANGQEDSKAPDGSTLKALGLPQPDFHSLILDLGALSFVDTVCLKSLKNIFHDFREIEVEVYMAACHSPVVSQLEAGHFFDASITKKHLFASVHDAVTFALQHPRPVPDSPVSVTRL

SEQ ID NO: 651 - protein, 252 aa, Homo sapiens
MRAPLLPPAPVVLSLLILGSGHYAAGLDLNDTYSGKREPFSGDHSADGFEVTSRSEMSSGSEISPVSEMPSSSEPSSGADYDYSEEYDNEPQIPGYIVDDSVRVEQVVKPPQNKTESENTSDKPKRKKKGGKNGKNRRNRKKKNPCNAEFQNFCIHGECKYIEHLEAVTCKCQQEYFGERCGEKSMKTHSMIDSSLSKIALAAIAAFMSAVILTAVAVITVQLRRQYVRKYEGEAEERKKLRQENGNVHAIA

SEQ ID NO: 652 - protein, 141 aa, Homo sapiens
MLVLLAGIFVVHIATVIMLFVSTIANVWLVSNTVDASVGLWKNCTNISCSDSLSYASEDALKTVQAFMILSIIFCVIALLVFVFQLFTMEKGNRFFLSGATTLVCFIMRIVMERSITTAIPTSWAGSASASASSSAFSIWS

SEQ ID NO: 653 - protein, 118 aa, Homo sapiens
MSAPAQPPAEGTEGTAPGGGPPGPPPNMTSNRRLQQTQAQVEEVVDIIRVNVDKVLERDQKLSELDDRADALQAGASQFESSAAKLKRKYWWKNCKMMIMLGAICAIIVVVIVIYFFT

SEQ ID NO: 654 - protein, 300 aa, Homo sapiens
MYKDCIESTGDYFLLCDAEGPWGIILESLAILGIVVTILLLLAFLFLMRKIQDCSQWNVLPTQLLFLLSVLGLFGLAFAFIIELNQQTAPVRYFLFGVLFALCFSCLLAHASNLVKLVRGCVSFSWTTILCIAIGCSLLQIIIATEYVTLIMTRGMMFVNMTPCQLNVDFVVLLVYVLFLMALTFFVSKATFCGPCENWKQHGRLIFITVLFSIIIWVVWISMLLRGNPQFQRQPQWDDPVVCIALVTNAWVFLLLYIVPELCILYRSCRQECPLQGNACPVTAYQHSFQVENQELSRDC

SEQ ID NO: 655 - protein, 165 aa, Homo sapiens
MSEEVTYADLQFQNSSEMEKIPEIGKFGEKAPPAPSHVWRPAALFLTLLCLLLLIGLGVLASMFHVTLKIEMKKMNKLQNISEELQRNISLQLMSNMNISNKIRNLSTTLQTIATKLCRELYSKEQEHKCKPCPRRWIWHKDSCYFLSDDVQTWQESKMACAAQN

SEQ ID NO: 656 - protein, 325 aa, Homo sapiens
MGPRARPALLLLMLLQTAVLQGRLLPLGYVDDQLFVFYDHESRRVEPRTPWVSSRISSQMWLQLSQSLKGWDHMFTVDFWTIMENHNHSKESHTLQVILGCEMQEDNSTEGYWKYGYDGQDHLEFCPDTLDWRAAEPRAWPTKLEWERHKIRARQNRAYLERDCPAQLQQLLELGRGVLDQQVPPLVKVTHHVTSSVTTLRCRALNYYPQNITMKWLKDKQPMDAKEFEPKDVLPNGDGTYQGWITLAVPPGEEQRYTCQVEHPGLDQPLIVIWEPSPSGTLVIGVISGIAVFVVILFIGILFIILRKRQGSRGAMGHYVLAERE

SEQ ID NO: 657 - protein, 820 aa, Homo sapiens
MWSWKCLLFWAVLVTATLCTARPSPTLPEQAQPWGAPVEVESFLVHPGDLLQLRCRLRDDVQSINWLRDGVQLAESNRTRITGEEVEVQDSVPADSGLYACVTSSPSGSDTTYFSVNVSDALPSSEDDDDDDDSSSEEKETDNTKPNPVAPYWTSPEKMEKKLHAVPAAKTVKFKCPSSGTPNPTLRWLKNGKEFKPDHRIGGYKVRYATWSIIMDSVVPSDKGNYTCIVENEYGSINHTYQLDVVERSPHRPILQAGLPANKTVALGSNVEFMCKVYSDPQPHIQWLKHIEVNGSKIGPDNLPYVQILKTAGVNTTDKEMEVLHLRNVSFEDAGEYTCLAGNSIGLSHHSAWLTVLEALEERPAVMTSPLYLEIIIYCTGAFLISCMVGSVIVYKMKSGTKKSDFHSQMAVHKLAKSIPLRRQVTVSADSSASMNSGVLLVRPSRLSSSGTPMLAGVSEYELPEDPRWELPRDRLVLGKPLGEGCFGQVVLAEAIGLDKDKPNRVTKVAVKMLKSDATEKDLSDLISEMEMMKMIGKHKNIINLLGACTQDGPLYVIVEYASKGNLREYLQARRPPGLEYCYNPSHNPEEQLSSKDLVSCAYQVARGMEYLASKKCIHRDLAARNVLVTEDNVMKIADFGLARDIHHIDYYKKTTNGRLPVKWMAPEALFDRIYTHQSDVWSFGVLLWEIFTLGGSPYPGVPVEELFKLLKEGHRMDKPSNCTNELYMMMRDCWHAVPSQRPTFKQLVEDLDRIVALTSNQEYLDLSMPLDQYSPSFPDTRSSTCSSGEDSVFSHEPLPEEPCLPRHPAQLANGGLKRR

SEQ ID NO: 658 - protein, 733 aa, Homo sapiens
MWSWKCLLFWAVLVTATLCTARPSPTLPEQDALPSSEDDDDDDDSSSEEKETDNTKPNPVAPYWTSPEKMEKKLHAVPAAKTVKFKCPSSGTPNPTLRWLKNGKEFKPDHRIGGYKVRYATWSIIMDSVVPSDKGNYTCIVENEYGSINHTYQLDVVERSPHRPILQAGLPANKTVALGSNVEFMCKVYSDPQPHIQWLKHIEVNGSKIGPDNLPYVQILKHSGINSSDAEVLTLFNVTEAQSGEYVCKVSNYIGEANQSAWLTVTRPVAKALEERPAVMTSPLYLEIIIYCTGAFLISCMVGSVIVYKMKSGTKKSDFHSQMAVHKLAKSIPLRRQVTVSADSSASMNSGVLLVRPSRLSSSGTPMLAGVSEYELPEDPRWELPRDRLVLGKPLGEGCFGQVVLAEAIGLDKDKPNRVTKVAVKMLKSDATEKDLSDLISEMEMMKMIGKHKNIINLLGACTQDGPLYVIVEYASKGNLREYLQARRPPGLEYCYNPSHNPEEQLSSKDLVSCAYQVARGMEYLASKKCIHRDLAARNVLVTEDNVMKIADFGLARDIHHIDYYKKTTNGRLPVKWMAPEALFDRIYTHQSDVWSFGVLLWEIFTLGGSPYPGVPVEELFKLLKEGHRMDKPSNCTNELYMMMRDCWHAVPSQRPTFKQLVEDLDRIVALTSNQEYLDLSMPLDQYSPSFPDTRSSTCSSGEDSVFSHEPLPEEPCLPRHPAQLANGGLKRR

SEQ ID NO: 659 - protein, 135 aa, Homo sapiens
MMYMPGSSDPRSQPINLNHYATKKSVAESMLDVALFMSNAMRLKAVLEQGPSSHYYTTLVTLISLSLLLQVVIGVLLVVIARLNLNEVEKQWRLNQLNNAATILVFFTVVINVFITAFGAHKTGFLAARASRNPL

SEQ ID NO: 660 - protein, 538 aa, Homo sapiens
MASDPIFTLAPPLHCHYGAFPPNASGWEQPPNASGVSVASAALAASAASRVATSTDPSCSGFAPPDFNHCLKDWDYNGLPVLTTNAIGQWDLVCDLGWQVILEQILFILGFASGYLFLGYPADRFGRRGIVLLTLGLVGPCGVGGAAAGSSTGVMALRFLLGFLLAGVDLGVYLMRLELCDPTQRLRVALAGELVGVGGHFLFLGLALVSKDWRFLQRMITAPCILFLFYGWPGLFLESARWLIVKRQIEEAQSVLRILAERNRPHGQMLGEEAQEALQDLENTCPLPATSSFSFASLLNYRNIWKNLLILGFTNFIAHAIRHCYQPVGGGGSPSDFYLCSLLASGTAALACVFLGVTVDRFGRRGILLLSMTLTGIASLVLLGLWDCEHPIFPTVWAQQGNPNRDLNEAAITTFSVLGLFSSQAAAILSTLLAAEVIPTTVRGRGLGLIMALGALGGLSGPAQRLHMGHGAFLQHVVLAACALLCILSIMLLPETKRKLLPEVLRDGELCRRPSLLRQPPPTRCDHVPLLATPNPAL

SEQ ID NO: 661 - protein, 124 aa, Homo sapiens
MAEQSDEAVKYYTLEEIQKHNHSKSTWLILHHKVYDLTKFLEEHPGGEEVLREQAGGDATENFEDVGHSTDAREMSKTFIIGELHPETLITTIDSSSSWWTNWVIPAISAVAVALMYRLYMAED

SEQ ID NO: 662 - protein, 1553 aa, Homo sapiens
MEPSALRKAGSEQEEGFEGLPRRVTDLGMVSNLRRSNSSLFKSWRLQCPFGNNDKQESLSSWIPENIKKKECVYFVESSKLSDAGKVVCQCGYTHEQHLEEATKPHTFQGTQWDPKKHVQEMPTDAFGDIVFTGLSQKVKKYVRVSQDTPSSVIYHLMTQHWGLDVPNLLISVTGGAKNFNMKPRLKSIFRRGLVKVAQTTGAWIITGGSHTGVMKQVGEAVRDFSLSSSYKEGELITIGVATWGTVHRREGLIHPTGSFPAEYILDEDGQGNLTCLDSNHSHFILVDDGTHGQYGVEIPLRTRLEKFISEQTKERGGVAIKIPIVCVVLEGGPGTLHTIDNATTNGTPCVVVEGSGRVADVIAQVANLPVSDITISLIQQKLSVFFQEMFETFTESRIVEWTKKIQDIVRRRQLLTVFREGKDGQQDVDVAILQALLKASRSQDHFGHENWDHQLKLAVAWNRVDIARSEIFMDEWQWKPSDLHPTMTAALISNKPEFVKLFLENGVQLKEFVTWDTLLYLYENLDPSCLFHSKLQKVLVEDPERPACAPAAPRLQMHHVAQVLRELLGDFTQPLYPRPRHNDRLRLLLPVPHVKLNVQGVSLRSLYKRSSGHVTFTMDPIRDLLIWAIVQNRRELAGIIWAQSQDCIAAALACSKILKELSKEEEDTDSSEEMLALAEEYEHRAIGVFTECYRKDEERAQKLLTRVSEAWGKTTCLQLALEAKDMKFVSHGGIQAFLTKVWWGQLSVDNGLWRVTLCMLAFPLLLTGLISFREKRLQDVGTPAARARAFFTAPVVVFHLNILSYFAFLCLFAYVLMVDFQPVPSWCECAIYLWLFSLVCEEMRQLFYDPDECGLMKKAALYFSDFWNKLDVGAILLFVAGLTCRLIPATLYPGRVILSLDFILFCLRLMHIFTISKTLGPKIIIVKRMMKDVFFFLFLLAVWVVSFGVAKQAILIHNERRVDWLFRGAVYHSYLTIFGQIPGYIDGVNFNPEHCSPNGTDPYKPKCPESDATQQRPAFPEWLTVLLLCLYLLFTNILLLNLLIAMFNYTFQQVQEHTDQIWKFQRHDLIEEYHGRPAAPPPFILLSHLQLFIKRVVLKTPAKRHKQLKNKLEKNEEAALLSWEIYLKENYLQNRQFQQKQRPEQKIEDISNKAGLELWGSRTSSVCKSRQFLHLTVVESRGSEKAPVTTLACLQGCLGKHGRVDAMVDLLDLDPLKRSGSMEQRLASLEEQVAQTAQALHWIVRTLRASGFSSEADVPTLASQKAAEEPDAEPGGRKKTEEPGDSYHVNARHLLYPNCPVTRFPVPNEKVPWETEFLIYDPPFYTAERKDAAAMDPMGDTLEPLSTIQYNVVDGLRDRRSFHGPYTVQAGLPLNPMGRTGLRGRGSLSCFGPNHTLYPMVTRWRRNEDGAICRKSIKKMLEVLVVKLPLSEHWALPGGSREPGEMLPRKLKRILRQEHWPSFENLLKCGMEVYKGYMDDPRNTDNAWIETVAVSVHFQDQNDVELNRLNSNLHACDSGASIRWQVVDRRIPLYANHKTLLQKAAAEFGAHY

SEQ ID NO: 663 - protein, 185 aa, Homo sapiens
MVKLGNNFAEKGTKQPLLEDGFDTIPLMTPLDVNQLQFPPPDKVVVKTKTEYEPDRKKGKARPPQIAEFTVSITEGVTERFKVSVLVLFALAFLTCVVFLVVYKVYKYDRACPDGFVLKNTQCIPEGLESYYAEQDSSAREKFYTVINHYNLAKQSITRSVSPWMSVLSEEKLSEQETEAAEKSA

SEQ ID NO: 664 - protein, 1114 aa, Homo sapiens
MVKSPMNRELVATYEVTLSVIDNASDLPERSVSVPNAKLTVNVLDVNDNTPQFKPFGITYYMERILEGATPGTTLIAVAAVDPDKGLNGLVTYTLLDLVPPGYVQLEDSSAGKVIANRTVDYEEVHWLNFTVRASDNGSPPRAAEIPVYLEIVDINDNNPIFDQPSYQEAVFEDVPVGTIILTVTATDADSGNFALIEYSLGDGESKFAINPTTGDIYVLSSLDREKKDHYILTALAKDNPGDVASNRRENSVQVVIQVLDVNDCRPQFSKPQFSTSVYENEPAGTSVITMMATDQDEGPNGELTYSLEGPGVEAFHVDMDSGLVTTQRPLQSYEKFSLTVVATDGGEPPLWGTTMLLVEVIDVNDNRPVFVRPPNGTILHIREEIPLRSNVYEVYATDKDEGLNGAVRYSFLKTAGNRDWEFFIIDPISGLIQTAQRLDRESQAVYSLILVASDLGQPVPYETMQPLQVALEDIDDNEPLFVRPPKGSPQYQLLTVPEHSPRGTLVGNVTGAVDADEGPNAIVYYFIAAGNEEKNFHLQPDGCLLVLRDLDREREAIFSFIVKASSNRSWTPPRGPSPTLDLVADLTLQEVRVVLEDINDQPPRFTKAEYTAGVATDAKVGSELIQVLALDADIGNNSLVFYSILAIHYFRALANDSEDVGQVFTMGSMDGILRTFDLFMAYSPGYFVVDIVARDLAGHNDTAIIGIYILRDDQRVKIVINEIPDRVRGFEEEFIHLLSNITGAIVNTDNVQFHVDKKGRVNFAQTELLIHVVNRDTNRILDVDRVIQMIDENKEQLRNLFRNYNVLDVQPAISVRLPDDMSALQMAIIVLAILLFLAAMLFVLMNWYYRTVHKRKLKAIVAGSAGNRGFIDIMDMPNTNKYSFDGANPVWLDPFCRNLELAAQAEHEDDLPENLSEIADLWNSPTRTHGTFGREPAAVKPDDDRYLRAAIQEYDNIAKLGQIIREGPIKGSLLKVVLEDYLRLKKLFAQRMVQKASSCHSSISELIQTELDEEPGDHSPGQGSLRFRHKPPVELKGPDGIHVVHGSTGTLLATDLNSLPEEDQKGLGRSLETLTAAEATAFERNARTESAKSTPLHKLRDVIMETPLEITEL

SEQ ID NO: 665 - protein, 317 aa, Homo sapiens
MRRASRDYTKYLRGSEEMGGGPGAPHEGPLHAPPPPAPHQPPAASRSMFVALLGLGLGQVVCSVALFFYFRAQMDPNRISEDGTHCIYRILRLHENADFQDTTLESQDTKLIPDSCRRIKQAFQGAVQKELQHIVGSQHIRAEKAMVDGSWLDLAKRSKLEAQPFAHLTINATDIPSGSHKVSLSSWYHDRGWAKISNMTFSNGKLIVNQDGFYYLYANICFRHHETSGDLATEYLQLMVYVTKTSIKIPSSHTLMKGGSTKYWSGNSEFHFYSINVGGFFKLRSGEEISIEVSNPSLLDPDQDATYFGAFKVRDID

SEQ ID NO: 666 - protein, 261 aa, Homo sapiens
MSWKKALRIPGDLRVATVTLMLAMLSSLLAEGRDSPEDFVFQFKGMCYFTNGTERVRLVTRYIYNREEYARFDSDVGVYRAVTPQGRPDAEYWNSQKEVLEGTRAELDTVCRHNYEVAFRGILQRRVEPTVTISPSRTEALNHHNLLVCSVTDFYPGQIKVRWFRNDQEETAGVVSTPLIRNGDWTFQILVMLEMTPQRGDVYTCHVEHPSLQSPITVEWRAQSESAQSKMLSGVGGFVLGLIFLGLGLIIRQRSQKGLLH

SEQ ID NO: 667 - protein, 355 aa, Homo sapiens
MDQFPESVTENFEYDDLAEACYIGDIVVFGTVFLSIFYSVIFAIGLVGNLLVVFALTNSKKPKSVTDIYLLNLALSDLLFVATLPFWTHYLINEKGLHNAMCKFTTAFFFIGFFGSIFFITVISIDRYLAIVLAANSMNNRTVQHGVTISLGVWAAAILVAAPQFMFTKQKENECLGDYPEVLQEIWPVLRNVETNFLGFLLPLLIMSYCYFRIIQTLFSCKNHKKAKAIKLILLVVIVFFLFWTPYNVMIFLETLKLYDFFPSCDMRKDLRLALSVTETVAFSHCCLNPLIYAFAGEKFRRYLYHLYGKCLAVLCGRSVHVDFSSSESQRSRHGSVLSSNFTYHTSDGDALLLL

SEQ ID NO: 668 - protein, 73 aa, Homo sapiens
GFIAFAYSVKSRDRKMVGDVTGAQAYASTAKCLNIWALILGILMTIGFILLLVFGSVTVYHIMLQIIQEKRGY

SEQ ID NO: 669 - protein, 288 aa, Homo sapiens
MPEAGFQATNAFTECKFTCTSGKCLYLGSLVCNQQNDCGDNSDEENCLLVTEHPPPGIFNSELEFAQIIIIVVVVTVMVVVIVCLLNHYKVSTRSFINRPNQSRRREDGLPQIMHAPRSRDRFTAPSFIQRDRFSRFQPTYPYVQHEIDLPPTISLSDGEEPPPYQGPCTLQLRDPEQQMELNRESVRAPPNRTIFDSDLIDIAMYSGGPCPPSSNSGISASTCSSNGRMEGPPPTYSEVMGHHPGASFLHHQRSNAHRGSRLQFQQNNAESTIVPIKGKDRKPGNLV

SEQ ID NO: 670 - protein, 1390 aa, Homo sapiens
MPSGSFMLVNASGRPEGQRAHLLLPQLKENDTHCIDFHYFVSSKSNSPPGLLNVYVKVNNGPLGNPIWNISGDPTRTWNRAELAISTFWPNFYQVIFEVITSGHQGYLAIDEVKVLGHPCTRTPHFLRIQNVEVNAGQFATFQCSAIGRTVAGDRLWLQGIDVRDAPLKEIKVTSSRRFIASFNVVNTTKRDAGKYRCMIRTEGGVGISNYAELVVKEPPVPIAPPQLASVGATYLWIQLNANSINGDGPIVAREVEYCTASGSWNDRQPVDSTSYKIGHLDPDTEYEISVLLTRPGEGGTGSPGPALRTRTKCADPMRGPRKLEVVEVKSRQITIRWEPFGYNVTRCHSYNLTVHYCYQVGGQEQVREEVSWDTENSHPQHTITNLSPYTNVSVKLILMNPEGRKESQELIVQTDEDLPGAVPTESIQGSTFEEKIFLQWREPTQTYGVITLYEITYKAVSSFDPEIDLSNQSGRVSKLGNETHFLFFGLYPGTTYSFTIRASTAKGFGPPATNQFTTKISAPSMPAYELETPLNQTDNTVTVMLKPAHSRGAPVSVYQIVVEEERPRRTKKTTEILKCYPVPIHFQNASLLNSQYYFAAEFPADSLQAAQPFTIGDNKTYNGYWNTPLLPYKSYRIYFQAASRANGETKIDCVQVATKGAATPKPVPEPEKQTDHTVKIAGVIAGILLFVIIFLGVVLVMKKRKLAKKRKETMSSTRQEMTVMVNSMDKSYAEQGTNCDEAFSFMDTHNLNGRSVSSPSSFTMKTNTLSTSVPNSYYPDETHTMASDTSSLVQSHTYKKREPADVPYQTGQLHPAIRVADLLQHITQMKCAEGYGFKEEYESFFEGQSAPWDSAKKDENRMKNRYGNIIAYDHSRVRLQTIEGDTNSDYINGNYIDGYHRPNHYIATQGPMQETIYDFWRMVWHENTASIIMVTNLVEVGRVKCCKYWPDDTEIYKDIKVTLIETELLAEYVIRTFAVEKRGVHEIREIRQFHFTGWPDHGVPYHATGLLGFVRQVKSKSPPSAGPLVVHCSAGAGRTGCFIVIDIMLDMAEREGVVDIYNCVRELRSRRVNMVQTEEQYVFIHDAILEACLCGDTSVPASQVRSLYYDMNKLDPQTNSSQIKEEFRTLNMVTPTLRVEDCSIALLPRNHEKNRCMDILPPDRCLPFLITIDGESSNYINAALMDSYKQPSAFIVTQHPLPNTVKDFWRLVLDYHCTSVVMLNDVDPAQLCPQYWPENGVHRHGPIQVEFVSADLEEDIISRIFRIYNAARPQDGYRMVQQFQFLGWPMYRDTPVSKRSFLKLIRQVDKWQEEYNGGEGRTVVHCLNGGGRSGTFCAISIVCEMLRHQRTVDVFHAVKTLRNNKPNMVDLLDQYKFCYEVALEYLNSG

SEQ ID NO: 671 - protein, 147 aa, Homo sapiens
MELPAVNLKVILLGHWLLTTCFWRHFSAKPRLETIELTCALCKLRSAAHRATAGLHCILRLLCLGQLHHPGLGRVGCGSAGLHRRHKHVSGWLAGHHLPGHRAHQHLLPAGQPHGHGPLWRGHGHPQLAAQAALLLLRLPHVPGARG

SEQ ID NO: 672 - protein, 116 aa, Homo sapiens
MSAPAQPPAEGTEGTAPGGGPPGPPPNMTSNRRLQQTQAQVEEVVDIIRVNVDKVLERDQKLSELDDRADALQAGASQFESSAAKLKRKYWWKNCKMMIMLGAICAIIVVVIVRRD

SEQ ID NO: 673 - protein, 2039 aa, Homo sapiens; identical to SEQ ID NO: 444

SEQ ID NO: 674 - protein, 560 aa, Homo sapiens
MLRGTLLCAVLGLLRAQPFPCPPACKCVFRDAAQCSGGDVARISALGLPTNLTHILLFGMGRGVLQSQSFSGMTVLQRLMISDSHISAVAPGTFSDLIKLKTLRLSRNKITHLPGALLDKMVLLEQLFLDHNALRGIDQNMFQKLVNLQELALNQNQLDFLPASLFTNLENLKLLDLSGNNLTHLPKGLLGAQAKLERLLLHSNRLVSLDSGLLNSLGALTELQFHRNHIRSIAPGAFDRLPNLSSLTLSRNHLAFLPSALFLHSHNLTLLTLFENPLAELPGVLFGEMGGLQELWLNRTQLRTLPAAAFRNLSRLRYLGVTLSPRLSALPQGAFQGLGELQVLALHSNGLTALPDGLLRGLGKLRQVSLRRNRLRALPRALFRNLSSLESVQLDHNQLETLPGDVFGALPRLTEVLLGHNSWRCDCGLGPFLGWLRQHLGLVGGEEPPRCAGPGAHAGLPLWALPGGDAECPGPRGPPPRPAADSSSEAPVHPALAPNSSEPWVWAQPVTTGKGQDHSPFWGFYFLLLAVQAMITVIIVFAMIKIGQLFRKLIRERALG

SEQ ID NO: 675 - protein, 717 aa, Homo sapiens
MSRRSQRLTRYSQGDDDGSSSSGGSSVAGSQSTLFKDSPLRTLKRKSSNMKRLSPAPQLGPSSDAHTSYYSESLVHESWFPPRSSLEELHGDANWGEDLRVRRRRGTGGSESSRASGLVGRKATEDFLGSSSGYSSEDDYVGYSDVDQQSSSSRLRSAVSRAGSLLWMVATSPGRLFRLLYWWAGTTWYRLTTAASLLDVFVLTRRFSSLKTFLWFLLPLLLLTCLTYGAWYFYPYGLQTFHPALVSWWAAKDSRRPDEGWEARDSSPHFQAEQRVMSRVHSLERRLEALAAEFSSNWQKEAMRLERLELRQGAPGQGGGGGLSHEDTLALLEGLVSRREAALKEDFRRETAARIQEELSALRAEHQQDSEDLFKKIVRASQESEARIQQLKSEWQSMTQESFQESSVKELRRLEDQLAGLQQELAALALKQSSVAEEVGLLPQQIQAVRDDVESQFPAWISQFLARGGGGRVGLLQREEMQAQLRELESKILTHVAEMQGKSAREAAASLSLTLQKEGVIGVTEEQVHHIVKQALQRYSEDRIGLADYALESGGASVISTRCSETYETKTALLSLFGIPLWYHSQSPRVILQPDVHPGNCWAFQGPQGFAVVRLSARIRPTAVTLEHVPKALSPNSTISSAPKDFAIFGFDEDLQQEGTLLGKFTYDQDGEPIQTFHFQAPTMATYQVVELRILTNWGHPEYTCIYRFRVHGEPAH

SEQ ID NO: 676 - protein, 897 aa, Homo sapiens
MVLAQGLLSMALLALCWERSLAGAEETIPLQTLRCYNDYTSHITCRWADTQDAQRLVNVTLIRRVNEDLLEPVSCDLSDDMPWSACPHPRCVPRRCVIPCQSFVVTDVDYFSFQPDRPLGTRLTVTLTQHVQPPEPRDLQISTDQDHFLLTWSVALGSPQSHWLSPGDLEFEVVYKRLQDSWEDAAILLSNTSQATLGPEHLMPSSTYVARVRTRLAPGSRLSGRPSKWSPEVCWDSQPGDEAQPQNLECFFDGAAVLSCSWEVRKEVASSVSFGLFYKPSPDAGEEECSPVLREGLGSLHTRHHCQIPVPDPATHGQYIVSVQPRRAEKHIKSSVNIQMAPPSLNVTKDGDSYSLRWETMKMRYEHIDHTFEIQYRKDTATWKDSKTETLQNAHSMALPALEPSTRYWARVRVRTSRTGYNGIWSEWSEARSWDTESVLPMWVLALIVIFLTIAVLLALRFCGIYGYRLRRKWEEKIPNPSKSHLFQNGSAELWPPGSMSAFTSGSPPHQGPWGSRFPELEGVFPVGFGDSEVSPLTIEDPKHVCDPPSGPDTTPAASDLPTEQPPSPQPGPPAASHTPEKQASSFDFNGPYLGPPHSRSLPDILGQPEPPQEGGSQKSPPPGSLEYLCLPAGGQVQLVPLAQAMGPGQAVEVERRPSQGAAGSPSLESGGGPAPPALGPRVGGQDQKDSPVAIPMSSGDTEDPGVASGYVSSADLVFTPNSGASSVSLVPSLGLPSDQTPSLCPGLASGPPGAPGPVKSGFEGYVELPPIEGRSPRSPRNNPVPPEAKSPVLNPGERPADVSPTSPQPEGLLVLQQVGDYCFLPGLGPGPLSLRSKPSSPGPGPEIKNLDQAFQVKKPPGQAVPQVPVIQLFKALKQQDYLSLPPWEVNKPGEVC

SEQ ID NO: 677 - protein, 725 aa, Homo sapiens
MLQTKDLIWTLFFLGTAVSLQVDIVPSQGEISVGESKFFLCQVAGDAKDKDISWFSPNGEKLTPNQQRISVVWNDDSSSTLTIYNANIDDAGIYKCVVTGEDGSESEATVNVKIFQKLMFKNAPTPQEFREGEDAVIVCDVVSSLPPTIIWKHKGRDVILKKDVRFIVLSNNYLQIRGIKKTDEGTYRCEGRILARGEINFKDIQVIVNVPPTIQARQNIVNATANLGQSVTLVCDAEGFPEPTMSWTKDGEQIEQEEDDEKYIFSDDSSQLTIKKVDKNDEAEYICIAENKAGEQDATIHLKVFAKPKITYVENQTAMELEEQVTLTCEASGDPIPSITWRTSTRNISSEEKTLDGHMVVRSHARVSSLTLKSIQYTDAGEYICTASNTIGQDSQSMYLEVQYAPKLQGPVAVYTWEGNQVNITCEVFAYPSATISWFRDGQLLPSSNYSNIKIYNTPSASYLEVTPDSENDFGNYNCTAVNRIGQESLEFILVQADTPSSPSIDQVEPYSSTAQVQFDEPEATGGVPILKYKAEWRAVGEEVWHSKWYDAKEASMEGIVTIVGLKPETTYAVRLAALNGKGLGEISAASEFKTQPVREPSAPKLEGQMGEDGNSIKVNLIKQDDGGSPIRHYLVRYRALSSEWKPEIRLPSGSDHVMLKSLDWNAEYEVYVVAENQQGKSKAAHFVFRTSAQPTAIPATLGGNSASYTFVSLLFSAVTLLLLC

SEQ ID NO: 678 - protein, 147 aa, Homo sapiens
MSVGVSTSAPLSPTSGTSVGMSTFSIMDYVVFVLLLVLSLAIGLYHACRGWGRHTVGELLMADRKMGCLPVALSLLATFQSAVAILGVPSEIYRFGTQYWFLGCCYFLGLLIPAHIFIPVFYRLHLTSAYEYLELRFNKTVRVCGTV

SEQ ID NO: 679 - protein, 452 aa, Homo sapiens
MSRESDVEAQQSHGSSACSQPHGSVTQSQGSSSQSQGISSSSTSTMPNSSQSSHSSSGTLSSLETVSTQELYSIPEDQEPEDQEPEEPTPAPWARLWALQDGFANLVFVFFDLTVDDQSVYPKALRDEYIMSKTLGSGACGEVKLAFERKTCKKVAIKIISKRKFAIGSAREADPALNVETEIEILKKLNHPCIIKIKNFFDAEDYYIVLELMEGGELFDKVVGNKRLKEATCKLYFYQMLLAVQYLHENGIIHRDLKPENVLLSSQEEDCLIKITDFGHSKILGETSLMRTLCGTPTYLAPEVLVSVGTAGYNRAVDCWSLGVILFICLSGYPPFSEHRTQVSLKDQITSGKYNFIPEVWAEVSEKALDLVKKLLVVDPKARFTTEEALRHPWLQDEDMKRKFQDLLSEENESTALPQVLAQPSTSRKRPREGEAEGAETTKRPAVCAAVL

SEQ ID NO: 680 - protein, 352 aa, Homo sapiens
MPSGVPGCWPQLPLKGPWRPTPRPRVPVPWRTPRFACRWLGYLGLLLLDVIICLLVLVGLIRSSKGILVGVCLLGVLALVISWGALGLELAVSVGSSDFCVDPDAYVTKMVEEYSVLSGDILQYYLACSPRAANPFQQKLSGSHKALVEMQDVVAELLRTVPWEQPATKDPLLRVQEVLNGTEVNLQHLTALVDCRSLHLDYVQALTGFCYDGVEGLIYLALFSFVTALMFSSIVCSVPHTWQQKRGPDEDGEEEAAPGPRQAHDSLYRVHMPSLYSCGSSYGSETSIPAAAHTVSNAPVTEYMSQNANFQNPRCENTPLIGRESPPPSYTSSMRAKYLATSQPRPDSSGSH

SEQ ID NO: 681 - protein, 258 aa, Homo sapiens
MSIGVNCTQITATECDFTAASPSAGFPMDFNVTLRLRAELGALHSAWVTMPWFQHYRNVTVGPPENIEVTPGEGSLIIRFSSPFDIADTSTAFFCYYVHYWEKGGIQQVKGPFRSNSISLDNLKPSRVYCLQVQAQLLWNKSNIFRVGHLSNISCYETMADASTELQQVILISVGTFSLLSVLAGACFFLVLKYRGLIKYWFHTPPSIPLQIEEYLKDPTQPILEALDKDSSPKDDVWDSVSIISFPEKEQEDVLQTL

SEQ ID NO: 682 - protein, 1225 aa, Homo sapiens
MKLRLPASPETHLDMLRHLYQGCQVVQGNLELTYLPTNASLSFLQDIQEVQGYVLIAHNQVRQVPLQRLRIVRGTQLFEDNYALAVLDNGDPLNNTTPVTGASPGGLRELQLRSLTEILKGGVLIQRNPQLCYQDTILWKDIFHKNNQLALTLIDTNRSRACHPCSPMCKGSRCWGESSEDCQSLTRTVCAGGCARCKGPLPTDCCHEQCAAGCTGPKHSDCLACLHFNHSGICELHCPALVTYNTDTFESMPNPEGRYTFGASCVTACPYNYLSTDVGSCTLVCPLHNQEVTAEDGTQRCEKCSKPCARVCYGLGMEHLREVRAVTSANIQEFAGCKKIFGSLAFLPESFDGDPASNTAPLQPEQLQVFETLEEITGYLYISAWPDSLPDLSVFQNLQVIRGRILHNGAYSLTLQGLGISWLGLRSLRELGSGLALIHHNTHLCFVHTVPWDQLFRNPHQALLHTANRPEDECVGEGLACHQLCARGHCWGPGPTQCVNCSQFLRGQECVEECRVLQGLPREYVNARHCLPCHPECQPQNGSVTCFGPEADQCVACAHYKDPPFCVARCPSGVKPDLSYMPIWKFPDEEGACQPCPINCTHSCVDLDDKGCPAEQRASPLTSIISAVVGILLVVVLGVVFGILIKRRQQKIRKYTMRRLLQETELVEPLTPSGAMPNQAQMRILKETELRKVKVLGSGAFGTVYKGIWIPDGENVKIPVAIKVLRENTSPKANKEILDEAYVMAGVGSPYVSRLLGICLTSTVQLVTQLMPYGCLLDHVRENRGRLGSQDLLNWCMQIAKGMSYLEDVRLVHRDLAARNVLVKSPNHVKITDFGLARLLDIDETEYHADGGKVPIKWMALESILRRRFTHQSDVWSYGVTVWELMTFGAKPYDGIPAREIPDLLEKGERLPQPPICTIDVYMIMVKCWMIDSECRPRFRELVSEFSRMARDPQRFVVIQNEDLGPASPLDSTFYRSLLEDDDMGDLVDAEEYLVPQQGFFCPDPAPGAGGMVHHRHRSSSTRSGGGDLTLGLEPSEEEAPRSPLAPSEGAGSDVFDGDLGMGAAKGLQSLPTHDPSPLQRYSEDPTVPLPSETDGYVAPLTCSPQPEYVNQPDVRPQPPSPREGPLPAARPAGATLERPKTLSPGKNGVVKDVFAFGGAVENPEYLTPQGGAAPQPHPPPAFSPAFDNLYYWDQDPPERGAPPSTFKGTPTAENPEYLGLDVPV

SEQ ID NO: 683 - protein, 234 aa, Homo sapiens
MLLAWVQAFLVSNMLLAEAYGSGGCFWDNGHLYREDQTSPAPGLRCLNWLDAQSGLASAPVSGAGNHSYCRNPDEDPRGPWCYVSGEAGVPEKRPCEDLRCPETTSQALPAFTTEIQEASEGPGADEVQVFAPANALPARSEAAAVQPVIGISQRVRMNSKEKKDLGTLGYVLGITMMVIIIAIGAGIILGYSYKRSVASLLGPLRRRGGRYTKSNFVAFLPKRKQDVENQLKM

SEQ ID NO: 684 - protein, 202 aa, Homo sapiens
MDSVEKTTNRSEQKSRKFLKSLIRKQPQELLLVIGTGVSAAVAPGIPALCSWRSCIEAVIEAAEQLEVLHPGDVAEFRRKVTKDRDLLVVAHDLIRKMSPRTGDAKPSFFQDCLMEVFDDLEQHIRSPVVLQSILSLMDRGAMVLTTNYDNLLEAFGRRQNKPMESLDLKDKTKVWAGAAGSLQVWGVLCPGSCSHFVAVNY

SEQ ID NO: 685 - protein, 903 aa, Homo sapiens
MVLAQGLLSMALLALCWERSLAGAEETIPLQTLRCYNDYTSHITCRWADTQDAQRLVNVTLIRRVNEDLLEPVSCDLSDDMPWSACPHPRCVPRRCVIPCQSFVVTDVDYFSFQPDRPLGTRLTVTLTQHVQPPEPRDLQISTDQDHFLLTWSVALGSPQSHWLSPGDLEFEVVYKRLQDSWEDAAILLSNTSQATLGPEHLMPSSTYVARVRTRLAPGSRLSGRPSKWSPEVCWDSQPGDEAQPQNLECFFDGAAVLSCSWEVRKEVASSVSFGLFYKPSPDAGSAVLLREEECSPVLREGLGSLHTRHHCQIPVPDPATHGQYIVSVQPRRAEKHIKSSVNIQMAPPSLNVTKDGDSYSLRWETMKMRYEHIDHTFEIQYRKDTATWKDSKTETLQNAHSMALPALEPSTRYWARVRVRTSRTGYNGIWSEWSEARSWDTESVLPMWVLALIVIFLTIAVLLALRFCGIYGYRLRRKWEEKIPNPSKSHLFQNGSAELWPPGSMSAFTSGSPPHQGPWGSRFPELEGVFPVGFGDSEVSPLTIEDPKHVCDPPSGPDTTPAASDLPTEQPPSPQPGPPAASHTPEKQASSFDFNGPYLGPPHSRSLPDILGQPEPPQEGGSQKSPPPGSLEYLCLPAGGQVQLVPLAQAMGPGQAVEVERRPSQGAAGSPSLESGGGPAPPALGPRVGGQDQKDSPVAIPMSSGDTEDPGVASGYVSSADLVFTPNSGASSVSLVPSLGLPSDQTPSLCPGLASGPPGAPGPVKSGFEGYVELPPIEGRSPRSPRNNPVPPEAKSPVLNPGERPADVSPTSPQPEGLLVLQQVGDYCFLPGLGPGPLSLRSKPSSPGPGPEIKNLDQAFQVKKPPGQAVPQVPVIQLFKALKQQDYLSLPPWEVNKPGEVC

SEQ ID NO: 686 - protein, 491 aa, Homo sapiens
MAGVSYAAPWWVSLLHRLPHFDLSWEATSSQFRPEDTDYQQALLLLGAAALACLALDLLFLLFYSFWLCCRRRKSEEHLDADCCCTAWCVIIATLVCSAGIAVGFYGNGETSDGIHRATYSLRHANRTVAGVQDRVWDTAVGLNHTAEPSLQTLERQLAGRPEPLRAVQRLQGLLETLLGYTAAIPFWRNTAVSLEVLAEQVDLYDWYRVCLLGVLALVISWGALGLELAVSVGSSDFCVDPDAYVTKMVEEYSVLSGDILQYYLACSPRAANPFQQKLSGSHKALVEMQDVVAELLRTVPWEQPATKDPLLRVQEVLNGTEVNLQHLTALVDCRSLHLDYVQALTGFCYDGVEGLIYLALFSFVTALMFSSIVCSVPHTWQQKRGPDEDGEEEAAPGPRQAHDSLYRVHMPSLYSCGSSYGSETSIPAAAHTVSNAPVTEYMSQNANFQNPRCENTPLIGRESPPPSYTSSMRAKYLATSQPRPDSSGSH

SEQ ID NO: 687 - protein, 284 aa, Homo sapiens
MALLLSQDRSLIASGLYGYNATLVGVLMAVFSDKGDYFWWLLLPVCAMSMTCPIFSSALNSMLSKWDLPVFTLPFNMALSMYLSATGHYNPFFPAKLVIPITTAPNISWSDLSALELLKSIPVGVGQIYGCDNPWTGGIFLGAILLSSPLMCLHAAIGSLLGIAAGLSLSAPFEDIYFGLWGFNSSLACIAMGGMFMALTWQTHLLALGCALFTAYLGVGMANFMAEVGLPACTWPFCLATLLFLIMTTKNSNIYKMPLSKVTYPEENRIFYLQAKKRMVESPL

SEQ ID NO: 688 - protein, 738 aa, Homo sapiens
MSRRSQRLTRYSQGDDDGSSSSGGSSVAGSQSTLFKDSPLRTLKRKSSNMKRLSPAPQLGPSSDAHTSYYSESLVHESWFPPRSSLEELHGDANWGEDLRVRRRRGTGGSESSRASGLVGRKATEDFLGSSSGYSSEDDYVEDSEGRGSKVTETEPVSSFPAGYSDVDQQSSSSRLRSAVSRAGSLLWMVATSPGRLFRLLYWWAGTTWYRLTTAASLLDVFVLTRRFSSLKTFLWFLLPLLLLTCLTYGAWYFYPYGLQTFHPALVSWWAAKDSRRPDEGWEARDSSPHFQAEQRVMSRVHSLERRLEALAAEFSSNWQKEAMRLERLELRQGAPGQGGGGGLSHEDTLALLEGLVSRREAALKEDFRRETAARIQEELSALRAEHQQDSEDLFKKIVRASQESEARIQQLKSEWQSMTQESFQESSVKELRRLEDQLAGLQQELAALALKQSSVAEEVGLLPQQIQAVRDDVESQFPAWISQFLARGGGGRVGLLQREEMQAQLRELESKILTHVAEMQGKSAREAAASLSLTLQKEGVIGVTEEQVHHIVKQALQRYSEDRIGLADYALESGGASVISTRCSETYETKTALLSLFGIPLWYHSQSPRVILQPDVHPGNCWAFQGPQGFAVVRLSARIRPTAVTLEHVPKALSPNSTISSAPKDFAIFGFDEDLQQEGTLLGKFTYDQDGEPIQTFHFQAPTMATYQVVELRILTNWGHPEYTCIYRFRVHGEPAH

SEQ ID NO: 689 - protein, 543 aa, Homo sapiens
MSRESDVEAQQSHGSSACSQPHGSVTQSQGSSSQSQGISSSSTSTMPNSSQSSHSSSGTLSSLETVSTQELYSIPEDQEPEDQEPEEPTPAPWARLWALQDGFANLECVNDNYWFGRDKSCEYCFDEPLLKRTDKYRTYSKKHFRIFREVGPKNSYIAYIEDHSGNGTFVNTELVGKGKRRPLNNNSEIALSLSRNKVFVFFDLTVDDQSVYPKALRDEYIMSKTLGSGACGEVKLAFERKTCKKVAIKIISKRKFAIGSAREADPALNVETEIEILKKLNHPCIIKIKNFFDAEDYYIVLELMEGGELFDKVVGNKRLKEATCKLYFYQMLLAVQYLHENGIIHRDLKPENVLLSSQEEDCLIKITDFGHSKILGETSLMRTLCGTPTYLAPEVLVSVGTAGYNRAVDCWSLGVILFICLSGYPPFSEHRTQVSLKDQITSGKYNFIPEVWAEVSEKALDLVKKLLVVDPKARFTTEEALRHPWLQDEDMKRKFQDLLSEENESTALPQVLAQPSTSRKRPREGEAEGAETTKRPAVCAAVL

SEQ ID NO: 690 - protein, 210 aa, Homo sapiens
MNAAVRAVVRMGIYVGAKVYFIYEGYQGMVDGGSNIAEADWESVSSILQVGGTIIGSARCQAFRTREGRLKAACNLLQRGITNLCVIGGDGSLTGANLFRKEWSGLLEELARNGQIDKEAVQKYAYLNVVGMVGSIDNDFCGTDMTIGTDSALHRIIEVVDAIMTTAQSHQRTFVLEVMGRHCGYLALVSALACGADWVFLPESPPEEGW

SEQ ID NO: 691 - protein, 949 aa, Homo sapiens
MAGIFYFALFSCLFGICDAVTGSRVYPANEVTLLDSRSVQGELGWIASPLEGGWEEVSIMDEKNTPIRTYQVCNVMEPSQNNWLRTDWITREGAQRVYIEIKFTLRDCNSLPGVMGTCKETFNLYYYESDNDKERFIRENQFVKIDTIAADESFTQVDIGDRIMKLNTEIRDVGPLSKKGFYLAFQDVGACIALVSVRVFYKKCPLTVRNLAQFPDTITGADTSSLVEVRGSCVNNSEEKDVPKMYCGADGEWLVPIGNCLCNAGHEERSGECQACKIGYYKALSTDATCAKCPPHSYSVWEGATSCTCDRGFFRADNDAASMPCTRPPSAPLNLISNVNETSVNLEWSSPQNTGGRQDISYNVVCKKCGAGDPSKCRPCGSGVHYTPQQNGLKTTKVSITDLLAHTNYTFEIWAVNGVSKYNPNPDQSVSVTVTTNQAAPSSIALVQAKEVTRYSVALAWLEPDRPNGVILEYEVKYYEKDQNERSYRIVRTAARNTDIKGLNPLTSYVFHVRARTAAGYGDFSEPLEVTTNTVPSRIIGDGANSTVLLVSVSGSVVLVVILIAAFVISRRRSKYSKAKQEADEEKHLNQGVRTYVDPFTYEDPNQAVREFAKEIDASCIKIEKVIGVGEFGEVCSGRLKVPGKREICVAIKTLKAGYTDKQRRDFLSEASIMGQFDHPNIIHLEGVVTKCKPVMIITEYMENGSLDAFLRKNDGRFTVIQLVGMLRGIGSGMKYLSDMSYVHRDLAARNILVNSNLVCKVSDFGMSRVLEDDPEAAYTTRGGKIPIRWTAPEAIAYRKFTSASDVWSYGIVMWEVMSYGERPYWDMSNQDVIKAIEEGYRLPPPMDCPIALHQLMLDCWQKERSDRPKFGQIVNMLDKLIRNPNSLKRTGTESSRPNTALLDPSSPEFSAVVSVGDWLQAIKMDRYKDNFTAAGYTTLEAVVHVNQE

SEQ ID NO: 692 - protein, 2088 aa, Homo sapiens
MLCCLLVRASNLPSAKKDRRSDPVASLTFRGVKKRTKVIKNSVNPVWNEGFEWDLKGIPLDQGSELHVVVKDHETMGRNRFLGEAKVPLREVLATPSLSASFNAPLLDTKKQPTGASLVLQVSYTPLPGAVPLFPPPTPLEPSPTLPDLDVVADTGGEEDTEDQGLTGDEAEPFLDQSGGPGAPTTPRKLPSRPPPHYPGIKRKRSAPTSRKLLSDKPQDFQIRVQVIEGRQLPGVNIKPVVKVTAAGQTKRTRIHKGNSPLFNETLFFNLFDSPGELFDEPIFITVVDSRSLRTDALLGEFRMDVGTIYREPRHAYLRKWLLLSDPDDFSAGARGYLKTSLCVLGPGDEAPLERKDPSEDKEDIESNLLRPTGVALRGAHFCLKVFRAEDLPQMDDAVMDNVKQIFGFESNKKNLVDPFVEVSFAGKMLCSKILEKTANPQWNQNITLPAMFPSMCEKMRIRIIDWDRLTHNDIVATTYLSMSKISAPGGEIEVDDYLGFLPTFGPCYINLYGSPREFTGFPDPYTELNTGKGEGVAYRGRLLLSLETKLVEHSEQKVEDLPADDILRVEKYLRRRKYSLFAAFYSATMLQDVDDAIQFEVSIGNYGNKFDMTCLPLASTTQYSRAVFDGCHYYYLPWGNVKPVVVLSSYWEDISHRIETQNQLLGIADRLEAGLEQVHLALKAQCSTEDVDSLVAQLTDELIAGCSQPLGDIHETPSATHLDQYLYQLRTHHLSQITEAALALKLGHSELPAALEQAEDWLLRLRALAEEPQNSLPDIVIWMLQGDKRVAYQRVPAHQVLFSRRGANYCGKNCGKLQTIFLKYPMEKVPGARMPVQIRVKLWFGLSVDEKEFNQFAEGKLSVFAETYENETKLALVGNWGTTGLTYPKFSDVTGKIKLPKDSFRPSAGWTWAGDWFVCPEKTLLHDMDAGHLSFVEEVFENQTRLPGGQWIYMSDNYTDVNGEKVLPKDDIECPLGWKWEDEEWSTDLNRAVDEQGWEYSITIPPERKPKHWVPAEKMYYTHRRRRWVRLRRRDLSQMEALKRHRQAEAEGEGWEYASLFGWKFHLEYRKTDAFRRRRWRRRMEPLEKTGPAAVFALEGALGGVMDDKSEDSMSVSTLSFGVNRPTISCIFDYGNRYHLRCYMYQARDLAAMDKDSFSDPYAIVSFLHQSQKTVVVKNTLNPTWDQTLIFYEIEIFGEPATVAEQPPSIVVELYDHDTYGADEFMGRCICQPSLERMPRLAWFPLTRGSQPSGELLASFELIQREKPAIHHIPGFEVQETSRILDESEDTDLPYPPPQREANIYMVPQNIKPALQRTAIEILAWGLRNMKSYQLANISSPSLVVECGGQTVQSCVIRNLRKNPNFDICTLFMEVMLPREELYCPPITVKVIDNRQFGRRPVVGQCTIRSLESFLCDPYSAESPSPQGGPDDVSLLSPGEDVLIDIDDKEPLIPIQLADGLSSLAPTNTASPPSSPHEEEFIDWWSKFFASIGEREKCGSYLEKDFDTLKVYDTQLENVEAFEGLSDFCNTFKLYRGKTQEETEDPSVIGEFKGLFKIYPLPEDPAIPMPPRQFHQLAAQGPQECLVRIYIVRAFGLQPKDPNGKCDPYIKISIGKKSVSDQDNYIPCTLEPVFGKMFELTCTLPLEKDLKITLYDYDLLSKDEKIGETVVDLENRLLSKFGARCGLPQTYCVSGPNQWRDQLRPSQLLHLFCQQHRVKAPVYRTDRVMFQDKEYSIEEIEAGRIPNPHLGPVEERLALHVLQQQGLVPEHVESRPLYSPLQPDIEQGKLQMWVDLFPKALGRPGPPFNITPRRARRFFLRCIIWNTRDVILDDLSLTGEKMSDIYVKGWMIGFEEHKQKTDVHYRSLGGEGNFNWRFIFPFDYLPAEQVCTIAKKDAFWRLDKTESKIPARVVFQIWDNDKFSFDDFLGSLQLDLNRMPKPAKTAKKCSLDQLDDAFHPEWFVSLFEQKTVKGWWPCVAEEGEKKILAGKLEMTLEIVAESEHEERPAGQGRDEPNMNPKLEDPRRPDTSFLWFTSPYKTMKFILWRRFRWAIILFIILFILLLFLAIFIYAFPNYAAMKLVKPFS

SEQ ID NO: 693 - protein, 569 aa, Homo sapiens
MKVLLRLICFIALLISSLEADKCKEREEKIILVSSANEIDVRPCPLNPNEHKGTITWYKDDSKTPVSTEQASRIHQHKEKLWFVPAKVEDSGHYYCVVRNSSYCLRIKISAKFVENEPNLCYNAQAIFKQKLPVAGDGGLVCPYMEFFKNENNELPKLQWYKDCKPLLLDNIHFSGVKDRLIVMNVAEKHRGNYTCHASYTYLGKQYPITRVIEFITLEENKPTRPVIVSPANETMEVDLGSQIQLICNVTGQLSDIAYWKWNGSVIDEDDPVLGEDYYSVENPANKRRSTLITVLNISEIESRFYKHPFTCFAKNTHGIDAAYIQLIYPVTNFQKHMIGICVTLTVIIVCSVFIYKIFKIDIVLWYRDSCYDFLPIKASDGKTYDAYILYPKTVGEGSTSDCDIFVFKVLPEVLEKQCGYKLFIYGRDDYVGEDIVEVINENVKKSRRLIIILVRETSGFSWLGGSSEEQIAMYNALVQDGIKVVLLELEKIQDYEKMPESIKFIKQKHGAIRWSGDFTQGPQSAKTRFWKNVRYHMPVQRRSPSSKHQLLSPATKEKLQREAHVPLG

SEQ ID NO: 694 - protein, 447 aa, Homo sapiens
MKVLLRLICFIALLISSLEADKCKEREEKIILVSSANEIDVRPCPLNPNEHKGTITWYKDDSKTPVSTEQASRIHQHKEKLWFVPAKVEDSGHYYCVVRNSSYCLRIKISAKFVENEPNLCYNAQAIFKQKLPVAGDGGLVCPYMEFFKNENNELPKLQWYKDCKPLLLDNIHFSGVKDRLIVMNVAEKHRGNYTCHASYTYLGKQYPITRVIEFITLEENKPTRPVIVSPANETMEVDLGSQIQLICNVTGQLSDIAYWKWNGSVIDEDDPVLGEDYYSVENPANKRRSTLITVLNISEIESRFYKHPFTCFAKNTHGIDAAYIQLIYPVTNFQKHMIGICVTLTVIIVCSVFIYKIFKIDIVLWYRDSCYDFLPIKASDGKTYDAYILYPKTVGEGSTSDCDIFVFKVLPEVLEKQCGYKLFIYGRDDYVGEGMCVMEQSKGLLL

SEQ ID NO: 695 - protein, 2102 aa, Homo sapiens
MLCCLLVRASNLPSAKKDRRSDPVASLTFRGVKKRTKVIKNSVNPVWNEGFEWDLKGIPLDQGSELHVVVKDHETMGRNRFLGEAKVPLREVLATPSLSASFNAPLLDTKKQPTGASLVLQVSYTPLPGAVPLFPPPTPLEPSPTLPDLDVVADTGGEEDTEDQGLTGDEAEPFLDQSGGPGAPTTPRKLPSRPPPHYPGIKRKRSAPTSRKLLSDKPQDFQIRVQVIEGRQLPGVNIKPVVKVTAAGQTKRTRIHKGNSPLFNETLFFNLFDSPGELFDEPIFITVVDSRSLRTDALLGEFRMDVGTIYREPRHAYLRKWLLLSDPDDFSAGARGYLKTSLCVLGPGDEAPLERKDPSEDKEDIESNLLRPTGVALRGAHFCLKVFRAEDLPQMDDAVMDNVKQIFGFESNKKNLVDPFVEVSFAGKMLCSKILEKTANPQWNQNITLPAMFPSMCEKMRIRIIDWDRLTHNDIVATTYLSMSKISAPGGEIEEEPAGAVKPSKASDLDDYLGFLPTFGPCYINLYGSPREFTGFPDPYTELNTGKGEGVAYRGRLLLSLETKLVEHSEQKVEDLPADDILRVEKYLRRRKYSLFAAFYSATMLQDVDDAIQFEVSIGNYGNKFDMTCLPLASTTQYSRAVFDGCHYYYLPWGNVKPVVVLSSYWEDISHRIETQNQLLGIADRLEAGLEQVHLALKAQCSTEDVDSLVAQLTDELIAGCSQPLGDIHETPSATHLDQYLYQLRTHHLSQITEAALALKLGHSELPAALEQAEDWLLRLRALAEEPQNSLPDIVIWMLQGDKRVAYQRVPAHQVLFSRRGANYCGKNCGKLQTIFLKYPMEKVPGARMPVQIRVKLWFGLSVDEKEFNQFAEGKLSVFAETYENETKLALVGNWGTTGLTYPKFSDVTGKIKLPKDSFRPSAGWTWAGDWFVCPEKTLLHDMDAGHLSFVEEVFENQTRLPGGQWIYMSDNYTDVNGEKVLPKDDIECPLGWKWEDEEWSTDLNRAVDEQGWEYSITIPPERKPKHWVPAEKMYYTHRRRRWVRLRRRDLSQMEALKRHRQAEAEGEGWEYASLFGWKFHLEYRKTDAFRRRRWRRRMEPLEKTGPAAVFALEGALGGVMDDKSEDSMSVSTLSFGVNRPTISCIFDYGNRYHLRCYMYQARDLAAMDKDSFSDPYAIVSFLHQSQKTVVVKNTLNPTWDQTLIFYEIEIFGEPATVAEQPPSIVVELYDHDTYGADEFMGRCICQPSLERMPRLAWFPLTRGSQPSGELLASFELIQREKPAIHHIPGFEVQETSRILDESEDTDLPYPPPQREANIYMVPQNIKPALQRTAIEILAWGLRNMKSYQLANISSPSLVVECGGQTVQSCVIRNLRKNPNFDICTLFMEVMLPREELYCPPITVKVIDNRQFGRRPVVGQCTIRSLESFLCDPYSAESPSPQGGPDDVSLLSPGEDVLIDIDDKEPLIPIQLADGLSSLAPTNTASPPSSPHEEEFIDWWSKFFASIGEREKCGSYLEKDFDTLKVYDTQLENVEAFEGLSDFCNTFKLYRGKTQEETEDPSVIGEFKGLFKIYPLPEDPAIPMPPRQFHQLAAQGPQECLVRIYIVRAFGLQPKDPNGKCDPYIKISIGKKSVSDQDNYIPCTLEPVFGKMFELTCTLPLEKDLKITLYDYDLLSKDEKIGETVVDLENRLLSKFGARCGLPQTYCVSGPNQWRDQLRPSQLLHLFCQQHRVKAPVYRTDRVMFQDKEYSIEEIEAGRIPNPHLGPVEERLALHVLQQQGLVPEHVESRPLYSPLQPDIEQGKLQMWVDLFPKALGRPGPPFNITPRRARRFFLRCIIWNTRDVILDDLSLTGEKMSDIYVKGWMIGFEEHKQKTDVHYRSLGGEGNFNWRFIFPFDYLPAEQVCTIAKKDAFWRLDKTESKIPARVVFQIWDNDKFSFDDFLGSLQLDLNRMPKPAKTAKKCSLDQLDDAFHPEWFVSLFEQKTVKGWWPCVAEEGEKKILAGKLEMTLEIVAESEHEERPAGQGRDEPNMNPKLEDPRRPDTSFLWFTSPYKTMKFILWRRFRWAIILFIILFILLLFLAIFIYAFPNYAAMKLVKPFS

SEQ ID NO: 696 - protein, 2118 aa, Homo sapiens
MLRVFILYAENVHTPDTDISDAYCSAVFAGVKKRTKVIKNSVNPVWNEGFEWDLKGIPLDQGSELHVVVKDHETMGRNRFLGEAKVPLREVLATPSLSASFNAPLLDTKKQPTGASLVLQVSYTPLPGAVPLFPPPTPLEPSPTLPDLDVVAGGGQSRAETWSLLSDSTMDTRYSGKKWPAPTDTGGEEDTEDQGLTGDEAEPFLDQSGGPGAPTTPRKLPSRPPPHYPGIKRKRSAPTSRKLLSDKPQDFQIRVQVIEGRQLPGVNIKPVVKVTAAGQTKRTRIHKGNSPLFNETLFFNLFDSPGELFDEPIFITVVDSRSLRTDALLGEFRMDVGTIYREPRHAYLRKWLLLSDPDDFSAGARGYLKTSLCVLGPGDEAPLERKDPSEDKEDIESNLLRPTGVALRGAHFCLKVFRAEDLPQMDDAVMDNVKQIFGFESNKKNLVDPFVEVSFAGKMLCSKILEKTANPQWNQNITLPAMFPSMCEKMRIRIIDWDRLTHNDIVATTYLSMSKISAPGGEIEVDDYLGFLPTFGPCYINLYGSPREFTGFPDPYTELNTGKGEGVAYRGRLLLSLETKLVEHSEQKVEDLPADDILRVEKYLRRRKYSLFAAFYSATMLQDVDDAIQFEVSIGNYGNKFDMTCLPLASTTQYSRAVFDGCHYYYLPWGNVKPVVVLSSYWEDISHRIETQNQLLGIADRLEAGLEQVHLALKAQCSTEDVDSLVAQLTDELIAGCSQPLGDIHETPSATHLDQYLYQLRTHHLSQITEAALALKLGHSELPAALEQAEDWLLRLRALAEEPQNSLPDIVIWMLQGDKRVAYQRVPAHQVLFSRRGANYCGKNCGKLQTIFLKYPMEKVPGARMPVQIRVKLWFGLSVDEKEFNQFAEGKLSVFAETYENETKLALVGNWGTTGLTYPKFSDVTGKIKLPKDSFRPSAGWTWAGDWFVCPEKTLLHDMDAGHLSFVEEVFENQTRLPGGQWIYMSDNYTDVNGEKVLPKDDIECPLGWKWEDEEWSTDLNRAVDEQGWEYSITIPPERKPKHWVPAEKMYYTHRRRRWVRLRRRDLSQMEALKRHRQAEAEGEGWEYASLFGWKFHLEYRKTDAFRRRRWRRRMEPLEKTGPAAVFALEGALGGVMDDKSEDSMSVSTLSFGVNRPTISCIFDYGNRYHLRCYMYQARDLAAMDKDSFSDPYAIVSFLHQSQKTVVVKNTLNPTWDQTLIFYEIEIFGEPATVAEQPPSIVVELYDHDTYGADEFMGRCICQPSLERMPRLAWFPLTRGSQPSGELLASFELIQREKPAIHHIPGFEVQETSRILDESEDTDLPYPPPQREANIYMVPQNIKPALQRTAIEILAWGLRNMKSYQLANISSPSLVVECGGQTVQSCVIRNLRKNPNFDICTLFMEVMLPREELYCPPITVKVIDNRQFGRRPVVGQCTIRSLESFLCDPYSAESPSPQGGPDDVSLLSPGEDVLIDIDDKEPLIPIQLADGLSSLAPTNTASPPSSPHEEEFIDWWSKFFASIGEREKCGSYLEKDFDTLKVYDTQLENVEAFEGLSDFCNTFKLYRGKTQEETEDPSVIGEFKGLFKIYPLPEDPAIPMPPRQFHQLAAQGPQECLVRIYIVRAFGLQPKDPNGKCDPYIKISIGKKSVSDQDNYIPCTLEPVFGKMFELTCTLPLEKDLKITLYDYDLLSKDEKIGETVVDLENRLLSKFGARCGLPQTYCVSGPNQWRDQLRPSQLLHLFCQQHRVKAPVYRTDRVMFQDKEYSIEEIEAGRIPNPHLGPVEERLALHVLQQQGLVPEHVESRPLYSPLQPDIEQGKLQMWVDLFPKALGRPGPPFNITPRRARRFFLRCIIWNTRDVILDDLSLTGEKMSDIYVKGWMIGFEEHKQKTDVHYRSLGGEGNFNWRFIFPFDYLPAEQVCTIAKKDAFWRLDKTESKIPARVVFQIWDNDKFSFDDFLGSLQLDLNRMPKPAKTAKKCSLDQLDDAFHPEWFVSLFEQKTVKGWWPCVAEEGEKKILAGKLEMTLEIVAESEHEERPAGQGRDEPNMNPKLEDPRRPDTSFLWFTSPYKTMKFILWRRFRWAIILFIILFILLLFLAIFIYAFPNYAAMKLVKPFS

SEQ ID NO: 697 - protein, 954 aa, Homo sapiens
MGVTVQSQGPGGKVVTCAHRYEKRQHVNTKQESRDIFGRCYVLSQNLRIEDDMDGGDWSFCDGRLRGHEKFGSCQQGVAATFTKDFHYIVFGAPGTYNWKGLLFLTSVSYTDPDQFVYKTRPPREQPDTFPDVMMNSYLGFSLDSGKGIVSKDEITFVSGAPRANHSGAVVLLKRDMKSAHLLPEHIFDGEGLASSFGYDVAVVDLNKDGWQDIVIGAPQYFDRDGEVGGAVYVYMNQQGRWNNVKPIRLNGTKDSMFGIAVKNIGDINQDGYPDIAVGAPYDDLGKVFIYHGSANGINTKPTQVLKGISPYFGYSIAGNMDLDRNSYPDVAVGSLSDSVTIFRSRPVINIQKTITVTPNRIDLRQKTACGAPSGICLQVKSCFEYTANPAGYNPSISIVGTLEAEKERRKSGLSSRVQFRNQGSEPKYTQELTLKRQKQKVCMEETLWLQDNIRDKLRPIPITASVEIQEPSSRRRVNSLPEVLPILNSDEPKTAHIDVHFLKEGCGDDNVCNSNLKLEYKFCTREGNQDKFSYLPIQKGVPELVLKDQKDIALEITVTNSPSNPRNPTKDGDDAHEAKLIATFPDTLTYSAYRELRAFPEKQLSCVANQNGSQADCELGNPFKRNSNVTFYLVLSTTEVTFDTPDLDINLKLETTSNQDNLAPITAKAKVVIELLLSVSGVAKPSQVYFGGTVVGEQAMKSEDEVGSLIEYEFRVINLGKPLTNLGTATLNIQWPKEISNGKWLLYLVKVESKGLEKVTCEPQKEINSLNLTESHNSRKKREITEKQIDDNRKFSLFAERKYQTLNCSVNVNCVNIRCPLRGLDSKASLILRSRLWNSTFLEEYSKLNYLDILMRAFIDVTAAAENIRLPNAGTQVRVTVFPSKTVAQYSGVPWWIILVAILAGILMLALLVFILWKCGFFKRNKKDHYDATYHKAEIHAQPSDKERLTSDA

SEQ ID NO: 698 - protein, 2098 aa, Homo sapiens
MLCCLLVRASNLPSAKKDRRSDPVASLTFRGVKKRTKVIKNSVNPVWNEGFEWDLKGIPLDQGSELHVVVKDHETMGRNRFLGEAKVPLREVLATPSLSASFNAPLLDTKKQPTGASLVLQVSYTPLPGAVPLFPPPTPLEPSPTLPDLDVVAGGGQSRAETWSLLSDSTMDTRYSGKKWPAPTDTGGEEDTEDQGLTGDEAEPFLDQSGGPGAPTTPRKLPSRPPPHYPGIKRKRSAPTSRKLLSDKPQDFQIRVQVIEGRQLPGVNIKPVVKVTAAGQTKRTRIHKGNSPLFNETLFFNLFDSPGELFDEPIFITVVDSRSLRTDALLGEFRMDVGTIYREPRHAYLRKWLLLSDPDDFSAGARGYLKTSLCVLGPGDEAPLERKDPSEDKEDIESNLLRPTGVALRGAHFCLKVFRAEDLPQMDDAVMDNVKQIFGFESNKKNLVDPFVEVSFAGKMLCSKILEKTANPQWNQNITLPAMFPSMCEKMRIRIIDWDRLTHNDIVATTYLSMSKISAPGGEIEVDDYLGFLPTFGPCYINLYGSPREFTGFPDPYTELNTGKGEGVAYRGRLLLSLETKLVEHSEQKVEDLPADDILRVEKYLRRRKYSLFAAFYSATMLQDVDDAIQFEVSIGNYGNKFDMTCLPLASTTQYSRAVFDGCHYYYLPWGNVKPVVVLSSYWEDISHRIETQNQLLGIADRLEAGLEQVHLALKAQCSTEDVDSLVAQLTDELIAGCSQPLGDIHETPSATHLDQYLYQLRTHHLSQITEAALALKLGHSELPAALEQAEDWLLRLRALAEEPQNSLPDIVIWMLQGDKRVAYQRVPAHQVLFSRRGANYCGKNCGKLQTIFLKYPMEKVPGARMPVQIRVKLWFGLSVDEKEFNQFAEGKLSVFAETYENETKLALVGNWGTTGLTYPKFSDVTGKIKLPKDSFRPSAGWTWAGDWFVCPEKTLLHDMDAGHLSFVEEVFENQTRLPGGQWIYMSDNYTDVNGEKVLPKDDIECPLGWKWEDEEWSTDLNRAVDEQGWEYSITIPPERKPKHWVPAEKMYYTHRRRRWVRLRRRDLSQMEALKRHRQAEAEGEGWEYASLFGWKFHLEYRKTDAFRRRRWRRRMEPLEKTGPAAVFALEGALGGVMDDKSEDSMSVSTLSFGVNRPTISCIFDYGNRYHLRCYMYQARDLAAMDKDSFSDPYAIVSFLHQSQKTVVVKNTLNPTWDQTLIFYEIEIFGEPATVAEQPPSIVVELYDHDTYGADEFMGRCICQPSLERMPRLAWFPLTRGSQPSGELLASFELIQREKPAIHHIPGFEVQETSRILDESEDTDLPYPPPQREANIYMVPQNIKPALQRTAIEILAWGLRNMKSYQLANISSPSLVVECGGQTVQSCVIRNLRKNPNFDICTLFMEVMLPREELYCPPITVKVIDNRQFGRRPVVGQCTIRSLESFLCDPYSAESPSPQGGPDDVSLLSPGEDVLIDIDDKEPLIPIQEEEFIDWWSKFFASIGEREKCGSYLEKDFDTLKVYDTQLENVEAFEGLSDFCNTFKLYRGKTQEETEDPSVIGEFKGLFKIYPLPEDPAIPMPPRQFHQLAAQGPQECLVRIYIVRAFGLQPKDPNGKCDPYIKISIGKKSVSDQDNYIPCTLEPVFGKMFELTCTLPLEKDLKITLYDYDLLSKDEKIGETVVDLENRLLSKFGARCGLPQTYCVSGPNQWRDQLRPSQLLHLFCQQHRVKAPVYRTDRVMFQDKEYSIEEIEAGRIPNPHLGPVEERLALHVLQQQGLVPEHVESRPLYSPLQPDIEQGKLQMWVDLFPKALGRPGPPFNITPRRARRFFLRCIIWNTRDVILDDLSLTGEKMSDIYVKGWMIGFEEHKQKTDVHYRSLGGEGNFNWRFIFPFDYLPAEQVCTIAKKDAFWRLDKTESKIPARVVFQIWDNDKFSFDDFLGSLQLDLNRMPKPAKTAKKCSLDQLDDAFHPEWFVSLFEQKTVKGWWPCVAEEGEKKILAGKLEMTLEIVAESEHEERPAGQGRDEPNMNPKLEDPRRPDTSFLWFTSPYKTMKFILWRRFRWAIILFIILFILLLFLAIFIYAFPNYAAMKLVKPFS

SEQ ID NO: 699 - protein, 2112 aa, Homo sapiens
MLCCLLVRASNLPSAKKDRRSDPVASLTFRGVKKRTKVIKNSVNPVWNEGFEWDLKGIPLDQGSELHVVVKDHETMGRNRFLGEAKVPLREVLATPSLSASFNAPLLDTKKQPTGASLVLQVSYTPLPGAVPLFPPPTPLEPSPTLPDLDVVAGGGQSRAETWSLLSDSTMDTRYSGKKWPAPTDTGGEEDTEDQGLTGDEAEPFLDQSGGPGAPTTPRKLPSRPPPHYPGIKRKRSAPTSRKLLSDKPQDFQIRVQVIEGRQLPGVNIKPVVKVTAAGQTKRTRIHKGNSPLFNETLFFNLFDSPGELFDEPIFITVVDSRSLRTDALLGEFRMDVGTIYREPRHAYLRKWLLLSDPDDFSAGARGYLKTSLCVLGPGDEAPLERKDPSEDKEDIESNLLRPTGVALRGAHFCLKVFRAEDLPQMDDAVMDNVKQIFGFESNKKNLVDPFVEVSFAGKMLCSKILEKTANPQWNQNITLPAMFPSMCEKMRIRIIDWDRLTHNDIVATTYLSMSKISAPGGEIEEEPAGAVKPSKASDLDDYLGFLPTFGPCYINLYGSPREFTGFPDPYTELNTGKGEGVAYRGRLLLSLETKLVEHSEQKVEDLPADDILRVEKYLRRRKYSLFAAFYSATMLQDVDDAIQFEVSIGNYGNKFDMTCLPLASTTQYSRAVFDGCHYYYLPWGNVKPVVVLSSYWEDISHRIETQNQLLGIADRLEAGLEQVHLALKAQCSTEDVDSLVAQLTDELIAGCSQPLGDIHETPSATHLDQYLYQLRTHHLSQITEAALALKLGHSELPAALEQAEDWLLRLRALAEEPQNSLPDIVIWMLQGDKRVAYQRVPAHQVLFSRRGANYCGKNCGKLQTIFLKYPMEKVPGARMPVQIRVKLWFGLSVDEKEFNQFAEGKLSVFAETYENETKLALVGNWGTTGLTYPKFSDVTGKIKLPKDSFRPSAGWTWAGDWFVCPEKTLLHDMDAGHLSFVEEVFENQTRLPGGQWIYMSDNYTDVNGEKVLPKDDIECPLGWKWEDEEWSTDLNRAVDEQGWEYSITIPPERKPKHWVPAEKMYYTHRRRRWVRLRRRDLSQMEALKRHRQAEAEGEGWEYASLFGWKFHLEYRKTDAFRRRRWRRRMEPLEKTGPAAVFALEGALGGVMDDKSEDSMSVSTLSFGVNRPTISCIFDYGNRYHLRCYMYQARDLAAMDKDSFSDPYAIVSFLHQSQKTVVVKNTLNPTWDQTLIFYEIEIFGEPATVAEQPPSIVVELYDHDTYGADEFMGRCICQPSLERMPRLAWFPLTRGSQPSGELLASFELIQREKPAIHHIPGFEVQETSRILDESEDTDLPYPPPQREANIYMVPQNIKPALQRTAIEILAWGLRNMKSYQLANISSPSLVVECGGQTVQSCVIRNLRKNPNFDICTLFMEVMLPREELYCPPITVKVIDNRQFGRRPVVGQCTIRSLESFLCDPYSAESPSPQGGPDDVSLLSPGEDVLIDIDDKEPLIPIQEEEFIDWWSKFFASIGEREKCGSYLEKDFDTLKVYDTQLENVEAFEGLSDFCNTFKLYRGKTQEETEDPSVIGEFKGLFKIYPLPEDPAIPMPPRQFHQLAAQGPQECLVRIYIVRAFGLQPKDPNGKCDPYIKISIGKKSVSDQDNYIPCTLEPVFGKMFELTCTLPLEKDLKITLYDYDLLSKDEKIGETVVDLENRLLSKFGARCGLPQTYCVSGPNQWRDQLRPSQLLHLFCQQHRVKAPVYRTDRVMFQDKEYSIEEIEAGRIPNPHLGPVEERLALHVLQQQGLVPEHVESRPLYSPLQPDIEQGKLQMWVDLFPKALGRPGPPFNITPRRARRFFLRCIIWNTRDVILDDLSLTGEKMSDIYVKGWMIGFEEHKQKTDVHYRSLGGEGNFNWRFIFPFDYLPAEQVCTIAKKDAFWRLDKTESKIPARVVFQIWDNDKFSFDDFLGSLQLDLNRMPKPAKTAKKCSLDQLDDAFHPEWFVSLFEQKTVKGWWPCVAEEGEKKILAGKLEMTLEIVAESEHEERPAGQGRDEPNMNPKLEDPRRPDTSFLWFTSPYKTMKFILWRRFRWAIILFIILFILLLFLAIFIYAFPNYAAMKLVKPFS

SEQ ID NO: 700 - protein, 538 aa, Homo sapiens
MKVLLRLICFIALLISSLEADKCKEREEKIILVSSANEIDVRPCPLNPNEHKGTITWYKDDSKTPVSTEQASRIHQHKEKLWFVPAKVEDSGHYYCVVRNSSYCLRIKISAKFVENEPNLCYNAQAIFKQKLPVAGDGGLVCPYMEFFKNENNELPKLQWYKDCKPLLLDNIHFSGVKDRLIVMNVAEKHRGNYTCHASYTYLGKQYPITRVIEFITLEENKPTRPVIVSPANETMEVDLGSQIQLICNVTGQLSDIAYWKWNGSVIDEDDPVLGEDYYSVENPANKRRSTLITVLNISEIESRFYKHPFTCFAKNTHGIDAAYIQLIYPVTNFQKHMIGICVTLTVIIVCSVFIYKIFKIDIVLWYRDSCYDFLPIKVLPEVLEKQCGYKLFIYGRDDYVGEDIVEVINENVKKSRRLIIILVRETSGFSWLGGSSEEQIAMYNALVQDGIKVVLLELEKIQDYEKMPESIKFIKQKHGAIRWSGDFTQGPQSAKTRFWKNVRYHMPVQRRSPSSKHQLLSPATKEKLQREAHVPLG

SEQ ID NO: 701 - protein, 1251 aa, Homo sapiens
MDSFDLALLQEWDLESLWGEDILNQRNDSLVVEFQSSASRCRSVYEPDRNALRRKERERRNQETQQDDGTFNSSYSLFSEPYKTNKGDELSNRIQNTLGNYDEMKDFLTDRSNQSHLVGVPKPGVPQTPVNKIDEHFVADSRAQNQPSSICSTTTSTPAAVPVQQSKRGTMGWQKAGHPPSDGQQRATQQGSLRTLLGDGVGRQQPRAKQVCNVEVGLQTQERPPAMAAKHSSSGHCVQNFPPSLASKPSLVQQKPTAYVRPMDGQDQAPDESPKLKSSSETSVHCTSYRGVPASKPEPARAKAKLSKFSIPKQGEESRSGETNSCVEEIIREMTWLPPLSAIQAPGKVEPTKFPFPNKDSQLVSSGHNNPKKGDAEPESPDNGTSNTSMLEDDLKLSSDEEENEQQAAQRTALRALSDSAVVQQPNCRTSVPSSKGSSSSSSSGSSSSSSDSESSSGSDSETESSSSESEGSKPPHFSSPEAEPASSNKWQLDKWLNKVNPHKPPILIQNESHGSESNQYYNPVKEDVQDCGKVPDVCQPSLREKEIKSTCKEEQRPRTANKAPGSKGVKQKSPPAAVAVAVSAAAPPPAVPCAPAENAPAPARRSAGKKPTRRTERTSAGDGANCHRPEEPAAADALGTSVVVPPEPTKTRPCGNNRASHRKELRSSVTCEKRRTRGLSRIVPKSKEFIETESSSSSSSSDSDLESEQEEYPLSKAQTVAASASSGNDQRLKEAAANGGSGPRAPVGSINARTTSDIAKELEEQFYTLVPFGRNELLSPLKDSDEIRSLWVKIDLTLLSRIPEHLPQEPGVLSAPATKDSESAPPSHTSDTPAEKALPKSKRKRKCDNEDDYREIKKSQGEKDSSSRLATSTSNTLSANHCNMNINSVAIPINKNEKMLRSPISPLSDASKHKYTSEDLTSSSRPNGNSLFTSASSSKKPKADSQLQPHGGDLTKAAHNNSENIPLHKSRPQTKPWSPGSNGHRDCKRQKLVFDDMPRSADYFMQEAKRMKHKADAMVEKFGKALNYAEAALSFIECGNAMEQGPMESKSPYTMYSETVELIRYAMRLKTHSGPNATPEDKQLAALCYRCLALLYWRMFRLKRDHAVKYSKALIDYFKNSSKAAQAPSPWGASGKSTGTPSPMSPNPSPASSVGSQGSLSNASALSPSTIVSIPQRIHQMAANHVSITNSILHSYDYWEMADNLAKENREFFNDLDLLMGPVTLHSSMEHLVQYSQQGLHWLRNSAHLS

SEQ ID NO: 702 - protein, 2119 aa, Homo sapiens
MLCCLLVRASNLPSAKKDRRSDPVASLTFRGVKKRTKVIKNSVNPVWNEGFEWDLKGIPLDQGSELHVVVKDHETMGRNRFLGEAKVPLREVLATPSLSASFNAPLLDTKKQPTGASLVLQVSYTPLPGAVPLFPPPTPLEPSPTLPDLDVVAGGGQSRAETWSLLSDSTMDTRYSGKKWPAPTDTGGEEDTEDQGLTGDEAEPFLDQSGGPGAPTTPRKLPSRPPPHYPGIKRKRSAPTSRKLLSDKPQDFQIRVQVIEGRQLPGVNIKPVVKVTAAGQTKRTRIHKGNSPLFNETLFFNLFDSPGELFDEPIFITVVDSRSLRTDALLGEFRMDVGTIYREPRHAYLRKWLLLSDPDDFSAGARGYLKTSLCVLGPGDEAPLERKDPSEDKEDIESNLLRPTGVALRGAHFCLKVFRAEDLPQMDDAVMDNVKQIFGFESNKKNLVDPFVEVSFAGKMLCSKILEKTANPQWNQNITLPAMFPSMCEKMRIRIIDWDRLTHNDIVATTYLSMSKISAPGGEIEVDDYLGFLPTFGPCYINLYGSPREFTGFPDPYTELNTGKGEGVAYRGRLLLSLETKLVEHSEQKVEDLPADDILRVEKYLRRRKYSLFAAFYSATMLQDVDDAIQFEVSIGNYGNKFDMTCLPLASTTQYSRAVFDGCHYYYLPWGNVKPVVVLSSYWEDISHRIETQNQLLGIADRLEAGLEQVHLALKAQCSTEDVDSLVAQLTDELIAGCSQPLGDIHETPSATHLDQYLYQLRTHHLSQITEAALALKLGHSELPAALEQAEDWLLRLRALAEEPQNSLPDIVIWMLQGDKRVAYQRVPAHQVLFSRRGANYCGKNCGKLQTIFLKYPMEKVPGARMPVQIRVKLWFGLSVDEKEFNQFAEGKLSVFAETYENETKLALVGNWGTTGLTYPKFSDVTGKIKLPKDSFRPSAGWTWAGDWFVCPEKTLLHDMDAGHLSFVEEVFENQTRLPGGQWIYMSDNYTDVNGEKVLPKDDIECPLGWKWEDEEWSTDLNRAVDEQGWEYSITIPPERKPKHWVPAEKMYYTHRRRRWVRLRRRDLSQMEALKRHRQAEAEGEGWEYASLFGWKFHLEYRKTDAFRRRRWRRRMEPLEKTGPAAVFALEGALGGVMDDKSEDSMSVSTLSFGVNRPTISCIFDYGNRYHLRCYMYQARDLAAMDKDSFSDPYAIVSFLHQSQKTVVVKNTLNPTWDQTLIFYEIEIFGEPATVAEQPPSIVVELYDHDTYGADEFMGRCICQPSLERMPRLAWFPLTRGSQPSGELLASFELIQREKPAIHHIPGFEVQETSRILDESEDTDLPYPPPQREANIYMVPQNIKPALQRTAIEILAWGLRNMKSYQLANISSPSLVVECGGQTVQSCVIRNLRKNPNFDICTLFMEVMLPREELYCPPITVKVIDNRQFGRRPVVGQCTIRSLESFLCDPYSAESPSPQGGPDDVSLLSPGEDVLIDIDDKEPLIPIQLADGLSSLAPTNTASPPSSPHEEEFIDWWSKFFASIGEREKCGSYLEKDFDTLKVYDTQLENVEAFEGLSDFCNTFKLYRGKTQEETEDPSVIGEFKGLFKIYPLPEDPAIPMPPRQFHQLAAQGPQECLVRIYIVRAFGLQPKDPNGKCDPYIKISIGKKSVSDQDNYIPCTLEPVFGKMFELTCTLPLEKDLKITLYDYDLLSKDEKIGETVVDLENRLLSKFGARCGLPQTYCVSGPNQWRDQLRPSQLLHLFCQQHRVKAPVYRTDRVMFQDKEYSIEEIEAGRIPNPHLGPVEERLALHVLQQQGLVPEHVESRPLYSPLQPDIEQGKLQMWVDLFPKALGRPGPPFNITPRRARRFFLRCIIWNTRDVILDDLSLTGEKMSDIYVKGWMIGFEEHKQKTDVHYRSLGGEGNFNWRFIFPFDYLPAEQVCTIAKKDAFWRLDKTESKIPARVVFQIWDNDKFSFDDFLGSLQLDLNRMPKPAKTAKKCSLDQLDDAFHPEWFVSLFEQKTVKGWWPCVAEEGEKKILAGKLEMTLEIVAESEHEERPAGQGRDEPNMNPKLEDPRRPDTSFLWFTSPYKTMKFILWRRFRWAIILFIILFILLLFLAIFIYAFPNYAAMKLVKPFS

SEQ ID NO: 703 - protein, 356 aa, Homo sapiens
MSIPLPLLQIYTSDNYTEEMGSGDYDSMKEPCFREENANFNKIFLPTIYSIIFLTGIVGNGLVILVMGYQKKLRSMTDKYRLHLSVADLLFVITLPFWAVDAVANWYFGNFLCKAVHVIYTVNLYSSVLILAFISLDRYLAIVHATNSQRPRKLLAEKVVYVGVWIPALLLTIPDFIFANVSEADDRYICDRFYPNDLWVVVFQFQHIMVGLILPGIVILSCYCIIISKLSHSKGHQKRKALKTTVILILAFFACWLPYYIGISIDSFILLEIIKQGCEFENTVHKWISITEALAFFHCCLNPILYAFLGAKFKTSAQHALTSVSRGSSLKILSKGKRGGHSSVSTESESSSFHSS

SEQ ID NO: 704 - protein, 1091 aa, Homo sapiens
MAAAGQLCLLYLSAGLLSRLGAAFNLDTREDNVIRKYGDPGSLFGFSLAMHWQLQPEDKRLLLVGAPRAEALPLQRANRTGGLYSCDITARGPCTRIEFDNDADPTSESKEDQWMGVTVQSQGPGGKVVTCAHRYEKRQHVNTKQESRDIFGRCYVLSQNLRIEDDMDGGDWSFCDGRLRGHEKFGSCQQGVAATFTKDFHYIVFGAPGTYNWKGIVRVEQKNNTFFDMNIFEDGPYEVGGETEHDESLVPVPANSYLGFSLDSGKGIVSKDEITFVSGAPRANHSGAVVLLKRDMKSAHLLPEHIFDGEGLASSFGYDVAVVDLNKDGWQDIVIGAPQYFDRDGEVGGAVYVYMNQQGRWNNVKPIRLNGTKDSMFGIAVKNIGDINQDGYPDIAVGAPYDDLGKVFIYHGSANGINTKPTQVLKGISPYFGYSIAGNMDLDRNSYPDVAVGSLSDSVTIFRSRPVINIQKTITVTPNRIDLRQKTACGAPSGICLQVKSCFEYTANPAGYNPSISIVGTLEAEKERRKSGLSSRVQFRNQGSEPKYTQELTLKRQKQKVCMEETLWLQDNIRDKLRPIPITASVEIQEPSSRRRVNSLPEVLPILNSDEPKTAHIDVHFLKEGCGDDNVCNSNLKLEYKFCTREGNQDKFSYLPIQKGVPELVLKDQKDIALEITVTNSPSNPRNPTKDGDDAHEAKLIATFPDTLTYSAYRELRAFPEKQLSCVANQNGSQADCELGNPFKRNSNVTFYLVLSTTEVTFDTPDLDINLKLETTSNQDNLAPITAKAKVVIELLLSVSGVAKPSQVYFGGTVVGEQAMKSEDEVGSLIEYEFRVINLGKPLTNLGTATLNIQWPKEISNGKWLLYLVKVESKGLEKVTCEPQKEINSLNLTESHNSRKKREITEKQIDDNRKFSLFAERKYQTLNCSVNVNCVNIRCPLRGLDSKASLILRSRLWNSTFLEEYSKLNYLDILMRAFIDVTAAAENIRLPNAGTQVRVTVFPSKTVAQYSGVPWWIILVAILAGILMLALLVFILWKCGFFKRSRYDDSVPRYHAVRIRKEEREIKDEKYIDNLEKKQWITKWNENESYS

SEQ ID NO: 705 - protein, 109 aa, Homo sapiens
MWSTRSPNSTAWPLSLEPDPGMSGWPDGRMETSTPTIMDIVVIAGVIAAVAIVLVSLLFVMLRYMYRHKGTYHTNEAKGTEFAESADAALQGDPALQDAGDSSRKEYFI

SEQ ID NO: 706 - protein, 977 aa, Homo sapiens
MGPPLPLLLLLLLLLPPRVLPAAPSSVPRGRQLPGRLGCLLEEGLCGASEACVNGFTWQDDYTQYVMDQELADLPKTYLRRPEASSPARPSKHSVGSERRYSREGGAALANALRRHLPFLEALSQAPASDVLARTHTAQDRPPAEGDDRFSESILTYVAHTSALTYPPGSRTQLREDLLPRTLGQLQPDELSPKVDSGVDRHHLMAALSAYAAQRPPAPPGEGSLEPQYLLRAPSRMPRPLLAPAAPQKWPSPLGDSEDPSSTGDGARIHTLLKDLQRQPAEVRGLSGLELDGMAELMAGLMQGVDHGVARGSPGRAALGESGEQADGPKATLRGDSFPDDGVQDDDDRLYQEVHRLSATLGGLLQDHGSRLLPGALPFARPLDMERKKSEHPESSLSSEEETAGVENVKSQTYSKDLLGQQPHSEPGAAAFGELQNQMPGPSKEEQSLPAGAQEALSDGLQLEVQPSEEEARGYIVTDRDPLRPEEGRRLVEDVARLLQVPSSAFADVEVLGPAVTFKVSANVQNVTTEDVEKATVDNKDKLEETSGLKILQTGVGSKSKLKFLPPQAEQEDSTKFIALTLVSLACILGVLLASGLIYCLRHSSQHRLKEKLSGLGGDPGADATAAYQELCRQRMATRPPDRPEGPHTSRISSVSSQFSDGPIPSPSARSSASSWSEEPVQSNMDISTGHMILSYMEDHLKNKNRLEKEWEALCAYQAEPNSSFVAQREENVPKNRSLAVLTYDHSRVLLKAENSHSHSDYINASPIMDHDPRNPAYIATQGPLPATVADFWQMVWESGCVVIVMLTPLAENGVRQCYHYWPDEGSNLYHIYEVNLVSEHIWCEDFLVRSFYLKNLQTNETRTVTQFHFLSWYDRGVPSSSRSLLDFRRKVNKCYRGRSCPIIVHCSDGAGRSGTYVLIDMVLNKMAKGAKEIDIAATLEHLRDQRPGMVQTKEQFEFALTAVAEEVNAILKALPQ

SEQ ID NO: 707 - protein, 2097 aa, Homo sapiens
MLRVFILYAENVHTPDTDISDAYCSAVFAGVKKRTKVIKNSVNPVWNEGFEWDLKGIPLDQGSELHVVVKDHETMGRNRFLGEAKVPLREVLATPSLSASFNAPLLDTKKQPTGASLVLQVSYTPLPGAVPLFPPPTPLEPSPTLPDLDVVAGGGQSRAETWSLLSDSTMDTRYSGKKWPAPTDTGGEEDTEDQGLTGDEAEPFLDQSGGPGAPTTPRKLPSRPPPHYPGIKRKRSAPTSRKLLSDKPQDFQIRVQVIEGRQLPGVNIKPVVKVTAAGQTKRTRIHKGNSPLFNETLFFNLFDSPGELFDEPIFITVVDSRSLRTDALLGEFRMDVGTIYREPRHAYLRKWLLLSDPDDFSAGARGYLKTSLCVLGPGDEAPLERKDPSEDKEDIESNLLRPTGVALRGAHFCLKVFRAEDLPQMDDAVMDNVKQIFGFESNKKNLVDPFVEVSFAGKMLCSKILEKTANPQWNQNITLPAMFPSMCEKMRIRIIDWDRLTHNDIVATTYLSMSKISAPGGEIEVDDYLGFLPTFGPCYINLYGSPREFTGFPDPYTELNTGKGEGVAYRGRLLLSLETKLVEHSEQKVEDLPADDILRVEKYLRRRKYSLFAAFYSATMLQDVDDAIQFEVSIGNYGNKFDMTCLPLASTTQYSRAVFDGCHYYYLPWGNVKPVVVLSSYWEDISHRIETQNQLLGIADRLEAGLEQVHLALKAQCSTEDVDSLVAQLTDELIAGCSQPLGDIHETPSATHLDQYLYQLRTHHLSQITEAALALKLGHSELPAALEQAEDWLLRLRALAEEPQNSLPDIVIWMLQGDKRVAYQRVPAHQVLFSRRGANYCGKNCGKLQTIFLKYPMEKVPGARMPVQIRVKLWFGLSVDEKEFNQFAEGKLSVFAETYENETKLALVGNWGTTGLTYPKFSDVTGKIKLPKDSFRPSAGWTWAGDWFVCPEKTLLHDMDAGHLSFVEEVFENQTRLPGGQWIYMSDNYTDVNGEKVLPKDDIECPLGWKWEDEEWSTDLNRAVDEQGWEYSITIPPERKPKHWVPAEKMYYTHRRRRWVRLRRRDLSQMEALKRHRQAEAEGEGWEYASLFGWKFHLEYRKTDAFRRRRWRRRMEPLEKTGPAAVFALEGALGGVMDDKSEDSMSVSTLSFGVNRPTISCIFDYGNRYHLRCYMYQARDLAAMDKDSFSDPYAIVSFLHQSQKTVVVKNTLNPTWDQTLIFYEIEIFGEPATVAEQPPSIVVELYDHDTYGADEFMGRCICQPSLERMPRLAWFPLTRGSQPSGELLASFELIQREKPAIHHIPGFEVQETSRILDESEDTDLPYPPPQREANIYMVPQNIKPALQRTAIEILAWGLRNMKSYQLANISSPSLVVECGGQTVQSCVIRNLRKNPNFDICTLFMEVMLPREELYCPPITVKVIDNRQFGRRPVVGQCTIRSLESFLCDPYSAESPSPQGGPDDVSLLSPGEDVLIDIDDKEPLIPIQEEEFIDWWSKFFASIGEREKCGSYLEKDFDTLKVYDTQLENVEAFEGLSDFCNTFKLYRGKTQEETEDPSVIGEFKGLFKIYPLPEDPAIPMPPRQFHQLAAQGPQECLVRIYIVRAFGLQPKDPNGKCDPYIKISIGKKSVSDQDNYIPCTLEPVFGKMFELTCTLPLEKDLKITLYDYDLLSKDEKIGETVVDLENRLLSKFGARCGLPQTYCVSGPNQWRDQLRPSQLLHLFCQQHRVKAPVYRTDRVMFQDKEYSIEEIEAGRIPNPHLGPVEERLALHVLQQQGLVPEHVESRPLYSPLQPDIEQGKLQMWVDLFPKALGRPGPPFNITPRRARRFFLRCIIWNTRDVILDDLSLTGEKMSDIYVKGWMIGFEEHKQKTDVHYRSLGGEGNFNWRFIFPFDYLPAEQVCTIAKKDAFWRLDKTESKIPARVVFQIWDNDKFSFDDFLGSLQLDLNRMPKPAKTAKKCSLDQLDDAFHPEWFVSLFEQKTVKGWWPCVAEEGEKKILAGKLEMTLEIVAESEHEERPAGQGRDEPNMNPKLEDPRRPDTSFLWFTSPYKTMKFILWRRFRWAIILFIILFILLLFLAIFIYAFPNYAAMKLVKPFS

SEQ ID NO: 708 - protein, 180 aa, Homo sapiens
MMPSKSLVMEYLAHPSTLGLAVGVACGMCLGWSLRVCFGMLPKSKTSKTHTDTESEASILGDSGEYKMILVVRNDLKMGKGKVAAQCSHAAVSAYKQIQRRNPEMLKQWEYCGQPKVVVKAPDEETLIALLAHAKMLGLTVSLIQDAGRTQIAPGSQTVLGIGPGPADLIDKVTGHLKLY

SEQ ID NO: 709 - protein, 457 aa, Homo sapiens
MILEVKPQTNASCEYSASHKQDLLLGSTGSISCPSLSCQSDAQSPAVTWYKNGKLLSVERSNRIVVDEVYDYHQGTYVCDYTQSDTVSSWTVRAVVQVRTIVGDTKLKPDILDPVEDTLEVELGKPLTISCKARFGFERVFNPVIKWYIKDSDLEWEVSVPEAKSIKSTLKDEIIERNIILEKVTQRDLRRKFVCFVQNSIGNTTQSVQLKEKRGVVLLYILLGTIGTLVAVLAASALLYRHWIEIVLLYRTYQSKDQTLGDKKDFDAFVSYAKWSSFPSEATSSLSEEHLALSLFPDVLENKYGYSLCLLERDVAPGGVYAEDIVSIIKRSRRGIFILSPNYVNGPSIFELQAAVNLALDDQTLKLILIKFCYFQEPESLPHLVKKALRVLPTVTWRGLKSVPPNSRFWAKMRYHMPVKNSQGFTWNQLRITSRIFQWKGLSRTETTGRSSQPKEW

SEQ ID NO: 710 - protein, 400 aa, Homo sapiens
MGKNPVRPPRALPPVPSQDDIPLSRPKKKKPRTKNTPASASLEGLAQTAGRRPSEGNEPSTKELKEHPEAPVQRRQKKTRLPLELETSSTQKKSSSSSLLRNENGIDAEPAEEAVIQKPRRKTKKTQPAELQYANELGVEDEDIITDEQTTVEQQSVFTAPTGISQPVGKVFVEKSRRFQAADRSELIKTTENIDVSMDVKPSWTTRDVALTVHRAFRMIGLFSHGFLAGCAVWNIVVIYVLAGDQLSNLSNLLQQYKTLAYPFQSLLYLLLALSTISAFDRIDFAKISVAIRNFLALDPTALASFLYFTALILSLSQQMTSDRIHLYTPSSVNGSLWEAGIEEQILQPWIVVNLVVALLVGLSWLFLSYRPGMDLSEELMFSSEVEEYPDKEKEIKASS

SEQ ID NO: 711 - protein, 205 aa, Homo sapiens
MGMVVLLMGLVFASVYIYRYFFLAQLARDNFFRCGVLYEDSLSSQVRTQMELEEDVKIYLDENYERINVPVPQFGGGDPADIIHDFQRGLTAYHDISLDKCYVIELNTTIVLPPRNFWELLMNVKRGTYLPQTYIIQEEMVVTEHVSDKEALGSFIYHLCNGKDTYRLRRRATRRRINKRGAKNCNAIRHFENTFVVETLICGVV

SEQ ID NO: 712 - protein, 88 aa, Homo sapiens
ARAYALLLQHLPVLVWLPRYPVRDWLLGDLLSGLSVAIMQLPQGLAYALLAGLPPVFGLYSSFYPVFIYFLFGTSRHISVGLERLHDQ

SEQ ID NO: 713 - protein, 374 aa, Homo sapiens
MILRPYQPCGTVKEFDTNFTYVQQSEFYLEPNIKYVFQVRCQETGKRYWQPWSSLFFHKTPETVPQVTSKAFQHDTWNSGLTVASISTGHLTSDNRGDIGLLLGMIVFAVMLSILSLIGIFNRSFRTGIKRRILLLIPKWLYEDIPNMKNSNVVKMLQENSELMNNNSSEQVLYVDPMITEIKEIFIPEHKPTDYKKENTGPLETRDYPQNSLFDNTTVVYIPDLNTGYKPQISNFLPEGSHLSNNNEITSLTLKPPVDSLDSGNNPRLQKHPNFAFSVSSVNSLSNTIFLGELSLILNQGECSSPDIQNSVEEETTMLLENDSPSETIPEQTLLPDEFVSCLGIVNEELPSINTYFPQNILESHFNRISLLEK

SEQ ID NO: 714 - protein, 828 aa, Homo sapiens
MRLEGEGRSARAGQNLSRAGSARRGAPRDLSMNNLTELQPGLFHHLRFLEELRLSGNHLSHIPGQAFSGLYSLKILMLQNNQLGGIPAEALWELPSLQSLDLNYNKLQEFPVAIRTLGRLQELGFHNNNIKAIPEKAFMGNPLLQTIHFYDNPIQFVGRSAFQYLPKLHTLSLNGAMDIQEFPDLKGTTSLEILTLTRAGIRLLPSGMCQQLPRLRVLELSHNQIEELPSLHRCQKLEEIGLQHNRIWEIGADTFSQLSSLQALDLSWNAIRSIHPEAFSTLHSLVKLDLTDNQLTTLPLAGLGGLMHLKLKGNLALSQAFSKDSFPKLRILEVPYAYQCCPYGMCASFFKASGQWEAEDLHLDDEESSKRPLGLLARQAENHYDQDLDELQLEMEDSKPHPSVQCSPTPGPFKPCEYLFESWGIRLAVWAIVLLSVLCNGLVLLTVFAGGPVPLPPVKFVVGAIAGANTLTGISCGLLASVDALTFGQFSEYGARWETGLGCRATGFLAVLGSEASVLLLTLAAVQCSVSVSCVRAYGKSPSLGSVRAGVLGCLALAGLAAALPLASVGEYGASPLCLPYAPPEGQPAALGFTVALVMMNSFCFLVVAGAYIKLYCDLPRGDFEAVWDCAMVRHVAWLIFADGLLYCPVAFLSFASMLGLFPVTPEAVKSVLLVVLPLPACLNPLLYLLFNPHFRDDLRRLRPRAGDSGPLAYAAAGELEKSSCDSTQALVAFSDVDLILEASEAGRPPGLETYGFPSVTLISCQQPGAPRLEGSHCVEPEGNHFGNPQPSMDGELLLRAEGSTPAGGGLSGGGGFQPSGLAFASHV

SEQ ID NO: 715 - protein, 1428 aa, Homo sapiens
MQGPPLLTAAHLLCVCTAALAVAPGPRFLVTAPGIIRPGGNVTIGVELLEHCPSQVTVKAELLKTASNLTVSVLEAEGVFEKGSFKTLTLPSLPLNSADEIYELRVTGRTQDEILFSNSTRLSFETKRISVFIQTDKALYKPKQEVKFRIVTLFSDFKPYKTSLNILIKDPKSNLIQQWLSQQSDLGVISKTFQLSSHPILGDWSIQVQVNDQTYYQSFQVSEYVLPKFEVTLQTPLYCSMNSKHLNGTITAKYTYGKPVKGDVTLTFLPLSFWGKKKNITKTFKINGSANFSFNDEEMKNVMDSSNGLSEYLDLSSPGPVEILTTVTESVTGISRNVSTNVFFKQHDYIIEFFDYTTVLKPSLNFTATVKVTRADGNQLTLEERRNNVVITVTQRNYTEYWSGSNSGNQKMEAVQKINYTVPQSGTFKIEFPILEDSSELQLKAYFLGSKSSMAVHSLFKSPSKTYIQLKTRDENIKVGSPFELVVSGNKRLKELSYMVVSRGQLVAVGKQNSTMFSLTPENSWTPKACVIVYYIEDDGEIISDVLKIPVQLVFKNKIKLYWSKVKAEPSEKVSLRISVTQPDSIVGIVAVDKSVNLMNASNDITMENVVHELELYNTGYYLGMFMNSFAVFQECGLWVLTDANLTKDYIDGVYDNAEYAERFMEENEGHIVDIHDFSLGSSPHVRKHFPETWIWLDTNMGYRIYQEFEVTVPDSITSWVATGFVISEDLGLGLTTTPVELQAFQPFFIFLNLPYSVIRGEEFALEITIFNYLKDATEVKVIIEKSDKFDILMTSNEINATGHQQTLLVPSEDGATVLFPIRPTHLGEIPITVTALSPTASDAVTQMILVKAEGIEKSYSQSILLDLTDNRLQSTLKTLSFSFPPNTVTGSERVQITAIGDVLGPSINGLASLIRMPYGCGEQNMINFAPNIYILDYLTKKKQLTDNLKEKALSFMRQGYQRELLYQREDGSFSAFGNYDPSGSTWLSAFVLRCFLEADPYIDIDQNVLHRTYTWLKGHQKSNGEFWDPGRVIHSELQGGNKSPVTLTAYIVTSLLGYRKYQPNIDVQESIHFLESEFSRGISDNYTLALITYALSSVGSPKAKEALNMLTWRAEQEGGMQFWVSSESKLSDSWQPRSLDIEVAAYALLSHFLQFQTSEGIPIMRWLSRQRNSLGGFASTQDTTVALKALSEFAALMNTERTNIQVTVTGPSSPSPLAVVQPTAVNISANGFGFAICQLNVVYNVKASGSSRRRRSIQNQEAFDLDVAVKENKDDLNHVDLNVCTSFSGPGRSGMALMEVNLLSGFMVPSEAISLSETVKKVEYDHGKLNLYLDSVNETQFCVNIPAVRNFKVSNTQDASVSIVDYYEPRRQAVRSYNSEVKLSSCDLCSDVQGCRPCEDGASGSHHHSSVIFIFCFKLLYFMELWL

SEQ ID NO: 716 - protein, 152 aa, Homo sapiens
MFPRPGALSWTVRRHTPRQVEPPCVCMTLTSRRQDSQEARPECQAWTGTLLLGTCLLYCARSSMPICTVSMSQDFGWNKKEAGIVLSSFFWGYCLTQVVGGHLGDRIGGEKVILLSASAWGSITAVTPLLAHLSSAHLAFMTFSRILMGLLQ

SEQ ID NO: 717 - protein, 258 aa, Homo sapiens
TSNQDNLAPITAKAKVVIELLLSVSGVAKPSQVYFGGTVVGEQAMKSEDEVGSLIEYEFRESHNSRKKREITEKQIDDNRKFSLFAERKYQTLNCSVNVNCVNIRCPLRGLDSKASLILRSRLWNSTFLEEYSKLNYLDILMRAFIDVTAAAENIRLPNAGTQVRVTVFPSKTVAQYSGVPWWIILVAILAGILMLALLVFILWKCGFFKRSRYDDSVPRYHAVRIRKEEREIKDEKYIDNLEKKQWITKWNENESYS

SEQ ID NO: 718 - protein, 1061 aa, Homo sapiens
MRRDERDAKAMRSLQPPDGAGSPPESLRNGYVKSCVSPLRQDPPRGFFFHLCRFCNVELRPPPASPQQPRRCSPFCRARLSLGALAAFVLALLLGAEPESWAAGAAWLRTLLSVCSHSLSPLFSIACAFFFLTCFLTRTKRGPGPGRSCGSWWLLALPACCYLGDFLVWQWWSWPWGDGDAGSAAPHTPPEAAAGRLLLVLSCVGLLLTLAHPLRLRHCVLVLLLASFVWWVSFTSLGSLPSALRPLLSGLVGGAGCLLALGLDHFFQIREAPLHPRLSSAAEEKVPVIRPRRRSSCVSLGETAASYYGSCKIFRRPSLPCISREQMILWDWDLKQWYKPHYQNSGGGNGVDLSVLNEARNMVSDLLTDPSLPPQGLNRNSLPTPQLRRSSGTSGLLPVEQSSRWDRNNGKRPHQEFGISSQGCYLNGPFNSNLLTIPKQRSSSVSLTHHVGLRRAGVLSSLSPVNSSNHGPVSTGSLTNRSPIEFPDTADFLNKPSVILQRSLGNAPNTPDFYQQLRNSDSNLCNSCGHQMLKYVSTSESDGTDCCSGKSGEEENIFSKESFKLMETQQEEETEKKDSRKLFQEGDKWLTEEAQSEQQTNIEQEVSLDLILVEEYDSLIEKMSNWNFPIFELVEKMGEKSGRILSQVMYTLFQDTGLLEIFKIPTQQFMNYFRALENGYRDIPYHNRIHATDVLHAVWYLTTRPVPGLQQIHNGCGTGNETDSDGRINHGRIAYISSKSCSNPDESYGCLSSNIPALELMALYVAAAMHDYDHPGRTNAFLVATNAPQAVLYNDRSVLENHHAASAWNLYLSRPEYNFLLHLDHVEFKRFRFLVIEAILATDLKKHFDFLAEFNAKANDVNSNGIEWSNENDRLLVCQVCIKLADINGPAKVRDLHLKWTEGIVNEFYEQGDEEANLGLPISPFMDRSSPQLAKLQESFITHIVGPLCNSYDAAGLLPGQWLEAEEDNDTESGDDEDGEELDTEDEEMENNLNPKPPRRKSRRRIFCQLMHHLTENHKIWKEIVEEEEKCKADGNKLQVENSSLPQADEIQVIEEADEEE

SEQ ID NO: 719 - protein, 801 aa, Homo sapiens
MNLQPIFWIGLISSVCCVFAQTDENRCLKANAKSCGECIQAGPNCGWCTNSTFLQEGMPTSARCDDLEALKKKGCPPDDIENPRGSKDIKKNKNVTNRSKGTAEKLKPEDITQIQPQQLVLRLRSGEPQTFTLKFKRAEDYPIDLYYLMDLSYSMKDDLENVKSLGTDLMNEMRRITSDFRIGFGSFVEKTVMPYISTTPAKLRNPCTSEQNCTSPFSYKNVLSLTNKGEVFNELVGKQRISGNLDSPEGGFDAIMQVAVCGSLIGWRNVTRLLVFSTDAGFHFAGDGKLGGIVLPNDGQCHLENNMYTMSHYYDYPSIAHLVQKLSENNIQTIFAVTEEFQPVYKELKNLIPKSAVGTLSANSSNVIQLIIDAYNSLSSEVILENGKLSEGVTISYKSYCKNGVNGTGENGRKCSNISIGDEVQFEISITSNKCPKKDSDSFKIRPLGFTEEVEVILQYICECECQSEGIPESPKCHEGNGTFECGACRCNEGRVGRHCECSTDEVNSEDMDAYCRKENSSEICSNNGECVCGQCVCRKRDNTNEIYSGKFCECDNFNCDRSNGLICGGNGVCKCRVCECNPNYTGSACDCSLDTSTCEASNGQICNGRGICECGVCKCTDPKFQGQTCEMCQTCLGVCAEHKECVQCRAFNKGEKKDTCTQECSYFNITKVESRDKLPQPVQPDPVSHCKEKDVDDCWFYFTYSVNGNNEVMVHVVENPECPTGPDIIPIVAGVVAGIVLIGLALLLIWKLLMIIHDRREFAKFEKEKMNAKWDTQENPIYKSPINNFKNPNYGRKAGL

SEQ ID NO: 720 - protein, 193 aa, Homo sapiens
GGLHTQCPGWPLPGGAGPDPLRLRGHLPVRTSCPRLYHSCSCAGLRLTAQVCVWPPSEQPLWATVPHLLLEVCWKLPQSKVGTVVTAAVAGVVLVVVKLLNDKLQQQLPMPIPGELLTLIGATGISYGMGLKHRFEAGAPSGPQHPAVLKARGQRLHHRCGWVCHCHLTGEDLRPEARLPGGQQPGAGGPGPQ

SEQ ID NO: 721 - protein, 267 aa, Homo sapiens
MTCSLGKVYISEIAYPAVRGLLGSCVQLMVVVGILLAYLAGWVLEWRWLAVLGCVPPSLMLLLMCFMPETPRFLLTQHRRQEAMAALRFLWGSEQGWEDPPIGAEQSFHLALLRQPGIYKPFIIGVSLMAFQQLSGVNAVMFYAETIFEEAKFKDSSLASVVVGVIQVLFTAVAALIMDRAGRRLLLVLSGVVMVFSTSAFGAYFKLTQGGPGNSSHVAISAPVSAQPVDASVGLAWLAVGSMCLFIAGFAVGWGPIPWLLMSEIFP

SEQ ID NO: 722 - protein, 346 aa, Homo sapiens
MYNGSCCRIEGDTISQVMPPLLIVAFVLGALGNGVALCGFCFHMKTWKPSTVYLFNLAVADFLLMICLPFRTDYYLRRRHWAFGDIPCRVGLFTLAMNRAGSIVFLTVVAADRYFKVVHPHHAVNTISTRVAAGIVCTLWALVILGTVYLLLENHLCVQETAVSCESFIMESANGWHDIMFQLEFFMPLGIILFCSFKIVWSLRRRQQLARQARMKKATRFIMVVAIVFITCYLPSVSARLYFLWTVPSSACDPSVHGALHITLSFTYMNSMLDPLVYYFSSPSFPKFYNKLKICSLKPKQPGHSKTQRPEEMPISNLGRRSCISVANSFQSQSDGQWDPHIVEWH

SEQ ID NO: 723 - protein, 80 aa, Homo sapiens
MTTSLDTVETFGTTSYYDDVGLLCEKADTRALMAQFVPPLYSLVFTVGLLGNVVVVMILIKYRRLRIMTNIYLLNLAISD

SEQ ID NO: 724 - protein, 74 aa, Homo sapiens
MGRVSGLVPSRFLTLLAHLVVVITLFWSRDSNIQACLPLTFTPEEYDKQDIHALPAVTEMALFVTVFGLKKKPF

SEQ ID NO: 725 - protein, 191 aa, Homo sapiens
MELQDPKMNGALPSDAVGYRQEREGFLPSRGPAPGSKPVQFMDFEGKTSFGMSVFNLSNAIMGSGILGLAYAMAHTGVIFFLALLLCIALLSSYSIHLLLTCAGIAGIRAYEQLGQRAFGPAGKVVVATVICLHNVGAMSSYLFIIKSELPLVIGTFLYMDPEGDWFLKGNLLIIIVSVLIILPLALMKHL

SEQ ID NO: 726 - protein, 195 aa, Homo sapiens
MAQLCGLRRSRAFLALLGSLLLSGVLAADRERSIHENATGDLATSRNAADSSVPSAPRRQDSEDHSSDMFNYEEYCTANAVTGPCRASFPRWYFDVERNSCNNFIYGGCRGNKNSYRSEEACMLRCFRQQENPPLPLGSKVVVLAGLFVMVLILFLGASMVYLIRVARRNQERALRTVWSSGDDKEQLVKNTYVL

SEQ ID NO: 727 - protein, 303 aa, Homo sapiens
GSVTESLAPQALNDSMINETARDAARVQVASTLSVLVGLFQVGLGLIHFGFVVTYLSEPLVRGYTTAAAVQVFVSQLKYVFGLHLSSHSGPLSLIYTVLEVCWKLPQSKLIGATGISYGMGLKHRFEVDVVGNIPAGLVPPVAPNTQLFSKLVGSAFTIAVVGFAIAISLGKIFALRHGYRVDSNQELVALGLSNLIGGIFQCFPVSCSMSRSLVQESTGGNSQVAGAISSLFILLIIVKLGELFHDLPKAVLAAIIIVNLKGMLRQLSDMRSLWKANRADLLIWLVTFTATILLNLDLGLVV

SEQ ID NO: 728 - protein, 535 aa, Homo sapiens
MDNYSTGYDVKPPCLYQMPLSGQQSSIKVEDIQMHNYQQHSHLPPQSEEMMPHSGSVYYKPSSPPTPTTPGFQVQHSPMWDDPGSLHNFHQNYVATTHMIEQRKTPVSRLSLFSFKQSPPGTPVSSCQMRFDGPLHVPMNPEPAGSHHVVDGQTFAVPNPIRKPASMGFPGLQIGHASQLLDTQVPSPPSRGSPSNEGLCAVCGDNAACQHYGVRTCEGCKGFFKRTVQKNAKYVCLANKNCPVDKRRRNRCQYCRFQKCLAVGMVKEVVRTDSLKGRRGRLPSKPKSPQEPSPPSPPVSLISALVRAHVDSNPAMTSLDYSRFQANPDYQMSGDDTQHIQQFYDLLTGSMEIIRGWAEKIPGFADLPKADQDLLFESAFLELFVLRLAYRSNPVEGKLIFCNGVVLHRLQCVRGFGEWIDSIVEFSSNLQNMNIDISAFSCIAALAMVTERHGLKEPKRVEELQNKIVNCLKDHVTFNNGGLNRPNYLSKLLGKLPELRTLCTQGLQRIFYLKLEDLVPPPAIIDKLFLDTLPF

SEQ ID NO: 729 - protein, 200 aa, Homo sapiens
MTRAGDHNRQRGCCGSLADYLTSAKFLLYLGHSLSTWGDRMWHFAVSVFLVELYGNSLLLTAVYGLVVAGSVLVLGAIIGDWVDKNARLKVAQTSLVVQNVSVILCGIILMMVFLHKHELLTMYHGWVLTSCYILIITIANIANLASTATAITIQRDWIVVVAGEDRSKLANMNATIRRIDQLTNILAPMAVGQIMTFGS

SEQ ID NO: 730 - protein, 160 aa, Homo sapiens
MTTNAGPLHPYWPQHLRLDNFVPNDRPTWHILAGLFSVTGVLVVTTWLLSGRAAVVPLGTWRRLSLCWFAVCGFIHLVIEGWFVLYYEDLLGDQAFLSQLWKEYAKGDSRYILGDNFTVCMETITACLWGPLSLWVVIAFLRQHPLRFILQLVVSVGQIY

SEQ ID NO: 731 - protein, 1530 aa, Homo sapiens
MSSQGSPSVALSTTTVSSVAVQAGDSKIVIAVIKCGKWVQLQLAESQPNLLEIGSSQDETKKLLHDHELLLAKLKALEDRVWELLQEADKTAEENKDQSQVYDAMAETLGEAWAALVSMLERRTELLRLTSEFFENALEFAIKIDQAEDFLQNTHEFESAESLKSLLQLHEHHTKELLERSLALLNKSQQLTDFIEKFKCEGPNVNPELTQGAHSSCLKVDRLLELLQDRRRQLDKYLKQQWQELSQVLQICQWDQQENQVTCWFQKTIRNLQEQSLGSSLSDNEDRIHKQEELIIKAKEWNSAVEKLKSEALRILLSKDYVEKEHLQLSHQKLSQLQEEFGQLMVERNTWLKKANEFFNSANKAFDVLGRVEAYLKLLKSEGLSLAVLAVRHEELHRKIKDCTTDALQKGQTLISQVDSCSSQVSGIHEMMGCIKRRVDHLTEQCSAHKEYALKKQQLTASVEGYLRKVEMSIQKISPVLSNAMDVGSTRSESEKILNKYLELDIQAKETSHELEAAAKTMMEKNEFVSDEMVSLSSKARWLAEELNLFGQSIDYRSQVLQTYVAFLKSSEEVEMQFQSLKEFYETEIPQKEQDDAKAKHCSDSAEKQWQLFLKKSFITQDLGLEFLNLINMAKENEILDVKNEVYLMKNTMENQKAEREELSLLRLAWQLKATESKPGKQQWAAFKEQLKKTSHNLKLLQEALMPVSALDLGGSLQFILDLRQKWNDMKPQFQQLNDEVQYIMKESEELTGRGAPVKEKSQQLKDLIHFHQKQKERIQDYEDILYKVVQFHQVKEELGRLIKSRELEFVEQPKELGDAHDVQIHLRCSQEKQARVDHLHRLALSLGVDIISSVQRPHCSNVSAKNLQQQLELLEEDSMKWRAKAEEYGRTLSRSVEYCAMRDEINELKDSFKDIKKKFNNLKFNYTKKNEKSRNLKALKYQIQQVDMYAEKMQALKRKMEKVSNKTSDSFLNYPSDKVNVLLEVMKDLQKHVDDFDKVVTDYKKNLDLTEHFQEVIEECHFWYEDASATVVRVGKYSTECKTKEAVKILHQQFNKFIAPSVPQQEERIQEATDLAQHLYGLEEGQKYIEKIVTKHKEVLESVTELCESLTELEEKLKQGDVLKMNPNLEDFHYDYIDLLKEPAKNKQTIFNEERNKGQVQVADLLGINGTGEERLPQDLKVSTDKEGGVQDLLLPEDMLSGEEYECVSPDDISLPPLPGSPESPLAPSDMEVEEPVSSSLSLHISSYGVQAGTSSPGDAQESVLPPPVAFADACNDKRETFSSHFERPYLQFKAEPPLTSRGFVEKSTALHRISAEHPESMMSEVHERALQQHPQAQGGLLETREKMHADNNFTKTQDRLHASSDAFSGLRFQSGTSRGYQRQMVPREEIKSTSAKSSVVSLADQAPNFSRLLSNVTVMEGSPVTLEVEVTGFPEPTLTWYKKGQKLSADGHLQVLHKETRHSVFIPKVCKADAGLYVARAQNSSGALSSNVILHVTGNCRLPITRVNWITLCVVYVSVSLMYWLLTQ

SEQ ID NO: 732 - protein, 1143 aa, Homo sapiens
MAVPARTCGASRPGPARTARPWPGCGPHPGPGTRRPTSGPPRPLWLLLPLLPLLAAPGASAYSFPQQHTMQHWARRLEQEVDGVMRIFGGVQQLREIYKDNRNLFEVQENEPQKLVEKVAGDIESLLDRKVQALKRLADAAENFQKAHRWQDNIKEEDIVYYDAKADAELDDPESEDVERGSKASTLRLDFIEDPNFKNKVNYSYAAVQIPTDIYKGSTVILNELNWTEALENVFMENRRQDPTLLWQVFGSATGVTRYYPATPWRAPKKIDLYDVRRRPWYIQGASSPKDMVIIVDVSGSVSGLTLKLMKTSVCEMLDTLSDDDYVNVASFNEKAQPVSCFTHLVQANVRNKKVFKEAVQGMVAKGTTGYKAGFEYAFDQLQNSNITRANCNKMIMMFTDGGEDRVQDVFEKYNWPNRTVRVFTFSVGQHNYDVTPLQWMACANKGYYFEIPSIGAIRINTQEYLDVLGRPMVLAGKEAKQVQWTNVYEDALGLGLVVTGTLPVFNLTQDGPGEKKNQLILGVMGIDVALNDIKRLTPNYTLGANGYVFAIDLNGYVLLHPNLKPQTTNFREPVTLDFLDAELEDENKEEIRRSMIDGNKGHKQIRTLVKSLDERYIDEVTRNYTWVPIRSTNYSLGLVLPPYSTFYLQANLSDQILQVKYFEFLLPSSFESEGHVFIAPREYCKDLNASDNNTEFLKNFIELMEKVTPDSKQCNNFLLHNLILDTGITQQLVERVWRDQDLNTYSLLAVFAATDGGITRVFPNKAAEDWTENPEPFNASFYRRSLDNHGYVFKPPHQDALLRPLELENDTVGILVSTAVELSLGRRTLRPAVVGVKLDLEAWAEKFKVLASNRTHQDQPQKCGPNSHCEMDCEVNNEDLLCVLIDDGGFLVLSNQNHQWDQVGRFFSEVDANLMLALYNNSFYTRKESYDYQAACAPQPPGNLGAAPRGVFVPTVADFLNLAWWTSAAAWSLFQQLLYGLIYHSWFQADPAEAEGSPETRESSCVMKQTQYYFGSVNASYNAIIDCGNCSRLFHAQRLTNTNLLFVVAEKPLCSQCEAGRLLQKETHSDGPEQCELVQRPRYRRGPHICFDYNATEDTSDCGRGASFPPSLGVLVSLQLLLLLGLPPRPQPQVLVHASRRL

SEQ ID NO: 733 - protein, 374 aa, Homo sapiens
MEFVKCLGHPEEFYNLVRFRIGGKRKVMPKMDQDSLSSSLKTCYKYLNQTSRSFAAVIQALDGEMRNAVCIFYLVLRALDTLEDDMTISVEKKVPLLHNFHSFLYQPDWRFMESKEKDRQVLEDFPTYCHYVAGLVGIGLSRLFSASEFEDPLVGEDTERANSMGLFLQKTNIIRDYLEDQQGGREFWPQEVWSRYVKKLGDFAKPENIDLAVQCLNELITNALHHIPDVITYLSRLRNQSVFNFCAIPQVMAIATLAACYNNQQVFKGAVKIRKGQAVTLMMDATNMPAVKAIIYQYMEEIYHRIPDSDPSSSKTRQIISTIRTQNLPNCQLISRSHYSPIYLSFVMLLAALSWQYLTTLSQVTEDYVQTGEH

SEQ ID NO: 734 - protein, 445 aa, Homo sapiens
MNGRSLIGGAGDARHGPVWKDPFGTKAGDAARRGIARLSLALADGSQEQEPEEEIAMEDSPTMVRVDSPTMVRGENQVSPCQGRRCFPKALGYVTGDMKELANQLKDKPVVLQFIDWILRGISQVVFVNNPVSGILILVGLLVQNPWWALTGWLGTVVSTLMALLLSQDRSLIASGLYGYNATLVGVLMAVFSDKGDYFWWLLLPVCAMSMTCPIFSSALNSMLSKWDLPVFTLPFNMALSMYLSATGHYNPFFPAKLVIPITTAPNISWSDLSALELLKSIPVGVGQIYGCDNPWTGGIFLGAILLSSPLMCLHAAIGSLLGIAAGLSLSAPFEDIYFGLWGFNSSLACIAMGGMFMALTWQTHLLALGCALFTAYLGVGMANFMAEVGLPACTWPFCLATLLFLIMTTKNSNIYKMPLSKVTYPEENRIFYLQAKKRMVESPL

SEQ ID NO: 735 - protein, 483 aa, Homo sapiens
MFCSTSAVNSCARCFFHSVCPAGMIVKFPGTAQKNTVCEPASPGVSPACASPENCKEPSSGTIPQAKPTPVSPATSSASTMPVRGGTRLAQEAASKLTRAPDSPSSVGRPSSDPGLSPTQPCPEGSGDCRKQCEPDYYLDEAGRCTACVSCSRDDLVEKTPCAWNSSRTCECRPGMICATSATNSCARCVPYPICAAETVTKPQDMAEKDTTFEAPPLGTQPDCNPTPENGEAPASTSPTQSLLVDSQASKTLPIPTSAPVALSSTGKPVLDAGPVLFWVILVLVVVVGSSAFLLCHRRACRKRIRQKLHLCYPVQTSQPKLELVDSRPRRSSTLRSGASVTEPVAEERGLMSQPLMETCHSVGAAYLESLPLQDASPAGGPSSPRDLPEPRVSTEHTNNKIEKIYIMKADTVIVGTVKAELPEGRGLAGPAEPELEEELEADHTPHYPEQETEPPLGSCSDVMLSVEEEGKEDPLPTAASGK

SEQ ID NO: 736 - protein, 180 aa, Homo sapiens
MVKISFQPAVAGIKGDKADKASASAPAPASATEILLTPAREEQPPQHRSKRGGSVGGVCYLSMGMVVLLMGLVFASVYIYRYFFLAQLARDNFFRCGVLYEDSLSSQVRTQMELEEDVKIYLDENYERINVPVPQFGGGDPADIIHDFQRGLTAYHDISLDKCYVIELNTTIVLPPRNFW

SEQ ID NO: 737 - protein, 286 aa, Homo sapiens
MSPHPTALLGLVLCLAQTIHTQEDLPRPSISAEPGTVIPLGSHVTFVCRGPVGVQTFRLERDSRSTYNDTEDVSQASPSESEARFRIDSVREGNAGLYRCIYYKPPKWSEQSDYLELLVKESSGGPDSPDTEPGSSAGPTQRPSDNSHNEHAPASQGLKAEHLYILIGVSVVFLFCLLLLVLFCLHRQNQIKQGPPRSKDEEQKPQQRPDLAVDVLERTADKATVNGLPEKDRETDTSALAAGSSQEVTYAQLDHWALTQRTARAVSPQSTKPMAESITYAAVARH

SEQ ID NO: 738 - protein, 116 aa, Homo sapiens
GGKPFSCTSLSLSQWLWCLFIGIGELLWGQFISAIPTRSLKFLKEAGHGTTKEEITKDAEGLDEIDHAEMELRRGQILWFRGLNRIQTQHLLQDSDLLPDKEEAIISSSLFPSCNF

SEQ ID NO: 739 - protein, 276 aa, Homo sapiens
QLMVVVGILLAYLAGWVLEWRWLAVLGCVPPSLMLLLMCFMPETPRFLLTQHRRQEAMAALRFLWGSEQGWEDPPIGAEQSFHLALLRQPGIYKPFIIGVSLMAFQQLSGVNAVMFYAETIFEEAKFKDSSLASVVVGVIQVLFTAVAALIMDRAGRRLLLVLSGVVMVFSTSAFGAYFKLTQGGPGNSSHVAISAPVSAQPVDASVGLAWLAVGSMCLFIAGFAVGWGPIPWLLMSEIFPLHVKGVATGICVLTNWLMAFLVTKEFSSLMLLLLL

SEQ ID NO: 740 - protein, 236 aa, Homo sapiens
MKRQLVTNSFLHHLLIGQKRPRNAPRTLPSVTMKLWVSALLMAWFGVLSCVQAEFFTSIGHMTDLIYAEKELVQSLKEYILVEEAKLSKIKSWANKMEALTSKSAADAEGYLAHPVNAYKLVKRLNTDWPALEDLVLQDSAAGFIANLSVQRQFFPTDEDEIGAAKALMRLQDTYRLDPGTISRGELPGTKYQAMLSVDDCFGMGRSAYNEGDYYHTVLWMEQVLKQLDAGEEATT

SEQ ID NO: 741 - protein, 374 aa, Homo sapiens
MVTCFHVPYSALTMFISTEQTERDSATAYRMTVEVLGTVLGTAIQGQIVGQADTPCFQDLNSSTVASQSANHTHGTTSHRETQKAYLLAAGVIVCIYIICAVILILGVREQREPYEAQQSEPIAYFRGLRLVMSHGPYIKLITGFLFTSLAFMLVEGNFVLFCTYTLGFRNEFQNLLLAIMLSATLTIPIWQWFLTRFGKKTAVYVGISSAVPFLILVALMESNLIITYAVAVAAGISVAAAFLLPWSMLPDVIDDFHLKQPHFHGTEPIFFSFYVFFTKFASGVSLGISTLSLDFAGYQTRGCSQPERVKFTLNMLVTMAPIVLILLGLLLFKMYPIDEERRRQNKKALQALRDEASSSGCSETDSTELASIL

SEQ ID NO: 742 - protein, 151 aa, Homo sapiens
MEALGFLKLEVNGPMVTVALSVALLALLKWYSTSAFSRLEKLGLRHPKPSPFIGNLTFFRQGFWESQMELRKLYGPLCGYYLGRRMFIVISEPDMIKQVLVENFSNFTNRMPQSIMPNSRHHVASRGMWPGGRRLACYLHPFRMAEGIAEV

SEQ ID NO: 743 - protein, 332 aa, Homo sapiens
MGIVQICKGEYFWLEPKNAFENFQEPDIGLVALAFLQGSFAYGGWNFLNYVTEELVDPYKNLPRAIFISIPLVTFVYVFANVAYVTAMSPQELLASNAVAVTFGEKLLGVMAWIMPISVALSTFGGVNGSLFTSSRLFFAGAREGHLPSVLAMIHVKRCTPIPALLFTCISTLLMLVTSDMYTLINYVGFINYLFYGVTVAGQIVLRWKKPDIPRPIKINLLFPIIYLLFWAFLLVFSLWSEPVVCGIGLAIMLTGVPVYFLGVYWQHKPKCFSDFIELLTLVSQKMCVVVYPEVERGSGTEEANEDMEEQQQPMYQPTPTKDKDVAGQPQP

SEQ ID NO: 744 - protein, 180 aa, Homo sapiens
MAGYEYVSPEQLAGFDKYKYSAVDTNPLSLYVMHPFWNTIVKVFPTWLAPNLITFSGFLLVVFNFLLMAYFDPDFYASAPGHKHVPDWVWIVVGILNFVAYTLGCALCVTLPMSLLNFFRSYKNNTLKLNSVYEAMVPLFSPCLLFILSTAWILWSPSDILELHPRVFYFMVGTAFANST

SEQ ID NO: 745 - protein, 691 aa, Homo sapiens
MGQGWATAGLPSLLFLLLCYGHPLLVPSQEASQQVTVTHGTSSQATTSSQTTTHQATAHQTSAQSPNLVTDEAEASKFVEEYDRTSQVVWNEYAEANWNYNTNITTETSKILLQKNMQIANHTLKYGTQARKFDVNQLQNTTIKRIIKKVQDLERAALPAQELEEYNKILLDMETTYSVATVCHPNGSCLQLEPDLTNVMATSRKYEDLLWAWEGWRDKAGRAILQFYPKYVELINQAARLNGYVDAGDSWRSMYETPSLEQDLERLFQELQPLYLNLHAYVRRALHRHYGAQHINLEGPIPAHLLGNMWAQTWSNIYDLVVPFPSAPSMDTTEAMLKQGWTPRRMFKEADDFFTSLGLLPVPPEFWNKSMLEKPTDGREVVCHASAWDFYNGKDFRIKQCTTVNLEDLVVAHHEMGHIQYFMQYKDLPVALREGANPGFHEAIGDVLALSVSTPKHLHSLNLLSSEGGSDEHDINFLMKMALDKIAFIPFSYLVDQWRWRVFDGSITKENYNQEWWSLRLKYQGLCPPVPRTQGDFDPGAKFHIPSSVPYIRTAMKLGFSRPWPEAMQLITGQPNMSASAMLSYFKPLLDWLRTENELHGEKLGWPQYNWTPNSARSEGPLPDSGRVSFLGLDLDAQQARVGQWLLLFLGIALLVATLGLSQRLFSIRHRSLHRHSHGPQFGSEVELRHS

SEQ ID NO: 746 - protein, 123 aa, Homo sapiens
AVMWRKKSSGHFLPIDRNRGSYSQAAAYSVVSGNLMITWWSSLFLLGVLFQGYLGCLRSHSVLGRRKVGDMWILFFLWLWTSFNTAFLALQSLRFGFGFRRGRSFLLRSWHHLMKRVQIKIFD

SEQ ID NO: 747 - protein, 265 aa, Homo sapiens
MVVVGILLAYLAGWVLEWRWLAVLGCVPPSLMLLLMCFMPETPRFLLTQHRRQEAMAALRFLWGSEQGWEDPPIGAEQSFHLALLRQPGIYKPFIIGVSLMAFQQLSGVNAVMFYAETIFEEAKFKDSSLASVVVGVIQVLFTAVAALIMDRAGRRLLLVLSGVVMVFSTSAFGAYFKLTQGGPGNSSHVAISAPVSAQPVDASVGLAWLAVGSMCLFIAGFAVGWGPIPWLLMSEIFPLHVKGVATGICVLTNWLMAFLVTKEF

SEQ ID NO: 748 - protein, 1118 aa, Homo sapiens
MEIKDQGAQMEPLLPTRNDEEAVVDRGGTRSILKTHFEKEDLEGHRTLFIGVHVPLGGRKSHRRHRHRGHKHRKRDRERDSGLEDGRESPSFDTPSQRVQFILGTEDDDEEHIPHDLFTELDEICWREGEDAEWRETARWLKFEEDVEDGGERWSKPYVATLSLHSLFELRSCILNGTVLLDMHANTLEEIADMVLDQQVSSGQLNEDVRHRVHEALMKQHHHQNQKKLTNRIPIVRSFADIGKKQSEPNSMDKNAGQVVSPQSAPACVENKNDVSRENSTVDFSKGLGGQQKGHTSPCGMKQRHEKGPPHQQEREVDLHFMKKIPPGAEASNILVGELEFLDRTVVAFVRLSPAVLLQGLAEVPIPTRFLFILLGPLGKGQQYHEIGRSIATLMTDEVFHDVAYKAKDRNDLVSGIDEFLDQVTVLPPGEWDPSIRIEPPKNVPSQEKRKIPAVPNGTAAHGEAEPHGGHSGPELQRTGRIFGGLILDIKRKAPYFWSDFRDAFSLQCLASFLFLYCACMSPVITFGGLLGEATEGRISAIESLFGASMTGIAYSLFGGQPLTILGSTGPVLVFEKILFKFCKEYGLSYLSLRASIGLWTATLCIILVATDASSLVCYITRFTEEAFASLICIIFIYEALEKLFELSEAYPINMHNDLELLTQYSCNCVEPHNPSNGTLKEWRESNISASDIIWENLTVSECKSLHGEYVGRACGHDHPYVPDVLFWSVILFFSTVTLSATLKQFKTSRYFPTKVRSIVSDFAVFLTILCMVLIDYAIGIPSPKLQVPSVFKPTRDDRGWFVTPLGPNPWWTVIAAIIPALLCTILIFMDQQITAVIINRKEHKLKKGCGYHLDLLMVAVMLGVCSIMGLPWFVAATVLSITHVNSLKLESECSAPGEQPKFLGIREQRVTGLMIFILMGSSVFMTSILKFIPMPVLYGVFLYMGASSLKGIQFFDRIKLFWMPAKHQPDFIYLRHVPLRKVHLFTIIQMSCLGLLWIIKVSRAAIVFPMMVLALVFVRKLMDLLFTKRELSWLDDLMPESKKKKLEDAEKEEEQSMLAMEDEGTVQLPLEGHYRDDPSVINISDEMSKTALWRNLLITADNSKDKESSFPSKSSPS

SEQ ID NO: 749 - protein, 853 aa, Homo sapiens
MEARVSLKRRIELTVEYPWRCGALSPTSNCRTGMWSWKCLLFWAVLVTATLCTARPSPTLPEQAQPWGAPVEVESFLVHPGDLLQLRCRLRDDVQSINWLRDGVQLAESNRTRITGEEVEVQDSVPADSGLYACVTSSPSGSDTTYFSVNVSDALPSSEDDDDDDDSSSEEKETDNTKPNPVAPYWTSPEKMEKKLHAVPAAKTVKFKCPSSGTPNPTLRWLKNGKEFKPDHRIGGYKVRYATWSIIMDSVVPSDKGNYTCIVENEYGSINHTYQLDVVERSPHRPILQAGLPANKTVALGSNVEFMCKVYSDPQPHIQWLKHIEVNGSKIGPDNLPYVQILKTAGVNTTDKEMEVLHLRNVSFEDAGEYTCLAGNSIGLSHHSAWLTVLEALEERPAVMTSPLYLEIIIYCTGAFLISCMVGSVIVYKMKSGTKKSDFHSQMAVHKLAKSIPLRRQVTVSADSSASMNSGVLLVRPSRLSSSGTPMLAGVSEYELPEDPRWELPRDRLVLGKPLGEGCFGQVVLAEAIGLDKDKPNRVTKVAVKMLKSDATEKDLSDLISEMEMMKMIGKHKNIINLLGACTQDGPLYVIVEYASKGNLREYLQARRPPGLEYCYNPSHNPEEQLSSKDLVSCAYQVARGMEYLASKKCIHRDLAARNVLVTEDNVMKIADFGLARDIHHIDYYKKTTNGRLPVKWMAPEALFDRIYTHQSDVWSFGVLLWEIFTLGGSPYPGVPVEELFKLLKEGHRMDKPSNCTNELYMMMRDCWHAVPSQRPTFKQLVEDLDRIVALTSNQEYLDLSMPLDQYSPSFPDTRSSTCSSGEDSVFSHEPLPEEPCLPRHPAQLANGGLKRR

SEQ ID NO: 750 - protein, 407 aa, Homo sapiens
MWPNGSSLGPCFRPTNITLEERRLIASPWFAASFCVVGLASNLLALSVLAGARQGGSHTRSSFLTFLCGLVLTDFLGLLVTGTIVVSQHAALFEWHAVDPGCRLCRFMGVVMIFFGLSPLLLGAAMASERYLGITRPFSRPAVASQRRAWATVGLVWAAALALGLLPLLGVGRYTVQYPGSWCFLTLGAESGDVAFGLLFSMLGGLSVGLSFLLNTVSVATLCHVYHGQEAAQQRPRDSEVEMMAQLLGIMVVASVCWLPLLVFIAQTVLRNPPAMSPAGQLSRTTEKELLIYLRVATWNQILDPWVYILFRRAVLRRLQPRLSTRPRRSLTLWPSLEYSGTISAHCNLRLPGSSDSRASASRAAGITGVSHCARPCMLFDPEFDLLAGVQLLPFEPPTGKALSRKD

SEQ ID NO: 751 - protein, 405 aa, Homo sapiens
MVTEMNPNVVVISVLAILSTLLIGLLLVTLIILRKKHLQMARECGAGTFVNFASLERDGKLPYNWRRSIFAFLTLLPSCLWTDYLLAFYINPWSKNGLKKRKLTNPVQLDDFDAYIKDMAKDSDYKFSLQFEELKLIGLDIPHFAADLPLNRCKNRYTNILPYDFSRVRLVSMNEEEGADYINANYIPGYNSPQEYIATQGPLPETRNDFWKMVLQQKSQIIVMLTQCNEKRRVKCDHYWPFTEEPIAYGDITVEMISEEEQDDWACRHFRINYADEMQDVMHFNYTAWPDHGVPTANAAESILQFVHMVRQQATKSKGPMIIHCSAGVGRTGTFIALDRLLQHIRDHEFVDILGLVSEMRSYRMSMVQTEEQYIFIHQCVQLMWMKKKQQFCISDVIYENVSKS

SEQ ID NO: 752 - protein, 233 aa, Homo sapiens
MNRSVMPEGKLVEPVLEKRGRFADLLDAKYLRTTLQIWVIWLGISFAYYGVILASAELLERDLVCGSKSDSAVVVTGGDSGESQSPCYCHMFAPSDYRTMIISTIGEIALNPLNILGINFLGRRLSLSITMGCTALFFLLLNICTSSAGLIGFLFMLRALVAANFNTVYIYTAEVYPTTMRALGMGTSGSLCRIGAMVAPFISQRALLLVNHFILYCRCEINGELSRTQTKRN

SEQ ID NO: 753 - protein, 551 aa, Homo sapiens
EHLNHVVSSAPSLRDPSQPQQWVSSQVLLCKRCNHHQTTKIKQLAAFAPREEGRYDEEVEVYRHHLEQMYKLCRPCQAAVEYYIKHQNRQLRALLLSHQFKRREADQTHAQNFSSAVKSPVQVILLRALAFLACAFLLTTALYGASGHFAPGTTVPLALPPGGNGSATPDNGTTPGAEGWRQLLGLLPEHMAEKLCEAWAFGQSHQTGVVALGLLTCLLAMLLAGRIRLRRIDAFCTCLWALLLGLHLAEQHLQAASPSWLDTLKFSTTSLCCLVGFTAAVATRKATGPRRFRPRRFFPGDSAGLFPTSPSLAIPHPSVGGSPASLFIPSPPSFLPLANQQLFRSPRRTSPSSLPGRLSRALSLGTIPSLTRADYFSLLSGSCPSSPLPSPAPSVAGSVASSSGSLRHRRPLISPARLNLKGQKLLLFPSPPGEAPTTPSSSDEHSPHNGSLFTMEPPHVPRKPPLQDVKHALDLRSKLERGSACSNRSIKKEDDSSQSSTCVVDTTTRGCSEEAATWRGRFGPSLVRGLLAVSLAANALFTSVFLYQSLR

SEQ ID NO: 754 - protein, 268 aa, Homo sapiens
LRLWSLWWVFNSAGYYLVVYYVHILWNEVDPTTNSARVYNGAADAASTLLGAITSFAAGFVKIRWARWSKLLIAGVTATQAGLVFLLAHTRHPSSIWLCYAAFVLFRGSYQFLVPIATFQIASSLSKELCALVFGVNTFFATIVKTIITFIVSDVRGLGLPVRKQALRMSRPRLGLCLPGPFPPQSAAPARAGMAASSAEDPGSERGPWRRAGTVAARGDPGGERGPWRREGTLAARGDPGGERGPWWREGTLAAKPRMQWVTRATAP

SEQ ID NO: 755 - protein, 1086 aa, Homo sapiens
MAAAGQLCLLYLSAGLLSRLGAAFNLDTREDNVIRKYGDPGSLFGFSLAMHWQLQPEDKRLLLVGAPRAEALPLQRANRTGGLYSCDITARGPCTRIEFDNDADPTSESKEDQWMGVTVQSQGPGGKVVTCAHRYEKRQHVNTKQESRDIFGRCYVLSQNLRIEDDMDGGDWSFCDGRLRGHEKFGSCQQGVAATFTKDFHYIVFGAPGTYNWKGLLFLTSVSYTDPDQFVYKTRPPREQPDTFPDVMMNSYLGFSLDSGKGIVSKDEITFVSGAPRANHSGAVVLLKRDMKSAHLLPEHIFDGEGLASSFGYDVAVVDLNKDGWQDIVIGAPQYFDRDGEVGGAVYVYMNQQGRWNNVKPIRLNGTKDSMFGIAVKNIGDINQDGYPDIAVGAPYDDLGKVFIYHGSANGINTKPTQVLKGISPYFGYSIAGNMDLDRNSYPDVAVGSLSDSVTIFRSRPVINIQKTITVTPNRIDLRQKTACGAPSGICLQVKSCFEYTANPAGYNPSISIVGTLEAEKERRKSGLSSRVQFRNQGSEPKYTQELTLKRQKQKVCMEETLWLQDNIRDKLRPIPITASVEIQEPSSRRRVNSLPEVLPILNSDEPKTAHIDVHFLKEGCGDDNVCNSNLKLEYKFCTREGNQDKFSYLPIQKGVPELVLKDQKDIALEITVTNSPSNPRNPTKDGDDAHEAKLIATFPDTLTYSAYRELRAFPEKQLSCVANQNGSQADCELGNPFKRNSNVTFYLVLSTTEVTFDTPDLDINLKLETTSNQDNLAPITAKAKVVIELLLSVSGVAKPSQVYFGGTVVGEQAMKSEDEVGSLIEYEFRVINLGKPLTNLGTATLNIQWPKEISNGKWLLYLVKVESKGLEKVTCEPQKEINSLNLTESHNSRKKREITEKQIDDNRKFSLFAERKYQTLNCSVNVNCVNIRCPLRGLDSKASLILRSRLWNSTFLEEYSKLNYLDILMRAFIDVTAAAENIRLPNAGTQVRVTVFPSKTVAQYSGVPWWIILVAILAGILMLALLVFILWKCGFFKRSRYDDSVPRYHAVRIRKEEREIKDEKYIDNLEKKQWITKWNENESYS

SEQ ID NO: 756 - protein, 232 aa, Homo sapiens
MWQLLLPTALLLLVSAGMRTDLPKAVVFLEPQWYSVLEKDSVTLKCQGAYSPEDNSTQWFHNENLISSQASSYFIDAATVNDSGEYRCQTNLSTLSDPVQLEVHIGWLLLQAPRWVFKEEDPIHLRCHSWKNTALHKVTYLQNGKDRKYFHHNSDFHIPKATLKDSGSYFCRGLVGSKNVSSETVNITITQGLAVSTISSFSPPGYQVSFCLVMVLLFAVDTGLYFSVKTNI

SEQ ID NO: 757 - protein, 439 aa, Homo sapiens
MTPQPAGPPDGGWGWVVAAAAFAINGLSYGLLRSLGLAFPDLAEHFDRSAQDTAWISALALAVQQAASPVGSALSTRWGARPVVMVGGVLASLGFVFSAFASDLLHLYLGLGLLAGFGWALVFAPALGTLSRYFSRRRVLAVGLALTGNGASSLLLAPALQLLLDTFGWRGALLLLGAITLHLTPCGALLLPLVLPGDPPAPPRSPLAALGLSLFTRRAFSIFALGTALVGGGYFVPYVHLAPHALDRGLGGYGAALVVAVAAMGDAGARLVCGWLADQGWVPLPRLLAVFGALTGLGLWVVGLSWGGPLLAAAVAYGLSAGSYAPLVFGVLPGLVGVGGVVQATGLVMMLMSLGGLLGPPLSGFLRDETGDFTASFLLSGSLILSGSFIYIGLPRALPSCGPASPPATPPPETGELLPAPQAVLLSPGGPGSTLDTTC

SEQ ID NO: 758 - protein, 416 aa, Homo sapiens
MIEVQHKQCLEEAQLENETIGCSKMWDNLTCWPATPRGQVVVLACPLIFKLFSSIQGRNVSRSCTDEGWTHLEPGPYPIACGLDDKAASLDEQQTMFYGSVKTGYTIGYGLSLATLLVATAILSLFRKLHCTRNYIHMHLFISFILRAAAVFIKDLALFDSGESDQCSEGSVGCKAAMVFFQYCVMANFFWLLVEGLYLYTLLAVSFFSERKYFWGYILIGWGVPSTFTMVWTIARIHFEDYGCWDTINSSLWWIIKGPILTSILVNFILFICIIRILLQKLRPPDIRKSDSSPYSRLARSTLLLIPLFGVHYIMFAFFPDNFKPEVKMVFELVVGSFQGFVVAILYCFLNGEVQAELRRKWRRWHLQGVLGWNPKYRHPSGGSNGATCSTQVSMLTRVSPGARRSSSFQAEVSLV

SEQ ID NO: 759 - protein, 166 aa, Homo sapiens
MDQFPESVTENFEYDDLAEACYIGDIVVFGTVFLSIFYSVIFAIGLVGNLLVVFALTNSKKPKSVTDIYLLNLALSDLLFVATLPFWTHYLINEKGLHNAMCKFTTAFFFIGFFGSIFFITVISIDRYLAIVLAANSMNNRTVQHGVTISLGVWAAAILVAAPQFM

SEQ ID NO: 760 - protein, 258 aa, Homo sapiens
MGPWSRVRVAKCQMLVTCFFILLLGLSVATMVTLTYFGAHFAVIRRASLEKNPYQAVHQWAFSAGLSLVGLLTLGAVLSAAATVREAQGLMAGGFLCFSLAFCAQVQVVFWRLHSPTQVEDAMLDTYDLVYEQAMKGTSHVRRQELAAIQDVFLCCGKKSPFSRLGSTEADLCQGEEAAREDCLQGIRSFLRTHQQVASSLTSIGLALTLGPQGQIHPDPTSMWPPAPGAQPLEMLPGWTHTLSPLRSSCYWSKRMLG

SEQ ID NO: 761 - protein, 208 aa, Homo sapiens
MPEEGSGCSVRRRPYGCVLRAALVPLVAGLVICLVVCIQRFAQAQQQLPLESLGWDVAELQLNHTGPQQDPRLYWQGGPALGRSFLHGPELDKGQLRIHRDGIYMVHIQVTLAICSSTTASRHHPTTLAVGICSPASRSISLLRLSFHQGLFGFWNWGLKVKCFLRHLIWTAHCFIPLTQLVFMQALQSWRNHHCSHFTDEENRGVNR

SEQ ID NO: 762 - protein, 485 aa, Homo sapiens
MYTSHEDIGYDFEDGPKDKKTLKPHPNIDGGWAWMMVLSSFFVHILIMGSQMALGVLNVEWLEEFHQSRGLTAWVSSLSMGITLIVGPFIGLFINTCGCRQTAIIGGLVNSLGWVLSAYAANVHYLFITFGVAAGLGSGMAYLPAVVMVGRYFQKRRALAQGLSTTGTGFGTFLMTVLLKYLCAEYGWRNAMLIQGAVSLNLCVCGALMRPLSPGKNPNDPGEKDVRGLPAHSTESVKSTGQQGRTEEKDGGLGNEETLCDLQAQECPDQAGHRKNMCALRILKTVSWLTMRVRKGFEDWYSGYFGTASLFTNRMFVAFIFWALFAYSSFVIPFIHLPEIVNLYNLSEQNDVFPLTSIIAIVHIFGKVILGVIADLPCISVWNVFLLANFTLVLSIFILPLMHTYAGLAVICALIGFSSGYFSLMPVVTEDLVGIEHLANAYGIIICANGISALLGPPFAGKLSEVLRAQSACTYGALCYKVPDK

SEQ ID NO: 763 - protein, 1088 aa, Homo sapiens
MEIKDQGAQMEPLLPTRNDEEAVVDRGGTRSILKTHFEKEDLEGHRTLFIGVHVPLGGRKSHRRHRHRGHKHRKRDRERDSGLEDGRESPSFDTPSQRVQFILGTEDDDEEHIPHDLFTELDEICWREGEDAEWRETARWLKFEEDVEDGGERWSKPYVATLSLHSLFELRSCILNGTVLLDMHANTLEEIADMVLDQQVSSGQLNEDVRHRVHEALMKQHHHQNQKKLTNRIPIVRSFADIGKKQSEPNSMDKNAGQVVSPQSAPACVENKNDVSRENSTVDFSKVDLHFMKKIPPGAEASNILVGELEFLDRTVVAFVRLSPAVLLQGLAEVPIPTRFLFILLGPLGKGQQYHEIGRSIATLMTDEVFHDVAYKAKDRNDLVSGIDEFLDQVTVLPPGEWDPSIRIEPPKNVPSQEKRKIPAVPNGTAAHGEAEPHGGHSGPELQRTGRIFGGLILDIKRKAPYFWSDFRDAFSLQCLASFLFLYCACMSPVITFGGLLGEATEGRISAIESLFGASMTGIAYSLFGGQPLTILGSTGPVLVFEKILFKFCKEYGLSYLSLRASIGLWTATLCIILVATDASSLVCYITRFTEEAFASLICIIFIYEALEKLFELSEAYPINMHNDLELLTQYSCNCVEPHNPSNGTLKEWRESNISASDIIWENLTVSECKSLHGEYVGRACGHDHPYVPDVLFWSVILFFSTVTLSATLKQFKTSRYFPTKVRSIVSDFAVFLTILCMVLIDYAIGIPSPKLQVPSVFKPTRDDRGWFVTPLGPNPWWTVIAAIIPALLCTILIFMDQQITAVIINRKEHKLKKGCGYHLDLLMVAVMLGVCSIMGLPWFVAATVLSITHVNSLKLESECSAPGEQPKFLGIREQRVTGLMIFILMGSSVFMTSILKFIPMPVLYGVFLYMGASSLKGIQFFDRIKLFWMPAKHQPDFIYLRHVPLRKVHLFTIIQMSCLGLLWIIKVSRAAIVFPMMVLALVFVRKLMDLLFTKRELSWLDDLMPESKKKKLEDAEKEEEQSMLAMEDEGTVQLPLEGHYRDDPSVINISDEMSKTALWRNLLITADNSKDKESSFPSKSSPS

SEQ ID NO: 764 - protein, 8749 aa, Homo sapiens
MATSRGASRCPRDIANVMQRLQDEQEIVQKRTFTKWINSHLAKRKPPMVVDDLFEDMKDGVKLLALLEVLSGQKLPCEQGRRMKRIHAVANIGTALKFLEGRKSMHRGSPIKLVNINSTDIADGRPSIVLGLMWTIILYFQIEELTSNLPQLQSLSSSASSVDSIVSSETPSPPSKRKVTTKIQGNAKKALLKWVQYTAGKQTGIEVKDFGKSWRSGVAFHSVIHAIRPELVDLETVKGRSNRENLEDAFTIAETELGIPRLLDPEDVDVDKPDEKSIMTYVAQFLKHYPDIHNASTDGQEDDEILPGFPSFANSVQNFKREDRVIFKEMKVWIEQFERDLTRAQMVESNLQDKYQSFKHFRVQYEMKRKQIEHLIQPLHRDGKLSLDQALVKQSWDRVTSRLFDWHIQLDKSLPAPLGTIGAWLYRAEVALREEITVQQVHEETANTIQRKLEQHKDLLQNTDAHKRAFHEIYRTRSVNGIPVPPDQLEDMAERFHFVSSTSELHLMKMEFLELKYRLLSLLVLAESKLKSWIIKYGRRESVEQLLQNYVSFIENSKFFEQYEVTYQILKQTAEMYVKADGSVEEAENVMKFMNETTAQWRNLSVEVRSVRSMLEEVISNWDRYGNTVASLQAWLEDAEKMLNQSENAKKDFFRNLPHWIQQHTAMNDAGNFLIETCDEMVSRDLKQQLLLLNGRWRELFMEVKQYAQADEMDRMKKEYTDCVVTLSAFATEAHKKLSEPLEVSFMNVKLLIQDLEDIEQRVPVMDAQYKIITKTAHLITKESPQEEGKEMFATMSKLKEQLTKVKECYSPLLYESQQLLIPLEELEKQMTSFYDSLGKINEIITVLEREAQSSALFKQKHQELLACQENCKKTLTLIEKGSQSVQKFVTLSNVLKHFDQTRLQRQIADIHVAFQSMVKKTGDWKKHVETNSRLMKKFEESRAELEKVLRIAQEGLEEKGDPEELLRRHTEFFSQLDQRVLNAFLKACDELTDILPEQEQQGLQEAVRKLHKQWKDLQGEAPYHLLHLKIDVEKNRFLASVEECRTELDRETKLMPQEGSEKIIKEHRVFFSDKGPHHLCEKRLQLIEELCVKLPVRDPVRDTPGTCHVTLKELRAAIDSTYRKLMEDPDKWKDYTSRFSEFSSWISTNETQLKGIKGEAIDTANHGEVKRAVEEIRNGVTKRGETLSWLKSRLKVLTEVSSENEAQKQGDELAKLSSSFKALVTLLSEVEKMLSNFGDCVQYKEIVKNSLEELISGSKEVQEQAEKILDTENLFEAQQLLLHHQQKTKRISAKKRDVQQQIAQAQQGEGGLPDRGHEELRKLESTLDGLERSRERQERRIQVTLRKWERFETNKETVVRYLFQTGSSHERFLSFSSLESLSSELEQTKEFSKRTESIAVQAENLVKEASEIPLGPQNKQLLQQQAKSIKEQVKKLEDTLEEDIKTMEMVKTKWDHFGSNFETLSVWITEKEKELNALETSSSAMDMQISQIKVTIQEIESKLSSIVGLEEEAQSFAQFVTTGESARIKAKLTQIRRYGEELREHAQCLEGTILGHLSQQQKFEENLRKIQQSVSEFEDKLAVPIKICSSATETYKVLQEHMDLCQALESLSSAITAFSASARKVVNRDSCVQEAAALQQQYEDILRRAKERQTALENLLAHWQRLEKELSSFLTWLERGEAKASSPEMDISADRVKVEGELQLIQALQNEVVSQASFYSKLLQLKESLFSVASKDDVKMMKLHLEQLDERWRDLPQIINKRINFLQSVVAEHQQFDELLLSFSVWIKLFLSELQTTSEISIMDHQVALTRHKDHAAEVESKKGELQSLQGHLAKLGSLGRAEDLHLLQGKAEDCFQLFEEASQVVERRQLALSHLAEFLQSHASLSGILRQLRQTVEATNSMNKNESDLIEKDLNDALQNAKALESAAVSLDGILSKAQYHLKIGSSEQRTSCRATADQLCGEVERIQNLLGTKQSEADALAVLKKAFQDQKEELLKSIEDIEERTDKERLKEPTRQALQQRLRVFNQLEDELNSHEHELCWLKDKAKQIAQKDVAFAPEVDREINRLEVTWDDTKRLIHENQGQCCGLIDLMREYQNLKSAVSKVLENASSVIVTRTTIKDQEDLKWAFSKHETAKNKMNYKQKDLDNFTSKGKHLLSELKKIHSSDFSLVKTDMESTVDKWLDVSEKLEENMDRLRVSLSIWDDVLSTRDEIEGWSNNCVPQMAENISNLDNHLRAEELLKEFESEVKNKALRLEELHSKVNDLKELTKNLETPPDLQFIEADLMQKLEHAKEITEVAKGTLKDFTAQSTQVEKFINDITTWFTKVEESLMNCAQNETCEALKKVKDIQKELQSQQSNISSTQENLNSLCRKYHSAELESLGRAMTGLIKKHEAVSQLCSKTQASLQESLEKHFSESMQEFQEWFLGAKAAAKESSDRTGDSKVLEAKLHDLQNILDSVSDGQSKLDAVTQEGQTLYAHLSKQIVSSIQEQITKANEEFQAFLKQCLKDKQALQDCASELGSFEDQHRKLNLWIHEMEERFNTENLGESKQHIPEKKNEVHKVEMFLGELLAARESLDKLSQRGQLLSEEGHGAGQEGRLCSQLLTSHQNLLRMTKEKLRSCQVALQEHEALEEALQSMWFWVKAIQDRLACAESTLGSKDTLEKRLSQIQDILLMKGEGEVKLNMAIGKGEQALRSSNKEGQRVIQTQLETLKEVWADIMSSSVHAQSTLESVISQWNDYVERKNQLEQWMESVDQKIEHPLQPQPGLKEKFVLLDHLQSILSEAEDHTRALHRLIAKSRELYEKTEDESFKDTAQEELKTQFNDIMTVAKEKMRKVEEIVKDHLMYLDAVHEFTDWLHSAKEELHRWSDMSGDSSATQKKLSKIKELIDSREIGASRLSRVESLAPEVKQNTTASGCELMHTEMQALRADWKQWEDSVFQTQSCLENLVSQMALSEQEFSGQVAQLEQALEQFSALLKTWAQQLTLLEGKNTDEEIVECWHKGQEILDALQKAEPRTEDLKSQLNELCRFSRDLSTYSGKVSGLIKEYNCLCLQASKGCQNKEQILQQRFRKAFRDFQQWLVNAKITTAKCFDIPQNISEVSTSLQKIQEFLSESENGQHKLNMMLSKGELLSTLLTKEKAKGIQAKVTAAKEDWKNFHSNLHQKESALENLKIQMKDFEVSAEPIQDWLSKTEKMVHESSNRLYDLPAKRREQQKLQSVLEEIHCYEPQLNRLKEKAQQLWEGQAASKSFRHRVSQLSSQYLALSNLTKEKVSRLDRIVAEHNQFSLGIKELQDWMTDAIHMLDSYCHPTSDKSVLDSRTLKLEALLSVKQEKEIQMKMIVTRGESVLQNTSPEGIPTIQQQLQSVKDMWASLLSAGIRCKSQLEGALSKWTSYQDGVRQFSGWMDSMEANLNESERQHAELRDKTTMLGKAKLLNEEVLSYSSLLETIEVKGAGMTEHYVTQLELQDLQERYRAIQERAKEAVTKSEKLVRLHQEYQRDLKAFEVWLGQEQEKLDQYSVLEGDAHTHETTLRDLQELQVHCAEGQALLNSVLHTREDVIPSGIPQAEDRALESLRQDWQAYQHRLSETRTQFNNVVNKLRLMEQKFQQVDEWLKTAEEKKWHEEVTAYRDEVEEVGARAQEILDESHVNSRMGCQATQLTSRYQALLLQVLEQIKFLEEEIQSLEESESSLSSYSDWYGSTHKNFKNVATKIDKVDTVMMGKKLKTLEVLLKDMEKGHSLLKSAREKGERAVKYLEEGEAERLRKEIHDHMEQLKELTSTVRKEHMTLEKGLHLAKEFSDKCKALTQWIAEYQEILHVPEEPKMELYEKKAQLSKYKSLQQTVLSHEPSVKSVREKGEALLELVQDVTLKDKIDQLQSDYQDLCSIGKAMMEEIAGFEDRLNNLQMKGDTLIGQCADHLQAKLKQNVHAHLQGTKDSYSAICSTAQRMYQSLEHELQKHVSRQDTLQQCQAWLSAVQPDLEPSPQPPLSRAEAIKQVKHFRALQEQARTYLDLLCSMCDLSNASVKTTAKDIQQTEQTIEQKLVQAQNLTQGWEEIKHLKSELWIYLQDADQQLQNMKRRHSELELNIAQNMVSQVKDFVKKLQSKQASVNTIIEKVNKLTKKEESPEHKEINHLNDQWLDLCRQSNNLCLQREEDLQRTRDYHDCMNVVEVFLEKFTTEWDNLARSDAESTAVHLEALKKLALALQERKYAIEDLKDQKQKMIEHLNLDDKELVKEQTSHLEQRWFQLEDLIKRKIQVSVTNLEELNVVQSRFQELMEWAEEQQPNIAEALKQSPPPDMAQNLLMDHLAICSELEAKQMLLKSLIKDADRVMADLGLNERQVIQKALSDAQSHVNCLSDLVGQRRKYLNKALSEKTQFLMAVFQATSQIQQHERKIMFREHICLLPDDVSKQVKTCKSAQASLKTYQNEVTGLWAQGRELMKEVTEQEKSEVLGKLQELQSVYDSVLQKCSHRLQELEKNLVSRKHFKEDFDKACHWLKQADIVTFPEINLMNESSELHTQLAKYQNILEQSPEYENLLLTLQRTGQTILPSLNEVDHSYLSEKLNALPRQFNVIVALAKDKFYKVQEAILARKEYASLIELTTQSLSELEAQFLRMSKVPTDLAVEEALSLQDGCRAILDEVAGLGEAVDELNQKKEGFRSTGQPWQPDKMLHLVTLYHRLKRQTEQRVSLLEDTTSAYQEHEKMCQQLERQLKSVKEEQSKVNEETLPAEEKLKMYHSLAGSLQDSGIVLKRVTIHLEDLAPHLDPLAYEKARHQIQSWQGELKLLTSAIGETVTECESRMVQSIDFQTEMSRSLDWLRRVKAELSGPVYLDLNLQDIQEEIRKIQIHQEEVQSSLRIMNALSHKEKEKFTKAKELISADLEHSLAELSELDGDIQEALRTRQATLTEIYSQCQRYYQVFQAANDWLEDAQELLQLAGNGLDVESAEENLKSHMEFFSTEDQFHSNLEELHSLVATLDPLIKPTGKEDLEQKVASLELRSQRMSRDSGAQVDLLQRCTAQWHDYQKAREEVIELMNDTEKKLSEFSLLKTSSSHEAEEKLSEHKALVSVVNSFHEKIVALEEKASQLEKTGNDASKATLSRSMTTVWQRWTRLRAVAQDQEKILEDAVDEWTGFNNKVKKATEMIDQLQDKLPGSSAEKASKAELLTLLEYHDTFVLELEQQQSALGMLRQQTLSMLQDGAAPTPGEEPPLMQEITAMQDRCLNMQEKVKTNGKLVKQELKDREMVETQINSVKCWVQETKEYLGNPTIEIDAQLEELQILLTEATNHRQNIEKMAEEQKEKYLGLYTILPSELSLQLAEVALDLKIRDQIQDKIKEVEQSKATSQELSRQIQKLAKDLTTILTKLKAKTDNVVQAKTDQKVLGEELDGCNSKLMELDAAVQKFLEQNGQLGKPLAKKIGKLTELHQQTIRQAENRLSKLNQAASHLEEYNEMLELILKWIEKAKVLAHGTIAWNSASQLREQYILHQTLLEESKEIDSELEAMTEKLQYLTSVYCTEKMSQQVAELGRETEELRQMIKIRLQNLQDAAKDMKKFEAELKKLQAALEQAQATLTSPEVGRLSLKEQLSHRQHLLSEMESLKPKVQAVQLCQSALRIPEDVVASLPLCHAALRLQEEASRLQHTAIQQCNIMQAAVVQYEQYEQEMKHLQQLIEGAHREIEDKPVATSNIQELQAQISRHEELAQKIKGYQEQIASLNSKCKMLTMKAKHATMLLTVTEVEGLAEGTEDLDGELLPTPSAHPSVVMMTAGRCHTLLSPVTEESGEEGTNSEISSPPACRSPSPVANTDASVNQDIAYYQALSAERLQTDAAKIHPSTSASQEFYEPGLEPSATAKLGDLQRSWETLKNVISEKQRTLYEALERQQKYQDSLQSISTKMEAIELKLSESPEPGRSPESQMAEHQALMDEILMLQDEINELQSSLAEELVSESCEADPAEQLALQSTLTVLAERMSTIRMKASGKRQLLEEKLNDQLEEQRQEQALQRYRCEADELDSWLLSTKATLDTALSPPKEPMDMEAQLMDCQNMLVEIEQKVVALSELSVHNENLLLEGKAHTKDEAEQLAGKLRRLKGSLLELQRALHDKQLNMQGTAQEKEESDVDLTATQSPGVQEWLAQARTTWTQQRQSSLQQQKELEQELAEQKSLLRSVASRGEEILIQHSAAETSGDAGEKPDVLSQELGMEGEKSSAEDQMRMKWESLHQEFSTKQKLLQNVLEQEQEQVLYSRPNRLLSGVPLYKGDVPTQDKSAVTSLLDGLNQAFEEVSSQSGGAKRQSIHLEQKLYDGVSATSTWLDDVEERLFVATALLPEETETCLFNQEILAKDIKEMSEEMDKNKNLFSQAFPENGDNRDVIEDTLGCLLGRLSLLDSVVNQRCHQMKERLQQILNFQNDLKVLFTSLADNKYIILQKLANVFEQPVAEQIEAIQQAEDGLKEFDAGIIELKRRGDKLQVEQPSMQELSKLQDMYDELMMIIGSRRSGLNQNLTLKSQYERALQDLADLLETGQEKMAGDQKIIVSSKEEIQQLLDKHKEYFQGLESHMILTETLFRKIISFAVQKETQFHTELMAQASAVLKRAHKRGVELEYILETWSHLDEDQQELSRQLEVVESSIPSVGLVEENEDRLIDRITLYQHLKSSLNEYQPKLYQVLDDGKRLLISISCSDLESQLNQLGECWLSNTNKMSKELHRLETILKHWTRYQSESADLIHWLQSAKDRLEFWTQQSVTVPQELEMVRDHLNAFLEFSKEVDAQSSLKSSVLSTGNQLLRLKKVDTATLRSELSRIDSQWTDLLTNIPAVQEKLHQLQMDKLPSRHAISEVMSWISLMENVIQKDEDNIKNSIGYKAIHEYLQKYKGFKIDINCKQLTVDFVNQSVLQISSQDVESKRSDKTDFAEQLGAMNKSWQILQGLVTEKIQLLEGLLESWSEYENNVQCLKTWFETQEKRLKQQHRIGDQASVQNALKDCQDLEDLIKAKEKEVEKIEQNGLALIQNKKEDVSSIVMSTLRELGQTWANLDHMVGQLKILLKSVLDQWSSHKVAFDKINSYLMEARYSLSRFRLLTGSLEAVQVQVDNLQNLQDDLEKQERSLQKFGSITNQLLKECHPPVTETLTNTLKEVNMRWNNLLEEIAEQLQSSKALLQLWQRYKDYSKQCASTVQQQEDRTNELLKAATNKDIADDEVATWIQDCNDLLKGLGTVKDSLFFLHELGEQLKQQVDASAASAIQSDQLSLSQHLCALEQALCKQQTSLQAGVLDYETFAKSLEALEAWIVEAEEILQGQDPSHSSDLSTIQERMEELKGQMLKFSSMAPDLDRLNELGYRLPLNDKEIKRMQNLNRHWSLISSQTTERFSKLQSFLLQHQTFLEKCETWMEFLVQTEQKLAVEISGNYQHLLEQQRAHELFQAEMFSRQQILHSIIIDGQRLLEQGQVDDRDEFNLKLTLLSNQWQGVIRRAQQRRGIIDSQIRQWQRYREMAEKLRKWLVEVSYLPMSGLGSVPIPLQQARTLFDEVQFKEKVFLRQQGSYILTVEAGKQLLLSADSGAEAALQAELAEIQEKWKSASMRLEEQKKKLAFLLKDWEKCEKGIADSLEKLRTFKKKLSQSLPDHHEELHAEQMRCKELENAVGSWTDDLTQLSLLKDTLSAYISADDISILNERVELLQRQWEELCHQLSLRRQQIGERLNEWAVFSEKNKELCEWLTQMESKVSQNGDILIEEMIEKLKKDYQEEIAIAQENKIQLQQMGERLAKASHESKASEIEYKLGKVNDRWQHLLDLIAARVKKLKETLVAVQQLDKNMSSLRTWLAHIESELAKPIVYDSCNSEEIQRKLNEQQELQRDIEKHSTGVASVLNLCEVLLHDCDACATDAECDSIQQATRNLDRRWRNICAMSMERRLKIEETWRLWQKFLDDYSRFEDWLKSSERTAAFPSSSGVIYTVAKEELKKFEAFQRQVHECLTQLELINKQYRRLARENRTDSACSLKQMVHEGNQRWDNLQKRVTSILRRLKHFIGQREEFETARDSILVWLTEMDLQLTNIEHFSECDVQAKIKQLKAFQQEISLNHNKIEQIIAQGEQLIEKSEPLDAAIIEEELDELRRYCQEVFGRVERYHKKLIRLPLPDDEHDLSDRELELEDSAALSDLHWHDRSADSLLSPQPSSNLSLSLAQPLRSERSGRDTPASVDSIPLEWDHDYDLSRDLESAMSRALPSEDEEGQDDKDFYLRGAVGLSDVMIPESPEAYVKLTENAIKNTSGDHSALESQIRQLGKALDDSRFQIQQTENIIRSKTPTGPELDTSYKGYMKLLGECSSSIDSVKRLEHKLKEEEESLPGFVNLHSTETQTAGVIDRWELLQAQALSKELRMKQNLQKWQQFNSDLNSIWAWLGDTEEELEQLQRLELSTDIQTIELQIKKLKELQKAVDHRKAIILSINLCSPEFTQADSKESRDLQDRLSQMNGRWDRVCSLLEEWRGLLQDALMQCQGFHEMSHGLLLMLENIDRRKNEIVPIDSNLDAEILQDHHKQLMQIKHELLESQLRVASLQDMSCQLLVNAEGTDCLEAKEKVHVIGNRLKLLLKEVSRHIKELEKLLDVSSSQQDLSSWSSADELDTSGSVSPTSGRSTPNRQKTPRGKCSLSQPGPSVSSPHSRSTKGGSDSSLSEPGPGRSGRGFLFRVLRAALPLQLLLLLLIGLACLVPMSEEDYSCALSNNFARSFHPMLRYTNGPPPL

SEQ ID NO: 765 - protein, 264 aa, Homo sapiens
MALQIPGGFWAAAVTVMLVMLSTPVAEARDFPKDFLVQFKGMCYFTNGTERVRGVARYIYNREEYGRFDSDVGEFQAVTELGRSIEDWNNYKDFLEQERAAVDKVCRHNYEAELRTTLQRQVEPTVTISPSRTEALNHHNLLVCSVTDFYPAQIKVRWFRNDQEETAGVVSTSLIRNGDWTFQILVMLEITPQRGDIYTCQVEHPSLQSPITVEWRAQSESAQSKMLSGIGGFVLGLIFLGLGLIIRHRGQKGPRGPPPAGLLH

SEQ ID NO: 766 - protein, 378 aa, Homo sapiens
MKMASFLAFLLLNFRVCLLLLQLLMPHSAQFSVLGPSGPILAMVGEDADLPCHLFPTMSAETMELKWVSSSLRQVVNVYADGKEVEDRQSAPYRGRTSILRDGITAGKAALRIHNVTASDSGKYLCYFQDGDFYEKALVELKVAALGSDLHVDVKGYKDGGIHLECRSTGWYPQPQIQWSNNKGENIPTVEAPVVADGVGLYAVAASVIMRGSSGEGVSCTIRSSLLGLEKTASISIADPFFRSAQRWIAALAGTLPVLLLLLGGAGYFLWQQQEEKKTQFRKKKREQELREMAWSTMKQEQSTRVKLLEELRWRSIQYASRGERHSAYNEWKKALFKPGPPIGQTQQQTRGQGSPVALSQESAQRTDSWGPEEGGES

SEQ ID NO: 767 - protein, 121 aa, Homo sapiens
MLSTSRSRFIRNTNESGEEVTTFFDYDYGAPCHKFDVKQIGAQLLPPLYSLVFIFGFVGNMLVVLILINCKKLKCLTDIYLLNLAISDLLFLITLPLWAHSAANEWVFGNAMCKLFTGLYH

SEQ ID NO: 768 - protein, 254 aa, Homo sapiens
MAPRSLLLLLSGALALTDTWAGSHSLRYFSTAVSRPGRGEPRYIAVEYVDDTQFLRFDSDAAIPRMEPREPWVEQEGPQYWEWTTGYAKANAQTDRVALRNLLRRYNQSEAGSHTLQGMNGCDMGPDGRLLRGYHQHAYDGKDYISLNEDLRSWTAADTVAQITQRFYEAEEYAEEFRTYLEGECLELLRRYLENGKETLQRAEQSPQPTIPIVGIVAGLVVLGAVVTGAVVAAVMWRKKSSDRNRGSYSQAAV

SEQ ID NO: 769 - protein, 1242 aa, Homo sapiens
MGAASGRRGPGLLLPLPLLLLLPPQPALALDPGLQPGNFSADEAGAQLFAQSYNSSAEQVLFQSVAASWAHDTNITAENARRQEEAALLSQEFAEAWGQKAKELYEPIWQNFTDPQLRRIIGAVRTLGSANLPLAKRQQYNALLSNMSRIYSTAKVCLPNKTATCWSLDPDLTNILASSRSYAMLLFAWEGWHNAAGIPLKPLYEDFTALSNEAYKQDGFTDTGAYWRSWYNSPTFEDDLEHLYQQLEPLYLNLHAFVRRALHRRYGDRYINLRGPIPAHLLGDMWAQSWENIYDMVVPFPDKPNLDVTSTMLQQGWNATHMFRVAEEFFTSLELSPMPPEFWEGSMLEKPADGREVVCHASAWDFYNRKDFRIKQCTRVTMDQLSTVHHEMGHIQYYLQYKDLPVSLRRGANPGFHEAIGDVLALSVSTPEHLHKIGLLDRVTNDTESDINYLLKMALEKIAFLPFGYLVDQWRWGVFSGRTPPSRYNFDWWYLRTKYQGICPPVTRNETHFDAGAKFHVPNVTPYIRYFVSFVLQFQFHEALCKEAGYEGPLHQCDIYRSTKAGAKLRKVLQAGSSRPWQEVLKDMVGLDALDAQPLLKYFQPVTQWLQEQNQQNGEVLGWPEYQWHPPLPDNYPEGIDLVTDEAEASKFVEEYDRTSQVVWNEYAEANWNYNTNITTETSKILLQKNMQIANHTLKYGTQARKFDVNQLQNTTIKRIIKKVQDLERAALPAQELEEYNKILLDMETTYSVATVCHPNGSCLQLEPDLTNVMATSRKYEDLLWAWEGWRDKAGRAILQFYPKYVELINQAARLNGYVDAGDSWRSMYETPSLEQDLERLFQELQPLYLNLHAYVRRALHRHYGAQHINLEGPIPAHLLGNMWAQTWSNIYDLVVPFPSAPSMDTTEAMLKQGWTPRRMFKEADDFFTSLGLLPVPPEFWNKSMLEKPTDGREVVCHASAWDFYNGKDFRIKQCTTVNLEDLVVAHHEMGHIQYFMQYKDLPVALREGANPGFHEAIGDVLALSVSTPKHLHSLNLLSSEGGSDEHDINFLMKMALDKIAFIPFSYLVDQWRWRVFDGSITKENYNQEWWSLRLKYQGLCPPVPRTQGDFDPGAKFHIPSSVPYIRYFVSFIIQFQFHEALCQAAGHTGPLHKCDIYQSKEAGQRLATAMKLGFSRPWPEAMQLITGQPNMSASAMLSYFKPLLDWLRTENELHGEKLGWPQYNWTPNSGTATHPTSSLGS

SEQ ID NO: 770 - protein, 480 aa, Homo sapiens
MLERPPALAMPMPTEGTPPPLSGTPIPVPAYFRHAEPGFSLKRPRGLSRSLPPPPPAKGSIPISRLFPPRTPGWHQLQPRRVSFRGEASETLQSPGYDPSRPESFFQQSFQRLSRLGHGSYGEVFKVRSKEDGRLYAVKRSMSPFRGPKDRARKLAEVGSHEKVGQHPCCVRLEQAWEEGGILYLQTELCGPSLQQHCEAWGASLPEAQVWGYLRDTLLALAHLHSQGLVHLDVKPANIFLGPRGRCKLGDFGLLVELGTAGAGEVQEGDPRYMAPELLQGSYGTAADVFSLGLTILEVACNMELPHGGEGWQQLRQGYLPPEFTAGLSSELRSVLVMMLEPDPKLRATAEALLALPVLRQPRAWGVLWCMAAEALSRGWALWQALLALLCWLWHGLAHPASWLQPLGPPATPPGSPPCSLLLDSSLSSNWDDDSLGPGHPPCLACPPAGLHSPLRLSWPGLWGAPPPPGAGAHPGMPWT

SEQ ID NO: 771 - protein, 692 aa, Homo sapiens
MGPWGWKLRWTVALLLAAAGTAVGDRCERNEFQCQDGKCISYKWVCDGSAECQDGSDESQETCLSVTCKSGDFSCGGRVNRCIPQFWRCDGQVDCDNGSDEQGCLTLCEGPNKFKCHSGECITLDKVCNMARDCRDWSDEPIKECGTNECLDNNGGCSHVCNDLKIGYECLCPDGFQLVAQRRCEDIDECQDPDTCSQLCVNLEGGYKCQCEEGFQLDPHTKACKAVGSIAYLFFTNRHEVRKMTLDRSEYTSLIPNLRNVVALDTEVASNRIYWSDLSQRMICSTQLDRAHGVSSYDTVISRDIQAPDGLAVDWIHSNIYWTDSVLGTVSVADTKGVKRKTLFRENGSKPRAIVVDPVHGFMYWTDWGTPAKIKKGGLNGVDIYSLVTENIQWPNGITLDLLSGRLYWVDSKLHSISSIDVNGGNRKTILEDEKRLAHPFSLAVFEDKVFWTDIINEAIFSANRLTGSDVNLLAENLLSPEDMVLFHNLTQPRGVNWCERTTLSNGGCQYLCLPAPQINPHSPKFTCACPDGMLLARDMRSCLTEAEAAVATQETSTVRLKVSSTAVRTQHTTTRPVPDTSRLPGATPGLTTVEIVTMSHQALGDVAGRGNEKKPSSVRALSIVLPIVLLVFLCLGVFLLWKNWRLKNINSINFDNPVYQKTTEDEVHICHNQDGYSYPSRQMVSLEDDVA

SEQ ID NO: 772 - protein, 261 aa, Homo sapiens
ESGREATGEGDLSSKLGTQGLEFWRGGRVRTEGAEKGGDRSILNARQGWLAALQDRSILAPLAWDLGLLLLFVGQHSLMAAERVKAWTSRYFGVLQRSLYVACTALALQLVMRYWEPIPKGPVLWEARAEPWATWVPLLCFVLHVISWLLIFSILLVFDYAELMGLKQVYYHVLGLGEPLALKSPRALRLFSHLRHPVCVELLTVLWVVPTLGTDRLLLAFLLTLYLGLAHGLDQQDLRYLRAQLQRKLHLLSRPQDGEAE

SEQ ID NO: 773 - protein, 313 aa, Homo sapiens
MNILGLVVFAIVFGVALRKLGPEGELLIRFFNSFNEATMVLVSWIMWYAPVGIMFLVAGKIVEMEDVGLLFARLGKYILCCLLGHAIHGLLVLPLIYFLFTRKNPYRFLWGIVTPLATAFGTSSSSATLPLMMKCVEENNGVAKHISRFILPIGATVNMDGAALFQCVAAVFIAQLSQQSLDFVKIITILVTATASSVGAAGIPAGGVLTLAIILEAVNLPVDHISLILAVDWLVDRSCTVLNVEGDALGAGLLQNYVDRTESRSTEPELIQVKSELPLDPLPVPTEEGNPLLKHYRGPAGDATVASEKESVM

SEQ ID NO: 774 - protein, 189 aa, Homo sapiens
GILPPDVGAGKVQAVNPRISNLTAAAAETYANISWEYEGPEHVNFYVEYGVAGTMASRQVDIATQGWFIGLMCAVALLILILLIVCFIRRNKGGKYPVKEKEDAHADPEIQPMKEDDGTFGEYSDAEDHKPLKKGSRTPSDRTVKKEDSDDSLVDYGEGVNGQFNEDGSFIGQYSGKKEKEPAEGNESS

SEQ ID NO: 775 - protein, 205 aa, Homo sapiens
MGSKVADLLYWKDTRTSGVVFTGLMVSLLCLLHFSIVSVAAHLALLLLCGTISLRVYRKVLQAVHRGDGANPFQAYLDVDLTLTREQTERLSHQITSRVVSAATQLRHFFLVEDLVDSLKLALLFYILTFVGAIFNGLTLLILGVIGLFTIPLLYRQHQAQIDQYVGLVTNQLSHIKAKIRAKIPGTGALASAAAAVSGSKAKAE

SEQ ID NO: 776 - protein, 2101 aa, Homo sapiens
MLRVFILYAENVHTPDTDISDAYCSAVFAGVKKRTKVIKNSVNPVWNEGFEWDLKGIPLDQGSELHVVVKDHETMGRNRFLGEAKVPLREVLATPSLSASFNAPLLDTKKQPTGASLVLQVSYTPLPGAVPLFPPPTPLEPSPTLPDLDVVADTGGEEDTEDQGLTGDEAEPFLDQSGGPGAPTTPRKLPSRPPPHYPGIKRKRSAPTSRKLLSDKPQDFQIRVQVIEGRQLPGVNIKPVVKVTAAGQTKRTRIHKGNSPLFNETLFFNLFDSPGELFDEPIFITVVDSRSLRTDALLGEFRMDVGTIYREPRHAYLRKWLLLSDPDDFSAGARGYLKTSLCVLGPGDEAPLERKDPSEDKEDIESNLLRPTGVALRGAHFCLKVFRAEDLPQMDDAVMDNVKQIFGFESNKKNLVDPFVEVSFAGKMLCSKILEKTANPQWNQNITLPAMFPSMCEKMRIRIIDWDRLTHNDIVATTYLSMSKISAPGGEIEEEPAGAVKPSKASDLDDYLGFLPTFGPCYINLYGSPREFTGFPDPYTELNTGKGEGVAYRGRLLLSLETKLVEHSEQKVEDLPADDILRVEKYLRRRKYSLFAAFYSATMLQDVDDAIQFEVSIGNYGNKFDMTCLPLASTTQYSRAVFDGCHYYYLPWGNVKPVVVLSSYWEDISHRIETQNQLLGIADRLEAGLEQVHLALKAQCSTEDVDSLVAQLTDELIAGCSQPLGDIHETPSATHLDQYLYQLRTHHLSQITEAALALKLGHSELPAALEQAEDWLLRLRALAEEPQNSLPDIVIWMLQGDKRVAYQRVPAHQVLFSRRGANYCGKNCGKLQTIFLKYPMEKVPGARMPVQIRVKLWFGLSVDEKEFNQFAEGKLSVFAETYENETKLALVGNWGTTGLTYPKFSDVTGKIKLPKDSFRPSAGWTWAGDWFVCPEKTLLHDMDAGHLSFVEEVFENQTRLPGGQWIYMSDNYTDVNGEKVLPKDDIECPLGWKWEDEEWSTDLNRAVDEQGWEYSITIPPERKPKHWVPAEKMYYTHRRRRWVRLRRRDLSQMEALKRHRQAEAEGEGWEYASLFGWKFHLEYRKTDAFRRRRWRRRMEPLEKTGPAAVFALEGALGGVMDDKSEDSMSVSTLSFGVNRPTISCIFDYGNRYHLRCYMYQARDLAAMDKDSFSDPYAIVSFLHQSQKTVVVKNTLNPTWDQTLIFYEIEIFGEPATVAEQPPSIVVELYDHDTYGADEFMGRCICQPSLERMPRLAWFPLTRGSQPSGELLASFELIQREKPAIHHIPGFEVQETSRILDESEDTDLPYPPPQREANIYMVPQNIKPALQRTAIEILAWGLRNMKSYQLANISSPSLVVECGGQTVQSCVIRNLRKNPNFDICTLFMEVMLPREELYCPPITVKVIDNRQFGRRPVVGQCTIRSLESFLCDPYSAESPSPQGGPDDVSLLSPGEDVLIDIDDKEPLIPIQLADGLSSLAPTNTASPPSSPHEEEFIDWWSKFFASIGEREKCGSYLEKDFDTLKVYDTQLENVEAFEGLSDFCNTFKLYRGKTQEETEDPSVIGEFKGLFKIYPLPEDPAIPMPPRQFHQLAAQGPQECLVRIYIVRAFGLQPKDPNGKCDPYIKISIGKKSVSDQDNYIPCTLEPVFGKMFELTCTLPLEKDLKITLYDYDLLSKDEKIGETVVDLENRLLSKFGARCGLPQTYCVSGPNQWRDQLRPSQLLHLFCQQHRVKAPVYRTDRVMFQDKEYSIEEIEAGRIPNPHLGPVEERLALHVLQQQGLVPEHVESRPLYSPLQPDIEQGKLQMWVDLFPKALGRPGPPFNITPRRARRFFLRCIIWNTRDVILDDLSLTGEKMSDIYVKGWMIGFEEHKQKTDVHYRSLGGEGNFNWRFIFPFDYLPAEQVCTIAKKDAFWRLDKTESKIPARVVFQIWDNDKFSFDDFLGSLQLDLNRMPKPAKTAKKCSLDQLDDAFHPEWFVSLFEQKTVKGWWPCVAEEGEKKILAGKLEMTLEIVAESEHEERPAGQGRDEPNMNPKLEDPRRPDTSFLWFTSPYKTMKFILWRRFRWAIILFIILFILLLFLAIFIYAFPNYAAMKLVKPFS

SEQ ID NO: 777 - protein, 233 aa, Homo sapiens
MSTESMIRDVELAEEALPKKTGGPQGSRRCLFLSLFSFLIVAGATTLFCLLHFGVIGPQREEFPRDLSLISPLAQAVRSSSRTPSDKPVAHVVANPQAEGQLQWLNRRANALLANGVELRDNQLVVPSEGLYLIYSQVLFKGQGCPSTHVLLTHTISRIAVSYQTKVNLLSAIKSPCQRETPEGAEAKPWYEPIYLGGVFQLEKGDRLSAEINRPDYLDFAESGQVYFGIIAL

SEQ ID NO: 778 - protein, 226 aa, Homo sapiens
RKKENSRSLDVGGPLRYAVYGFFFTGPLSHFFYFFMEHWIPPEVPLAGLRRLLLDRLVFAPAFLMLFFLIMNFLEGKDASAFAAKMRGGFWPALRMNWRVWTPLQFININYVPLKPGSPGPLPHWEDGVQHPLQHGRIPPDATGGGLAEPAGATCFPPPEVPGALRQPGSSVLVCLPGLLGEVTTAGRTSGALWTWVWGSHPPSESRTNPVRMSLTLNQVIQDAQK

SEQ ID NO: 779 - protein, 263 aa, Homo sapiens
MITFLPLLLGLSLGCTGAGGFVAHVESTCLLDDAGTPKDFTYCISFNKDLLTCWDPEENKMAPCEFGVLNSLANVLSQHLNQKDTLMQRLRNGLQNCATHTQPFWGSLTNRTRPPSVQVAKTTPFNTREPVMLACYVWGFYPAEVTITWRKNGKLVMPHSSAHKTAQPNGDWTYQTLSHLALTPSYGDTYTCVVEHTGAPEPILRDWTPGLSPMQTLKVSVSAVTLGLGLIIFSLGVISWRRAGHSSYTPLPGSNYSEGWHIS

SEQ ID NO: 780 - protein, 296 aa, Homo sapiens
MPPAVGGPVGYTPPDGGWGWAVVIGAFISIGFSYAFPKSITVFFKEIEGIFHATTSEVSWISSIMLAVMYGGGPISSILVNKYGSRIVMIVGGCLSGCGLIAASFCNTVQQLYVCIGVIGGLGLAFNLNPALTMIGKYFYKRRPLANGLAMAGSPVFLCTLAPLNQVFFGIFGWRGSFLILGGLLLNCCVAGALMRPIGPKPTKAGKDKSKASLEKAGKSGVKKDLHDANTDLIGRHPKQEKRSVFQTINQFLDLTLFTHRGFLLYLSGNVIMFFGLFAPLVFLSSYGKSQHYSSE

SEQ ID NO: 781 - protein, 360 aa, Homo sapiens
MLSTSRSRFIRNTNESGEEVTTFFDYDYGAPCHKFDVKQIGAQLLPPLYSLVFIFGFVGNMLVVLILINCKKLKCLTDIYLLNLAISDLLFLITLPLWAHSAANEWVFGNAMCKLFTGLYHIGYFGGIFFIILLTIDRYLAIVHAVFALKARTVTFGVVTSVITWLVAVFASVPGIIFTKCQKEDSVYVCGPYFPRGWNNFHTIMRNILGLVLPLLIMVICYSGILKTLLRCRNEKKRHRAVRVIFTIMIVYFLFWTPYNIVILLNTFQEFFGLSNCESTSQLDQATQVTETLGMTHCCINPIIYAFVGEKFRRYLSVFFRKHITKRFCKQCPVFYRETVDGVTSTNTPSTGEQEVSAGL

SEQ ID NO: 782 - protein, 288 aa, Homo sapiens
GCQHGTCHQPWQCICHSGWAGKFCDKGFHGRDCERKAGPCEQAGSPCRNGGQCQDDQGFALNFTCRCLVGFVGARCEVNVDDCLMRPCANGATCLDGINRFSCLCPEGFAGRFCTINLDDCASRPCQRGARCRDRVHDFDCLCPSGYGGKTCELVLPVPDPPTTVDTPLGPTSAVVVPATGPAPHSAGAGLLRISVKEVVRRQEAGLGEPSLVALVVFGALTAALVLATVLLTLRAWRRGVCPPGPCCYPAPHYAPACQDQECQVSMLPAGLPLPRDLPPEPGKTTAL

SEQ ID NO: 783 - protein, 822 aa, Homo sapiens [sequence omitted]

SEQ ID NO: 784 - protein, 489 aa, Homo sapiens
MYTSHEDIGYDFEDGPKDKKTLKPHPNIDGGWAWMMVLSSFFVHILIMGSQMALGVLNVEWLEEFHQSRGLTAWVSSLSMGITLIVGPFIGLFINTCGCRQTAIIGGLVNSLGWVLSAYAANVHYLFITFGVAAGLGSGMAYLPAVVMVGRYFQKRRALAQGLSTTGTGFGTFLMTVLLKYLCAEYGWRNAMLIQGAVSLNLCVCGALMRPLSPGKNPNDPGEKDVRGLPAHSTESVKSTGQQGRTEEKDGGLGNEETLCDLQAQECPDQAGHRKNMCALRILKTVSWLTMRVRKGFEDWYSGYFGTASLFTNRMFVAFIFWALFAYSSFVIPFIHLPEIVNLYNLSEQNDVFPLTSIIAIVHIFGKVILGVIADLPCISVWNVFLLANFTLVLSIFILPLMHTYAGLAVICALIGFSSGYFSLMPVVTEDLVGIEHLANAYGIIICANGISALLGPPFAGKLSEVLRAQSACTYGALCYKVPDKEEGF

SEQ ID NO: 785 - protein, 345 aa, Homo sapiens
MPTGHLGSPLALALLPVATNRPAVQWSCTAPQPTSLAAGTIGAARRRPMASSARRARGSRRYSWVSEEPLNYVGWQDGEPQQPGGCTYVDVDGAWRTTSCDTKLQGAVCGVSSGPPPPRRISYHGSCPQGLADSAWIPFREHCYSFHMELLLGHKEARQRCQRAGGAVLSILDEMENVFVWEHLQSYEGQSRGAWLGMNFNPKGGTLVWQDNTAVNYSNWGPPGLGPSMLSHNSCYWIQSNSGLWRPGACTNITMGVVCKLPRAEQSSFSPSALPENPAALVVVLMAVLLLLALLTAALILYRRRQSIERGAFEGARYSRSSSSPTEATEKNILVSDMEMNEQQE

SEQ ID NO: 786 - protein, 188 aa, Homo sapiens
MPGGPGVLQALPATIFLLFLLSAVYLGPGCQALWMHKVPASLMVSLGEDAHFQCPHNSSNNANVTWWRVLHGNYTWPPEFLGPGEDPNEPPPRPFLDMGEGTKNRIITAEGIILLFCAVVPGTLLLFRKRWQNEKLGLDAGDEYEDENLYEGLNLDDCSMYEDISRGLQGTYQDVGSLNIGDVQLEKP

SEQ ID NO: 787 - protein, 723 aa, Homo sapiens
MGLADASGPRDTQALLSATQAMDLRRRDYHMERPLLNQEHLEELGRWGSAPRTHQWRTWLQCSRARAYALLLQHLPVLVWLPRYPVRDWLLGDLLSGLSVAIMQLPQGLAYALLAGLPPVFGLYSSFYPVFIYFLFGTSRHISVATPGPLPLLTAPGRPTGGAGPDPLRLRGHLPVRTSCPRLYHSCSCAGLRLTAQVCVWPPSEQPLWATVPHLLLEVCWKLPQSKVGTVVTAAVAGVVLVVVKLLNDKLQQQLPMPIPGELLTLIGATGISYGMGLKHRFEVDVVGNIPAGLVPPVAPNTQLFSKLVGSAFTIAVVGFAIAISLGKIFALRHGYRVDSNQELVALGLSNLIGGIFQCFPVSCSMSRSLVQESTGGNSQVAGAISSLFILLIIVKLGELFHDLPKAVLAAIIIVNLKGMLRQLSDMRSLWKANRADLLIWLVTFTATILLNLDLGLVVAVIFSLLLVVVRTQMPHYSVLGQVPDTDIYRDVAEYSEAKEVRGVKVFRSSATVYFANAEFYSDALKQRCGVDVDFLISQKKKLLKKQEQLKLKQLQKEEKLRKQAASPKGASVSINVNTSLEDMRSNNVEDCKMMQVSSGDKMEDATANGQEDSKAPDGSTLKALGLPQPDFHSLILDLGALSFVDTVCLKSLKNIFHDFREIEVEVYMAACHSPVVSQLEAGHFFDASITKKHLFASVHDAVTFALQHPRPVPDSPVSVTRL

SEQ ID NO: 788 - protein, 115 aa, Homo sapiens
MSVGVSTSAPLSPTSGTSVGMSTFSIMDYVVFVLLLVLSLAIGLYHACRGWGRHTVGELLMADRKMGCLPVALSLLATFQSAVAILGVPSEIYRFGTQYWFLGCCYFLGLLIPAH

SEQ ID NO: 789 - protein, 223 aa, Homo sapiens
MTQEPFREELAYDRMPTLERGRQDPASYAPDAKPSDLQLSKRLPPCFSHKTWVFSVLMGCIPSAIVSFTVSRRNANVIPNFQILFVSTFAVTTTCLIWFGCKLVLNPSAININFNLILLLLLELLMAATVIIAARSSEEDCKKKKGSMSDSANILDEVPFPARVLKSYSVVEVIAGISAVLGGIIALNVDDSVSGPHLSVTFFWILVACFPSAIASHVAAECP

SEQ ID NO: 790 - protein, 977 aa, Homo sapiens
MPARRLLLLLTLLLPGLGIFGSTSTVTLPETLLFVSTLDGSLHAVSKRTGSIKWTLKEDPVLQVPTHVEEPAFLPDPNDGSLYTLGSKNNEGLTKLPFTIPELVQASPCRSSDGILYMGKKQDIWYVIDLLTGEKQQTLSSAFADSLCPSTSLLYLGRTEYTITMYDTKTRELRWNATYFDYAASLPEDDVDYKMSHFVSNGDGLVVTVDSESGDVLWIQNYASPVVAFYVWQREGLRKVMHINVAVETLRYLTFMSGEVGRITKWKYPFPKETEAKSKLTPTLYVGKYSTSLYASPSMVHEGVAVVPRGSTLPLLEGPQTDGVTIGDKGECVITPSTDVKFDPGLKSKNKLNYLRNYWLLIGHHETPLSASTKMLERFPNNLPKHRENVIPADSEKKSFEEVINLVDQTSENAPTTVSRDVEEKPAHAPARPEAPVDSMLKDMATIILSTFLLIGWVAFIITYPLSMHQQQQLQHQQFQKELEKIQLLQQQQQQLPFHPPGDTAQDGELLDTSGPYSESSGTSSPSTSPRASNHSLCSGSSASKAGSSPSLEQDDGDEETSVVIVGKISFCPKDVLGHGAEGTIVYRGMFDNRDVAVKRILPECFSFADREVQLLRESDEHPNVIRYFCTEKDRQFQYIAIELCAATLQEYVEQKDFAHLGLEPITLLQQTTSGLAHLHSLNIVHRDLKPHNILISMPNAHGKIKAMISDFGLCKKLAVGRHSFSRRSGVPGTEGWIAPEMLSEDCKENPTYTVDIFSAGCVFYYVISEGSHPFGKSLQRQANILLGACSLDCLHPEKHEDVIARELIEKMIAMDPQKRPSAKHVLKHPFFWSLEKQLQFFQDVSDRIEKESLDGPIVKQLERGGRAVVKMDWRENITVPLQTDLRKFRTYKGGSVRDLLRAMRNKKHHYRELPAEVRETLGSLPDDFVCYFTSRFPHLLAHTYRAMELCSHERLFQPYYFHEPPEPQPPVTPDAL

SEQ ID NO: 791 - protein, 325 aa, Homo sapiens
MVRRDRLRRMREWWVQVGLLAVPLLAAYLHIPPPQLSPALHSWKSSGKFFTYKGLRIFYQDSVGVVGSPEIVVLLHGFPTSSYDWYKIWEGLTLRFHRVIALDFLGFGFSDKPASIVEALLRHLGLQNRRINLLSHDYGDIVAQELLYRYKQNRSGRLTIKSLCLSNGGIFPETHRPLLLQKLLKDGGVLSPILTRLMNFFVFSRGLTPVFGPYTRPSESELWDMWAGIRNNDGNLVIDSLLQYINQRKKFRRRWVGALASVTIPIHFIYGPLDPVNPYPEFLELYRKTLPRSTVSILDDHISHYPQLEDPMGFLNAYMGFINSF

SEQ ID NO: 792 - protein, 423 aa, Homo sapiens
MVFAFWKVFLILSCLAGQVSVVQVTIPDGFVNVTVGSNVTLICIYTTTVASREQLSIQWSFFHKKEMEPISHSSCLSTEGMEEKAVSQCLKMTHARDARGRCSWTSEIYFSQGGQAVAIGQFKDRITGSNDPGNASITISHMQPADSGIYICDVNNPPDFLGQNQGILNVSVLVKPSKPLCSVQGRPETGHTISLSCLSALGTPSPVYYWHKLEGRDIVPVKENFNPTTGILVIGNLTNFEQGYYQCTAINRLGNSSCEIDLTSSHPEVGIIVGALIGSLVGAAIIISVVCFARNKAKAKAKERNSKTIAELEPMTKINPRGESEAMPREDATQLEVTLPSSIHETGPDTIQEPDYEPKPTQEPAPEPAPGSEPMAVPDLDIELELEPETQSELEPEPEPEPESEPGVVVEPLSEDEKGVVKA

SEQ ID NO: 793 - protein, 140 aa, Homo sapiens
MGRVSGLVPSRFLTLLAHLVVVITLFWSRDSNIQACLPLTFTPEEYDKQDIQLVAALSVTLGLFAVELAGFLSGVSMFNSTQSLISIGAHCSASVALSFFIFERWECTTYWYIFVFCSALPAVTEMALFVTVFGLKKKPF

SEQ ID NO: 794 - protein, 81 aa, Homo sapiens
MMDQARSAFSNLFGGEPLSYTRFSLARQVDGDNSHVEMKLAVDEEENADNNTKANVTKPKRCSGSICYGTIAVIVFFLIGC

SEQ ID NO: 795 - protein, 58 aa, Homo sapiens
MSVGVSTSAPLSPTSGTSVGMSTFSIMDYVVFVLLLVLSLAIGLYHACRGWGRHTVGE

SEQ ID NO: 796 - protein, 279 aa, Homo sapiens
MELQDPKMNGALPSDAVGYRQEREGFLPSRGPAPGSKPVQFMDFEGKTSFGMSVFNLSNAIMGSGILGLAYAMAHTGVIFFLALLLCIALLSSYSIHLLLTCAGIAGIRAYEQLGQRAFGPAGKVVVATVICLHNVGAMSSYLFIIKSELPLVIGTFLYMDPEGDWFLKGNLLIIIVSVLIILPLALMKHLGYLGYTSGLSLTCMLFFLVSVIYKKFQLGCAIGHNETAMESEALVGLPSQGLNSSCEAQMFTVDSQMSYTVPIMAFAFVCHPEVLPIY

SEQ ID NO: 797 - protein, 177 aa, Homo sapiens
MAAPVLLRVSVPRWERVARYAVCAAGILLSIYAYHVEREKERDPEHRALCDLGPWVKCSAALASRHDSKRCGGFDPHDVLHHVGRGVPVPGLHSVLCAEGVLHHLHRHVRAELPSSHYQLQTTSLLERGLEAAAATQAGLTPDRLHPNSLKPLSIQFILQQVFIIIIIIIIHNRHFP

SEQ ID NO: 798 - protein, 125 aa, Homo sapiens
MGMVVLLMGLVFASVYIYRYFFLAQLARDNFFRCGVLYEDSLSSQVRTQMELEEDVKIYLDENYERINVPVPQFGGGDPADIIHDFQRGLTAYHDISLDKCYVIELNTTIVLPPRNFWELLMNVK

SEQ ID NO: 799 - protein, 884 aa, Homo sapiens
MTRHADRIISLFTFAVGVNICLGFTAHRIKRAEGWEEGPPTVLSDSPWTNISGSCKGRCFELQEAGPPDCRCDNLCKSYTSCCHDFDELCLKTARGWECTKDRCGEVRNEENACHCSEDCLARGDCCTNYQVVCKGESHWVDDDCEEIKAAECPAGFVRPPLIIFSVDGFRASYMKKGSKVMPNIEKLRSCGTHSPYMRPVYPTKTFPNLYTLATGLYPESHGIVGNSMYDPVFDATFHLRGREKFNHRWWGGQPLWITATKQGVKAGTFFWSVVIPHERRILTILQWLTLPDHERPSVYAFYSEQPDFSGHKYGPFGPEMTNPLREIDKIVGQLMDGLKQLKLHRCVNVIFVGDHGMEDVTCDRTEFLSNYLTNVDDITLVPGTLGRIRSKFSNNAKYDPKAIIANLTCKKPDQHFKPYLKQHLPKRLHYANNRRIEDIHLLVERRWHVARKPLDVYKKPSGKCFFQGDHGFDNKVNSMQTVFVGYGSTFKYKTKVPPFENIELYNVMCDLLGLKPAPNNGTHGSLNHLLRTNTFRPTMPEEVTRPNYPGIMYLQSDFDLGCTCDDKVEPKNKLDELNKRLHTKGSTEAETRKFRGSRNENKENINGNFEPRKERHLLYGRPAVLYRTRYDILYHTDFESGYSEIFLMPLWTSYTVSKQAEVSSVPDHLTSCVRPDVRVSPSFSQNCLAYKNDKQMSYGFLFPPYLSSSPEAKYDAFLVTNMVPMYPAFKRVWNYFQRVLVKKYASERNGVNVISGPIFDYDYDGLHDTEDKIKQYVEGSSIPVPTHYYSIITSCLDFTQPADKCDGPLSVSSFILPHRPDNEESCNSSEDESKWVEELMKMHTARVRDIEHLTSLDFFRKTSRSYPEILTLKTYLHTYESEI

SEQ ID NO: 800 - protein, 807 aa, Homo sapiens
MSENSSDSDSSCGWTVISHEGSDIEMLNSVTPTDSCEPAPECSSLEQEELQALQIEQGESSQNGTVLMEETAYPALEETSSTIEAEEQKIPEDSIYIGTASDDSDIVTLEPPKLEEIGNQEVVIVEEAQSSEDFNMGSSSSSQYTFCQPETVFSSQPSDDESSSDETSNQPSPAFRRRRARKKTVSASESEDRLVAEQETEPSKELSKRQFSSGLNKCVILALVIAISMGFGHFYGTIQIQKRQQLVRKIHEDELNDMKDYLSQCQQEQESFIDYKSLKENLARCWTLTEAEKMSFETQKTNLATENQYLRVSLEKEEKALSSLQEELNKLREQIRILEDKGTSTELVKENQKLKQHLEEEKQKKHSFLSQRETLLTEAKMLKRELERERLVTTALRGELQQLSGSQLHGKSDSPNVYTEKKEIAILRERLTELERKLTFEQQRSDLWERLYVEAKDQNGKQGTDGKKKGGRGSHRAKNKSKETFLGSVKETFDAMKNSTKEFVRHHKEKIKQAKEAVKENLKKFSDSVKSTFRHFKDTTKNIFDEKGNKRFGATKEAAEKPRTVFSDYLHPQYKAPTENHHNRGPTMQNDGRKEKPVHFKEFRKNTNSKKCSPGHDCRENSHSFRKACSGVFDCAQQESMSLFNTVVNPIRMDEFRQIIQRYMLKELDTFCHWNELDQFINKFFLNGVFIHDQKLFTDFVNDVKDYLRNMKEYEVDNDGVFEKLDEYIYRHFFGHTFSPPYGPSRPDKKQRMVNIENSRHRKQEQKHLQPQPYKREGKWHKYGRTNGRQMANLEIELGQLPFDPQY

SEQ ID NO: 801 - protein, 142 aa, Homo sapiens
DVDQQSSSSRLRSAVSRAGSLLWMVATSPGRLFRLLYWWAGTTWYRLTTAASLLDVFVLTRRFSSLKTFLWFLLPLLLLTCLTYGAWYFYPYGLQTFHPALVSWWAAKDSRRPDEGWEARDSSPHFQAGFQERTKATRPLRP

SEQ ID NO: 802 - protein, 193 aa, Homo sapiens
MSVGVSTSAPLSPTSGTSVGMSTFSIMDYVVFVLLLVLSLAIGLYHACRGWGRHTVGELLMADRKMGCLPVALSLLATFQSAVAILGVPSEIYRFGTQYWFLGCCYFLGLLIPAHIFIPVFYRLHLTSAYEYLELRFNKTVRVCGTVTFIFQMVIYMGVVLYAPSLALNAVTGFDLWLSVLALGIVCTVYTAL

SEQ ID NO: 803 - protein, 2732 aa, Homo sapiens
MEQTDCKPYQPLPKVKHEMDLAYTSSSDESEDGRKPRQSYNSRETLHEYNQELRMNYNSQSRKRKEVEKSTQEMEFCETSHTLCSGYQTDMHSVSRHGYQLEMGSDVDTETEGAASPDHALRMWIRGMKSEHSSCLSSRANSALSLTDTDHERKSDGENGFKFSPVCCDMEAQAGSTQDVQSSPHNQFTFRPLPPPPPPPHACTCARKPPPAADSLQRRSMTTRSQPSPAAPAPPTSTQDSVHLHNSWVLNSNIPLETRHFLFKHGSGSSAIFSAASQNYPLTSNTVYSPPPRPLPRSTFSRPAFTFNKPYRCCNWKCTALSATAITVTLALLLAYVIAVHLFGLTWQLQPVEGELYANGVSKGNRGTESMDTTYSPIGGKVSDKSEKKVFQKGRAIDTGEVDIGAQVMQTIPPGLFWRFQITIHHPIYLKFNISLAKDSLLGIYGRRNIPPTHTQFDFVKLMDGKQLVKQDSKGSDDTQHSPRNLILTSLQETGFIEYMDQGPWYLAFYNDGKKMEQVFVLTTAIEIMDDCSTNCNGNGECISGHCHCFPGFLGPDCARDSCPVLCGGNGEYEKGHCVCRHGWKGPECDVPEEQCIDPTCFGHGTCIMGVCICVPGYKGEICEEEDCLDPMCSNHGICVKGECHCSTGWGGVNCETPLPVCQEQCSGHGTFLLDAGVCSCDPKWTGSDCSTELCTMECGSHGVCSRGICQCEEGWVGPTCEERSCHSHCTEHGQCKDGKCECSPGWEGDHCTIAHYLDAVRDGCPGLCFGNGRCTLDQNGWHCVCQVGWSGTGCNVVMEMLCGDNLDNDGDGLTDCVDPDCCQQSNCYISPLCQGSPDPLDLIQQSQTLFSQHTSRLFYDRIKFLIGKDSTHVIPPEVSFDSRRACVIRGQVVAIDGTPLVGVNVSFLHHSDYGFTISRQDGSFDLVAIGGISVILIFDRSPFLPEKRTLWLPWNQFIVVEKVTMQRVVSDPPSCDISNFISPNPIVLPSPLTSFGGSCPERGTIVPELQVVQEEIPIPSSFVRLSYLSSRTPGYKTLLRILLTHSTIPVGMIKVHLTVAVEGRLTQKWFPAAINLVYTFAWNKTDIYGQKVWGLAEALVSVGYEYETCPDFILWEQRTVVLQGFEMDASNLGGWSLNKHHILNPQSGIIHKGNGENMFISQQPPVISTIMGNGHQRSVACTNCNGPAHNNKLFAPVALASGPDGSVYVGDFNFVRRIFPSGNSVSILELRNRDTRHSTSPAHKYYLAMDPVSESLYLSDTNTRKVYKLKSLVETKDLSKNFEVVAGTGDQCLPFDQSHCGDGGRASEASLNSPRGITVDRHGFIYFVDGTMIRKIDENAVITTVIGSNGLTSTQPLSCDSGMDITQVRLEWPTDLAVNPMDNSLYVLDNNIVLQISENRRVRIIAGRPIHCQVPGIDHFLVSKVAIHSTLESARAISVSHSGLLFIAETDERKVNRIQQVTTNGEIYIIAGAPTDCDCKIDPNCDCFSGDGGYAKDAKMKAPSSLAVSPDGTLYVADLGNVRIRTISRNQAHLNDMNIYEIASPADQELYQFTVNGTHLHTLNLITRDYVYNFTYNSEGDLGAITSSNGNSVHIRRDAGGMPLWLVVPGGQVYWLTISSNGVLKRVSAQGYNLALMTYPGNTGLLATKSNENGWTTVYEYDPEGHLTNATFPTGEVSSFHSDLEKLTKVELDTSNRENVLMSTNLTATSTIYILKQENTQSTYRVNPDGSLRVTFASGMEIGLSSEPHILAGAVNPTLGKCNISLPGEHNANLIEWRQRKEQNKGNVSAFERRLRAHNRNLLSIDFDHITRTGKIYDDHRKFTLRILYDQTGRPILWSPVSRYNEVNITYSPSGLVTFIQRGTWNEKMEYDQSGKIISRTWADGKIWSYTYLEKSVMLLLHSQRRYIFEYDQPDCLLSVTMPSMVRHSLQTMLSVGYYRNIYTPPDSSTSFIQDYSRDGRLLQTLHLGTGRRVLYKYTKQARLSEVLYDTTQVTLTYEESSGVIKTIHLMHDGFICTIRYRQTGPLIGRQIFRFSEEGLVNARFDYSYNNFRVTSMQAVINETPLPIDLYRYVDVSGRTEQFGKFSVINYDLNQVITTTVMKHTKIFSANGQVIEVQYEILKAIAYWMTIQYDNVGRMVICDIRVGVDANITRYFYEYDADGQLQTVSVNDKTQWRYSYDLNGNINLLSHGKSARLTPLRYDLRDRITRLGEIQYKMDEDGFLRQRGNDIFEYNSNGLLQKAYNKASGWTVQYYYDGLGRRVASKSSLGQHLQFFYADLTNPIRVTHLYNHTSSEITSLYYDLQGHLIAMELSSGEEYYVACDNTGTPLAVFSSRGQVIKEILYTPYGDIYHDTYPDFQVIIGFHGGLYDFLTKLVHLGQRDYDVVAGRWTTPNHHIWKQLNLLPKPFNLYSFENNYPVGKIQDVAKYTTDIRSWLELFGFQLHNVLPGFPKPELENLELTYELLRLQTKTQEWDPGKTILGIQCELQKQLRNFISLDQLPMTPRYNDGRCLEGGKQPRFAAVPSVFGKGIKFAIKDGIVTADIIGVANEDSRRLAAILNNAHYLENLHFTIEGRDTHYFIKLGSLEEDLVLIGNTGGRRILENGVNVTVSQMTSVLNGRTRRFADIQLQHGALCFNIRYGTTVEEEKNHVLEIARQRAVAQAWTKEQRRLQEGEEGIRAWTEGEKQQLLSTGRVQGYDGYFVLSVEQYLELSDSANNIHFMRQSEIGRR

SEQ ID NO: 804 - protein, 218 aa, Homo sapiens
MELQDPKMNGALPSDAVGYRQEREGFLPSRGPAPGSKPVQFMDFEGKTSFGMSVFNLSNAIMGSGILGLAYAMAHTGVIFFLALLLCIALLSSYSIHLLLTCAGIAGIRAYEQLGQRAFGPAGKVVVATVICLHNVGAMSSYLFIIKSELPLVIGTFLYMDPEGDWFLKGNLLIIIVSVLIILPLALMKHLGYLGYTSGLSLTCMLFFLVSVIYKKFQ

SEQ ID NO: 805 - protein, 78 aa, Homo sapiens
MSVGVSTSAPLSPTSGTSVGMSTFSIMDYVVFVLLLVLSLAIGLYHACRGWGRHTVGELLMADRKMGCLPVALSLLAT

SEQ ID NO: 806 - protein, 979 aa, Homo sapiens
MELAALCRWGLLLALLPPGAASTQDNYLSTDVGSCTLVCPLHNQEVTAEDGTQRCEKCSKPCARVCYGLGMEHLREVRAVTSANIQEFAGCKKIFGSLAFLPESFDGDPASNTAPLQPEQLQVFETLEEITGYLYISAWPDSLPDLSVFQNLQVIRGRILHNGAYSLTLQGLGISWLGLRSLRELGSGLALIHHNTHLCFVHTVPWDQLFRNPHQALLHTANRPEDECVGEGLACHQLCARGHCWGPGPTQCVNCSQFLRGQECVEECRVLQGLPREYVNARHCLPCHPECQPQNGSVTCFGPEADQCVACAHYKDPPFCVARCPSGVKPDLSYMPIWKFPDEEGACQPCPINCTHSCVDLDDKGCPAEQRASPLTSIISAVVGILLVVVLGVVFGILIKRRQQKIRKYTMRRLLQETELVEPLTPSGAMPNQAQMRILKETELRKVKVLGSGAFGTVYKGIWIPDGENVKIPVAIKVLRENTSPKANKEILDEAYVMAGVGSPYVSRLLGICLTSTVQLVTQLMPYGCLLDHVRENRGRLGSQDLLNWCMQIAKGMSYLEDVRLVHRDLAARNVLVKSPNHVKITDFGLARLLDIDETEYHADGGKVPIKWMALESILRRRFTHQSDVWSYGVTVWELMTFGAKPYDGIPAREIPDLLEKGERLPQPPICTIDVYMIMVKCWMIDSECRPRFRELVSEFSRMARDPQRFVVIQNEDLGPASPLDSTFYRSLLEDDDMGDLVDAEEYLVPQQGFFCPDPAPGAGGMVHHRHRSSSTRSGGGDLTLGLEPSEEEAPRSPLAPSEGAGSDVFDGDLGMGAAKGLQSLPTHDPSPLQRYSEDPTVPLPSETDGYVAPLTCSPQPEYVNQPDVRPQPPSPREGPLPAARPAGATLERPKTLSPGKNGVVKDVFAFGGAVENPEYLTPQGGAAPQPHPPPAFSPAFDNLYYWDQDPPERGAPPSTFKGTPTAENPEYLGLDVPV

SEQ ID NO: 807 - protein, 278 aa, Homo sapiens
MDFWLWPLYFLPEYEPSWEEQPMPETPKWFHLPYLFQMPAYASSSKFVTRVTTPAQRGKVPPVHHSSPTTQITHRPRVSRASSVAGDKPRTFLPSTTASKISALEGLLKPQTPSYNHHTRLHRQRALDYGSQSGREGQGFHILIPTILGLFLLALLGLVVKRAVERRKALSRRARRLAVRMRALESSQRPRGSPRPRSQNNIYSACPRRARGADAAGTGEAPVPGPGAPLPPAPLQVSESPWLHAPSLKTSCEYVSLYHQPAAMMEDSDSDDYINVPA

SEQ ID NO: 808 - protein, 1368 aa, Homo sapiens
MQGPPLLTAAHLLCVCTAALAVAPGPRFLVTAPGIIRPGGNVTIGVELLEHCPSQVTVKAELLKTASNLTVSVLEAEGVFEKGSFKTLTLPSDPKSNLIQQWLSQQSDLGVISKTFQLSSHPILGDWSIQVQVNDQTYYQSFQVSEYVLPKFEVTLQTPLYCSMNSKHLNGTITAKYTYGKPVKGDVTLTFLPLSFWGKKKNITKTFKINGSANFSFNDEEMKNVMDSSNGLSEYLDLSSPGPVEILTTVTESVTGISRNVSTNVFFKQHDYIIEFFDYTTVLKPSLNFTATVKVTRADGNQLTLEERRNNVVITVTQRNYTEYWSGSNSGNQKMEAVQKINYTVPQSGTFKIEFPILEDSSELQLKAYFLGSKSSMAVHSLFKSPSKTYIQLKTRDENIKVGSPFELVVSGNKRLKELSYMVVSRGQLVAVGKQNSTMFSLTPENSWTPKACVIVYYIEDDGEIISDVLKIPVQLVFKNKIKLYWSKVKAEPSEKVSLRISVTQPDSIVGIVAVDKSVNLMNASNDITMENVVHELELYNTGYYLGMFMNSFAVFQECGLWVLTDANLTKDYIDGVYDNAEYAERFMEENEGHIVDIHDFSLGSSPHVRKHFPETWIWLDTNMGYRIYQEFEVTVPDSITSWVATGFVISEDLGLGLTTTPVELQAFQPFFIFLNLPYSVIRGEEFALEITIFNYLKDATEVKVIIEKSDKFDILMTSNEINATGHQQTLLVPSEDGATVLFPIRPTHLGEIPITVTALSPTASDAVTQMILVKAEGIEKSYSQSILLDLTDNRLQSTLKTLSFSFPPNTVTGSERVQITAIGDVLGPSINGLASLIRMPYGCGEQNMINFAPNIYILDYLTKKKQLTDNLKEKALSFMRQGYQRELLYQREDGSFSAFGNYDPSGSTWLSAFVLRCFLEADPYIDIDQNVLHRTYTWLKGHQKSNGEFWDPGRVIHSELQGGNKSPVTLTAYIVTSLLGYRKYQPNIDVQESIHFLESEFSRGISDNYTLALITYALSSVGSPKAKEALNMLTWRAEQEGGMQFWVSSESKLSDSWQPRSLDIEVAAYALLSHFLQFQTSEGIPIMRWLSRQRNSLGGFASTQDTTVALKALSEFAALMNTERTNIQVTVTGPSSPSPVKFLIDTHNRLLLQTAELAVVQPTAVNISANGFGFAICQLNVVYNVKASGSSRRRRSIQNQEAFDLDVAVKENKDDLNHVDLNVCTSFSGPGRSGMALMEVNLLSGFMVPSEAISLSETVKKVEYDHGKLNLYLDSVNETQFCVNIPAVRNFKVSNTQDASVSIVDYYEPRRQAVRSYNSEVKLSSCDLCSDVQGCRPCEDGASGSHHHSSVIFIFCFKLLYFMELWL

SEQ ID NO: 809 - protein, 1054 aa, Homo sapiens
MEIKDQGAQMEPLLPTRNDEEAVVDRGGTRSILKTHFEKEDLEGHRTLFIGVHVPLGGRKSHRRHRHRGHKHRKRDRERDSGLEDGRESPSFDTPSQRVQFILGTEDDDEEHIPHDLFTELDEICWREGEDAEWRETARWLKFEEDVEDGGERWSKPYVATLSLHSLFELRSCILNGTVLLDMHANTLEEIADMVLDQQVSSGQLNEDVRHRVHEALMKQHHHQNQKKLTNRIPIVRSFADIGKKQSEPNSMDKNAGQVVSPQSAPACVENKNDVSRENSTVDFSKGLGGQQKGHTSPCGMKQRHEKGPPHQQEREVDLHFMKKIPPGAEASNILVGELEFLDRTVVAFVRLSPAVLLQGLAEVPIPTRFLFILLGPLGKGQQYHEIGRSIATLMTDEVFHDVAYKAKDRNDLVSGIDEFLDQVTVLPPGEWDPSIRIEPPKNVPSQEKRKIPAVPNGTAAHGEAEPHGGHSGPELQRTGRIFGGLILDIKRKAPYFWSDFRDAFSLQCLASFLFLYCACMSPVITFGGLLGEATEGRISAIESLFGASMTGIAYSLFGGQPLTILGSTGPVLVFEKILFKFCKEYGLSYLSLRASIGLWTATLCIILVATDASSLVCYITRFTEEAFASLICIIFIYEALEKLFELSEAYPINMHNDLELLTQYSCNCVEPHNPSNGTLKEWRESNISASDIIWENLTVSECKSLHGEYVGRACGHDHPYVPDVLFWSVILFFSTVTLSATLKQFKTSRYFPTKVRSIVSDFAVFLTILCMVLIDYAIGIPSPKLQVPSVFKPTRDDRGWFVTPLGPNPWWTVIAAIIPALLCTILIFMDQQITAVIINRKEHKLKKGCGYHLDLLMVAVMLGVCSIMGLPWFVAATVLSITHVNSLKLESECSAPGEQPKFLGIREQRVTGLMIFILMGSSVFMTSILKFIPMPVLYGVFLYMGASSLKGIQFFDRIKLFWMPAKHQPDFIYLRHVPLRKVHLFTIIQMSCLGLLWIIKVSRAAIVFPMMVLALVFVRKLMDLLFTKRELSWLDDLMPESKKKKLEDAEKEH

SEQ ID NO: 810 - protein, 217 aa, Homo sapiens
ALNDSMINETARDAARVQVASTLSVLVGLFQVGLGLIHFGFVVTYLSEPLVRGYTTAAAVQVFVSQLKYVFGLHLSSHSGPLSLIYTVLEVCWKLPQSKVGTVVTAAVAGVVLVVVKLLNDKLQQQLPMPIPGELLTLIGATGISYGMGLKHRFEVDVVGNIPAGGPQHPAVLKARGQRLHHRCGWVCHCHLTGEDLRPEARLPGGQQPGAGGPGPQ

SEQ ID NO: 811 - protein, 1144 aa, Homo sapiens
MAVPARTCGASRPGPARTARPWPGCGPHPGPGTRRPTSGPPRPLWLLLPLLPLLAAPGASAYSFPQQHTMQHWARRLEQEVDGVMRIFGGVQQLREIYKDNRNLFEVQENEPQKLVEKVAGDIESLLDRKVQALKRLADAAENFQKAHRWQDNIKEEDIVYYDAKADAELDDPESEDVERGSKASTLRLDFIEDPNFKNKVNYSYAAVQIPTDIYKGSTVILNELNWTEALENVFMENRRQDPTLLWQVFGSATGVTRYYPATPWRAPKKIDLYDVRRRPWYIQGASSPKDMVIIVDVSGSVSGLTLKLMKTSVCEMLDTLSDDDYVNVASFNEKAQPVSCFTHLVQANVRNKKVFKEAVQGMVAKGTTGYKAGFEYAFDQLQNSNITRANCNKMIMMFTDGGEDRVQDVFEKYNWPNRTVRVFTFSVGQHNYDVTPLQWMACANKGYYFEIPSIGAIRINTQEYLDVLGRPMVLAGKEAKQVQWTNVYEDALGLGLVVTGTLPVFNLTQDGPGEKKNQLILGVMGIDVALNDIKRLTPNYTLGANGYVFAIDLNGYVLLHPNLKPQTTNFREPVTLDFLDAELEDENKEEIRRSMIDGNKGHKQIRTLVKSLDERYIDEVTRNYTWVPIRSTNYSLGLVLPPYSTFYLQANLSDQILQVKYFEFLLPSSFESEGHVFIAPREYCKDLNASDNNTEFLKNFIELMEKVTPDSKQCNNFLLHNLILDTGITQQLVERVWRDQDLNTYSLLAVFAATDGGITRVFPNKAAEDWTENPEPFNASFYRRSLDNHGYVFKPPHQDALLRPLELENDTVGILVSTAVELSLGRRTLRPAVVGVKLDLEAWAEKFKVLASNRTHQDQPQKQCGPNSHCEMDCEVNNEDLLCVLIDDGGFLVLSNQNHQWDQVGRFFSEVDANLMLALYNNSFYTRKESYDYQAACAPQPPGNLGAAPRGVFVPTVADFLNLAWWTSAAAWSLFQQLLYGLIYHSWFQADPAEAEGSPETRESSCVMKQTQYYFGSVNASYNAIIDCGNCSRLFHAQRLTNTNLLFVVAEKPLCSQCEAGRLLQKETHSDGPEQCELVQRPRYRRGPHICFDYNATEDTSDCGRGASFPPSLGVLVSLQLLLLLGLPPRPQPQVLVHASRRL

SEQ ID NO: 812 - protein, 758 aa, Homo sapiens
MGLADASGPRDTQALLSATQAMDLRRRDYHMERPLLNQEHLEELGRWGSAPRTHQWRTWLQCSRARAYALLLQHLPVLVWLPRYPVRDWLLGDLLSGLSVAIMQLPQGLAYALLAGLPPVFGLYSSFYPVFIYFLFGTSRHISVGTFAVMSVMVGSVTESLAPQALNDSMINETARDAARVQVASTLSVLVGLFQVGLGLIHFGFVVTYLSEPLVRGYTTAAAVQVFVSQLKYVFGLHLSSHSGPLSLIYTVLEVCWKLPQSKVGTVVTAAVAGVVLVVVKLLNDKLQQQLPMPIPGELLTLIGATGISYGMGLKHRFEVDVVGNIPAGLVPPVAPNTQLFSKLVGSAFTIAVVGFAIAISLGKIFALRHGYRVDSNQELVALGLSNLIGGIFQCFPVSCSMSRSLVQESTGGNSQVAGAISSLFILLIIVKLGELFHDLPKAVLAAIIIVNLKGMLRQLSDMRSLWKANRADLLIWLVTFTATILLNLDLGLVVAVIFSLLLVVVRTQMPHYSVLGQVPDTDIYRDVAEYSEAKEVRGVKVFRSSATVYFANAEFYSDALKQRCGVDVDFLISQKKKLLKKQEQLKLKQLQKEEKLRKQAASPKGASVSINVNTSLEDMRSNNVEDCKMMVSSGDKMEDATANGQEDSKAPDGSTLKALGLPQPDFHSLILDLGALSFVDTVCLKSLKNIFHDFREIEVEVYMAACHSPVVSQLEAGHFFDASITKKHLFASVHDAVTFALQHPRPVPDSPVSVTRL

SEQ ID NO: 813 - protein, 35 aa, Homo sapiens
MGRVSGLVPSRFLTLLAHLVVVITLFWSRCPSSCH

SEQ ID NO: 814 - protein, 1022 aa, Homo sapiens
MATEGAAQLGNRVAGMVCSLWVLLLVSSVLALEEVLLDTTGETSEIGWLTYPPGGWDEVSVLDDQRRLTRTFEACHVAGAPPGTGQDNWLQTHFVERRGAQRAHIRLHFSVRACSSLGVSGGTCRETFTLYYRQAEEPDSPDSVSSWHLKRWTKVDTIAADESFPSSSSSSSSSSSSAAWAVGPHGAGQRAGLQLNVKERSFGPLTQRGFYVAFQDTGACLALVAVRLFSYTCPAVLRSFASFPETQASGAGGASLVAAVGTCVAHAEPEEDGVGGQAGGSPPRLHCNGEGKWMVAVGGCRCQPGYQPARGDKACQACPRGLYKASAGNAPCSPCPARSHAPNPAAPVCPCLEGFYRASSDPPEAPCTGPPSAPQELWFEVQGSALMLHWRLPRELGGRGDLLFNVVCKECEGRQEPASGGGGTCHRCRDEVHFDPRQRGLTESRVLVGGLRAHVPYILEVQAVNGVSELSPDPPQAAAINVSTSHEVPSAVPVVHQVSRASNSITVSWPQPDQTNGNILDYQLRYYDQAEDESHSFTLTSETNTATVTQLSPGHIYGFQVRARTAAGHGPYGGKVYFQTLPQGELSSQLPERLSLVIGSILGALAFLLLAAITVLAVVFQRKRRGTGYTEQLQQYSSPGLGVKYYIDPSTYEDPCQAIRELAREVDPAYIKIEEVIGTGSFGEVRQGRLQPRGRREQTVAIQALWAGGAESLQMTFLGRAAVLGQFQHPNILRLEGVVTKSRPLMVLTEFMELGPLDSFLRQREGQFSSLQLVAMQRGVAAAMQYLSSFAFVHRSLSAHSVLVNSHLVCKVARLGHSPQGPSCLLRWAAPEVIAHGKHTTSSDVWSFGILMWEVMSYGERPYWDMSEQEVLNAIEQEFRLPPPPGCPPGLHLLMLDTWQKDRARRPHFDQLVAAFDKMIRKPDTLQAGGDPGERPSQALLTPVALDFPCLDSPQAWLSAIGLECYQDNFSKFGLCTFSDVAQLSLEDLPALGITLAGHQKKLLHHIQLLQQHLRQQGSVEV

SEQ ID NO: 815 - protein, 172 aa, Homo sapiens
KQLDADVSPKPTIFLPSIAETKLQKAGTYLCLLEKFFPDVIKIHWQEKKSNTILGSQEGNTMKTNDTYMKFSWLTVPEKSLDKEHRCIVRHENNKNGVDQEIIFPPIKTDVITMDPKDNCSKDANDTLLLQLTNTSAYYMYLLLLLKSVVYFAIITCCLLRRTAFCCNGEKS

SEQ ID NO: 816 - protein, 241 aa, Homo sapiens
MTCSLGKVYISEIAYPAVRGLLGSCVQLMVVVGILLAYLAGWVLEWRWLAVLGCVPPSLMLLLMCFMPETPRFLLTQHRRQEAMAALRFLWGSEQGWEDPPIGAEQQLSGVNAVMFYAETIFEEAKFKDSSLASVVVGVIQVLFTAVAALIMDRAGRRLLLVLSGVVMVFSTSAFGAYFKLTQGGPGNSSHVAISAPVSAQPVDASVGLAWLAVGSMCLFIAGFAVGWGPIPWLLMSEIFP

SEQ ID NO: 817 - protein, 70 aa, Homo sapiens
MSPEEWTYLVVLLISIPIGFLFKKAGPGLKRWGAAAVGLGLTLFTCGPHTLHSLVTILGTWALIQAQPCW

SEQ ID NO: 818 - protein, 360 aa, Homo sapiens
MNSLLIGELSPEQPSFEPTKNKELTDEFRELRATVERMGLMKANHVFFLLYLLHILLLDGAAWLTLWVFGTSFLPFLLCAVLLSAVQAQAGWLQHDFGHLSVFSTSKWNHLLHHFVIGHLKGAPASWWNHMHFQHHAKPNCFRKDPDINMHPFFFALGKILSVELGKQKKKYMPYNHQHKYFFLIGPPALLPLYFQWYIFYFVIQRKKWVDLAWMITFYVRFFLTYVPLLGLKAFLGLFFIVRFLESNWFVWVTQMNHIPMHIDHDRNMDWVSTQLQATCNVHKSAFNDWFSGHLNFQIEHHLFPTMPRHNYHKVAPLVQSLCAKHGIEYQSKPLLSAFADIIHSLKESGQLWLDAYLHQ

SEQ ID NO: 819 - protein, 309 aa, Homo sapiens
MPHTLSLPYPQLLGLSVATMVTLTYFGAHFAVIRRASLEKNPYQAVHQWAFSAGLSLVGLLTLGAVLSAAATVREAQGLMAGGFLCFSLAFCAQVQVVFWRLHSPTQVEDAMLDTYDLVYEQAMKGTSHVRRQELAAIQDVFLCCGKKSPFSRLGSTEADLCQGEEAAREDCLQGIRSFLRTHQQVASSLTSIGLALTVSALLFSSFLWFAIRCGCSLDRKGKYTLTPRACGRQPQEPSLLRCSQGGPTHCLHSEAVAIGPRGCSGSLRWLQESDAAPLPLSCHLAAHRALQGRSRGGLSGCPERGLSD

SEQ ID NO: 820 - protein, 213 aa, Homo sapiens
MSEEVTYADLQFQNSSEMEKIPEIGKFGEKAPPAPSHVWRPAALFLTLLCLLLLIGLGVLASMFHVTLKIEMKKMNKLQNISEELQRNISLQLMSNMNISNKIRNLSTTLQTIATKLCRELYSKEQEHKCKPCPRRWIWHKDSCYFLSDDVQTWQESKMACAAQNASLLKINNKNALEFIKSQSRSYDYWLGLSPEEDSTRGMRVDNIINSSA

SEQ ID NO: 821 - protein, 492 aa, Homo sapiens
MATKPTEPVTILSLRKLSLGTAEPQVKEPKTFTVEDAVETIGFGRFHIALFLIMGSTGVVEAMEIMLIAVVSPVIRCEWQLENWQVALVTTMVFFGYMVFSILFGLLADRYGRWKILLISFLWGAYFSLLTSFAPSYIWFVFLRTMVGCGVSGHSQGLIIKTEFLPTKYRGYMLPLSQVFWLAGSLLIIGLASVIIPTIGWRWLIRVASIPGIILIVAFKFIPESARFNVSTGNTRAALATLERVAKMNRSVMPEGKLVEPVLEKRGRFADLLDAKYLRTTLQIWVIWLGISFAYYGVILASAELLERDLVCGSKSDSAVVVTGGDSGESQSPCYCHMFAPSDYRTMIISTIGEIALNPLNILGINFLGRRLSLSITMGCTALFFLLLNICTSSAGLIGFLFMLRALVAANFNTVYIYTAEVYPTTMRALGMGTSGSLCRIGAMVAPFISQVLMSASILGALCLFSSVCVVCAISAFTLPIETKGRALQQIK

SEQ ID NO: 822 - protein, 998 aa, Homo sapiens
MKVKEEKAGVGKLDHTNHRRRFPDQKECPPIHIGLPVPTYPQRKTDQKGHLSGLQKVHWGLRPDQPQQELTGPGSGASSQDSSMDLISRTRSPAAEQLQDILGEEDEAPNPTLFTEMDTLQHDGDQMEWKESARWIKFEEKVEEGGERWSKPHVSTLSLHSLFELRTCLQTGTVLLDLDSGSLPQIIDDVIEKQIEDGLLRPELRERVSYVLLRRHRHQTKKPIHRSLADIGKSVSTTNRSPARSPGAGPSLHHSTEDLRMRQSANYGRLCHAQSRSMNDISLTPNTDQRKNKFMKKIPKDSEASNVLVGEVDFLDQPFIAFVRLIQSAMLGGVTEVPVPTRFLFILLGPSGRAKSYNEIGRAIATLMVDDLFSDVAYKARNREDLIAGIDEFLDEVIVLPPGEWDPNIRIEPPKKVPSADKRKSVFSLAELGQMNGSVGGGGGAPGGGNGGGGGGGSGGGAGSGGAGGTSSGDDGEMPAMHEIGEELIWTGRFFGGLCLDIKRKLPWFPSDFYDGFHIQSISAILFIYLGCITNAITFGGLLGDATDNYQGVMESFLGTAMAGSLFCLFSGQPLIILSSTGPILIFEKLLFDFSKGNGLDYMEFRLWIGLHSAVQCLILVATDASFIIKYITRFTEEGFSTLISFIFIYDAIKKMIGAFKYYPINMDFKPNFITTYKCECVAPDTVNTTVFNASAPLAPDTNASLYNLLNLTALDWSLLSKKECLSYGGRLLGNSCKFIPDLALMSFILFFGTYSMTLTLKKFKFSRYFPTKPTRPDRGWFVAPFGKNPWWVYPASILPALLVTILIFMDQQITAVIVNRKENKLKGTESNRHHRLHPDGNLCLPGSHPKVYPPAGAVRSLPLHGRGLPEWHPVLGTLQALPDASQAPAGPCLPAARAAAPDPPLHPGADPLPGGALDPQIHGGCHHLPGHVSLHHRSWASSSFEGFWISSFPSTTWPGLTTSSQRRKKRRQTRRGREKKGPTRTVMRSPSSLLPRL

SEQ ID NO: 823 - protein, 1093 aa, Homo sapiens
MPAAGSNEPDGVLSYQRPDEEAVVDQGGTSTILNIHYEKEELEGHRTLYVGVRMPLGRQSHRHHRTHGQKHRRRGRGKGASQGEEGLEALAHDTPSQRVQFILGTEEDEEHVPHELFTELDEICMKEGEDAEWKETARWLKFEEDVEDGGERWSKPYVATLSLHSLFELRSCLINGTVLLDMHANSIEEISDLILDQQELSSDLNDSMRVKVREALLKKHHHQNEKKRNNLIPIVRSFAEVGKKQSDPHLMDKHGQTVSPQSVPTTNLEVKNGVNCEHSPVDLSKVDLHFMKKIPTGAEASNVLVGEVDILDRPIVAFVRLSPAVLLSGLTEVPIPTRFLFILLGPVGKGQQYHEIGRSMATIMTDEIFHDVAYKAKERDDLLAGIDEFLDQVTVLPPGEWDPSIRIEPPKNVPSQEKRKMPGVPNGNVCHIEQEPHGGHSGPELQRTGRLFGGLVLDIKRKAPWYWSDYRDALSLQCLASFLFLYCACMSPVITFGGLLGEATEGRISAIESLFGASMTGIAYSLFAGQALTILGSTGPVLVFEKILFKFCKDYALSYLSLRACIGLWTAFLCIVLVATDASSLVCYITRFTEEAFASLICIIFIYEAIEKLIHLAETYPIHMHSQLDHLSLYYCRCTLPENPNNHTLQYWKDHNIVTAEVHWANLTVSECQEMHGEFMGSACGHHGPYTPDVLFWSCILFFTTFILSSTLKTFKTSRYFPTRVRSMVSDFAVFLTIFTMVIIDFLIGVPSPKLQVPSVFKPTRDDRGWIINPIGPNPWWTVIAAIIPALLCTILIFMDQQITAVIINRKEHKLKKGCGYHLDLLMVAIMLGVCSIMGLPWFVAATVLSITHVNSLKLESECSAPGEQPKFLGIREQRVTGLMIFVLMGCSVFMTAILKFIPMPVLYGVFLYMGVSSLQGIQFFDRLKLFGMPAKHQPDFIYLRHVPLRKVHLFTLIQLTCLVLLWVIKASPAAIVFPMMVLALVFVRKVMDLCFSKRELSWLDDLMPESKKKKLDDAKKKAKEEEEAEKMLEIGGDKFPLESRKLLSSPGKNISCRCDPSEINISDEMPKTTVWKALSMNSGNAKEKSLFN

SEQ ID NO: 824 - protein, 145 aa, Homo sapiens
MTTNAGPLHPYWPQHLRLDNFVPNDRPTWHILAGLFSVTGVLVVTTWLLSGRAAVVPLGTWRRLSLCWFAVCGFIHLVIEGWFVLYYEDLLGDQAFLSQLWKEYAKGDSRYILGDNFTVCMETITACLWGPLSLWVVIAFLRQHP

SEQ ID NO: 825 - protein, 112 aa, Homo sapiens
MPRNQGFSEPEYSAEYSAEYSVSLPSDPDRGVGRTHEISVRNSGSCLCLPRFMRLTFVPESLENLYQTYFKRQRHETLLVLVVFAALFDCYVVVMCAVVFSSDKLASLAVAG

SEQ ID NO: 826 - protein, 102 aa, Homo sapiens
MDREERKTINQGQEDEMEIYGYNLSRWKLAIVSLGVICSGGFLLLLLYWMPEWRVKATCVRAAIKDCEVVLLRTTDEFKMWFCAKIRVLSLETYPVSSPKSM

SEQ ID NO: 827 - protein, 339 aa, Homo sapiens
MYSTTYEERNITGTRVKVPVGQEVEGMNILGLVVFAIVFGVALRKLGPEGELLIRFFNSFNEATMVLVSWIMWYAPVGIMFLVAGKIVEMEDVGLLFARLGKYILCCLLGHAIHGLLVLPLIYFLFTRKNPYRFLWGIVTPLATAFGTSSSSATLPLMMKCVEENNGVAKHISRFILPIGATVNMDGAALFQCVAAVFIAQLSQQSLDFVKIITILVTATASSVGAAGIPAGGVLTLAIILEAVNLPVDHISLILAVDWLVDRSCTVLNVEGDALGAGLLQNYVDRTESRSTEPELIQVKSELPLDPLPVPTEEGNPLLKHYRGPAGDATVASEKESVM

SEQ ID NO: 828 - protein, 461 aa, Homo sapiens
MKMASFLAFLLLNFRVCLLLLQLLMPHSAQFSVLGPSGPILAMVGEDADLPCHLFPTMSAETMELKWVSSSLRQVVNVYADGKEVEDRQSAPYRGRTSILRDGITAGKAALRIHNVTASDSGKYLCYFQDGDFYEKALVELKVADGVGLYAVAASVIMRGSSGEGVSCTIRSSLLGLEKTASISIADPFFRSAQRWIAALAGTLPVLLLLLGGAGYFLWQQQEEKKTQFRKKKREQELREMAWSTMKQEQSTRVKLLEELRWRSIQYASRGERHSAYNEWKKALFKPADVILDPKTANPILLVSEDQRSVQRAKEPQDLPDNPERFNWHYCVLGCESFISGRHYWEVEVGDRKEWHIGVCSKNVQRKGWVKMTPENGFWTMGLTDGNKYRTLTEPRTNLKLPKPPKKVGVFLDYETGDISFYNAVDGSHIHTFLDVSFSEALYPVFRILTLEPTALTICPA

SEQ ID NO: 829 - protein, 1130 aa, Homo sapiens
MAAAGQLCLLYLSAGLLSRLGAAFNLDTREDNVIRKYGDPGSLFGFSLAMHWQLQPEDKRLLLVGAPRAEALPLQRANRTGGLYSCDITARGPCTRIEFDNDADPTSESKEDQWMGVTVQSQGPGGKVVTCAHRYEKRQHVNTKQESRDIFGRCYVLSQNLRIEDDMDGGDWSFCDGRLRGHEKFGSCQQGVAATFTKDFHYIVFGAPGTYNWKGIVRVEQKNNTFFDMNIFEDGPYEVGGETEHDESLVPVPANSYLGLLFLTSVSYTDPDQFVYKTRPPREQPDTFPDVMMNSYLGFSLDSGKGIVSKDEITFVSGAPRANHSGAVVLLKRDMKSAHLLPEHIFDGEGLASSFGYDVAVVDLNKDGWQDIVIGAPQYFDRDGEVGGAVYVYMNQQGRWNNVKPIRLNGTKDSMFGIAVKNIGDINQDGYPDIAVGAPYDDLGKVFIYHGSANGINTKPTQVLKGISPYFGYSIAGNMDLDRNSYPDVAVGSLSDSVTIFRSRPVINIQKTITVTPNRIDLRQKTACGAPSGICLQVKSCFEYTANPAGYNPSISIVGTLEAEKERRKSGLSSRVQFRNQGSEPKYTQELTLKRQKQKVCMEETLWLQDNIRDKLRPIPITASVEIQEPSSRRRVNSLPEVLPILNSDEPKTAHIDVHFLKEGCGDDNVCNSNLKLEYKFCTREGNQDKFSYLPIQKGVPELVLKDQKDIALEITVTNSPSNPRNPTKDGDDAHEAKLIATFPDTLTYSAYRELRAFPEKQLSCVANQNGSQADCELGNPFKRNSNVTFYLVLSTTEVTFDTPDLDINLKLETTSNQDNLAPITAKAKVVIELLLSVSGVAKPSQVYFGGTVVGEQAMKSEDEVGSLIEYEFRVINLGKPLTNLGTATLNIQWPKEISNGKWLLYLVKVESKGLEKVTCEPQKEINSLNLTESHNSRKKREITEKQIDDNRKFSLFAERKYQTLNCSVNVNCVNIRCPLRGLDSKASLILRSRLWNSTFLEEYSKLNYLDILMRAFIDVTAAAENIRLPNAGTQVRVTVFPSKTVAQYSGVPWWIILVAILAGILMLALLVFILWKCGFFKRSRYDDSVPRYHAVRIRKEEREIKDEKYIDNLEKKQWITKWNENESYS

SEQ ID NO: 830 - protein, 224 aa, Homo sapiens
MSRRSQRLTRYSQGDDDGSSSSGGSSVAGSQSTLFKDSPLRTLKRKSSNMKRLSPAPQLGPSSDAHTSYYSESLVHESWFPPRSSLEELHGDANWGYSDVDQQSSSSRLRSAVSRAGSLLWMVATSPGRLFRLLYWWAGTTWYRLTTAASLLDVFVLTRRFSSLKTFLWFLLPLLLLTCLTYGAWYFYPYGLQTFHPALVSWWAAKDSRRPDEGWEARDSSPHF

SEQ ID NO: 831 - protein, 2111 aa, Homo sapiens
MLRVFILYAENVHTPDTDISDAYCSAVFAGVKKRTKVIKNSVNPVWNEGFEWDLKGIPLDQGSELHVVVKDHETMGRNRFLGEAKVPLREVLATPSLSASFNAPLLDTKKQPTGASLVLQVSYTPLPGAVPLFPPPTPLEPSPTLPDLDVVAGGGQSRAETWSLLSDSTMDTRYSGKKWPAPTDTGGEEDTEDQGLTGDEAEPFLDQSGGPGAPTTPRKLPSRPPPHYPGIKRKRSAPTSRKLLSDKPQDFQIRVQVIEGRQLPGVNIKPVVKVTAAGQTKRTRIHKGNSPLFNETLFFNLFDSPGELFDEPIFITVVDSRSLRTDALLGEFRMDVGTIYREPRHAYLRKWLLLSDPDDFSAGARGYLKTSLCVLGPGDEAPLERKDPSEDKEDIESNLLRPTGVALRGAHFCLKVFRAEDLPQMDDAVMDNVKQIFGFESNKKNLVDPFVEVSFAGKMLCSKILEKTANPQWNQNITLPAMFPSMCEKMRIRIIDWDRLTHNDIVATTYLSMSKISAPGGEIEEEPAGAVKPSKASDLDDYLGFLPTFGPCYINLYGSPREFTGFPDPYTELNTGKGEGVAYRGRLLLSLETKLVEHSEQKVEDLPADDILRVEKYLRRRKYSLFAAFYSATMLQDVDDAIQFEVSIGNYGNKFDMTCLPLASTTQYSRAVFDGCHYYYLPWGNVKPVVVLSSYWEDISHRIETQNQLLGIADRLEAGLEQVHLALKAQCSTEDVDSLVAQLTDELIAGCSQPLGDIHETPSATHLDQYLYQLRTHHLSQITEAALALKLGHSELPAALEQAEDWLLRLRALAEEPQNSLPDIVIWMLQGDKRVAYQRVPAHQVLFSRRGANYCGKNCGKLQTIFLKYPMEKVPGARMPVQIRVKLWFGLSVDEKEFNQFAEGKLSVFAETYENETKLALVGNWGTTGLTYPKFSDVTGKIKLPKDSFRPSAGWTWAGDWFVCPEKTLLHDMDAGHLSFVEEVFENQTRLPGGQWIYMSDNYTDVNGEKVLPKDDIECPLGWKWEDEEWSTDLNRAVDEQGWEYSITIPPERKPKHWVPAEKMYYTHRRRRWVRLRRRDLSQMEALKRHRQAEAEGEGWEYASLFGWKFHLEYRKTDAFRRRRWRRRMEPLEKTGPAAVFALEGALGGVMDDKSEDSMSVSTLSFGVNRPTISCIFDYGNRYHLRCYMYQARDLAAMDKDSFSDPYAIVSFLHQSQKTVVVKNTLNPTWDQTLIFYEIEIFGEPATVAEQPPSIVVELYDHDTYGADEFMGRCICQPSLERMPRLAWFPLTRGSQPSGELLASFELIQREKPAIHHIPGFEVQETSRILDESEDTDLPYPPPQREANIYMVPQNIKPALQRTAIEILAWGLRNMKSYQLANISSPSLVVECGGQTVQSCVIRNLRKNPNFDICTLFMEVMLPREELYCPPITVKVIDNRQFGRRPVVGQCTIRSLESFLCDPYSAESPSPQGGPDDVSLLSPGEDVLIDIDDKEPLIPIQEEEFIDWWSKFFASIGEREKCGSYLEKDFDTLKVYDTQLENVEAFEGLSDFCNTFKLYRGKTQEETEDPSVIGEFKGLFKIYPLPEDPAIPMPPRQFHQLAAQGPQECLVRIYIVRAFGLQPKDPNGKCDPYIKISIGKKSVSDQDNYIPCTLEPVFGKMFELTCTLPLEKDLKITLYDYDLLSKDEKIGETVVDLENRLLSKFGARCGLPQTYCVSGPNQWRDQLRPSQLLHLFCQQHRVKAPVYRTDRVMFQDKEYSIEEIEAGRIPNPHLGPVEERLALHVLQQQGLVPEHVESRPLYSPLQPDIEQGKLQMWVDLFPKALGRPGPPFNITPRRARRFFLRCIIWNTRDVILDDLSLTGEKMSDIYVKGWMIGFEEHKQKTDVHYRSLGGEGNFNWRFIFPFDYLPAEQVCTIAKKDAFWRLDKTESKIPARVVFQIWDNDKFSFDDFLGSLQLDLNRMPKPAKTAKKCSLDQLDDAFHPEWFVSLFEQKTVKGWWPCVAEEGEKKILAGKLEMTLEIVAESEHEERPAGQGRDEPNMNPKLEDPRRPDTSFLWFTSPYKTMKFILWRRFRWAIILFIILFILLLFLAIFIYAFPNYAAMKLVKPFS

SEQ ID NO: 832 - protein, 272 aa, Homo sapiens
MELQDPKMNGALPSDAVGYRQEREGFLPSRGPAPGSKPVQFMDFEGKTSFGMSVFNLSNAIMGSGILGLAYAMAHTGVIFFLALLLCIALLSSYSIHLLLTCAGIAGIRAYEQLGQRAFGPAGKVVVATVICLHNVGAMSSYLFIIKSELPLVIGTFLYMDPEGDWFLKGNLLIIIVSVLIILPLALMKHLGYLGYTSGLSLTCMLFFLVSVIYKKFQLGCAIGHNETAMESEALVGLPSQGLNSSCEAQMFTVDSQMSYTVPIMAFAFVCH

SEQ ID NO: 833 - protein, 256 aa, Homo sapiens
MTAPGAAGRCPPTTWLGSLLLLVCLLASRSITEEVSEYCSHMIGSGHLQSLQRLIDSQMETSCQITFEFVDQEQLKDPVCYLKKAFLLVQDIMEDTMRFRDNTPNAIAIVQLQELSLRLKSCFTKDYEEHDKACVRTFYETPLQLLEKVKNVFNETKNLLDKDWNIFSKNCNNSFAECSSQGHERQSEGSFSPQLQESVFHLLVPSVILVLLAVGGLLFYRWRRRSHQEPQRADSPLEQPEGSPLTQDDRQVELPV

SEQ ID NO: 834 - protein, 266 aa, Homo sapiens
MAKGEGAESGSAAGLLPTSILQSTERPAQKEPKKKKQQLSVCNKLCYALGGAPYQVTGCALGFFLQIYLLDVAQVGPFSASIILFVGRAWDAITDPLVGLCISKSPWTCLGRLMPWIIFSTPLAVIAYFLIWFVPDFPHGQTYWYLLFYCLFETMVTCFHVPYSALTMFISTEQTERDSATAYRMTVEVLGTVLGTAIQGQIVGQADTPCFQDLNSSTVASQSANHTHGTTSHRETQKAYLLAAGVIVCIYIICAVILILGVREQR

SEQ ID NO: 835 - protein, 197 aa, Homo sapiens
LCFASLALVRRYLHHLLLWVESLDSLLGVLLFVVGFIVVSFPCGWGYIVLNVAAGYLYGFVLGMGLMMVGVLIGTFIAHVVCKRLLTAWVAARIQSSEKLSAVIRVVEGGSGLKVVALARLTPIPFGLQNAVFSIIISIGLMFYVVHRAQVELNAAIVACEMELKSSLVKGNQPNTSGSSFYNKRTLTFSGGGINVV

SEQ ID NO: 836 - protein, 131 aa, Homo sapiens
MASKSWLNFLTFLCGSAIGFLLCSQLFSILLGEKVDTQPNVLHNDPHARHSDDNGQNHLEGQMNFNADSSQHKDENTDIAENLYQKVRILCWVMTGPQNLEKKAKHVKATWAQRCNKVLFMSSEENKDFPA

SEQ ID NO: 837 - protein, 1211 aa, Homo sapiens
MQLKIMPKKKRLSAGRVPLILFLCQMISALEVPLDPKLLEDLVQPPTITQQSPKDYIIDPRENIVIQCEAKGKPPPSFSWTRNGTHFDIDKDPLVTMKPGTGTLIINIMSEGKAETYEGVYQCTARNERGAAVSNNIVVRPSRSPLWTKEKLEPITLQSGQSLVLPCRPPIGLPPPIIFWMDNSFQRLPQSERVSQGLNGDLYFSNVLPEDTREDYICYARFNHTQTIQQKQPISVKVISVDELNDTIAANLSDTEFYGAKSSRERPPTFLTPEGNASNKEELRGNVLSLECIAEGLPTPIIYWAKEDGMLPKNRTVYKNFEKTLQIIHVSEADSGNYQCIAKNALGAIHHTISVRVKAAPYWITAPQNLVLSPGEDGTLICRANGNPKPRISWLTNGVPIEIAPDDPSRKIDGDTIIFSNVQERSSAVYQCNASNEYGYLLANAFVNVLAEPPRILTPANTLYQVIANRPALLDCAFFGSPLPTIEWFKGAKGSALHEDIYVLHENGTLEIPVAQKDSTGTYTCVARNKLGMAKNEVHLEIKDPTWIVKQPEYAVVQRGSMVSFECKVKHDHTLSLTVLWLKDNRELPSDERFTVDKDHLVVADVSDDDSGTYTCVANTTLDSVSASAVLSVVAPTPTPAPVYDVPNPPFDLELTDQLDKSVQLSWTPGDDNNSPITKFIIEYEDAMHKPGLWHHQTEVSGTQTTAQLKLSPYVNYSFRVMAVNSIGKSLPSEASEQYLTKASEPDKNPTAVEGLGSEPDNLVITWKPLNGFESNGPGLQYKVSWRQKDGDDEWTSVVVANVSKYIVSGTPTFVPYLIKVQALNDMGFAPEPAVVMGHSGEDLPMVAPGNVRVNVVNSTLAEVHWDPVPLKSIRGHLQGYRIYYWKTQSSSKRNRRHIEKKILTFQGSKTHGMLPGLEPFSHYTLNVRVVNGKGEGPASPDRVFNTPEGVPSAPSSLKIVNPTLDSLTLEWDPPSHPNGILTEYTLKYQPINSTHELGPLVDLKIPANKTRWTLKNLNFSTRYKFYFYAQTSAGSGSQITEEAVTTVDEAGILPPDVGAGKAMASRQVDIATQGWFIGLMCAVALLILILLIVCFIRRNKGGKYPVKEKEDAHADPEIQPMKEDDGTFGEYSDAEDHKPLKKGSRTPSDRTVKKEDSDDSLVDYGEGVNGQFNEDGSFIGQYSGKKEKEPAEGNESSEAPSPVNAMNSFV

SEQ ID NO: 838 - protein, 227 aa, Homo sapiens
ARPAMAPDPVAAETAAQGPTPRYFTWDEVAQRSGCEERWLVIDRKVYNISEFTRRHPGGSRVISHYAGQDATDPFVAFHINKGLVKKYMNSLLIGELSPEQPSFEPTKNKELTDEFRELRATVERMGLMKANHVFFLLYLLHILLLDGAAWLTLWVFGTSFLPFLLCAVLLSAVQHFGRPRWPDHLISVQDQPGQRGETSTKNTKRPGTVAHACNTSTLGGQDGQII

SEQ ID NO: 839 - protein, 108 aa, Homo sapiens
MESCSCHPGSGVQWRDHGSLQLPPPGFKMKMRRYKLFLMFCMAGLCLISFLHFFKTLSYVTFPRELASLSPNLVSSFFWNNAPVTPQASPEPGGPDLLRTPLYSHSPL

SEQ ID NO: 840 - protein, 432 aa, Homo sapiens
MTYGSPQANASPSDAVALDHGEVSRRQQQELPNMFGDLRSTFIALMIGSYASSAVTFPGIKLIYDAGVSFIVVLVVWAGCSGLVFLNCFFNWPLEPFPGPEDMDYSVKIKFSWLGFDHKITGKQFYKQVTTVGRRLSVGSSMRSAKEQVALQEGHKLCLSTVDLEVKCQPDAAVAPSFMHSVFSPILLLSLVTMCVTQLRLIFYMGAMNNILKFLVSGDQKTVGLYTSIFGVLQLLCLLTAPVIGYIMDWRLKECEDASEEPEEKDANQGEKKKKKRDRQIQKITNAMRAFAFTNLLLVGFGVTCLIPNLPLQILSFILHTIVRGFIHSAVGGLYAAVYPSTQFGSLTGLQSLISALFALLQQPLFLAMMGPLQGDPLWVNVGLLLLSLLGFCLPLYLICYRRQLERQLQQRQEDDKLFLKINGSSNQEAFV

SEQ ID NO: 841 - protein, 1283 aa, Homo sapiens
MGNLEIVLTGHNADLSFLQWIREVTGYVLVAMNEFSTLPLPNLRVVRGTQVYDGKFAIFVMLNYNTNSSHALRQLRLTQLTEILSGGVYIEKNDKLCHMDTIDWRDIVRDRDAEIVVKDNGRSCPPCHEVCKGRCWGPGSEDCQTLTKTICAPQCNGHCFGPNPNQCCHDECAGGCSGPQDTDCFACRHFNDSGACVPRCPQPLVYNKLTFQLEPNPHTKYQYGGVCVASCPHNFVVDQTSCVRACPPDKMEVDKNGLKMCEPCGGLCPKACEGTGSGSRFQTVDSSNIDGFVNCTKILGNLDFLITGLNGDPWHKIPALDPEKLNVFRTVREITGYLNIQSWPPHMHNFSVFSNLTTIGGRSLYNRGFSLLIMKNLNVTSLGFRSLKEISAGRIYISANRQLCYHHSLNWTKVLRGPTEERLDIKHNRPRRDCVAEGKVCDPLCSSGGCWGPGPGQCLSCRNYSRGGVCVTHCNFLNGEPREFAHEAECFSCHPECQPMEGTATCNGSGSDTCAQCAHFRDGPHCVSSCPHGVLGAKGPIYKYPDVQNECRPCHENCTQGCKGPELQDCLGQTLVLIGKTHLTMALTVIAGLVVIFMMLGGTFLYWRGRRIQNKRAMRRYLERGESIEPLDPSEKANKVLARIFKETELRKLKVLGSGVFGTVHKGVWIPEGESIKIPVCIKVIEDKSGRQSFQAVTDHMLAIGSLDHAHIVRLLGLCPGSSLQLVTQYLPLGSLLDHVRQHRGALGPQLLLNWGVQIAKGMYYLEEHGMVHRNLAARNVLLKSPSQVQVADFGVADLLPPDDKQLLYSEAKTPIKWMALESIHFGKYTHQSDVWSYGVTVWELMTFGAEPYAGLRLAEVPDLLEKGERLAQPQICTIDVYMVMVKCWMIDENIRPTFKELANEFTRMARDPPRYLVIKRESGPGIAPGPEPHGLTNKKLEEVELEPELDLDLDLEAEEDNLATTTLGSALSLPVGTLNRPRGSQSLLSPSSGYMPMNQGNLGESCQESAVSGSSERCPRPVSLHPMPRGCLASESSEGHVTGSEAELQEKVSMCRSRSRSRSPRPRGDSAYHSQRHSLLTPVTPLSPPGLEEEDVNGYVMPDTHLKGTPSSREGTLSSVGLSSVLGTEEEDEDEEYEYMNRRRRHSPPHPPRPSSLEELGYEYMDVGSDLSASLGSTQSCPLHPVPIMPTAGTTPDEDYEYMNRQRDGGGPGGDYAAMGACPASEQGYEEMRAFQGPGHQAPHVHYARLKTLRSLEATDSAFDNPDYWHSRLFPKANAQRT

SEQ ID NO: 842 - protein, 155 aa, Homo sapiens
MELPAVNLKVILLGHWLLTTCFWRHFSAKPRLETIELTCALCKLRSAAHRATAGLHCILRLLCLGQLHHPGLGRVGCGSAGLHRRHKHVSGWLAGHHLPGHRAHQHLLPAGQPHGHGPLWRGHGHPQLAAQAALLLLRLPHVPGARGFPWVFSGP

SEQ ID NO: 843 - protein, 106 aa, Homo sapiens
MDQFPESVTENFEYDDLAEACYIGDIVVFGTVFLSIFYSVIFAIGLVGNLLVVFALTNSKKPKSVTDIYLLNLALSDLLFVATLPFWTHYLINEKGLHNAMCKFTT

SEQ ID NO: 844 - protein, 729 aa, Homo sapiens
MVAVGGCRCQPGYQPARGDKACQACPRGLYKASAGNAPCSPCPARSHAPNPAAPVCPCLEGFYRASSDPPEAPCTGPPSAPQELWFEVQGSALMLHWRLPRELGGRGDLLFNVVCKECEGRQEPASGGGGTCHRCRDEVHFDPRQRGLTESRVLVGGLRAHVPYILEVQAVNGVSELSPDPPQAAAINVSTSHEVPSAVPVVHQVSRASNSITVSWPQPDQTNGNILDYQLRYYDQAEDESHSFTLTSETNTATVTQLSPGHIYGFQVRARTAAGHGPYGGKVYFQTLPQGELSSQLPERLSLVIGSILGALAFLLLAAITVLAVVFQRKRRGTGYTEQLQQYSSPGLGVKYYIDPSTYEDPCQAIRELAREVDPAYIKIEEVIGTGSFGEVRQGRLQPRGRREQTVAIQALWAGGAESLQMTFLGRAAVLGQFQHPNILRLEGVVTKSRPLMVLTEFMELGPLDSFLRQREGQFSSLQLVAMQRGVAAAMQYLSSFAFVHRSLSAHSVLVNSHLVCKVARLGHSPQGPSCLLRWAAPEVIAHGKHTTSSDVWSFGILMWEVMSYGERPYWDMSEQEVLNAIEQEFRLPPPPGCPPGLHLLMLDTWQKDRARRPHFDQLVAAFDKMIRKPDTLQAGGDPGERPSQALLTPVALDFPCLDSPQAWLSAIGLECYQDNFSKFGLCTFSDVAQLSLEDLPALGITLAGHQKKLLHHIQLLQQHLRQQGSVEV

SEQ ID NO: 845 - protein, 242 aa, Homo sapiens
VLRVLSPDLVRRLLNLAVRAFQVPKGESLNFPESTPGYGHTVPLSDGGKAFCIIYSVIGIPFTLLFLTAVVQRITVHVTRRPVLYFHIRWGFSKQVVAIVHAVLLGFVTVSCFFFIPAAVFSVLEDDWNFLESFYFCFISLSTIGLGDYVPGEGYNQKFRELYKIGITCYLLLGLIAMLVVLETFCELHELKKFRKMFYVKKDKDEDQVHIIEHDQLSFSSITDQAAGMKEDQKQNEPFVAT

SEQ ID NO: 846 - protein, 290 aa, Homo sapiens
VSCWLSDSCQELQRRGIILCSYGVTSPIAVFGRPGRLRNRRHFERRLVPMKWLKKCLDTAPTPMWPDDLQNHTFLHTVYCQDGSPSVGLSEAYDEDQLFFFDFSQNTRVPRLPEFADWAQEQGDAPAILFDKEFCEWMIQQIGPKLDGKIPVSRGFPIAEVFTLKPLEFGKPNTLVCFVSNLFPPMLTVNWQHHSVPVEGFGPTFVSAVDGLSFQAFSYLNFTPEPSDIFSCIVTHEIDRYTAIAYWVPRNALPSDLLENVLCGVAFGLGVLGIIVGIVLIIYFRKPCSG

SEQ ID NO: 847 - protein, 460 aa, Homo sapiens
MALSVRTLPLRGFLVPRPQPTRSQDAPSPRLPLSSAPAPCRHKNEEDNHSYYVSRLYGPSEPHSRELWVDVAEANRSQVKIHTILSNTHRQASRVVLSFDFPFYGHPLRQITIATGGFIFMGDVIHRMLTATQYVAPLMANFNPGYSDNSTVVYFDNGTVFVVQWDHVYLQGWEDKGSFTFQAALHHDGRIVFAYKEIPMSVPEISSSQHPVKTGLSDAFMILNPSPDVPESRRRSIFEYHRIELDPSKVTSMSAVEFTPLPTCLQHRSCDACMSSDLTFNCSWCHVLQRCSSGFDRYRQEWMDYGCAQEAEGRMCEDFQDEDHDSASPDTSFSPYDGDLTTTSSSLFIDSLTTEDDTKLNPYAGGDGLQNNLSPKTKGTPVHLGTIVGIVLAVLLVAAIILAGIYINGHPTSNAALFFIERRPHHWPAMKFRSHPDHSTYAEVEPSGHEKEGFMEAEQC

SEQ ID NO: 848 - protein, 307 aa, Homo sapiens
QTEKSDEVSRKGNWWVTEMGGGAGERLFTSSCLVGLVPLGLRISLVTCPLQCGIMWQLLLPTALLLLVSAGMRTDLPKAVVFLEPQWYRVLEKDSVTLKCQGAYSPEDNSTQWFHNESLISSQASSYFIDAATVDDSGEYRCQTNLSTLSDPVQLEVHIGWLLLQAPRWVFKEEDPIHLRCHSWKNTALHKVTYLQNGKGRKYFHHNSDFYIPKATLKDSGSYFCRGLFGSKNVSSETVNITITQGLAVSTISSFFPPGYQVSFCLVMVLLFAVDTGLYFSVKTNIRSSTRDWKDHKFKWRKDPQDK

SEQ ID NO: 849 - protein, 822 aa, Homo sapiens
MVSWGRFICLVVVTMATLSLARPSFSLVEDTTLEPEEPPTKYQISQPEVYVAAPGESLEVRCLLKDAAVISWTKDGVHLGPNNRTVLIGEYLQIKGATPRDSGLYACTASRTVDSETWYFMVNVTDAISSGDDEDDTDGAEDFVSENSNNKRAPYWTNTEKMEKRLHAVPAANTVKFRCPAGGNPMPTMRWLKNGKEFKQEHRIGGYKVRNQHWSLIMESVVPSDKGNYTCVVENEYGSINHTYHLDVVERSPHRPILQAGLPANASTVVGGDVEFVCKVYSDAQPHIQWIKHVEKNGSKYGPDGLPYLKVLKHSGINSSNAEVLALFNVTEADAGEYICKVSNYIGQANQSAWLTVLPKQQAPGREKEITASPDYLEIAIYCIGVFLIACMVVTVILCRMKNTTKKPDFSSQPAVHKLTKRIPLRRQVTVSAESSSSMNSNTPLVRITTRLSSTADTPMLAGVSEYELPEDPKWEFPRDKLTLGKPLGEGCFGQVVMAEAVGIDKDKPKEAVTVAVKMLKDDATEKDLSDLVSEMEMMKMIGKHKNIINLLGACTQDGPLYVIVEYASKGNLREYLRARRPPGMEYSYDINRVPEEQMTFKDLVSCTYQLARGMEYLASQKCIHRDLAARNVLVTENNVMKIADFGLARDINNIDYYKKTTNGRLPVKWMAPEALFDRVYTHQSDVWSFGVLMWEIFTLGGSPYPGIPVEELFKLLKEGHRMDKPANCTNELYMMMRDCWHAVPSQRPTFKQLVEDLDRILTLTTNEEYLDLSQPLEQYSPSYPDTRSSCSSGDDSVFSPDPMPYEPCLPQYPHINGSVKT

SEQ ID NO: 850 - protein, 244 aa, Homo sapiens
MGALGLEGRGGRLQGRGSLLLAVAGATSLVTLLLAVPITVLAVLALVPQDQGGLVTETADPGAQAQQGLGFQKLPEEEPETDLSPGLPAAHLIGAPLKGQGLGWETTKEQAFLTSGTQFSDAEGLALPQDGLYYLYCLVGYRGRAPPGGGDPQGRSVTLRSSLYRAGGAYGPGTPELLLEGAETVTPVLDPARRQGYGPLWYTSVGFGGLVQLRRGERVYVNISHPDMVDFARGKTFFGAVMVG

SEQ ID NO: 851 - protein, 275 aa, Homo sapiens
MALQIPGGFWAAAVTVMLVMLSTPVAEARDFPKDFLVQFKGMCYFTNGTERVRGVARYIYNREEYGRFDSDVGEFQAVTELGRSIEDWNNYKDFLEQERAAVDKVCRHNYEAELRTTLQRQVEPTVTISPSRTEALNHHNLLVCSVTDFYPAQIKVRWFRNDQEETAGVVSTSLIRNGDWTFQILVMLEITPQRGDIYTCQVEHPSLQSPITVEWRAQSESAQSKMLSGIGGFVLGLIFLGLGLIIRHRGQKGPRGPPPAGNISAMIQSGERAQA

SEQ ID NO: 852 - protein, 90 aa, Homo sapiens
MILSIIFCVIALLVFVFQLFTMEKGNRFFLSGATTLVCWLCILVGVSIYTSHYANRDGTQYHHGYSYILGWICFCFSFIIGVLYLVLRKK

SEQ ID NO: 853 - protein, 245 aa, Homo sapiens
MTKARLFRLWLVLGSVFMILLIIVYWDSAGAAHFYLHTSFSRPHTGPPLPTPGPDRDRELTADSDVDEFLDKFLSAGVKQSDLPRKETEQPPAPGSMEESVRGYDWSPRDARRSPDQGRQQAERRSVLRGFCANSSLAFPTKERAFDDIPNSELSHLIVDDRHGAIYCYVPKVACTNWKRVMIVLSGSLLHRGAPYRDPLRIPREHVHNASAHLTFNKFWRRYGKLSRHLMKVKLKKYTKFLFVR

SEQ ID NO: 854 - protein, 140 aa, Homo sapiens
TRPPSVQVAKTTPFNTREPVMLACYVWGFYPAEVTITWRKNGKLVMPHSSAHKTAQPNGDWTYQTLSHLALTPSYGDTYTCVVEHTGAPEPILRDWTPGLSPMQTLKVSVSAVTLGLGLIIFSLGVISWRRAGHSRWHIS

SEQ ID NO: 855 - protein, 153 aa, Homo sapiens
MSVGVSTSAPLSPTSGTSVGMSTFSIMDYVVFVLLLVLSLAIGLYHACRGWGRHTVGELLMADRKMGCLPVALSLLATFQSAVAILGVPSEIYRFGTQYWFLGCCYFLGLLIPAHIFIPVFYRLHLTSAYEYLELRFNKTVRVCGTVTFIFQM

SEQ ID NO: 856 - protein, 133 aa, Homo sapiens
MSVGVSTSAPLSPTSGTSVGMSTFSIMDYVVFVLLLVLSLAIGLYHACRGWGRHTVGELLMADRKMGCLPVALSLLATFQSAVAILGVPSEIYRFGTQYWFLGCCYFLGLLIPAHIFIPVFYRLHLTSAYEYL

SEQ ID NO: 857 - protein, 1560 aa, Homo sapiens
NSIYTISISSTAESGKKPWYLEECSSTLATTYSSGESYDKKIITTDLRQRCTDNHTGTSASAPMAAGIIALALEANPFLTWRDVQHVIVRTSRAGHLNANDWKTNAAGFKVSHLYGFGLMDAEAMVMEAEKWTTVPRQHVCVESTDRQIKTIRPNSAVRSIYKASGCSDNPNRHVNYLEHVVVRITITHPRRGDLAIYLTSPSGTRSQLLANRLFDHSMEGFKNWEFMTIHCWGERAAGDWVLEVYDTPSQLRNFKTPGKLKEWSLVLYGTSVQPYSPTNEFPKVERFRYSRVEDPTDDYGTEDYAGPCDPECSEVGCDGPGPDHCNDCLHYYYKLKNNTRICVSSCPPGHYHADKKRCRKCAPNCESCFGSHGDQCMSCKYGYFLNEETNSCVTHCPDGSYQDTKKNLCRKCSENCKTCTEFHNCTECRDGLSLQGSRCSVSCEDGRYFNGQDCQPCHRFCATCAGAGADGCINCTEGYFMEDGRCVQSCSISYYFDHSSENGYKSCKKCDISCLTCNGPGFKNCTSCPSGYLLDLGMCQMGAICKDGEYVDEHGHCQTCEASCAKCQGPTQEDCTTCPMTRIFDDGRCVSNCPSWKFEFENQCHPCHHTCQRCQGSGPTHCTSCGADNYGREHFLYQGECGDSCPEGHYATEGNTCLPCPDNCELCHSVHVCTRCMKGYFIAPTNHTCQKLECGQGEVQDPDYEECVPCEEGCLGCSLDDPGTCTSCAMGYYRFDHHCYKTCPEKTYSEEVECKACDSNCGSCDQNGCYWCEEGFFLLGGSCVRKCGPGFYGDQEMGECESCHRACETCTGPGHDECSSCQEGLQLLRGMCVHATKTQEEGKFWNEAVSTANLSVVKSLLQERRRWKVQIKRDILRKLQPCHSSCKTCNGSATLCTSCPKGAYLLAQACVSSCPQGTWPSVRSGSCENCTEACAICSGADLCKKCQMQPGHPLFLHEGRCYSKCPEGSYAEDGICERCSSPCRTCEGNATNCHSCEGGHVLHHGVCQENCPERHVAVKGVCKHCPEMCQDCIHEKTCKECTPEFFLHDDMCHQSCPRGFYADSRHCVPCHKDCLECSGPKADDCELCLESSWVLYDGLCLEECPAGTYYEKETKECRDCHKSCLTCSSSGTCTTCQKGLIMNPRGSCMANEKCSPSEYWDEDAPGCKPCHVKCFHCMGPAEDQCQTCPMNSLLLNTTCVKDCPEGYYADEDSNRCAHCHSSCRTCEGRHSRQCHSCRPGWFQLGKECLLQCREGYYADNSTGRCERCNRSCKGCQGPRPTDCLSCDRFFFLLRSKGECHRSCPDHYYVEQSTQTCERCHPTCDQCKGKGALNCLSCVWSYHLMGGICTSDCLVGEYRVGEGEKFNCEKCHESCMECKGPGAKNCTLCPANLVLHMDDSHCLHCCNTSDPPSAQECCDCQDTTDECILRTSKVRPATEHFKTALFITSSMMLVLLLGAAVVVWKKSRGRVQPAAKAGYEKLADPNKSYSSYKSSYRESTSFEEDQVIEYRDRDYDEDDDDDIVYMGQDGTVYRKFKYGLLDDDDIDELEYDDESYSYYQ

SEQ ID NO: 858 - protein, 256 aa, Homo sapiens
MTPEDPEETQPLLGPPGGSAPRGRRVFLAAFAAALGPLSFGFALGYSSPAIPSLQRAAPPAPRLDDAAASWFGVYISEIAYPAVRGLLGSCVQLMVVVGILLAYLAGWVLEWRWLAVLGCVPPSLMLLLMCFMPETPRFLLTQHRRQEAMAALRFLWGSEQGWEDPPIGAEQSFHLALLRQPGIYKPFIIGVSLMAFQQLSGVNAVMFYAETIFEEAKFKDSSLASVVVGVIQVLFTAVAALIMDRAGRRLLLVLS

SEQ ID NO: 859 - protein, 340 aa, Homo sapiens
MLSGSRAVPTPHRGSEELLKYMLHSPCVSLTMNGTYNTCGSSDLTWPPAIKLGFYAYLGVLLVLGLLLNSLALWVFCCRMQQWTETRIYMTNLAVADLCLLCTLPFVLHSLRDTSDTPLCQLSQGIYLTNRYMSISLVTAIAVDRYVAVRHPLRARGLRSPRQAAAVCAVLWVLVIGSLVARWLLGIQEGGFCFRSTRHNFNSMAFPLLGFYLPLAVVVFCSLKVVTALAQRPPTDVGQAEATRKAARMVWANLLVFVVCFLPLHVGLTVRLAVGWNACALLETIRRALYITSKLSDANCCLDAICYYYMAKEFQEASALAVAPSAKAHKSQDSLCVTLA

SEQ ID NO: 860 - protein, 475 aa, Homo sapiens
MLWAVRTRCYVVKAQLGPTVALEGRAPRAPGPSCLGNGNCQRPGPITSRNVTRASLPDMESNLSGLVPAAGLVPALPPAVTLGLTAAYTTLYALLFFSVYAQLWLVLLYGHKRLSYQTVFLALCLLWAALRTTLFSFYFRDTPRANRLGPLPFWLLYCCPVCLQFFTLTLMNLYFAQVVFKAKVKRRPEMSRGLLAVRGAFVGASLLFLLVNVLCAVLSHRRRAQPWALLLVRVLVSDSLFVICALSLAACLCLVARRAPSTSIYLEAKGTSVCQAAAMGGAMVLLYASRACYNLTALALAPQSRLDTFDYDWYNVSDQADLVNDLGNKGYLVFGLILFVWELLPTTLLVGFFRVHRPPQDLSTSHILNGQVFASRSYFFDRAGHCEDEGCSWEHSRGESTRCQDQAATTTVSTPPHRRDPPPSPTEYPGPSPPHPRPLCQVCLPLLAQDPGGRGYPLLWPAPCCSCHSELVPSP

SEQ ID NO: 861 - protein, 99 aa, Homo sapiens
MCVGEKRRAIIPSHLAYGKRGFPPSVPADAVVQYDVELIALIRANYWLKLVKGILPLVGMAMVPALLGLIGYHLYRKANRPKVSKKKLKEEKRNKSKKK

SEQ ID NO: 862 - protein, 248 aa, Homo sapiens
LAPSTQFPAPGMGGHPGGAGEDAQCPPAPCPPTGLQHEGIFRVSGAQLRVSEIRDAFERGEDPLVEGCTAHDLDSVAGVLKLYFRSLEPPLFPPDLFGELLASSELEATAERVEHVSRLLWRLPAPVLVVLRYLFTFLNQDAQLESLGADNEPELEAEMPAQEDDLEGVVEAVACFAYTGRTAQELSFRRGDVLRLHERASSDWWRGEHNGMRGLIPHKYITLPAGTEKQVVGAGLQTAGESGSSPEG

SEQ ID NO: 863 - protein, 372 aa, Homo sapiens
MATKPTEPVTILSLRKLSLGTAEPQVKEPKTFTVEDAVETIGFGRFHIALFLIMGSTGVFWLAGSLLIIGLASVIIPTIGWRWLIRVASIPGIILIVAFKFIPESARFNVSTGNTRAALATLERVAKMNRSVMPEGKLVEPVLEKRGRFADLLDAKYLRTTLQIWVIWLGISFAYYGVILASAELLERDLVCGSKSDSAVVVTGGDSGESQSPCYCHMFAPSDYRTMIISTIGEIALNPLNILGINFLGRRLSLSITMGCTALFFLLLNICTSSAGLIGFLFMLRALVAANFNTVYIYTAEVYPTTMRALGMGTSGSLCRIGAMVAPFISQVLMSASILGALCLFSSVCVVCAISAFTLPIETKGRALQQIK

SEQ ID NO: 864 - protein, 310 aa, Homo sapiens
MAPSSPRPALPALLVLLGALFPVSEAQVHLALGDQRLNPTVTYGNDSFSAKASVSVTAEDEGTQRLTCAVILGNQSQETLQTVTIYSFPAPNVILTKPEVSEGTEVTVKCEAHPRAKVTLNGVPAQPLGPRAQLLLKATPEDNGRSFSCSATLEVAGQLIHKNQTRELRVLYGPRLDERDCPGNWTWPENSQQTPMCQAWGNPLPELKCLKDGTFPLPIGESVTVTRDLEGTYLCRARSTQGEVTRKVTVNVLSPRYEIVIITVVAAAVIMGTAGLSTYLYNRQRKIKKYRLQQAQKGTPMKPNTQATPP

SEQ ID NO: 865 - protein, 188 aa, Homo sapiens
KQLDADVSPKPTIFLPSIAETKLQKAGTYLCLLEKFFPDIIKIHWQEKKSNTILGSQEGNTMKTNDTYMKFSWLTVPEESLDKEHRCIVRHENNKNGIDQEIIFPPIKTDVTTVDPKYNYSKDANDVITMDPKDNWSKDANDTLLLQLTNTSAYYTYLLLLLKSVVYFAIITCCLLRRTAFCCNGEKS

SEQ ID NO: 866 - protein, 788 aa, Homo sapiens
MGSTDSKLNFRKAVIQLTTKTQPVEATDDAFWDQFWADTATSVQDVFALVPAAEIRAVREESPSNLATLCYKAVEKLVQGAESGCHSEKEKQIVLNCSRLLTRVLPYIFEDPDWRGFFWSTVPGAGRGGQGEEDDEHARPLAESLLLAIADLLFCPDFTVQSHRRSTVDSAEDVHSLDSCEYIWEAGVGFAHSPQPNYIHDMNRMELLKLLLTCFSEAMYLPPAPESGSTNPWVQFFCSTENRHALPLFTSLLNTVCAYDPVGYGIPYNHLLFSDYREPLVEEAAQVLIVTLDHDSASSASPTVDGTTTGTAMDDADPPGPENLFVNYLSRIHREEDFQFILKGIARLLSNPLLQTYLPNSTKKIQFHQELLVLFWKLCDFNKKFLFFVLKSSDVLDILVPILFFLNDARADQSRVGLMHIGVFILLLLSGERNFGVRLNKPYSIRVPMDIPVFTGTHADLLIVVFHKIITSGHQRLQPLFDCLLTIVVNVSPYLKSLSMVTANKLLHLLEAFSTTWFLFSAAQNHHLVFFLLEVFNNIIQYQFDGNSNLVYAIIRKRSIFHQLANLPTDPPTIHKALQRRRRTPEPLSRTGSQEGTSMEGSRPAAPAEPGTLKTSLVATPGIDKLTEKSQVSEDGTLRSLEPEPQQSLEDGSPAKGEPSQAWREQRRPSTSSASGQWSPTPEWVLSWKSKLPLQTIMRLLQVLVPQVEKICIDKGLTDESEILRFLQHGTLVGLLPVPHPILIRKYQANSGTAMWFRTYMWGVIYLRNVDPPVWYDTDVKLFEIQRV

SEQ ID NO: 867 - protein, 200 aa, Homo sapiens
MEDFNMESDSFEDFWKGEDLSNYSYSSTLPPFLLDAAPCEPESLEINKYFVVIIYALVFLLSLLGNSLVMLVILYSRVGRSVTDVYLLNLALADLLFALTLPIWAASKVNGWIFGTFLCKVVSLLKEVNFYSGILLLACISVDRYLAIVHATRTLTQKRYLVKFICLSIWGLSLLLALPVLLFRRTVYSSNVSPACYEDM

SEQ ID NO: 868 - protein, 286 aa, Homo sapiens
ISEPGSPSRNRENETSRQNLSECKVWRNPLNLFRGAEYRRYTWVTGKEPLTYYDMNLSAQDHQTFFTCDTDFLRPSDTVMQKAWRERNPPARIKAAYQALELNNDCATAYVLLAEEEATTIVDAERLFKQALKAGETIYRQSQQCQHQSPQHEAQLRRDTNVLVYIKRRLAMCARKLGRIREAVKIMRDYLLEMKSLILPPEHILKRGDSEAIAYAFFHLQHWKRIEGALNLLQCTWEGTFHHVSVYPKKELPLFIHFTAGFCSSTAMIAILTHQFPEIMGIFAKA

SEQ ID NO: 869 - protein, 168 aa, Homo sapiens
GRRVFLAAFAAALGPLSFGFALGYSSPAIPSLQRAAPPAPRLDDAAASWFGVYISEIAYPAVRGLLGSCVQLMVVVGILLAYLAGWVLEWRWLAVLGCVPPSLMLLLMCFMPETPRFLLTQHRRQEAMAALRFLWGSEQGWEDPPIGAEQQLSGVNAVMFYAETIFEE

SEQ ID NO: 870 - protein, 114 aa, Homo sapiens
MAMGLFRVCLVVVTAIINHPLLFPRENATVPENEEEIIRKMQAHQEKLQLEQLRLEEEVARLAAEKEALEQVAEEGRQQNETRVAWDLWSTLCMILFLMIEVWRQDHQEGPSPE

SEQ ID NO: 871 - protein, 1443 aa, Homo sapiens
MATSRGASRCPRDIANVMQRLQDEQEIVQKRTFTKWINSHLAKRKPPMVVDDLFEDMKDGVKLLALLEVLSGQKLPCEQGRRMKRIHAVANIGTALKFLEGRKIKLVNINSTDIADGRPSIVLGLMWTIILYFQIEELTSNLPQLQSLSSSASSVDSIVSSETPSPPSKRKVTTKIQGNAKKALLKWVQYTAGKQTGIEVKDFGKSWRSGVAFHSVIHAIRPELVDLETVKGRSNRENLEDAFTIAETELGIPRLLDPEDVDVDKPDEKSIMTYVAQFLKHYPDIHNASTDGQEDDEILPGFPSFANSVQNFKREDRVIFKEMKVWIEQFERDLTRAQMVESNLQDKYQSFKHFRVQYEMKRKQIEHLIQPLHRDGKLSLDQALVKQSWDRVTSRLFDWHIQLDKSLPAPLGTIGAWLYRAEVALREEITVQQVHEETANTIQRKLEQHKDLLQNTDAHKRAFHEIYRTRSVNGIPVPPDQLEDMAERFHFVSSTSELHLMKMEFLELKYRLLSLLVLAESKLKSWIIKYGRRESVEQLLQNYVSFIENSKFFEQYEVTYQILKQTAEMYVKADGSVEEAENVMKFMNETTAQWRNLSVEVRSVRSMLEEVISNWDRYGNTVASLQAWLEDAEKMLNQSENAKKDFFRNLPHWIQQHTAMNDAGNFLIETCDEMVSRDLKQQLLLLNGRWRELFMEVKQYAQADEMDRMKKEYTDCVVTLSAFATEAHKKLSEPLEVSFMNVKLLIQDLEDIEQRVPVMDAQYKIITKTAHLITKESPQEEGKEMFATMSKLKEQLTKVKECYSPLLYESQQLLIPLEELEKQMTSFYDSLGKINEIITVLEREAQSSALFKQKHQELLACQENCKKTLTLIEKGSQSVQKFVTLSNVLKHFDQTRLQRQIADIHVAFQSMVKKTGDWKKHVETNSRLMKKFEESRAELEKVLRIAQEGLEEKGDPEELLRRHTEFFSQLDQRVLNAFLKACDELTDILPEQEQQGLQEAVRKLHKQWKDLQGEAPYHLLHLKIDVEKNRFLASVEECRTELDRETKLMPQEGSEKIIKEHRVFFSDKGPHHLCEKRLQLIEELCVKLPVRDPVRDTPGTCHVTLKELRAAIDSTYRKLMEDPDKWKDYTSRFSEFSSWISTNETQLKGIKGEAIDTANHGEVKRAVEEIRNGVTKRGETLSWLKSRLKVLTEVSSENEAQKQGDELAKLSSSFKALVTLLSEVEKMLSNFGDCVQYKEIVKNSLEELISGSKEVQEQAEKILDTENLFEAQQLLLHHQQKTKRISAKKRDVQQQIAQAQQGEGGLPDRGHEELRKLESTLDGLERSRERQERRIQVTLRKWERFETNKETVVRYLFQTGSSHERFLSFSSLESLSSELEQTKEFSKRTESIAVQAENLVKEASEIPLGPQNKQLLQQQAKSIKEQVKKLEDTLEEEYVIDKS

SEQ ID NO: 872 - protein, 353 aa, Homo sapiens
AYVPLIFPATWLLDTRGLRLTALLGSGLNCLGAWIKCGSVQQHLFWVTMLGQCLCSVAQVFILGLPSRIASVWFGPKEVSTACATAVLGNQLGTAVGFLLPPVLVPNTQNDTNLLACNISTMFYGTSAVATLLFILTAIGIMTGAFYSVSTLLNQMILTYYEGEEVNAGRIGLTLVVAGMVGSILCGLWLDYTKTYKQTTLIVYILSFIGMVIFTFTLDLRYIIIVFVTGGVLGFFMTGYLPLGFEFAVEITYPESEGTSSGLLNASAQIFGILFTLAQGKLTSDYGPKAGNIFLCVWMFIGIILTALIKSDLRRHNINIGITNVDVKAIPADSPTDQEPKTVMLSKQSESAI

SEQ ID NO: 873 - protein, 123 aa, Homo sapiens
MPRLHDHFWSCSCAHSARRRGPPRASAAGLAAKVGEMINVSVSGPSLLAAHGAPDADPAPRGRSAAMSGPEPGSPYPNTWHHRLLQRSLVLFSVGVVLALVLNLLQIQRNVTLFPEEVIATIF

SEQ ID NO: 874 - protein, 151 aa, Homo sapiens
TTALCAARTASCTSHCATQGALQPRRRMWTARRCVRDPQRSFALGIQWIVVRILGGIPGPIAFGWVIDKACLLWQDQCGQQGSCLVYQNSAMSRYILIMGLLYKVLGVLFFAIACFLYKPLSESSDGLETCLPSQSSAPDSATDSQLQSSV

SEQ ID NO: 875 - protein, 552 aa, Homo sapiens
MGCSAKARWAAGALGVAGLLCAVLGAVMIVMVPSLIKQQVLKNVRIDPSSLSFNMWKEIPIPFYLSVYFFDVMNPSEILKGEKPQVRERGPYVYREFRHKSNITFNNNDTVSFLEYRTFQFQPSKSHGSESDYIVMPNILVLGAAVMMENKPMTLKLIMTLAFTTLGERAFMNRTVGEIMWGYKDPLVNLINKYFPGMFPFKDKFGLFAELNNSDSGLFTVFTGVQNISRIHLVDKWNGLSKVDFWHSDQCNMINGTSGQMWPPFMTPESSLEFYSPEACRSMKLMYKESGVFEGIPTYRFVAPKTLFANGSIYPPNEGFCPCLESGIQNVSTCRFSAPLFLSHPHFLNADPVLAEAVTGLHPNQEAHSLFLDIHPVTGIPMNCSVKLQLSLYMKSVAGIGQTGKIEPVVLPLLWFAESGAMEGETLHTFYTQLVLMPKVMHYAQYVLLALGCVLLLVPVICQIRSQVGAGQRAARADSHSLACWGKGASDRTLWPTAAWSPPPAAVLRLCRSGSGHCWGLRSTLASFACRVATTLPVLEGLGPSLGGGTGS

SEQ ID NO: 876 - protein, 324 aa, Homo sapiens
MSPAAAAEPDGDQQDRHVSKLIFCFFVFGAVLLCVGVLLSIFGFQACQYKPLPDCPMVLKVAGPACAVVGLGAVILARSRAQLQLRAGLQRGQQMDPDRAFICGESRQFAQCLIFGFLFLTSGMLISVLGIWVPGCGSNWAQEPLNETDTGDSEPRMCGFLSLQIMGPLIVLVGLCFFVVAHVKKRNTLNAGQDASEREEGQIQIMEPVQVTVGDSVIIFPPPPPPYFPESSASAVAESPGTNSLLPNENPPSYYSIFNYGRTPTSEGAASERDCESIYTISGTNSSSEASHTPHLPSELPPRYEEKENAAATFLPLSSEPSPP

SEQ ID NO: 877 - protein, 667 aa, Homo sapiens
MQTQEILRILRLPELGDLGQFFRSLSATTLVSMGALAAILAYWFTHRPKALQPPCNLLMQSEEVEDSGGARRSVIGSGPQLLTHYYDDARTMYQVFRRGLSISGNGPCLGFRKPKQPYQWLSYQEVADRAEFLGSGLLQHNCKACTDQFIGVFAQNRPEWIIVELACYTYSMVVVPLYDTLGPGAIRYIINTADISTVIVDKPQKAVLLLEHVERKETPGLKLIILMDPFEEALKERGQKCGVVIKSMQAVEDCGQENHQAPVPPQPDDLSIVCFTSGTTGNPKGAMLTHGNVVADFSGFLKVTESQWAPTCADVHISYLPLAHMFERMVQSVVYCHGGRVGFFQGDIRLLSDDMKALCPTIFPVVPRLLNRMYDKIFSQANTPLKRWLLEFAAKRKQAEVRSGIIRNDSIWDELFFNKIQASLGGCVRMIVTGAAPASPTVLGFLRAALGCQVYEGYGQTECTAGCTFTTPGDWTSGHVGAPLPCNHIKLVDVEELNYWACKGEGEICVRGPNVFKGYLKDPDRTKEALDSDGWLHTGDIGKWLPAGTLKIIDRKKHIFKLAQGEYVAPEKIENIYIRSQPVAQIYVHGDSLKAFLVGIVVPDPEVMPSWAQKRGIEGTYADLCTNKDLKKAILEDMVRLGKESGLHSFEQDLPQCLIQIKVFSKY

SEQ ID NO: 878 - protein, 90 aa, Homo sapiens
MLDVALFMSNAMRLKAVLEQGPSSHYYTTLVTLISLSLLLQVVIGVLLVVIGEEPSLQSDLLPRHPWLAERPHVSPGPPCIGTGSFATTR

SEQ ID NO: 879 - protein, 187 aa, Homo sapiens
GLRCIKYLLLGFNLLFWLAGSAVIAFGLWFRFGGAIKELSSEDKSPEYFYVGLYVLVGAGALMMAVGFFGCCGAMRESQCVLGSFFTCLLVIFAAEVTTGVFAFIGKGVAIRHVQTMYEEAYNDYLKDRGKGNGTLITFHSTFQCCGKESSEQVQPTCPKELLGHKIFGMIFSMVLCCAIRNSRDVI

SEQ ID NO: 880 - protein, 247 aa, Homo sapiens
MTRQRVWMRWAVRQPWSFSNIVSWLTSSGCWWRASTCTPCLPSPSSLSGSTSGGVPSTFTMVWTIARIHFEDYGCWDTINSSLWWIIKGPILTSILVNFILFICIIRILLQKLRPPDIRKSDSSPYSRLARSTLLLIPLFGVHYIMFAFFPDNFKPEVKMVFELVVGSFQGFVVAILYCFLNGEVQAELRRKWRRWHLQGVLGWNPKYRHPSGGSNGATCSTQVSMLTRVSPGARRSSSFQAEVSLV

SEQ ID NO: 881 - protein, 228 aa, Homo sapiens
MSRRSQRLTRYSQGDDDGSSSSGGSSVAGSQSTLFKDSPLRTLKRKSSNMKRLSPAPQLGPSSDAHTSYYSESLVHESWFPPRSSLEELHGDANWGEDLRVRRRRGTGGSESSRASGLVGRKATEDFLGSSSGYSSEDDYVGYSDVDQQSSSSRLRSAVSRAGSLLWMVATSPGRLFRLLYWWAGTTWYRLTTAASLLDVFVLTRRFSSLKTFLWFLLPLLLLTCLTY

SEQ ID NO: 882 - protein, 2591 aa, Homo sapiens
MPVTEKDLAEDAPWKKIQQNTFTRWCNEHLKCVNKRIGNLQTDLSDGLRLIALLEVLSQKRMYRKYHQRPTFRQMQLENVSVALEFLDRESIKLVSIDSKAIVDGNLKLILGLVWTLILHYSISMPVWEDEGDDDAKKQTPKQRLLGWIQNKIPYLPITNFNQNWQDGKALGALVDSCAPGLCPDWESWDPQKPVDNAREAMQQADDWLGVPQVITPEEIIHPDVDEHSVMTYLSQFPKAKLKPGAPLKPKLNPKKARAYGRGIEPTGNMVKQPAKFTVDTISAGQGDVMVFVEDPEGNKEEAQVTPDSDKNKTYSVEYLPKVTGLHKVTVLFAGQHISKSPFEVSVDKAQGDASKVTAKGPGLEAVGNIANKPTYFDIYTAGAGVGDIGVEVEDPQGKNTVELLVEDKGNQVYRCVYKPMQPGPHVVKIFFAGDTIPKSPFVVQVGEACNPNACRASGRGLQPKGVRIRETTDFKVDTKAAGSGELGVTMKGPKGLEELVKQKDFLDGVYAFEYYPSTPGRYSIAITWGGHHIPKSPFEVQVGPEAGMQKVRAWGPGLHGGIVGRSADFVVESIGSEVGSLGFAIEGPSQAKIEYNDQNDGSCDVKYWPKEPGEYAVHIMCDDEDIKDSPYMAFIHPATGGYNPDLVRAYGPGLEKSGCIVNNLAEFTVDPKDAGKAPLKIFAQDGEGQRIDIQMKNRMDGTYACSYTPVKAIKHTIAVVWGGVNIPHSPYRVNIGQGSHPQKVKVFGPGVERSGLKANEPTHFTVDCTEAGEGDVSVGIKCDARVLSEDEEDVDFDIIHNANDTFTVKYVPPAAGRYTIKVLFASQEIPASPFRVKVDPSHDASKVKAEGPGLSKAGVENGKPTHFTVYTKGAGKAPLNVQFNSPLPGDAVKDLDIIDNYDYSHTVKYTPTQQGNMQVLVTYGGDPIPKSPFTVGVAAPLDLSKIKLNGLENRVEVGKDQEFTVDTRGAGGQGKLDVTILSPSRKVVPCLVTPVTGRENSTAKFIPREEGLYAVDVTYDGHPVPGSPYTVEASLPPDPSKVKAHGPGLEGGLVGKPAEFTIDTKGAGTGGLGLTVEGPCEAKIECSDNGDGTCSVSYLPTKPGEYFVNILFEEVHIPGSPFKADIEMPFDPSKVVASGPGLEHGKVGEAGLLSVDCSEAGPGALGLEAVSDSGTKAEVSIQNNKDGTYAVTYVPLTAGMYTLTMKYGGELVPHFPARVKVEPAVDTSRIKVFGPGIEGKDVFREATTDFTVDSRPLTQVGGDHIKAHIANPSGASTECFVTDNADGTYQVEYTPFEKGLHVVEVTYDDVPIPNSPFKVAVTEGCQPSRVQAQGPGLKEAFTNKPNVFTVVTRGAGIGGLGITVEGPSESKINCRDNKDGSCSAEYIPFAPGDYDVNITYGGAHIPGSPFRVPVKDVVDPSKVKIAGPGLGSGVRARVLQSFTVDSSKAGLAPLEVRVLGPRGLVEPVNVVDNGDGTHTVTYTPSQEGPYMVSVKYADEEIPRSPFKVKVLPTYDASKVTASGPGLSSYGVPASLPVDFAIDARDAGEGLLAVQITDQEGKPKRAIVHDNKDGTYAVTYIPDKTGRYMIGVTYGGDDIPLSPYRIRATQTGDASKCLATGPGIASTVKTGEEVGFVVDAKTAGKGKVTCTVLTPDGTEAEADVIENEDGTYDIFYTAAKPGTYVIYVRFGGVDIPNSPFTVMATDGEVTAVEEAPVTEEAYVPVSDMNGLGFKPFDLVIPFAVRKGEITGEVHMPSGKTATPEIVDNKDGTVTVRYAPTEVGLHEMHIKYMGSHIPESPLQFYVNYPNSGSVSAYGPGLVYGVANKTATFTIVTEDAGEGGLDLAIEGPSKAEISCIDNKDGTCTVTYLPTLPGDYSILVKYNDKHIPGSPFTAKITDDSRRCSQVKLGSAADFLLDISETDLSSLTASIKAPSGRDEPCLLKRLPNNHIGISFIPREVGEHLVSIKKNGNHVANSPVSIMVVQSEIGDARRAKVYGRGLSEGRTFEMSDFIVDTRDAGYGGISLAVEGPSKVDIQTEDLEDGTCKVSYFPTVPGVYIVSTKFADEHVPGSPFTVKISGEGRVKESITRTSRAPSVATVGSICDLNLKIPEINSSDMSAHVTSPSGRVTEAEIVPMGKNSHCVRFVPQEMGVHTVSVKYRGQHVTGSPFQFTVGPLGEGGAHKVRAGGPGLERGEAGVPAEFSIWTREAGAGGLSIAVEGPSKAEITFDDHKNGSCGVSYIAQEPGNYEVSIKFNDEHIPESPYLVPVIAPSDDARRLTVMSLQESGLKVNQPASFAIRLNGAKGKIDAKVHSPSGAVEECHVSELEPDKYAVRFIPHENGVHTIDVKFNGSHVVGSPFKVRVGEPGQAGNPALVSAYGTGLEGGTTGIQSEFFINTTRAGPGTLSVTIEGPSKVKMDCQETPEGYKVMYTPMAPGNYLISVKYGGPNHIVGSPFKAKVTGQRLVSPGSANETSSILVESVTRSSTETCYSAIPKASSDASKVTSKGAGLSKAFVGQKSSFLVDCSKAGSNMLLIGVHGPTTPCEEVSMKHVGNQQYNVTYVVKERGDYVLAVKWGEEHIPGSPFHVTVP

SEQ ID NO: 883 - protein, 396 aa, Homo sapiens
MESNLSGLVPAAGLVPALPPAVTLGLTAAYTTLYALLFFSVYAQLWLVLLYGHKRLSYQTVFLALCLLWAALRTTLFSFYFRDTPRANRLGPLPFWLLYCCPVCLQFFTLTLMNLYFAQVVFKAKVKRRPEMSRGLLAVRGAFVGASLLFLLVNVLCAVLSHRRRAQPWALLLVRVLVSDSLFVICALSLAACLCLVARRAPSTSIYLEAKGTSVCQAAAMGGAMVLLYASRACYNLTALALAPQSRLDTFDYDWYNVSDQADLVNDLGNKGYLVFGLILFVWELLPTTLLVGFFRVHRPPQDLSTSHILNGQVFASRSYFFDRAGHCEDEGCSWEHSRGESTSMSGSLGSGSWYGAIGREPGWYGGSQTKTTPLLFSQVPGPGGHHHSLYSTPQT

SEQ ID NO: 884 - protein, 139 aa, Homo sapiens
MNSLLIGELSPEQPSFEPTKNKELTDEFRELRATVERMGLMKANHVFFLLYLLHILLLDGAAWLTLWVFGTSFLPFLLCAVLLSAVQAQAGWLQHDFGHLSVFSTSKWNHLLHHFVIGHLKGAPASWWNHMHFQHHAKP

SEQ ID NO: 885 - protein, 77 aa, Homo sapiens
MGALGLEGRGGRLQGRGSLLLAVAGATSLVTLLLAVPITVLAVLALVPQDQGGLGFRSCQRRSQKQISAPGSQLPTS

SEQ ID NO: 886 - protein, 866 aa, Homo sapiens
MGFPPLLKGQASATRSSLASCSWVVFFLSCLSRHAPEIEGGRRWTELIRTMESRVLLRTFCLIFGLGAVWGLGVDPSLQIDVLTELELGESTTGVRQVPGLHNGTKAFLFQDTPRSIKASTATAEQFFQKLRNKHEFTILVTLKQTHLNSGVILSIHHLDHRYLELESSGHRNEVRLHYRSGSHRPHTEVFPYILADDKWHKLSLAISASHLILHIDCNKIYERVVEKPSTDLPLGTTFWLGQRNNAHGYFKGIMQDVQLLVMPQGFIAQCPDLNRTCPTCNDFHGLVQKIMELQDILAKTSAKLSRAEQRMNRLDQCYCERTCTMKGTTYREFESWIDGCKNCTCLNGTIQCETLICPNPDCPLKSALAYVDGKCCKECKSICQFQGRTYFEGERNTVYSSSGVCVLYECKDQTMKLVESSGCPALDCPESHQITLSHSCCKVCKGYDFCSERHNCMENSICRNLNDRAVCSCRDGFRALREDNAYCEDIDECAEGRHYCRENTMCVNTPGSFMCICKTGYIRIDDYSCTEHDECITNQHNCDENALCFNTVGGHNCVCKPGYTGNGTTCKAFCKDGCRNGGACIAANVCACPQGFTGPSCETDIDECSDGFVQCDSRANCINLPGWYHCECRDGYHDNGMFSPSGESCEDIDECGTGRHSCANDTICFNLDGGYDCRCPHGKNCTGDCIHDGKVKHNGQIWVLENDRCSVCSCQNGFVMCRRMVCDCENPTVDLFCCPECDPRLSSQCLHQNGETLYNSGDTWVQNCQQCRCLQGEVDCWPLPCPDVECEFSILPENECCPRCVTDPCQADTIRNDITKTCLDEMNVVRFTGSSWIKHGTECTLCQCKNGHICCSVDPQCLQEL

SEQ ID NO: 887 - protein, 163 aa, Homo sapiens
MELQDPKMNGALPSDAVGYRQEREGFLPSRGPAPGSKPVQFMDFEGKTSFGMSVFNLSNAIMGSGILGLAYAMAHTGVIFFLALLLCIALLSSYSIHLLLTCAGIAGIRAYEQLGQRAFGPAGKVVVATVICLHNVGAMSSYLFIIKSELPLVIGTFLYMDPE

SEQ ID NO: 888 - protein, 230 aa, Homo sapiens [sequence omitted]

SEQ ID NO: 889 - protein, 105 aa, Homo sapiens
MNLGVSMLRILFLLDVGGAQVLATGKTPGAEIDFKYALIGTAVGVAISAGFLALKICMIRRHLFDDDSSDLKSTPGGLSDTIPLKKRAPRRNHNFSKRDAQVIEL

SEQ ID NO: 890 - protein, 348 aa, Homo sapiens
MGPRARPALLLLMLLQTAVLQGRLLRSHSLHYLFMGASEQDLGLSLFEALGYVDDQLFVFYDHESRRVEPRTPWVSSRISSQMWLQLSQSLKGWDHMFTVDFWTIMENHNHSKESHTLQVILGCEMQEDNSTEGYWKYGYDGQDHLEFCPDTLDWRAAEPRAWPTKLEWERHKIRARQNRAYLERDCPAQLQQLLELGRGVLDQQVPPLVKVTHHVTSSVTTLRCRALNYYPQNITMKWLKDKQPMDAKEFEPKDVLPNGDGTYQGWITLAVPPGEEQRYTCQVEHPGLDQPLIVIWEPSPSGTLVIGVISGIAVFVVILFIGILFIILRKRQGSRGAMGHYVLAERE

SEQ ID NO: 891 - protein, 80 aa, Homo sapiens
YSIQDDSSVAQVKAISFYQACCLPGVIPYLVSLIRDKLGWMWVFYFFILMTSCTIVFISPLIVREIFSLVLRRQAHILRE

SEQ ID NO: 892 - protein, 841 aa, Homo sapiens
MEWGSESAAVRRHRVGVERREGAAAAPPPEREARAQEPLVDGCSGGGRTRKRSPGGSGGASRGAGTGLSEVRAALGLALYLIALRTLVQLSLQQLVLRGAAGHRGEFDALQARDYLEHITSIGPRTTGSPENEILTVHYLLEQIKLIEVQSNSLHKISVDVQRPTGSFSIDFLGGFTSYYDNITNVVVKLEPRDGAQHAVLANCHFDSVANSPGASDDAVSCSVMLEVLRVLSTSSEALHHAVIFLFNGAEENVLQASHGFITQHPWASLIRAFINLEAAGVGGKELVFQTGPENPWLVQAYVSAAKHPFASVVAQEVFQSGIIPSDTDFRIYRDFGNIPGIDLAFIENGYIYHTKYDTADRILTDSIQRAGDNILAVLKHLATSDMLAAASKYRHGNMVFFDVLGLFVIAYPSRIGSIINYMVVMGVVLYLGKKFLQPKHKTGNYKKDFLCGLGITLISWFTSLVTVLIIAVFISLIGQSLSWYNHFYVSVCLYGTATVAKIILIHTLAKRFYYMNASAQYLGEVFFDISLFVHCCFLVTLTYQGLCSAFISAVWVAFPLLTKLCVHKDFKQHGAQGKFIAFYLLGMFIPYLYALYLIWAVFEMFTPILGRSGSEIPPDVVLASILAGCTMILSSYFINFIYLAKSTKKTMLTLTLVCAITFLLVCSGTFFPYSSNPANPKPKRVFLQHMTRTFHDLEGNAVKRDSGIWINGFDYTGISHITPHIPEINDSIRAHCEENAPLCGFPWYLPVHFLIRKNWYLPAPEVSPRNPPHFRLISKEQTPWDSIKLTFEATACLPILQILDLPASTIMTKPYVLLCSSPQRVNTFSVVSWQWHPSHK

SEQ ID NO: 893 - protein, 167 aa, Homo sapiens
MVGALCGCWFRLGGARPLIPLGPTVVQTSMSRSQVALLGLSLLLMLLLYVGLPGPPEQTSCLWGDPNVTVLAGLTPGNSPIFYREVLPLNQAHRVEVVLLHGKAFNSHTWEQLGTLQLLSQRGYRAVALDLPAHHAQRHDQQGSRGGAPIGDALPPVPAYPHCPAQA

SEQ ID NO: 894 - protein, 163 aa, Homo sapiens
MMVRWALLCEFWGDIAKEFYWKTPCPGPFLRYNFDVTKGKIFIEWMKGATTNICYNVLDRNVHEKKLGDKVAFYWEGNEPGETTQITYHQLLVQVCQFSNVLRKQGIQKGDRVAIYMPMIPELVVAMLACARIGALHSIVFAGFSSESLCERILDSSCSLLIT

SEQ ID NO: 895 - protein, 147 aa, Homo sapiens
MHYYRYSNAKVSCWYKYLLFSYNIIFWNQCCGAYGPEDWDLNVYFNCSGASYSREKCGVPFSCCVPDPAQKVVNTQCGYDVRIQLKSKWDESIFTKGCIQALESWLPRNIYIVAGVFIAISLLQIFGIFLARTLISDIEAVKAGHHF

SEQ ID NO: 896 - protein, 224 aa, Homo sapiens
MQQQYREASLPTAGQGLSEEEGLALHLDGALALLHACCHACCCCAGEGPVVQNHDDEGPQNTLPRVAVPEEQQGSLQEVSRTLRTCLGTVVQTSMSRSQVALLGLSLLLMLLLYVGLPGPPEQTSCLWGDPNVTVLAGLTPGNSPIFYREVLPLNQAHRVEVVLLHGKAFNSHTWEQLGTLQLLSQRGYRAVALDLPGFGNSAPSKEASTEAGRAALLERALRD

SEQ ID NO: 897 - protein, 397 aa, Homo sapiens
MKAQTALSFFLILITSLSGSQGIFPLAFFIYVPMNEQIVIGRLDEDIILPSSFERGSEVVIHWKYQDSYKVHSYYKGSDHLESQDPRYANRTSLFYNEIQNGNASLFFRRVSLLDEGIYTCYVGTAIQVITNKVVLKVGVFLTPVMKYEKRNTNSFLICSVLSVYPRPIITWKMDNTPISENNMEETGSLDSFSINSPLNITGSNSSYECTIENSLLKQTWTGRWTMKDGLHKMQSEHVSLSCQPVNDYFSPNQDFKVTWSRMKSGTFSVLAYYLSSSQNTIINESRFSWNKELINQSDFSMNLMDLNLSDSGEYLCNISSDEYTLLTIHTVHVEPSQETASHNKGLWILVPSAILAAFLLIWSVKCCRERCCVPPGERCPSAPDNGEENVPLSGKV

SEQ ID NO: 898 - protein, 350 aa, Homo sapiens
MVMWNILKPRTHLLCMTNMFCTRHEGTDSTVFLPHSHNISEWISRRVSLLDEGIYTCYVGTAIQVITNKVVLKVGVFLTPVMKYEKRNTNSFLICSVLSVYPRPIITWKMDNTPISENNMEETGSLDSFSINSPLNITGSNSSYECTIENSLLKQTWTGRWTMKDGLHKMQSEHVSLSCQPVNDYFSPNQDFKVTWSRMKSGTFSVLAYYLSSSQNTIINESRFSWNKELINQSDFSMNLMDLNLSDSGEYLCNISSDEYTLLTIHTVHVEPSQETASHNKGLWILVPSAILAAFLLIWSVKCCRAQLEARRSRHPADGAQQERCCVPPGERCPSAPDNGEENVPLSGKV

SEQ ID NO: 899 - protein, 147 aa, Homo sapiens
MERQSRVMSEKDEYQFQHQGAVELLVFNFLLILTILTIWLFKNHRFRFLHETGGAMVYGLIMGLILRYATAPTDIESGTVYDCVKLTFSPSTLLVNITDQVYEYKYKREISQHNINPHQGNAILEKRHFFQNLGSILTYAFLGTAIS

SEQ ID NO: 900 - protein, 348 aa, Homo sapiens
MSLVLLSLAALCRSAVPREPTVQCGSETGPSPEWMLQHDLIPGDLRDLRVEPVTTSVATGDYSILMNVSWVLRADASIRLLKATKICVTGKSNFQSYSCVRCNYTEAFQTQTRPSGGKWTFSYIGFPVELNTVYFIGAHNIPNANMNEDGPSMSVNFTSPGSLWDPNITACKKNEETVEVNFTTTPLGNRYMALIQHSTIIGFSQVFEPHQKKQTRASVVIPVTGDSEGATVQLTPYFPTCGSDCIRHKGTVVLCPQTGVPFPLDNNKSKPGGWLPLLLLSLLVATWVLVAGIYLMWRHERIKKTSFSTTTLLPPIKVLVVYPSEICFHHTICYFTEFLQNHCRSEVI

SEQ ID NO: 901 - protein, 989 aa, Homo sapiens
MGRKTSRVQQGPPRSPACSAHGERSWGLEFPPFRWLLGIAGRTHLAALPPFQWVLAFEIFIPLVLFFILLGLRQKKPTISVKEAFYTAAPLTSAGILPVMQSLCPDGQRDEFGFLQYANSTVTQLLERLDRVVEEGNLFDPARPSLGSELEALRQHLEALSAGPGTSGSHLDRSTVSSFSLDSVARNPQELWRFLTQNLSLPNSTAQALLAARVDPPEVYHLLFGPSSALDSQSGLHKGQEPWSRLGGNPLFRMEELLLAPALLEQLTCTPGSGELGRILTVPESQKGALQGYRDAVCSGQAAARARRFSGLSAELRNQLDVAKVSQQLGLDAPNGSDSSPQAPPPRRLQALLGDLLDAQKVLQDVDVLSALALLLPQGACTGRTPGPPASGAGGAANGTGAGAVMGPNATAEEGAPSAAALATPDTLQGQCSAFVQLWAGLQPILCGNNRTIEPEALRRGNMSSLGFTSKEQRNLGLLVHLMTSNPKILYAPAGSEVDRVILKANETFAFVGNVTHYAQVWLNISAEIRSFLEQGRLQQHLRWLQQYVAELRLHPEALNLSLDELPPALRQDNFSLPSGMALLQQLDTIDNAACGWIQFMSKVSVDIFKGFPDEESIVNYTLNQAYQDNVTVFASVIFQTRKDGSLPPHVHYKIRQNSSFTEKTNEIRRAYWRPGPNTGGRFYFLYGFVWIQDMMERAIIDTFVGHDVVEPGSYVQMFPYPCYTRDDFLFVIEHMMPLCMVISWVYSVAMTIQHIVAEKEHRLKEVMKTMGLNNAVHWVAWFITGFVQLSISVTALTAILKYGQVLMHSHVVIIWLFLAVYAVATIMFCFLVSVLYSKAKLASACGGIIYFLSYVPYMYVAIREEVAHDKITAFEKCIASLMSTTAFGLGSKYFALYEVAGVGIQWHTFSQSPVEGDDFNLLLAVTMLMVDAVVYGILTWYIEAVHPEVLLAGQWADRSLGVELAVGTHPPPQCHGGGPGLCHGEPAL

SEQ ID NO: 902 - protein, 321 aa, Homo sapiens
MAPAFLLLLLLWPQGCVSGPSADSVYTKVRLLEGETLSVQCSYKGYKNRVEGKVWCKIRKKKCEPGFARVWVKGPRYLLQDDAQAKVVNITMVALKLQDSGRYWCMRNTSGILYPLMGFQLDVSPAPQTERNIPFTHLDNILKSGTVTTGQAPTSGPDAPFTTGVMVFTPGLITLPRLLASTRPASKTGYSFTATSTTSQGPRRTMGSQTVTASPSNARDSSAGPESISTKSGDLSTRSPTTGLCLTSRSLLNRLPSMPSIRHQDVYSTVLGVVLTLLVLMLIMVYGFWKKRHMASYSMCSDPSTRDPPGRPEPYVEVYLI

SEQ ID NO: 903 - protein, 327 aa, Homo sapiens
IQNGNASLFFRRVSLLDEGIYTCYVGTAIQVITNKVVLKVGVFLTPVMKYEKRNTNSFLICSVLSVYPRPIITWKMDNTPISENNMEETGSLDSFSINSPLNITGSNSSYECTIENSLLKQTWTGRWTMKDGLHKMQSEHVSLSCQPVNDYFSPNQDFKVTWSRMKSGTFSVLAYYLSSSQNTIINESRFSWNKELINQSDFSMNLMDLNLSDSGEYLCNISSDEYTLLTIHTVHVEPSQETASHNKGLWILVPSAILAAFLLIWSVKCCRAQLEARRSRHPADGAQQERCCVPPGERCPSAPDNGEENVVRHYFLYQTIYSIKMLL

SEQ ID NO: 904 - protein, 392 aa, Homo sapiens
MRAKAFPETRDYSQPTAAATVQDIKKPVQQPAKQAPHQTLAARFMDGHITFQTAATVKIPTTTPATTKNTATTSPITYTLVTTQATPNNSHTAPPVTEVTVGPSLAPYSLPPTITPPAHTTGTSSSTVSHTTGNTTQPSNQTTLPATLSIALHKSTTGQKPVQPTHAPGTTAAAHNTTRTAAPASTVPGPTLAPQPSSVKTGIYQVLNGSRLCIKAEMGIQLIVQDKESVFSPRRYFNIDPNATQASGNCGTRKSNLLLNFQGGFVNLTFTKDEESYYISEVGAYLTVSDPETIYQGIKHAVVMFQTAVGHSFKCVSEQSLQLSAHLQVKTTDVQLQAFDFEDDHFGNVDECSSDYTIVLPVIGAIVVGLCLMGMGVYKIRLRCQSSGYQRI

SEQ ID NO: 905 - protein, 169 aa, Homo sapiens
MMTGTIETTGNISAEKGGSIILQCHLSSTTAQVTQVNWEQQDQLLAICNADLGWHISPSFKDRVAPGPGLGLTLQSLTVNDTGEYFCIYHTYPDGTYTGRIFLEVLESSVAEHGARFQIPLLGAMAATLVVICTAVIVVVALTRKKKALRIHSVEGDLRRKSAGQEEWS

SEQ ID NO: 906 - protein, 247 aa, Homo sapiens
MGRTSFDSDSWTLRLHNLQIKDKGLYQCIIHHKKPTGMIRIHQMNSELSVLANFSQPEIVPISNITENVYINLTCSSIHGYPEPKKMSVLLRTKNSTIEYDGVMQKSQDNVTELYDVSISLSVSFPDVTSNMTIFCILETDKTRLLSSPFSIELEDPQPPPDHIPWITAVLPTVIICVMVFCLILWKWKKKKRPRNSYKCGTNTMEREESEQTKKREKIHIPERSDEAQRVFKSSKTSSCDKSDTCF

SEQ ID NO: 907 - protein, 269 aa, Homo sapiens
MSPHPTALLGLVLCLAQTIHTQEDLPRPSISAEPGTVIPLGSHVTFVCRGPVGVQTFRLERDSRSTYNDTEDVSQASPSESEARFRIDSVREGNAGLYRCIYYKPPKWSEQSDYLELLVKGPTQRPSDNSHNEHAPASQGLKAEHLYILIGVSVVFLFCLLLLVLFCLHRQNQIKQGPPRSKDEEQKPQQRPDLAVDVLERTADKATVNGLPEKDRETDTSALAAGSSQEVTYAQLDHWALTQRTARAVSPQSTKPMAESITYAAVARH

SEQ ID NO: 908 - protein, 61 aa, Homo sapiens
MERQSRVMSEKDEYQFQHQGAVELLVFNFLLILTILTIWLFKNHRFRFLHETGGAMVYDDI

SEQ ID NO: 909 - protein, 222 aa, Homo sapiens
MDHHQPGTGRYQVLLNEEDNSESSAIEQPPTSNPAPQIVQAASSAPALETDSSPPPYSSITVEVPTTSDTEVYGEFYPVPPPYSVATSLPTYDEAEKAKAAAMAAAAAETSQRIQEEECPPRDDFSDADQLRVGNDGIFMLAFFTGRYGAICGFGLSLIKWILIVRFSDYFTGYFNGQYWLWWIFLVLGLLLFFRGFVNYLKVRNMSESMAAAHRTRYFFLL

SEQ ID NO: 910 - protein, 192 aa, Homo sapiens
IFFGLLVSPEEIGLSGIEAEENFEEDSHRPLINGGENEDEYEPNYSIQDDSSVAQVKAISFYQACCLPGVIPYSLAYACLKLVNYSFFFWLPFYLSNNFGWKEAEADKLSIWYDVGGIIGGTLQGFISDVLQKRAPVLALSLLLAVGSLIGYSLFSVSDPGQARMDVGFLLFHSHDKLYNCVYLAINSEGNI

SEQ ID NO: 911 - protein, 819 aa, Homo sapiens
MGSGARFPSGTLRVRWLLLLGLVGPVLGAARPGFQQTSHLSSYEIITPWRLTRERREAPRPYSKQVSYVIQAEGKEHIIHLERNKDLLPEDFVVYTYNKEGTLITDHPNIQNHCHYRGYVEGVHNSSIALSDCFGLRGLLHLENASYGIEPLQNSSHFEHIIYRMDDVYKEPLKCGVSNKDIEKETAKDEEEEPPSMTQLLRRRRAVLPQTRYVELFIVVDKERYDMMGRNQTAVREEMILLANYLDSMYIMLNIRIVLVGLEIWTNGNLINIVGGAGDVLGNFVQWREKFLITRRRHDSAQLVLKKGFGGTAGMAFVGTVCSRSHAGGINVFGQITVETFASIVAHELGHNLGMNHDDGRDCSCGAKSCIMNSGASGSRNFSSCSAEDFEKLTLNKGGNCLLNIPKPDEAYSAPSCGNKLVDAGEECDCGTPKECELDPCCEGSTCKLKSFAECAYGDCCKDCRFLPGGTLCRGKTSECDVPEYCNGSSQFCQPDVFIQNGYPCQNNKAYCYNGMCQYYDAQCQVIFGSKAKAAPKDCFIEVNSKGDRFGNCGFSGNEYKKCATGNALCGKLQCENVQEIPVFGIVPAIIQTPSRGTKCWGVDFQLGSDVPDPGMVNEGTKCGAGKICRNFQCVDASVLNYDCDVQKKCHGHGVCNSNKNCHCENGWAPPNCETKGYGGSVDSGPTYNEMNTALRDGLLVFFFLIVPLIVCAIFIFIKRDQLWRSYFRKKRSQTYESDGKNQANPSRQPGSVPRHVSPVTPPREVPIYANRFAVPTYAAKQPQQFPSRPPPPQPKVSSQGNLIPARPAPAPPLYSSLT

SEQ ID NO: 912 - protein, 163 aa, Homo sapiens
MTALSSENCSFQYQLRQTNQPLDVNYLLFLIILGKILLNILTLGMRRKNTCQNFMEYFCISLAFVDLLLLVNISIILYFRDFVLLSIRFTKYHICLFTQIISFTYGFLHYPVFLTACIDYCLNFSKTTKLSFKCQKLFYFFTVILIWISVLAYVLGDPAIYQS

SEQ ID NO: 913 - protein, 163 aa, Homo sapiens
MMTGTIETTGNISAEKGGSIILQCHLSSTTAQVTQVNWEQQDQLLAICNADLGWHISPSFKDRVAPGPGLGLTLQSLTVNDTGEYFCIYHTYPDGTYTGRIFLEVLESSVAEHGARFQIPLLGAMAATLVVICTAVIVVVALTRKKKALRIHSVEGDLRRKSA

SEQ ID NO: 914 - protein, 345 aa, Homo sapiens
MGPRARPALLLLMLLQTAVLQGRLLRSHSLHYLFMGASEQDLGLSLFEALGYVDDQLFVFYDHESRRVEPRTPWVSSRISSQMWLQLSQSLKGWDHMFTVDFWTIMENHNHSKESHTLQVILGCEMQEDNSTEGYWKYGYDGQDHLEFCPDTLDWRAAEPRAWPTKLEWERHKIRARQNRAYLERDCPAQLQQLLELGRGVLDQQEGSESSSLPGKVTTLRCRALNYYPQNITMKWLKDKQPMDAKEFEPKDVLPNGDGTYQGWITLAVPPGEEQRYTCQVEHPGLDQPLIVIWEPSPSGTLVIGVISGIAVFVVILFIGILFIILRKRQGSRGAMGHYVLAERE

SEQ ID NO: 915 - protein, 1066 aa, Homo sapiens
FYFLYGFVWIQDMMERAIIDTFVGHDVVEPGSYVQMFPYPCYTRDDFLFVIEHMMPLCMVISWVYSVAMTIQHIVAEKEHRLKEVMKTMGLNNAVHWVAWFITGFVQLSISVTALTAILKYGQVLMHSHVVIIWLFLAVYAVATIMFCFLVSVLYSKAKLASACGGIIYFLSYVPYMYVAIREEVAHDKITAFEKCIASLMSTTAFGLGSKYFALYEVAGVGIQWHTFSQSPVEGDDFNLLLAVTMLMVDAVVYGILTWYIEAVHPGMYGLPRPWYFPLQKSYWLGSGRTEAWEWSWPWARTPRLSVMEEDQACAMESRRFEETRGMEEEPTHLPLVVCVDKLTKVYKDDKKLALNKLSLNLYENQVVSFLGHNGAGKTTTMSILTGLFPPTSGSATIYGHDIRTEMDEIRKNLGMCPQHNVLFDRLTVEEHLWFYSRLKSMAQEEIRREMDKMIEDLELSNKRHSLVQTLSGGMKRKLSVAIAFVGGSRAIILDEPTAGVDPYARRAIWDLILKYKPGRTILLSTHHMDEADLLGDRIAIISHGKLKCCGSPLFLKGTYGDGYRLTLVKRPAEPGGPQEPGLASSPPGRAPLSSCSELQVSQFIRKHVASCLLVSDTSTELSYILPSEAAKKGAFERLFQHLERSLDALHLSSFGLMDTTLEEVFLKVSEEDQSLENSEADVKESRKDVLPGAEGPASGEGHAGNLARCSELTQSQASLQSASSVGSARGDEGAGYTDVYGDYRPLFDNPQDPDNVSLQEVEAEALSRVGQGSRKLDGGWLKVRQFHGLLVKRFHCARRNSKALFSQILLPAFFVCVAMTVALSVPEIGDLPPLVLSPSQYHNYTQPRGNFIPYANEERREYRLRLSPDASPQQLVSTFRLPSGVGATCVLKSPANGSLGPTLNLSSGESRLLAARFFDSMCLESFTQGLPLSNFVPPPPSPAPSDSPASPDEDLQAWNVSLPPTAGPEMWTSAPSLPRLVREPVRCTCSAQGTGFSCPSSVGGHPPQMRVVTGDILTDITGHNVSEYLLFTSDRFRLHRLTACLASPPLPPACPGMGPSPLETS

SEQ ID NO: 916 - protein, 203 aa, Homo sapiens
MGLPEERVRSGSGSRGQEEAGAGGRARSWSPPPEVSRSAHVPSLQRYRELHRRSVEEPREFWGDIAKEFYWKTPCPGPFLRYNFDVTKGKIFIEWMKGATTNICYNVLDRNVHEKKLGDKVAFYWSTSGNSSYRYTCREGNEPGETTQITYHQLLVQVCQFSNVLRKQGIQKGDRVAIYMPMIPELVVAMLACARIGALHSIV

SEQ ID NO: 917 - protein, 352 aa, Homo sapiens
MKMASFLAFLLLNFRVCLLLLQLLMPHSAQFSVLGPSGPILAMVGEDADLPCHLFPTMSAETMELKWVSSSLRQVVNVYADGKEVEDRQSAPYRGRTSILRDGITAGKAALRIHNVTASDSGKYLCYFQDGDFYEKALVELKVAALGSDLHVDVKGYKDGGIHLECRSTGWYPQPQIQWSNNKGENIPTVEAPVVADGVGLYAVAASVIMRGSSGEGVSCTIRSSLLGLEKTASISIADPFFRSAQRWIAALAGTLPVLLLLLGGAGYFLWQQQEEKKTQFRKKKREQELREMAWSTMKQEQSTRVKLLEELRWRSIQYASRGERHSAYNEWKKALFKPGEEMLQMRLHFVK

SEQ ID NO: 918 - protein, 1440 aa, Homo sapiens
GRFYFLYGFVWIQDMMERAIIDTFVGHDVVEPGSYVQMFPYPCYTRDDFLFVIEHMMPLCMVISWVYSVAMTIQHIVAEKEHRLKEVMKTMGLNNAVHWVAWFITGFVQLSISVTALTAILKYGQVLMHSHVVIIWLFLAVYAVATIMFCFLVSVLYSKAKLASACGGIIYFLSYVPYMYVAIREEVAHDKITAFEKCIASLMSTTAFGLGSKYFALYEVAGVGIQWHTFSQSPVEGDDFNLLLAVTMLMVDAVVYGILTWYIEAVHPGMYGLPRPWYFPLQKSYWLGSGRTEAWEWSWPWARTPRLSVMEEDQACAMESRRFEETRGMEEEPTHLPLVVCVDKLTKVYKDDKKLALNKLSLNLYENQVVSFLGHNGAGKTTTMSILTGLFPPTSGSATIYGHDIRTEMDEIRKNLGMCPQHNVLFDRLTVEEHLWFYSRLKSMAQEEIRREMDKMIEDLELSNKRHSLVQTLSGGMKRKLSVAIAFVGGSRAIILDEPTAGVDPYARRAIWDLILKYKPGRTILLSTHHMDEADLLGDRIAIISHGKLKCCGSPLFLKGTYGDGYRLTLVKRPAEPGGPQEPGLASSPPGRAPLSSCSELQVSQFIRKHVASCLLVSDTSTELSYILPSEAAKKGAFERLFQHLERSLDALHLSSFGLMDTTLEEVFLKVSEEDQSLENSEADVKESRKDVLPGAEGPASGEGHAGNLARCSELTQSQASLQSASSVGSARGDEGAGYTDVYGDYRPLFDNPQDPDNVSLQEVEAEALSRVGQGSRKLDGGWLKVRQFHGLLVKRFHCARRNSKALFSQILLPAFFVCVAMTVALSVPEIGDLPPLVLSPSQYHNYTQPRGNFIPYANEERREYRLRLSPDASPQQLVSTFRLPSGVGATCVLKSPANGSLGPTLNLSSGESRLLAARFFDSMCLESFTQGLPLSNFVPPPPSPAPSDSPASPDEDLQAWNVSLPPTAGPEMWTSAPSLPRLVREPVRCTCSAQGTGFSCPSSVGGHPPQMRVVTGDILTDITGHNVSEYLLFTSDRFRLHRYGAITFGNVLKSIPASFGTRAPPMVRKIAVRRAAQVFYNNKGYHSMPTYLNSLNNAILRANLPKSKGNPAAYGITVTNHPMNKTSASLSLDYLLQGTDVVIAIFIIVAMSFVPASFVVFLVAEKSTKAKHLQFVSGCNPIIYWLANYVWDMLNYLVPATCCVIILFVFDLPAYTSPTNFPAVLSLFLLYGWSITPIMYPASFWFEVPSSAYVFLIVINLFIGITATVATFLLQLFEHDKDLKVVNSYLKSCFLIFPNYNLGHGLMEMAYNEYINEYYAKIGQFDKMKSPFEWDIVTRGLVAMAVEGVVGFLLTIMCQYNFLRRPQRMPVSTKPVEDDVDVASERQRVLRGDADNDMVKIENLTKVGSGHVGWGLGGVGQGQGGGAPAVEVEPGWAGP

SEQ ID NO: 919 - protein, 238 aa, Homo sapiens
SVGVVLALVLNLLQIQRNVTLFPEEVIATIFSSAWWVPPCCGTAAAVVGLLYPCIDSHLGEPHKFKREWASVMRCIAVFVGINHASAKLDFANNVQLSLTLAALSLGLWWTFDRSRSGLGLGITIAFLATLITQFLVYNGVYQYTSPDFLYIRSWLPCIFFSGGVTVGNIGRQLAMLIPFCEELNLKTTWLFHKTRSNYRVFLKSPIVIESSKPPILRARKILEENLTVDYDKDYLFS

SEQ ID NO: 920 - protein, 217 aa, Homo sapiens
MDPQCTMGLSNILFVMAFLLSANFSQPEIVPISNITENVYINLTCSSIHGYPEPKKMSVLLRTKNSTIEYDGVMQKSQDNVTELYDVSISLSVSFPDVTSNMTIFCILETDKTRLLSSPFSIELEDPQPPPDHIPWITAVLPTVIICVMVFCLILWKWKKKKRPRNSYKCGTNTMEREESEQTKKREKIHIPERSDEAQRVFKSSKTSSCDKSDTCF

SEQ ID NO: 921 - protein, 294 aa, Homo sapiens
MERLTLTRTIGGPLLTATLLGKTTINDYQVIRMPFSHLSTYSLVWVMAAVVLCTAQVQVVTQDEREQLYTPASLKCSLQNAQEALIVTWQKKKAVSPENMVTFSENHGVVIQPAYKDKINITQLGLQNSTITFWNITLEDEGCYMCLFNTFGFGKISGTACLTVYVQPIVSLHYKFSEDHLNITCSATARPAPMVFWKVPRSGIENSTVTLSHPNGTTSVTSILHIKDPKNQVGKEVICQVLHLGTVTDFKQTVNKGYWFSVPLLLSIVSLVILLVLISILLYWKRHRNQDREP

SEQ ID NO: 922 - protein, 209 aa, Homo sapiens
MAASAGAGAVIAAPDSRRWLWSVLAAALGLLTAGVSALEVYTPKEIFVANGTQGKLTCKFKSTSTTGGLTSVSWSFQPEGADTTVSFFHYSQGQVYLGNYPPFKDRISWAGDLDKKDASINIENMQFIHNGTYICDVKNPPDIVVQPGHIRLYVVEKENLPVFPVWVVVGIVTAVVLGLTLLISMILAVLYRRKNSKRDYTGAQSYMHS

SEQ ID NO: 923 - protein, 152 aa, Homo sapiens
MVATPKEGTQGSEKGRLGTVVQTSMSRSQVALLGLSLLLMLLLYVGLPGPPEQTSCLWGDPNVTVLAGLTPGNSPIFYREVLPLNQAHRVEVVLLHGKAFNSHTWEQLGTLQLLSQRGYRAVALDLPGFGNSAPSKEASTEAGRAALLERAL

SEQ ID NO: 924 - protein, 311 aa, Homo sapiens
MAFLVAHPMQFVYLLTTLCVFNMVFAKLGFSETVFSQRLSFTVLSAVGYFQWQKRPHLLPVGPLGRSMRWCLLLIWAQGLRQAPLASGMMTGTIETTGNISAEKGGSIILQCHLSSTTAQVTQVNWEQQDQLLAICNADLGWHISPSFKDRVAPGPGLGLTLQSLTVNDTGEYFCIYHTYPDGTYTGRIFLEVLESSVAEHGARFQIPLLGAMAATLVVICTAVIVVVALTRKKKALRIHSVEGDLRRKSAGQEEWSPSAPSPPGSCVQAEAAPAGLCGEQRGEDCAELHDYFNVLSYRSLGNCSFFTETG

SEQ ID NO: 925 - protein, 246 aa, Homo sapiens
MGPRARPALLLLMLLQTAVLQGRLLQSHTLQVILGCEMQEDNSTEGYWKYGYDGQDHLEFCPDTLDWRAAEPRAWPTKLEWERHKIRARQNRAYLERDCPAQLQQLLELGRGVLDQQVTTLRCRALNYYPQNITMKWLKDKQPMDAKEFEPKDVLPNGDGTYQGWITLAVPPGEEQRYTCQVEHPGLDQPLIVIWEPSPSGTLVIGVISGIAVFVVILFIGILFIILRKRQGSRGAMGHYVLAERE

SEQ ID NO: 926 - protein, 245 aa, Homo sapiens
MAFLGLFSLLVLQSMATGATFPEEAIADLSVNMYNRLRATGEDENILFSPLSIALAMGMMELGAQGSTQKEIRHSMGYDSLKNGEEFSFLKEFSNMVTAKESQYVMKIANSLFVQNGFHVNEEFLQMMKKYFNAAVNHVDFSQNVAVANYINKWVENNTNNLVKDLVSPRDFDAATYLALINAVYFKGNWKSQFRPENTRTFSFTKDDESEVQIPMMYQQGEFYYGEFSDGSNEAGGIYQVLEIP

SEQ ID NO: 927 - protein, 143 aa, Homo sapiens
MTALSSENCSFQYQLRQTNQPLDVNYLLFLIILGKILLNILTLGMRRKNTCQNFMEYFCISLAFVDLLLLVNISIILYFRDFVLLSIRFTKYHICLFTQIISFTYGFLHYPVFLTACIDYCLNFSKTTKLSFKCQKLFYFFTV

SEQ ID NO: 928 - protein, 334 aa, Homo sapiens
MGPRARPALLLLMLLQTAVLQGRLLRSHSLHYLFMGASEQDLGLSLFEALGYVDDQLFVFYDHESRRVEPRTPWVSSRISSQMWLQLSQSLKGWDHMFTVDFWTIMENHNHSKESHTLQVILGCEMQEDNSTEGYWKYGYDGQDHLEFCPDTLDWRAAEPRAWPTKLEWERHKIRARQNRAYLERDCPAQLQQLLELGRGVLDQQVTTLRCRALNYYPQNITMKWLKDKQPMDAKEFEPKDVLPNGDGTYQGWITLAVPPGEEQRYTCQVEHPGLDQPLIVIWEPSPSGTLVIGVISGIAVFVVILFIGILFIILRKRQGSRGAMGHYVLAERE

SEQ ID NO: 929 - protein, 535 aa, Homo sapiens
MTEALQWARYHWRRLIRGATRDDDSGPYNYSSLLACGRKSSQTPKLSGRHRIVVPHIQPFKDEYEKFSGAYVNNRIRTTKYTLLNFVPRNLFEQFHRAANLYFLFLVVLNWVPLVEAFQKEITMLPLVVVLTIIAIKDGLEDYRKYKIDKQINNLITKVYSRKEKKYIDRCWKDVTVGDFIRLSCNEVIPADMVLLFSTDPDGICHIETSGLDGESNLKQRQVVRGYAEQDSEVDPEKFSSRIECESPNNDLSRFRGFLEHSNKERVGLSKENLLLRGCTIRNTEAVVGIVVYAGHETKAMLNNSGPRYKRSKLERRANTDVLWCVMLLVIMCLTGAVGHGIWLSRYEKMHFFNVPEPDGHIISPLLAGFYMFWTMIILLQLGQIYFIQSDVDFYNEKMDSIVQCRALNIAEDLGQIQYLFSDKTGTLTENKMVFRRCSVAGFDYCHEENARRLESYQEAVSEDEDFIDTVSGSLSNMAKPRAPSCRTVHNGPLGNKPSNHLAGSSFTLGSGEGASEVPHSRQAAFSSPIVSMNA

SEQ ID NO: 930 - protein, 1817 aa, Homo sapiens
MRTGWATPRRPAGLLMLLFWFFDLAEPSGRAANDPFTIVHGNTGKCIKPVYGWIVADDCDETEDKLWKWVSQHRLFHLHSQKCLGLDITKSVNELRMFSCDSSAMLWWKCEHHSLYGAARYRLALKDGHGTAISNASDVWKKGGSEESLCDQPYHEIYTRDGNSYGRPCEFPFLIDGTWHHDCILDEDHSGPWCATTLNYEYDRKWGICLKPENGCEDNWEKNEQFGSCYQFNTQTALSWKEAYVSCQNQGADLLSINSAAELTYLKEKEGIAKIFWIGLNQLYSARGWEWSDHKPLNFLNWDPDRPSAPTIGGSSCARMDAESGLWQSFSCEAQLPYVCRKPLNNTVELTDVWTYSDTRCDAGWLPNNGFCYLLVNESNSWDKAHAKCKAFSSDLISIHSLADVEVVVTKLHNEDIKEEVWIGLKNINIPTLFQWSDGTEVTLTYWDENEPNVPYNKTPNCVSYLGELGQWKVQSCEEKLKYVCKRKGEKLNDASSDKMCPPDEGWKRHGETCYKIYEDEVPFGTNCNLTITSRFEQEYLNDLMKKYDKSLRKYFWTGLRDVDSCGEYNWATVGGRRRAVTFSNWNFLEPASPGGCVAMSTGKSVGKWEVKDCRSFKALSICKKMSGPLGPEEASPKPDDPCPEGWQSFPASLSCYKVFHAERIVRKRNWEEAERFCQALGAHLSSFSHVDEIKEFLHFLTDQFSGQHWLWIGLNKRSPDLQGSWQWSDRTPVSTIIMPNEFQQDYDIRDCAAVKVFHRPWRRGWHFYDDREFIYLRPFACDTKLEWVCQIPKGRTPKTPDWYNPDRAGIHGPPLIIEGSEYWFVADLHLNYEEAVLYCASNHSFLATITSFVGLKAIKNKIANISGDGQKWWIRISEWPIDDHFTYSRYPWHRFPVTFGEECLYMSAKTWLIDLGKPTDCSTKLPFICEKYNVSSLEKYSPDSAAKVQCSEQWIPFQNKCFLKIKPVSLTFSQASDTCHSYGGTLPSVLSQIEQDFITSLLPDMEATLWIGLRWTAYEKINKWTDNRELTYSNFHPLLVSGRLRIPENFFEEESRYHCALILNLQKSPFTGTWNFTSCSERHFVSLCQKYSEVKSRQTLQNASETVKYLNNLYKIIPKTLTWHSAKRECLKSNMQLVSITDPYQQAFLSVQALLHNSSLWIGLFSQDDELNFGWSDGKRLHFSRWAETNGQLEDCVVLDTDGFWKTVDCNDNQPGAICYYSGNETEKEVKPVDSVKCPSPVLNTPWIPFQNCCYNFIITKNRHMATTQDEVHTKCQKLNPKSHILSIRDEKENNFVLEQLLYFNYMASWVMLGITYRNKSLMWFDKTPLSYTHWRAGRPTIKNEKFLAGLSTDGFWDIQTFKVIEEAVYFHQHSILACKIEMVDYKEEYNTTLPQFMPYEDGIYSVIQKKVTWYEALNMCSQSGGHLASVHNQNGQLFLEDIVKRDGFPLWVGLSSHDGSESSFEWSDGSTFDYIPWKGQTSPGNCVLLDPKGTWKHEKCNSVKDGAICYKPTKSKKLSRLTYSSRCPAAKENGSRWIQYKGHCYKSDQALHSFSEAKKLCSKHDHSATIVSIKDEDENKFVSRLMRENNNITMRVWLGLSQHSVDCPSSTWIQFQDSCYIFLQEAIKVESIEDVRNQCTDHGADMISIHNEEENAFILDTLKKQWKGPDDILLGMFYDTDDASFKWFDNSNMTFDKWTDQDDDEDLVDTCAFLHIKTGEWKKGNCEVSSVEGTLCKTAIPYKRKYLSDNHILISALVIASTVILTVLGAIIWFLYKKHSDSRFTTVFSTAPQSPYNEDCVLVVGEENEYPVQFD

SEQ ID NO: 931 - protein, 274 aa, Homo sapiens
MRAPLLPPAPVVLSLLILGSGHYAAGLDLNDTYSGKREPFSGDHSADGFEVTSRSEMSSGSEISPVSEMPSSSEPSSGADYDYSEEYDNEPQIPGYIVDDSVRVEQVVKPPQNKTESENTSDKPKRKKKGGKNGKNRRNRKKKNPCNAEFQNFCIHGECKYIEHLEAVTCKCQQEYFGERCGEKSMKTHSMIDSSLSKIALAAIAAFMSAVILTAVAVITVQISHWSHCQVIAINDESVLFPVDHKTMDPFCYDGFKLSIVTFYAISVYKGARR

SEQ ID NO: 932 - protein, 193 aa, Homo sapiens
MSGELPPNINIKEPRWDQSTFIGRANHFFTVTDPRNILLTNEQLESARKIVHDYRQGIVPPGLTENELWRAKYIYDSAFHPDTGEKMILIGRMSAQVPMNMTITGCMMTFYRTTPAVLFWQWINQSFNAVVNYTNRSGDAPLTVNELGTAYVSATTGAVATALGLNALTKHVSPLIGRFVPFAAVAAANCINI

SEQ ID NO: 933 - protein, 662 aa, Homo sapiens
MKKFSRMPKSEGGSGGGAAGGGAGGAGAGAGCGSGGSSVGVRVFAVGRHQVTLEESLAEGGFSTVFLVRTHGGIRCALKRMYVNNMPDLNVCKREITIMKELSGHKNIVGYLDCAVNSISDNVWEVLILMEYCRAGQVVNQMNKKLQTGFTEPEVLQIFCDTCEAVARLHQCKTPIIHRDLKVENILLNDGGNYVLCDFGSATNKFLNPQKDGVNVVEEEIKKYTTLSYRAPEMINLYGGKPITTKADIWALGCLLYKLCFFTLPFGESQVAICDGNFTIPDNSRYSRNIHCLIRFMLEPDPEHRPDIFQVSYFAFKFAKKDCPVSNINNSSIPSALPEPMTASEAAARKSQIKARITDTIGPTETSIAPRQRPKANSATTATPSVLTIQSSATPVKVLAPGEFGNHRPKGALRPGNGPEILLGQGPPQQPPQQHRVLQQLQQGDWRLQQLHLQHRHPHQQQQQQQQQQQQQQQQQQQQQQQQQQQHHHHHHHHLLQDAYMQQYQHATQQQQMLQQQFLMHSVYQPQPSASQYPTMMPQYQQAFFQQQMLAQHQPSQQQASPEYLTSPQEFSPALVSYTSSLPAQVGTIMDSSYSANRSVADKEAIANFTNQKNISNPPDMSGWNPFGEDNFSKLTEEELLDREFDLLRSSKGHLKAYFASQ

SEQ ID NO: 934 - protein, 354 aa, Homo sapiens
VWSITGSECLPGGNLFGIIILFYCAIIGGKLLGLIKLPTLPPLPSLLGMLLAGFLIRNIPVINDNVQIKHKWSSSLRSIALSIILVRAGLGLDSKALKKLKGVCVRLSMGPCIVEACTSALLAHYLLGLPWQWGFILGFVLGAVSPAVVVPSMLLLQGGGYGVEKGVPTLLMAAGSFDDILAITGFNTCLGIAFSTGSTVFNVLRGVLEVVIGVATGSVLGFFIQYFPSRDQDKLVCKRTFLVLGLSVLAVFSSVHFGFPGSGGLCTLVMAFLAGMGWTSEKAEVEKIIAVAWDIFQPLLFGLIGAEVSIASLRPETVGSADSITGNFGTERPKLLGPPSTQLRFHFFHIQLST

SEQ ID NO: 935 - protein, 125 aa, Homo sapiens
MQAPRAALVFALVIALVPVGRGNYEELENSGDTTVESERPNKVTIPSTFAAVTIKETLNANINSTNFAPDENQLEFILMVLIPLILLVLLLLSVVFLATYYKRKRTKQEPSSQGSQSALQTYLLV

SEQ ID NO: 936 - protein, 480 aa, Homo sapiens
MGDEDKRITYEDSEPSTGMNYTPSMHQEAQEETVMKLKGIDANEPTEGSILLKSSEKKLQETPTEANHVQRLRQMLACPPHGLLDRVITNGMLLAGFLIRNIPVINDNVQIKHKWSSSLRSIALSIILVRAGLGLDSKALKKLKGVCVRLSMGPCIVEACTSALLAHYLLGLPWQWGFILGFVLGAVSPAVVVPSMLLLQGGGYGVEKGVPTLLMAAGSFDDILAITGFNTCLGIAFSTGSTVFNVLRGVLEVVIGVATGSVLGFFIQYFPSRDQDKLVCKRTFLVLGLSVLAVFSSVHFGFPGSGGLCTLVMAFLAGMGWTSEKAEVEKIIAVAWDIFQPLLFGLIGAEVSIASLRPETVGLCVATVGIAVLIRILTTFLMVCFAGFNLKEKIFISFAWLPKATVQAAIGSVALDTARSHGEKQLEDYGMDVLTVAFLSILITAPIGSLLIGLLGPRLLQKVEHQNKDEEVQGETSVQV

SEQ ID NO: 937 - protein, 89 aa, Homo sapiens
MAEGGFDPCECVCSHEHAMRRLINLLRQSQSYCTDTECLQELPGPSGDNGISVTMILVAWMVIALILFLLRPPNLRGSSLPGKPTSPHN

SEQ ID NO: 938 - protein, 189 aa, Homo sapiens
GSKFSKTQTFQGCGILQPDPPANITVTAVARNPRWLSVTWQDPHSWNSSFYRLRFELRYRAERSKTFTTWMVKDLQHHCVIHDAWSGLRHVVQLRAQEEFGQGEWSEWSPEAMGTPWTESRSPPAENEVSTPMQALTTNKDDDNILFRDSANATSLPVQDSSSVPLPTFLVAGGSLAFGTLLCIAIVLR

SEQ ID NO: 939 - protein, 1873 aa, Homo sapiens
MRTGWATPRRPAGLLMLLFWFFDLAEPSGRAANDPFTIVHGNTGKCIKPVYGWIVADDCDETEDKLWKWVSQHRLFHLHSQKCLGLDITKSVNELRMFSCDSSAMLWWKCEHHSLYGAARYRLALKDGHGTAISNASDVWKKGGSEESLCDQPYHEIYTRDGNSYGRPCEFPFLIDGTWHHDCILDEDHSGPWCATTLNYEYDRKWGICLKPENGCEDNWEKNEQFGSCYQFNTQTALSWKEAYVSCQNQGADLLSINSAAELTYLKEKEGIAKIFWIGLNQLYSARGWEWSDHKPLNFLNWDPDRPSAPTIGGSSCARMDAESGLWQSFSCEAQLPYVCRKPLNNTVELTDVWTYSDTRCDAGWLPNNGFCYLLVNESNSWDKAHAKCKAFSSDLISIHSLADVEVVVTKLHNEDIKEEVWIGLKNINIPTLFQWSDGTEVTLTYWDENEPNVPYNKTPNCVSYLGELGQWKVQSCEEKLKYVCKRKGEKLNDASSDKMCPPDEGWKRHGETCYKIYEDEVPFGTNCNLTITSRFEQEYLNDLMKKYDKSLRKYFWTGLRDVDSCGEYNWATVGGRRRAVTFSNWNFLEPASPGGCVAMSTGKSVGKWEVKDCRSFKALSICKKMSGPLGPEEASPKPDDPCPEGWQSFPASLSCYKVFHAERIVRKRNWEEAERFCQALGAHLSSFSHVDEIKEFLHFLTDQFSGQHWLWIGLNKRSPDLQGSWQWSDRTPVSTIIMPNEFQQDYDIRDCAAVKVFHRPWRRGWHFYDDREFIYLRPFACDTKLEWVCQIPKGRTPKTPDWYNPDRAGIHGPPLIIEGSEYWFVADLHLNYEEAVLYCASNHSFLATITSFVGLKAIKNKIANISGDGQKWWIRISEWPIDDHFTYSRYPWHRFPVTFGEECLYMSAKTWLIDLGKPTDCSTKLPFICEKYNVSSLEKYSPDSAAKVQCSEQWIPFQNKCFLKIKPVSLTFSQASDTCHSYGGTLPSVLSQIEQDFITSLLPDMEATLWIGLRWTAYEKINKWTDNRELTYSNFHPLLVSGRLRIPENFFEEESRYHCALILNLQKSPFTGTWNFTSCSERHFVSLCQKYSEVKSRQTLQNASETVKYLNNLYKIIPKTLTWHSAKRECLKSNMQLVSITDPYQQAFLSVQALLHNSSLWIGLFSQDDELNFGWSDGKRLHFSRWAETNGQLEDCVVLDTDGFWKTVDCNDNQPGAICYYSGNETEKEVKPVDSVKCPSPVLNTPWIPFQNCCYNFIITKNRHMATTQDEVHTKCQKLNPKSHILSIRDEKENNFVLEQLLYFNYMASWVMLGITYRNKSLMWFDKTPLSYTHWRAGRPTIKNEKFLAGLSTDGFWDIQTFKVIEEAVYFHQHSILACKIEMVDYKEEYNTTLPQFMPYEDGIYSVIQKKVTWYEALNMCSQSGGHLASVHNQNGQLFLEDIVKRDGFPLWVGLSSHDGSESSFEWSDGSTFDYIPWKGQTSPGNCVLLDPKGTWKHEKCNSVKDGAICYKPTKSKKLSRLTYSSRCPAAKENGSRWIQYKGHCYKSDQALHSFSEAKKLCSKHDHSATIVSIKDEDENKFVSRLMRENNNITMRVWLGLSQHSVDQSWSWLDGSEVTFVKWENKSKSGVGRCSMLIASNETWKKVECEHGFGRVVCKVPLDCPSSTWIQFQDSCYIFLQEAIKVESIEDVRNQCTDHGADMISIHNEEENAFILDTLKKQWKGPDDILLGMFYDTDDASFKWFDNSNMTFDKWTDQDDDEDLVDTCAFLHIKTGEWKKGNCEVSSVEGTLCKTAIPYKRKYLSDNHILISALVIASTVILTVLGAIIWFLYKKHSDSRFTTVFSTAPQSPYNEDCVLVVGEENEYPVQFD

SEQ ID NO: 940 - protein, 229 aa, Homo sapiens
MATNESVSIFSSASLAVEYVDSLLPENPLQEPFKNAWNYMLNNYTKFQIATWGSLIVHEALYFLFCLPGFLFQFIPYMKKYKIQKDKPETWENQWKCFKVLLFNHFCIQLPLICGTYYFTEYFNIPYDWERMPRWYFLLARCFGCAVIEDTWHYFLHRLLHHKRIYKYIHKVHHEFQAPFGMEAEYAHPLETLILGTGFFIGIVLLCDHVILLWAWVTIRLLETIDVHR

SEQ ID NO: 941 - protein, 627 aa, Homo sapiens
MLDLSYNNLNVVGNDSFAWLPQLEYFFLEYNNIQHLFSHSLHGLFNVRYLNLKRSFTKQSISLASLPKIDDFSFQWLKCLEHLNMEDNDIPGIKSNMFTGLINLKYLSLSNSFTSLRTLTNETFVSLAHSPLHILNLTKNKISKIESDAFSWLGHLEVLDLGLNEIGQELTGQEWRGLENIFEIYLSYNKYLQLTRNSFALVPSLQRLMLRRVALKNVDSSPSPFQPLRNLTILDLSNNNIANINDDMLEGLEKLEILDLQHNNLARLWKHANPGGPIYFLKGLSHLHILNLESNGFDEIPVEVFKDLFELKIIDLGLNNLNTLPASVFNNQVSLKSLNLQKNLITSVEKKVFGPAFRNLTELDMRFNPFDCTCESIAWFVNWINETHTNIPELSSHYLCNTPPHYHGFPVRLFDTSSCKDSAPFELFFMINTSILLIFIFIVLLIHFEGWRISFYWNVSVHRVLGFKEIDRQTEQFEYAAYIIHAYKDKDWVWEHFSSMEKEDQSLKFCLEERDFEAGVFELEAIVNSIKRSRKIIFVITHHLLKDPLCKRFKVHHAVQQAIEQNLDSIILVFLEEIPDYKLNHALCLRRGMFKSHCILNWPVQKERIGAFRHKLQVALGSKNSVH

SEQ ID NO: 942 - protein, 98 aa, Homo sapiens
MNMSVLTLQEYEFEKQFNENEAIQWMQENWKKSFLFSALYAAFIFGGRHLMNKRAKFELRKPLVLWSLTLAVFRCYNNLKQLTLYSVLFELVLIWCTF

SEQ ID NO: 943 - protein, 795 aa, Homo sapiens
MPRAPRCRAVRSLLRSHYREVLPLATFVRRLGPQGWRLVQRGDPAAFRALVAQCLVCVPWDARPPPAAPSFRQVSCLKELVARVLQRLCERGAKNVLAFGFALLDGARGGPPEAFTTSVRSYLPNTVTDALRGSGAWGLLLRRVGDDVLVHLLARCALFVLVAPSCAYQVCGPPLYQLGAATQARPPPHASGPRRRLGCERAWNHSVREAGVPLGLPAPGARRRGGSASRSLPLPKRPRRGAAPEPERTPVGQGSWAHPGRTRGPSDRGFCVVSPARPAEEATSLEGALSGTRHSHPSVGRQHHAGPPSTSRPPRPWDTPCPPVYAETKHFLYSSGDKEQLRPSFLLSSLRPSLTGARRLVETIFLGSRPWMPGTPRRLPRLPQRYWQMRPLFLELLGNHAQCPYGVLLKTHCPLRAAVTPAAGVCAREKPQGSVAAPEEEDTDPRRLVQLLRQHSSPWQVYGFVRACLRRLVPPGLWGSRHNERRFLRNTKKFISLGKHAKLSLQELTWKMSVRDCAWLRRSPGVGCVPAAEHRLREEILAKFLHWLMSVYVVELLRSFFYVTETTFQKNRLFFYRKSVWSKLQSIGIRQHLKRVQLRELSEAEVRQHREARPALLTSRLRFIPKPDGLRPIVNMDYVVGARTFRREKRAERLTSRVKALFSVLNYERARRPGLLGASVLGLDDIHRAWRTFVLRVRAQDPPPELYFVKDRLTEVIASIIKPQNTYCVRRYAVVQKAAHGHVRKAFKSHVLRPVPGDPAGLHPLHAALQPVLRRHGEQAVCGDSAGRAAPAFGG

SEQ ID NO: 944 - protein, 85 aa, Homo sapiens
MATNESVSIFSSASLAVEYVDSLLPENPLQEPFKNAWNYMLNNYTKFQIATWGSLIVHEALYFLFCLPGFLFQFIPYMKKYKIQK

SEQ ID NO: 945 - protein, 120 aa, Homo sapiens
MASSSSLVPDRLRLPLCFLGVFVCYFYYGILQEKITRGKYGEGAKQETFTFALTLVFIQCVINAVFAKIWWIVPGAGSMLPVLSPIWVPWSPAIQHYSLSTTQLRSLVNPASQSQSCSLG

SEQ ID NO: 946 - protein, 220 aa, Homo sapiens
MATNESVSIFSSASLAVEYVDSLLPENPLQEPFKNAWNYMLNNYTKFQIATWGSLIVHEALYFLFCLPGFLFQFIPYMKKYKIQKDKPETWENQWKCFKVLLFNHFCIQLPLICGTYYFTEYFNIPYDWERMPRWYFLLARCFGCAVIEDTWHYFLHRLLHHKRIYKYIHKVHHEFQAPFGMEAEYAHPLETLILGTGFFIGIVLLCDHVILLWAWVTIR

SEQ ID NO: 947 - protein, 417 aa, Homo sapiens
MGDEDKRITYEDSEPSTGMNYTPSMHQEAQEETVMKLKGIDANEPTEGSILLKSSEKKLQETPTEANHVQRLRQMLACPPHGLLDRVITNGMLLAGFLIRNIPVINDNVQIKHKWSSSLRSIALSIILVRAGLGLDSKALKKLKGVCVRLSMGPCIVEACTSALLAHYLLGLPWQWGFILGFVLGAVSPAVVVPSMLLLQGGGYGVEKGVPTLLMAAGSFDDILAITGFNTCLGIAFSTGSTVFNVLRGVLEVVIGVATGSVLGFFIQYFPSRDQDKLVCKRTFLVLGLSVLAVFSSVHFGFPGSGGLCTLVMAFLAGMGWTSEKAEVEKIIAVAWDIFQPLLFGLIGAEVSIASLRPETVGCNRICGFGHSKVTWRETIRRLWNGCVDSGIFVHPHHSPNWKSAYWFTGPQASAES

SEQ ID NO: 948 - protein, 136 aa, Homo sapiens
MNMSVLTLQEYEFEKQFNENEAIQWMQENWKKSFLFSALYAAFIFGGRHLMNKRAKFELRKPLVLWSLTLAVFSIFGALRTGAYMVYILMTKGLKQSVCDQGFYNGPVSKFWAYAFVLSKAPELGDTIFIILRKQK

SEQ ID NO: 949 - protein, 146 aa, Homo sapiens
MVKLGNNFAEKGTKQPLLEDGFDTIPLMTPLDVNQLQFPPPDKVSVLVLFALAFLTCVVFLVVYKVYKYDRACPDGFVLKNTQCIPEGLESYYAEQDSSAREKFYTVINHYNLAKQSITRSVSPWMSVLSEEKLSEQETEAAEKSA

SEQ ID NO: 950 - protein, 1306 aa, Homo sapiens
MQRGAALCLRLWLCLGLLDGLVSGYSMTPPTLNITEESHVIDTGDSLSISCRGQHPLEWAWPGAQEAPATGDKDSEDTGVVRDCEGTDARPYCKVLLLHEVHANDTGSYVCYYKYIKARIEGTTAASSYVFVRDFEQPFINKPDTLLVNRKDAMWVPCLVSIPGLNVTLRSQSSVLWPDGQEVVWDDRRGMLVSTPLLHDALYLQCETTWGDQDFLSNPFLVHITGNELYDIQLLPRKSLELLVGEKLVLNCTVWAEFNSGVTFDWDYPGKQAERGKWVPERRSQQTHTELSSILTIHNVSQHDLGSYVCKANNGIQRFRESTEVIVHENPFISVEWLKGPILEATAGDELVKLPVKLAAYPPPEFQWYKDGKALSGRHSPHALVLKEVTEASTGTYTLALWNSAAGLRRNISLELVVNVPPQIHEKEASSPSIYSRHSRQALTCTAYGVPLPLSIQWHWRPWTPCKMFAQRSLRRRQQQDLMPQCRDWRAVTTQDAVNPIESLDTWTEFVEGKNKTVSKLVIQNANVSAMYKCVVSNKVGQDERLIYFYVTTIPDGFTIESKPSEELLEGQPVLLSCQADSYKYEHLRWYRLNLSTLHDAHGNPLLLDCKNVHLFATPLAASLEEVAPGARHATLSLSIPRVAPEHEGHYVCEVQDRRSHDKHCHKKYLSVQALEAPRLTQNLTDLLVNVSDSLEMQCLVAGAHAPSIVWYKDERLLEEKSGVDLADSNQKLSIQRVREEDAGRYLCSVCNAKGCVNSSASVAVEGSEDKGSMEIVILVGTGVIAVFFWVLLLLIFCNMRRPAHADIKTGYLSIIMDPGEVPLEEQCEYLSYDASQWEFPRERLHLGRVLGYGAFGKVVEASAFGIHKGSSCDTVAVKMLKEGATASEHRALMSELKILIHIGNHLNVVNLLGACTKPQGPLMVIVEFCKYGNLSNFLRAKRDAFSPCAEKSPEQRGRFRAMVELARLDRRRPGSSDRVLFARFSKTEGGARRASPDQEAEDLWLSPLTMEDLVCYSFQVARGMEFLASRKCIHRDLAARNILLSESDVVKICDFGLARDIYKDPDYVRKGSARLPLKWMAPESIFDKVYTTQSDVWSFGVLLWEIFSLGASPYPGVQINEEFCQRLRDGTRMRAPELATPAIRRIMLNCWSGDPKARPAFSELVEILGDLLQGRGLQEEEEVCMAPRSSQSSEEGSFSQVSTMALHIAQADAEDSPPSLQRHSLAARYYNWVSFPGCLARGAETRGSSRMKTFEEFPMTPTTYKGSVDNQTDSGMVLASEEFEQIESRHRQESGFRGTRRTRGA

SEQ ID NO: 951 - protein, 108 aa, Homo sapiens
MNMSVLTLQEYEFEKQFNENEAIQWMQENWKKSFLFSALYAAFIFGGRHLMNKRAKFELRKPLVLWSLTLAVFSIFGALRTGAYMVYILMTKGLKQSVCDQGFYNGPV

SEQ ID NO: 952 - protein, 111 aa, Homo sapiens
MLSRLFRMHGLFVASHPWEVIVGTVTLTICMMSMNMFTGNNKICGWNYECPKFEEDVLSSDIIILTITRCIAILYIYFQFQNLRQLGSKYILGIAGLFTIFSSFVFSTVVI

SEQ ID NO: 953 - protein, 198 aa, Homo sapiens
MAEDKETKHGGHKNGRKGGLSGTSFFTWFMVIALLGVWTSVAVVWFDLVDYEEVLGKLGIYDADGDGDFDVDDAKVLLGLKERSTSEPAVPPEEAEPHTEPEEQVPVEAEPQNIEDEAKEQIQSLLHEMVHAEHETEHSYHVEETDSSEPVVEDERLHHDTDDVTYQVYEEQAVYEPLENEGIEITEVTAPPEDNPVE

SEQ ID NO: 954 - protein, 313 aa, Homo sapiens
MYRISQLMSTPVASSSRLEREYAGELSPTCIFPSFTCDSLDGYHSFECGSIDPLTGSHYTCRRSPRLLTNGYYIWTEDSFLCDKDGNITLNPSQTSVMYKENLVRIFRKKKRICHSFSSLFNLSTSKSWLHGSIFGDINSSPSEDNWLKGTRRLDTDHCNGNADDLDCSSLTDDWESGKMNAESVITSSSSHIISQPPGGNSHSLSLQSQLTASERFQENSSDHSETRLLQEVFFQAILLAVCLIISACARWFMGEILASVFTCSLMITVACLSKFDNHLGMPSMNVLHLNIWKLSNLQSTWNQVFYWKGVSE

SEQ ID NO: 955 - protein, 955 aa, Homo sapiens
MPGGAGAARLCLLAFALQPLRPRAAREPGWTRGSEEGSPKLQHELIIPQWKTSESPVREKHPLKAELRVMAEGRELILDLEKNEQLFAPSYTETHYTSSGNPQTTTRKLEDHCFYHGTVRETELSSVTLSTCRGIRGLITVSSNLSYVIEPLPDSKGQHLIYRSEHLKPPPGNCGFEHSKPTTRDWALQFTQQTKKRPRRMKREDLNSMKYVELYLVADYLEFQKNRRDQDATKHKLIEIANYVDKFYRSLNIRIALVGLEVWTHGNMCEVSENPYSTLWSFLSWRRKLLAQKYHDNAQLITGMSFHGTTIGLAPLMAMCSVYQSGGVNMDHSENAIGVAATMAHEMGHNFGMTHDSADCCSASAADGGCIMAAATGHPFPKVFNGCNRRELDRYLQSGGGMCLSNMPDTRMLYGGRRCGNGYLEDGEECDCGEEEECNNPCCNASNCTLRPGAECAHGSCCHQCKLLAPGTLCREQARQCDLPEFCTGKSPHCPTNFYQMDGTPCEGGQAYCYNGMCLTYQEQCQQLWGPGARPAPDLCFEKVNVAGDTFGNCGKDMNGEHRKCNMRDAKCGKIQCQSSEARPLESNAVPIDTTIIMNGRQIQCRGTHVYRGPEEEGDMLDPGLVMTGTKCGYNHICFEGQCRNTSFFETEGCGKKCNGHGVCNNNQNCHCLPGWAPPFCNTPGHGGSIDSGPMPPESVGPVVAGVLVAILVLAVLMLMYYCCRQNNKLGQLKPSALPSKLRQQFSCPFRVSQNSGTGHANPTFKLQTPQGKRKVINTPEILRKPSQPPPRPPPDYLRGGSPPAPLPAHLSRAARNSPGPGSQIERTESSRRPPPSRPIPPAPNCIVSQDFSRPRPPQKALPANPVPGRRSLPRPGGASPLRPPGAGPQQSRPLAALAPKVSPREALKVKAGTRGLQGGRCRVEKTKQFMLLVVWTELPEQKPRAKHSCFLVPA

SEQ ID NO: 956 - protein, 251 aa, Homo sapiens
MVSWMICRLVVLVFGMLCPAYASYKAVKTKNIREYVRWMMYWIVFALFMAAEIVTDIFISWFPFYYEIKMAFVLWLLSPYTKGASLLYRKFVHPSLSRHEKEIDAYIVQAKERSYETVLSFGKRGLNIAASAAVQAATKSQGALAGRLRSFSMQDLRSISDAPAPAYHDPLYLEDQVSHRRPPIGHLALPEGSDEEKDCALRRGQLGSAASAPFLPRALQGSRAIWRDLGLHIWPACTSCLGPTLLTPADG

SEQ ID NO: 957 - protein, 99 aa, Homo sapiens
DDLDCSSLTDDWESGKMNAESVITSSSSHIISQPPGGNSHSLSLQSQLTASERFQENSSDHSETRLLQEVFFQAILLAVCLIISACARNNNANHTMGED

SEQ ID NO: 958 - protein, 75 aa, Homo sapiens
MCRKCSRGCPRGMVKVKDCTPWSDIECVHKESGNGHNIWVILVVTLVVPLLLVAVLIVCCCIGSGCGGDPKCMDR

SEQ ID NO: 959 - protein, 232 aa, Homo sapiens
MSYVFVNDSSQTNVPLLQACIDGDFNYSKRLLESGFDPNIRDSRGRTGLHLAAARGNVDICQLLHKFGADLLATDYQGNTALHLCGHVDTIQFLVSNGLKIDICNHQGATPLVLAKRRGVNKDVIRLLESLEEQEVKGFNRGTHSKLETMQTAESESAMESHSLLNPNLQQGEGVLSSFRTTWQEFVEDLGFWRVLLLIFVIALLSLGIAYYRRTLRLGSFARQDRSRIQAI

SEQ ID NO: 960 - protein, 174 aa, Homo sapiens
GVARPAMAPDPVAAETAAQGPTPRYFTWDEVAQRSGCEERWLVIDRKVYNISEFTRRHPGGSRVISHYAGQDATKELTDEFRELRATVERMGLMKANHVFFLLYLLHILLLDGAAWLTLWVFGTSFLPFLLCAVLLSAVQAQAGWLQHDFGHLSVFSTSKWNHLLHHFVIGHLK

SEQ ID NO: 961 - protein, 270 aa, Homo sapiens
WSTMEGDCLSCMKYLMFVFNFFIFLGGACLLAIGIWVMVDPTGFREIVAANPLLLTGAYILLAMGGLLFLLGFLGCCGAVRENKCLLLFFFLFILIIFLAELSAAILAFIFRENLTREFFTKELTKHYQGNNDTDVFSATWNSVMITFGCCGVNGPEDFKFASVFRLLTLDSEEVPEACCRREPQSRDGVLLSREECLLGRSLFLNKQGCYTVILNTFETYVYLAGALAIGVLAIEEERAHSVSQATGILYQLPASPQAFQSPGTLGATA

SEQ ID NO: 962 - protein, 180 aa, Homo sapiens
MNIEVGNISYTGAIISWSSSEPCLEDYYHIMYRPNWNSIFSGYLRYSFHHEEKVPRTISSVVLEHLAPSTLYFLCISCKKAAFPYRHYCTMFHTLDKSPLAPGSSLVDPQISLWVLMAILLACFTAVLAFICLQFWCVRCHEPRWSYRAGHMEEANGLVRWPEEAPDLGQREEDLQGLPL

SEQ ID NO: 963 - protein, 413 aa, Homo sapiens
MTREPPGCRRVNSLMLYTLRSITSHRSSHPERWATSSQDAFRAFHPDLEFVGKFLKPLLIGELAPEEPSQDHGKNSKITEDFRALRKTAEDMNLFKTNHVFFLLLLAHIIALESIAWFTVFYFGNGWIPTLITAFVLATSQAQAGWLQHDYGHLSVYRKPKWNHLVHKFVIGHLKGASANWWNHRHFQHHAKPNIFHKDPDVNMLHVFVLGEWQPIEYGKKKLKYLPYNHQHEYFFLIGPPLLIPMYFQYQIIMTMIVHKNWVDLAWAVSYYIRFFITYIPFYGILGALLFLNFIRFLESHWFVWVTQMNHIVMEIDQEAYRDWFSSQLTATCNVEQSFFNDWFSGHLNFQIEHHLFPTMPRHNLHKIAPLVKSLCAKHGIEYQEKPLLRALLDIIRSLKKSGKLWLDAYLHK

SEQ ID NO: 964 - protein, 419 aa, Homo sapiens
MSCAGRAGPARLAALALLTCSLWPARADNASQEYYTALINVTVQEPGRGAPLTFRIDRGRYGLDSPKAEVRGQVLAPLPLHGVADHLGCDPQTRFFVPPNIKQWIALLQRGNCTFKEKISRAAFHNAVAVVIYNNKSKEEPVTMTHPGTGDIIAVMITELRGKDILSYLEKNISVQMTIAVGTRMPPKNFSRGSLVFVSISFIVLMIISSAWLIFYFIQKIRYTNARDRNQRRLGDAAKKAISKLTTRTVKKGDKETDPDFDHCAVCIESYKQNDVVRILPCKHVFHKSCVDPWLSEHCTCPMCKLNILKALGIVPNLPCTDNVAFDMERLTRTQAVNRRSALGDLAGDNSLGLEPLRTSGISPLPQDGELTPRTGEINIAVTSGHFFHRNSLSPRSLVYESEFSTIEPSLDMYDENKT

SEQ ID NO: 965 - protein, 275 aa, Homo sapiens
IEPVYFYIGIVFGLQGIYVTALFVTSWLMSGTWLAGMLTVAWFVINRVDTTRIEYSIPLRENWALPYFACQIAALTGYLKSNLNTYGERFCYLLMSASTYTFMMMWEYSHYLLFLQAISLFLLDTFSVEQSDKLNVKKGSFVAKIIKVINFYLVCTLTITLNIIMKMFVPHKENGHMLKFLEVKFGLNMTKNFTMNWLLCQESLQAPSQDFFLRLTQSSLLPFYILVLIICFLSMLQVIFRRINGKSLKETVTLEDGRIGERPEIIYHVIHTILL

SEQ ID NO: 966 - protein, 119 aa, Homo sapiens
MPPRITDLSLPNYLMASSVGLLPTQLLNSYLGTTLRTMEDVIAEQSVSGYFVFCLQIIISIGLMFYVVHRAQVELNAAIVACEMELKSSLVKGNQPNTSGSSFYNKRTLTFSGGGINVV

SEQ ID NO: 967 - protein, 68 aa, Homo sapiens
MALIVLQLTFGIGYVTLLQIHSIYSQLIILDLLVPVIGLITELPLHIRETLLFTSSLILTLNTVFVLA

SEQ ID NO: 968 - protein, 103 aa, Homo sapiens
MNLFKTNHVFFLLLLAHIIALESIAWFTVFYFGNGWIPTLITAFVLATSQAQAGWLQHDYGHLSVYRKPKWNHLVHKFVIGHLKGASANWWNHRHFQHHAKPN

SEQ ID NO: 969 - protein, 93 aa, Homo sapiens
MNLFKTNHVFFLLLLAHIIALESIAWFTVFYFGNGWIPTLITAFVLATSQAQAGWLQHDYGHLSVYRKPKWNHLVHKFVIGHLKGASANWWNH

SEQ ID NO: 970 - protein, 419 aa, Homo sapiens
MSCAGRAGPARLAALALLTCSLWPARADNASQEYYTALINVTVQEPGRGAPLTFRIDRGRYGLDSPKAEVRGQVLAPLPLHGVADHLGCDPQTRFFVPPNIKQWIALLQRGNCTFKEKISRAAFHNAVAVVIYNNKSKEEPVTMTHPGTGDIIAVMITELRGKDILSYLEKNISVQMTIAVGTRMPPKNFSRGSLVFVSISFIVLMIISSAWLIFYFIQKIRYTNARDRNQRRLGDAAKKAISKLTTRTVKKGDKETDPDFDHCAVCIESYKQNDVVRILPCKHVFHKSCVDPWLSEHCTCPMCKLNILKALGIVPNLPCTDNVAFDMERLTRTQAVNRRSALGDLAGDNSLGLEPLRTSGISPLPQDGELTPRTGEINIAVTKEWFIIASFGLLSALTLCYMIIRATASLNANEVEWF

SEQ ID NO: 971 - protein, 479 aa, Homo sapiens
MLRRKGTNISETSLIGTAACTSTSSQNDPEVIIVGAGVLGSALAAVLSRDGRKVTVIERDLKEPDRIVGEFLQPGGYHVLKDLGLGDTVEGLDAQVVNGYMIHDQESKSEVQIPYPLSENNQVQSGRAFHHGRFIMSLRKAAMAEPNAKFIEGVVLQLLEEDDVVMGVQYKDKETGDIKELHAPLTVVADGLFSKFRKSLVSNKVSVSSHFVGFLMKNAPQFKANHAELILANPSPVLIYQISSSETRVLVDIRGEMPRNLREYMVEKIYPQIPDHLKEPFLEATDNSHLRSMPASFLPPSSVKKRGVLLLGDAYNMRHPLTGGGMTVAFKDIKLWRKLLKGIPDLYDDAAIFEAKKSFYWARKTSHSFVVNILAQALYELFSATDDSLHQLRKACFLYFKLGGECVAGPVGLLSVLSPNPLVLIGHFFAVAIYAVYFCFKSEPWITKPRALLSSGAVLYKACSVIFPLIYSEMKYMVH

SEQ ID NO: 972 - protein, 40 aa, Homo sapiens
MFPVGRIHRHLKTRTTSHGRVGATAAVYSAAILEYLTAEV

SEQ ID NO: 973 - protein, 58 aa, Homo sapiens
MGRVWDLPGVLKVEGFRATMAQRLVRVLQICAGHVPGVSALNLLSLLRSSEGPSLEDL

SEQ ID NO: 974 - protein, 175 aa, Homo sapiens
MSYVFVNDSSQTNVPLLQACIDGDFNYSKRLLESGFDPNIRDSRGRTGLHLAAARGNVDICQLLHKFGADLLATDYQGNTALHLCGHVDTIQFLVSNGLKIDICAMESHSLLNPNLQQGEGVLSSFRTTWQEFVEDLGFWRVLLLIFVIALLSLGIAYYVSGVLPFVENQPELVH

SEQ ID NO: 975 - protein, 273 aa, Homo sapiens
MFSHLPFDCVLLLLLLLLTRSSEVEYRAEVGQNAYLPCFYTPAAPGNLVPVCWGKGACPVFECGNVVLRTDERDVNYWTSRYWLNGDFRKGDVSLTIENVTLADSGIYCCRIQIPGIMNDEKFNLKLVIKPAETQTLGSLPDINLTQISTLANELRDSRLANDLRDSGATIRIGIYIGAGICAGLALALIFGALIFKWYSHSKEKIQNLSLISLANLPPSGLANAVAEGIRSEENIYTIEENVYEVEEPNEYYCYVSSRQQPSQPLGCRFAMP

SEQ ID NO: 976 - protein, 488 aa, Homo sapiens
DCGEEEECNNPCCNASNCTLRPGAECAHGSCCHQCKLLAPGTLCREQARQCDLPEFCTGKSPHCPTNFYQMDGTPCEGGQAYCYNGMCLTYQEQCQQLWGPGARPAPDLCFEKVNVAGDTFGNCGKDMNGEHRKCNMRDAKCGKIQCQSSEARPLESNAVPIDTTIIMNGRQIQCRGTHVYRGPEEEGDMLDPGLVMTGTKCGYNHICFEGQCRNTSFFETEGCGKKCNGHGVCNNNQNCHCLPGWAPPFCNTPGHGGSIDSGPMPPESVGPVVAGVLVAILVLAVLMLMYYCCRQNNKLGQLKPSALPSKLRQQFSCPFRVSQNSGTGHANPTFKLQTPQGKRKVINTPEILRKPSQPPPRPPPDYLRGGSPPAPLPAHLSRAARNSPGPGSQIERTESSRRPPPSRPIPPAPNCIVSQDFSRPRPPQKALPANPVPGRRSLPRPGGASPLRPPGAGPQQSRPLAALAPKRVWKTCNLKTGDQFQSQ

SEQ ID NO: 977 - protein, 386 aa, Homo sapiens
MGKGGNQGEGAAEREVSVPTFSWEEIQKHNLRTDRWLVIDRKVYNITKWSIQHPGGQRVIGHYAGEDATDAFRAFHPDLEFVGKFLKPLLIGELAPEEPSQDHGKNSKITEDFRALRKTAEDMNLFKTNHVFFLLLLAHIIALESIAWFTVFYFGNGWIPTLITAFVLATSQAQAGWLQHDYGHLSVYRKPKWNHLVHKFVIGHLKGASANWWNHRHFQHHAKPNIFHKDPDVNMLHVFVLGEWQPIEYGKKKLKYLPYNHQHEYFFLIGPPLLIPMYFQYQIIMTMIVHKNWVDLAWAVSYYIRFFITYIPFYGILGALLFLNFIRFLESHWFVWVTQMNHIVMEIDQEAYRDWFSSQLTATCNVEQSFFNDWFSGHLNFQIEHQ

SEQ ID NO: 978 - protein, 142 aa, Homo sapiens
TTVHRSTYQNHSTETPSLTAAVPSSVSVPRAPSISPSTLSPATSNHSQHYANEDSKMGSTVTAAVIGIIVPIVVIALLCMSGYLIWRNWKRKNTKSMNFDNPVYRKTTEEEDEDELHIGRTAQIGHVYPARVALSLEDDGLP

SEQ ID NO: 979 - protein, 271 aa, Homo sapiens
MFHLLLAARSGPARLLGPPASLPGLEVLWSPRALLLWLAWLGLQAALYLLPARKVAEGQELKDKSRLRYPINGNPIYDFFLGRELNPRICFFDFKYFCELRPGLIGWVLINLALLMKEAELRGSPSLAMWLVNGFQLLYVGDALWHEEAVLTTMDITHDGFGFMLAFGDMAWVPFTYSLQAQFLLHHPQPLGLPMASVICLINATGYYIFRGANSQKNTFRKNPSDPRVAGLETISTATGRKLLVSGWWGMVRHPNYLGDLIMALAWSLPC

SEQ ID NO: 980 - protein, 82 aa, Homo sapiens
MAGQGLPLHVATLLTGLLECLGFAGVLFGWPSLVFVFKNEDYFKDLCGPDAGPIGNATGQAGRLGCMGDLFSTPDCKAQDER

SEQ ID NO: 981 - protein, 204 aa, Homo sapiens
ISEHVEEAKKLYSIILSAPIPEPKTKDDLEQLTTEIKKRANNVRNKLKSMEKHIEEDEVRSSADLRIRKSQHSVLSRKFVEVMTKYNEAQVDFRERSKGRIQRQLEITGKKTTDEELEEMLESGNPAIFTSGIIDSQISKQALSEIEGRHKDIVRLESSIKELHDMFMDIAMLVENQKLIIIIVLVVVLLGILALIIGLSVGLN

SEQ ID NO: 982 - protein, 432 aa, Homo sapiens
YNPILGETFRCCWFHPQTDSRTFYIAEQVSHHPPVSAFHVSNRKDGFCISGSITAKSRFYGNSLSALLDGKATLTFLNRAEDYTLTMPYAHCKGILYGTMTLELGGKVTIECAKNNFQAQLEFKLKPFFGGSTSINQISGKITSGEEVLASLSGHWDRDVFIKEEGSGSSALFWTPSGEVRRQRLRQHTVPLEEQTELESERLWQHVTRAISKGDQHRATQEKFALEEAQRQRARERQESLMPWKPQLFHLDPITQEWHYRYEDHSPWDPLKDIAQFEQDGILRTLQQEAVARQTTFLGSPGPRHERSGPDQRLRKASDQPSGHSQATESSGSTPESCPELSDEEQDGDFVPGGESPCPRCRKEARRLQALHEAILSIREAQQELHRHLSAMLSSTARAAQAPTPGLLQSPRSWFLLCVFLACQLFINHILK

SEQ ID NO: 983 - protein, 182 aa, Homo sapiens
MEQGKGLAVLILAIILLQGTLAQSIKGNHLVKVYDYQEDGSVLLTCDAEAKNITWFKDGKMIGFLTEDKKKWNLGSNAKDPRGMYQCKGSQNKSKPLQVYYRMCQNCIELNAATISGFLFAEIVSIFVLAVGVYFIAGQDGVRQSRASDKQTLLPNDQLYQPLKDREDDQYSHLQGNQLRRN

SEQ ID NO: 984 - protein, 164 aa, Homo sapiens
MAFWTQLMLLLWKNFMYRRRQPVQLLVELLWPLFLFFILVAVRHSHPPLEHHECHFPNKPLPSAGTVPWLQGLICNVNNTCFPQLTPGEEPGRLSNFNDSLVSRLLADARTVLGGASAHRTLAGLGKLIATLRAARSTAQPQPTKQSPLEPPMLDVAELLTSLL

SEQ ID NO: 985 - protein, 330 aa, Homo sapiens
MKLFDASPTFFAFLLGHILAMEVLAWLLIYLLGPGWVPSALAAFILAISQAQSWCLQHDLGHASIFKKSWWNHVAQKFVMGQLKGFSAHWWNFRHFQHHAKPNIFHKDPDVTVAPVFLLGESSVEYGKKKRRYLPYNQQHLYFFLIGPPLLTLVNFEVENLAYMLVCMQWADLLWAASFYARFFLSYLPFYGVPGVLLFFVAVRVLESHWFVWITQMNHIPKEIGHEKHRDWVSSQLAATCNVEPSLFTNWFSGHLNFQIEHQCQHTLPTPSLFPRMPRHNYSRVAPLVKSLCAKHGLSYEVKPFLTALVDIVRSLKKSGDIWLDAYLHQ

SEQ ID NO: 986 - protein, 227 aa, Homo sapiens
TLAVALCSTVPSLALTSLLCLGFALCASVPILPLQYLTFILQVISRSFLYGSNAAFLTLAFPSEHFGKLFGLVMALSAVVSLLQFPIFTLIKGSLQNDPFYDKAKMKLPLLLALLFGAVSALHLRSETSTFETPLGAKTLPEDEETPEQEMEETPCRELEEEEEWGSGSEDASKKDGAVESISVPDMVDKNLTCPEEEDTVKVVGIPGCQTCRYLLVRSLQTFSQAW

SEQ ID NO: 987 - protein, 332 aa, Homo sapiens
MTISVEKKVPLLHNFHSFLYQPDWRFMESKEKDRQVLEDFPTISLEFRNLAEKYQTVIADICRRMGIGMAEFLDKHVTSEQEWDKYCHYVAGLVGIGLSRLFSASEFEDPLVGEDTERANSMGLFLQKTNIIRDYLEDQQGGREFWPQEVWSRYVKKLGDFAKPENIDLAVQCLNELITNALHHIPDVITYLSRLRNQSVFNFCAIPQVMAIATLAACYNNQQVFKGAVKIRKGQAVTLMMDATNMPAVKAIIYQYMEEIYHRIPDSDPSSSKTRQIISTIRTQNLPNCQLISRSHYSPIYLSFVMLLAALSWQYLTTLSQVTEDYVQTGEH

SEQ ID NO: 988 - protein, 181 aa, Homo sapiens
PIYDFFLGRELNPRICFFDFKYFCELRPGLIGWVLINLALLMKEAELRGSPSLAMWLVNGFQLLYVGDALWHEEAVLTTMDITHDGFGFMLAFGDMAWVPFTYSLQAQFLLHHPQPLGLPMASVICLINATGYYIFRGANSQKNTFRKNPSDPRVAGVSHLLPYFYLLYFTALLVHREARD

SEQ ID NO: 989 - protein, 353 aa, Homo sapiens
MRNAVCIFYLVLRALDTLEDDMTISVEKKVPLLHNFHSFLYQPDWRFMESKEKDRQVLEDFPTISLEFRNLAEKYQTVIADICRRMGIGMAEFLDKHVTSEQEWDKYCHYVAGLVGIGLSRLFSASEFEDPLVGEDTERANSMGLFLQKTNIIRDYLEDQQGGREFWPQEVWSRYVKKLGDFAKPENIDLAVQCLNELITNALHHIPDVITYLSRLRNQSVFNFCAIPQVMAIATLAACYNNQQVFKGAVKIRKGQAVTLMMDATNMPAVKAIIYQYMEEIYHRIPDSDPSSSKTRQIISTIRTQNLPNCQLISRSHYSPIYLSFVMLLAALSWQYLTTLSQVTEDYVQTGEH

SEQ ID NO: 990 - protein, 109 aa, Homo sapiens
MAGQGLPLHVATLLTGLLECLGFAGVLFGWPSLVFVFKNEDYFKDLCGPDAGPIGNATGQADCKAQDERFSLIFTLGSFMNNFMTFPTGYIFDRFKTTVARLIAIFFYT

SEQ ID NO: 991 - protein, 44 aa, Homo sapiens
MAGQGLPLHVATLLTGLLECLGFAGVLFGWPSLVFVFKNEDYFK

SEQ ID NO: 992 - protein, 108 aa, Homo sapiens
MGSACIKVTKYFLFLFNLIFFILGAVILGFGVWILADKSSFISVLQTSSSSLRMGAYVFIGVGAVTMLMGFLGCIGAVNEVRCLLGLYFAFLLLILIAQVTAGALFYF

SEQ ID NO: 993 - protein, 264 aa, Homo sapiens
MPVEEFVAGWISGALGLVLGHPFDTVKLLGFFKGMSFPIASIAVVNSVLFGVYSNTLLVLTATSHQERRAQPPSYMHIFLAGCTGGFLQAYCLAPFDLIKVRLQNQTEPRAQPGSPPPRYQGPVHCAASIFREEGPRGLFRGAWALTLRDTPTVGIYFITYEGLCRQYTPEGQNPSSATVLVAGGFAGIASWVAATPLDMIKSRMQMDGLRRRVYQGMLDCMVSSIRQEGLGVFFRGVTINSARAFPVNAVTFLSYEYLLRWWG

SEQ ID NO: 994 - protein, 234 aa, Homo sapiens
MNILGLVLFALVLGVALKKLGSEGEDLIRFFNSLNEATMVLVSWIMCSATLPSMMKCIEENNGVDKRISRFILPIGATVNMDGAAIFQCVAAVFIAQLNNVELNAGQIFTILVTATASSVGAAGVPAGGVLTIAIILEAIGLPTHDLPLILAVDWIVDRTTTVVNVEGDALGAGILHHLNQKATKKGEQELAEVKVEAIPNCKSEEETSPLVTHQNPAGPVASAPELESKESVL

SEQ ID NO: 995 - protein, 590 aa, Homo sapiens
SICVVFAMSFVPASFTLVLIEERVTRAKHLQLMGGLSPTLYWLGNFLWDMCNYLVPACIVVLIFLAFQQRAYVAPANLPALLLLLLLYGTAYVVLTCINLFIGINGSMATFVLELFSDQKLQEVSRILKQVFLIFPHFCLGRGLIDMVRNQAMADAFERLGDRQFQSPLRWEVVGKNLLAMVIQGPLFLLFTLLLQHRSQLLPQPRVRSLPLLGEEDEDVARERERVVQGATQGDVLVLRNLTKVYRGQRMPAVDRLCLGIPPGECFGLLGVNGAGKTSTFRMVTGDTLASRGEAVLAGHSVAREPSAAHLSMGYCPQSDAIFELLTGREHLELLARLRGVPEAQVAQTAGSGLARLGLSWYADRPAGTYSGGNKRKLATALALVGDPAVVFLDEPTTGMDPSARRFLWNSLLAVVREGRSVMLTSHSMEECEALCSRLAIMVNGRFRCLGSPQHLKGRFAAGHTLTLRVPAARSQPAAAFVAAEFPGAELREAHGGRLRFQLPPGGRCALARVFGELAVHGAEHGVEDFSVSQTMLEEVFLYFSKDQGKDEDTEEQKEAGVGVDPAPGLQHPKRVSQFLDDPSTAETVL

SEQ ID NO: 996 - protein, 1060 aa, Homo sapiens
MHQCRSDEYNCSSGMCIRSSWVCDGDNDCRDWSDEANCTAIYHTCEASNFQCRNGHCIPQRWACDGDTDCQDGSDEDPVNCEKKCNGFRCPNGTCIPSSKHCDGLRDCSDGSDEQHCEPLCTHFMDFVCKNRQQCLFHSMVCDGIIQCRDGSDEDAAFAGCSQDPEFHKVCDEFGFQCQNGVCISLIWKCDGMDDCGDYSDEANCENPTEAPNCSRYFQFRCENGHCIPNRWKCDRENDCGDWSDEKDCGDSHILPFSTPGPSTCLPNYYRCSSGTCVMDTWVCDGYRDCADGSDEEACPLLANVTAASTPTQLGRCDRFEFECHQPKTCIPNWKRCDGHQDCQDGRDEANCPTHSTLTCMSREFQCEDGEACIVLSERCDGFLDCSDESDEKACSDELTVYKVQNLQWTADFSGDVTLTWMRPKKMPSASCVYNVYYRVVGESIWKTLETHSNKTNTVLKVLKPDTTYQVKVQVQCLSKAHNTNDFVTLRTPEGLPDAPRNLQLSLPREAEGVIVGHWAPPIHTHGLIREYIVEYSRSGSKMWASQRAASNFTEIKNLLVNTLYTVRVAAVTSRGIGNWSDSKSITTIKGKVIPPPDIHIDSYGENYLSFTLTMESDIKVNGYVVNLFWAFDTHKQERRTLNFRGSILSHKVGNLTAHTSYEISAWAKTDLGDSPLAFEHVMTRGVRPPAPSLKAKAINQTAVECTWTGPRNVVYGIFYATSFLDLYRNPKSLTTSLHNKTVIVSKDEQYLFLVRVVVPYQGPSSDYVVVKMIPDSRLPPRHLHVVHTGKTSVVIKWESPYDSPDQDLLYAVAVKDLIRKTDRSYKVKSRNSTVEYTLNKLEPGGKYHIIVQLGNMSKDSSIKITTVSLSAPDALKIITENDHVLLFWKSLALKEKHFNESRGYEIHMFDSAMNITAYLGNTTDNFFKISNLKMGHNYTFTVQARCLFGNQICGEPAILLYDELGSGADASATQAARSTDVAAVVVPILFLILLSLGVGFAILYTKHRRLQSSFTAFANSHYSSRLGSAIFSSGDDLGEDDEDAPMITGFSDDVPMVIA

SEQ ID NO: 997 - protein, 219 aa, Homo sapiens
MAPTQGPRAPLEFGGPLGAAALLLLLPATMFHLLLAARSGPARLLGPPASLPGLEVLWSPRALLLWLAWLGLQAALYLLPARKVLINLALLMKEAELRGSPSLAMWLVNGFQLLYVGDALWHEEAVLTTMDITHDGFGFMLAFGDMAWVPFTYSLQAQFLLHHPQPLGLPMASVICLINATGYYIFRGANSQKNTFRKNPSDPRVAGLETISTATGRKL

SEQ ID NO: 998 - protein, 256 aa, Homo sapiens
MAPTQGPRAPLEFGGPLGAAALLLLLPATMFHLLLAARSGPARLLGPPASLPGLEVLWSPRALLLWLAWLGLQAALYLLPARKAQVAPVSALAPGGNSGNPIYDFFLGRELNPRICFFDFKYFCELRPGLIGWVLINLALLMKEAELRGSPSLAMWLVNGFQLLYVGDALWHEEAVLTTMDITHDGFGFMLAFGDMAWVPFTYSLQAQFLLHHPQPLGLPMASVICLINATGYYIFRGANSQKNTFRKNPSDPRVA

SEQ ID NO: 999 - protein, 417 aa, Homo sapiens
MGGVGEPGPREGPAQPGAPLPTFCWEQIRAHDQPGDKWLVIERRVYDISRWAQRHPGGSRLIGHHGAEDATDAFRAFHQDLNFVRKFLQPLLIGELAPEEPSQDGPLNAQLVEDFRALHQAAEDMKLFDASPTFFAFLLGHILAMEAQSWCLQHDLGHASIFKKSWWNHVAQKFVMGQLKGFSAHWWNFRHFQHHAKPNIFHKDPDVTVAPVFLLGESSVEYGKKKRRYLPYNQQHLYFFLIGPPLLTLVNFEVENLAYMLVCMQWADLLWAASFYARFFLSYLPFYGVPGVLLFFVAVRVLESHWFVWITQMNHIPKEIGHEKHRDWVSSQLAATCNVEPSLFTNWFSGHLNFQIEHHLFPRMPRHNYSRVAPLVKSLCAKHGLSYEVKPFLTALVDIVRSLKKSGDIWLDAYLHQ

SEQ ID NO: 1000 - protein, 115 aa, Homo sapiens
MAPTQGPRAPLEFGGPLGAAALLLLLPATMFHLLLAARSGPARLLGPPASLPGLEVLWSPRALLLWLAWLGLQAALYLLPARKVAEGQELKDKSRLRYPINGNPIYDFFLGRELN

SEQ ID NO: 1001 - protein, 52 aa, Homo sapiens
MRQLKGKPKKETSKDKKERKQAMQEARQQITTVVLPTLAVVVLLIVVFVYVA

SEQ ID NO: 1002 - protein, 105 aa, Homo sapiens
MAAKSQPNIPKAKSLDGVTNDRTASQGQWGRAWEVDWFSLASVIFLLLFAPFIVYYFIMACDQYSCALTGPVVDIVTGHARLSDIWAKTPPITRKAAQLYTLWVT

SEQ ID NO: 1003 - protein, 171 aa, Homo sapiens
MPRYGASLRQSCPRSGREQGQDGTAGAPGLLWMGLVLALALALALALALSDSRVLWAPAEAHPLSPQGHPARLHRIVPRLRDVFGWGNLTCPICKGLFTAINLGLKKEPNVARVGSVAIKLCNLLKIAPPAVCQSIVHLFEDDMVENWGVLCSFPIPRSPPHLSQYEFLFP

SEQ ID NO: 1004 - protein, 329 aa, Homo sapiens
MLGQVVTLILLLLLKVYQGKGCQGSADHVVSISGVPLQLQPNSIQTKVDSIAWKKLLPSQNGFHHILKWENGSLPSNTSNDRFSFIVKNLSLLIKAAQQQDSGLYCLEVTSISGKVQTATFQVFVFDKVEKPRLQGQGKILDRGRCQVALSCLVSRDGNVSYAWYRGSKLIQTAGNLTYLDEEVDINGTHTYTCNVSNPVSWESHTLNLTQDCQNAHQEFRFWPFLVIIVILSALFLGTLACFCVWRRKRKEKQSETSPKEFLTIYEDVKDLKTRRNHEQEQTFPGGGSTIYSMIQSQSSAPTSQEPAYTLYSLIQPSRKGDRFYSFSG

SEQ ID NO: 1005 - protein, 71 aa, Homo sapiens
MFLSLPTLTVLIPLVSLAGLFYSASVEENFPQGCTSTASLCFYSLLLPITIPVYVFFHLWTWMGIKLFRHN

SEQ ID NO: 1006 - protein, 143 aa, Homo sapiens
MGQVACHPKKRGQPLLRPRARAAWTTGVVQEGRMRDVGGAQVLATGKTPGAEIDFKYALIGTAVGVAISAGFLALKICMIRRHLFDDDSSDLKSTPGGLSGEGCGARAWLCPTQRGTEGHSVMLATARMNPQAQSPTGCKGRQ

SEQ ID NO: 1007 - protein, 820 aa, Homo sapiens
MWSWKCLLFWAVLVTATLCTARPSPTLPEQAQPWGAPVEVESFLVHPGDLLQLRCRLRDDVQSINWLRDGVQLAESNRTRITGEEVEVQDSVPADSGLYACVTSSPSGSDTTYFSVNVSDALPSSEDDDDDDDSSSEEKETDNTKPNRMPVAPYWTSPEKMEKKLHAVPAAKTVKFKCPSSGTPNPTLRWLKNGKEFKPDHRIGGYKVRYATWSIIMDSVVPSDKGNYTCIVENEYGSINHTYQLDVVERSPHRPILQAGLPANKTVALGSNVEFMCKVYSDPQPHIQWLKHIEVNGSKIGPDNLPYVQILKTAGVNTTDKEMEVLHLRNVSFEDAGEYTCLAGNSIGLSHHSAWLTVLEALEERPAVMTSPLYLEIIIYCTGAFLISCMVGSVIVYKMKSGTKKSDFHSQMAVHKLAKSIPLRRQVSADSSASMNSGVLLVRPSRLSSSGTPMLAGVSEYELPEDPRWELPRDRLVLGKPLGEGCFGQVVLAEAIGLDKDKPNRVTKVAVKMLKSDATEKDLSDLISEMEMMKMIGKHKNIINLLGACTQDGPLYVIVEYASKGNLREYLQARRPPGLEYCYNPSHNPEEQLSSKDLVSCAYQVARGMEYLASKKCIHRDLAARNVLVTEDNVMKIADFGLARDIHHIDYYKKTTNGRLPVKWMAPEALFDRIYTHQSDVWSFGVLLWEIFTLGGSPYPGVPVEELFKLLKEGHRMDKPSNCTNELYMMMRDCWHAVPSQRPTFKQLVEDLDRIVALTSNQEYLDLSMPLDQYSPSFPDTRSSTCSSGEDSVFSHEPLPEEPCLPRHPAQLANGGLKRR

SEQ ID NO: 1008 - protein, 217 aa, Homo sapiens
MAEFDTISELEEEEEEEAATSSSSPSSSSSVSGPDDDEEDEEEEEEEEEEEEEEEEEEEEEAPPPPRVVSEEHLRRYAPDPVLVRGAGHITVFGLSNKFDTEFPSVLTGKVAPEEFKTSIGRVNACLKKALPVNVKWLLCGCLCCCCTLGCSLWPVICLNKRTRRSIQKLIEWENNRLYHKLALHWKLTKRKCETSNMMEYVILIEFLPKYPIFRPD

SEQ ID NO: 1009 - protein, 351 aa, Homo sapiens
MLEVLRVLSTSSEALHHAVIFLFNGAEENVLQASHGFITQHPWASLIRAFINLEAAGVGGKELVFQTGPENPWLVQAYVSAAKHPFASVVAQEVFQSGIIPSDTDFRIYRDFGNIPGIDLAFIENGYIYHTKYDTADRILTDSIQRAGDNILAVLKHLATSDMLAAASKYRHGNMVFFDVLGLFVIAYPSRIGSIINYMVVMGVVLYLGKKFLQPKHKTGNYKKDFLCGLGITLISWFTSLVTVLIIAVFISLIGQSLSWYNHFYVSVCLYGTATVAKIILIHTLAKRFYYMNASAQYLGEVFFDISLFVHCCFLVTLTYQGLCSAFISAVWVAFPLLTKLCVHKDFKQHD

SEQ ID NO: 1010 - protein, 504 aa, Homo sapiens
MPGVCDRAPDFLSPSEDQVLRPALGSSVALNCTAWVVSGPHCSLPSVQWLKDGLPLGIGGHYSLHEYSWVKANLSEVLVSSVLGVNVTSTEVYGAFTCSIQNISFSSFTLQRAGPTSHVAAVLASLLVLLALLLAALLYVKCRLNVLLWYQDAYGEVEINDGKLYDAYVSYSDCPEDRKFVNFILKPQLERRRGYKLFLDDRDLLPRAEPSADLLVNLSRCRRLIVVLSDAFLSRAWCSHSFREGLCRLLELTRRPIFITFEGQRRDPAHPALRLLRQHRHLVTLLLWRPGSVTPSSDFWKEVQLALPRKVQYRPVEGDPQTQLQDDKDPMLILRGRVPEGRALDSEVDPDPEGDLGMPAQPHSPTGEAQHRAEWGQAQGTGPGGAPGVEDSSRHREPLHGLCPGGARPSVCLGTSWASQAITAGGEQGQPLAVGLGQGCGWPPQASRSPHPRCPGACLWRAISSTAHQWGLAGREPEQRSGRLGSRLAKLQCPHRLLLPGVQG

SEQ ID NO: 1011 - protein, 136 aa, Homo sapiens
TTKEEKETAEHENRELQSKEFLSAKEETPGAGQKQELRSFWSYAFSRRFAWHLVWLSVIQLWHYLFIGTLNSLLTNMAGGDMARVSTYTNAFAFTQFGVLCAPWNGLLMDRLKQKYQKEARKTVSLQSTLASSLGW

SEQ ID NO: 1012 - protein, 107 aa, Homo sapiens
MGRVSGLVPSRFLTLLAHLVVVITLFWSRDSNIQACLPLTFTPEEYDKQDIQLVAALSVTLGLFAVELAGFLSGVSMFNSTQSLICILSACPPFPHDPLLSGLPSAT

SEQ ID NO: 1013 - protein, 179 aa, Homo sapiens
MARDWIRPQRASDCWSGKQQLFQIIIIIIISPPCCCVDDTWAQAEVGPVTSCTGFVEGSSRTGGMGSACIKVTKYFLFLFNLIFFILGAVILGFGVWILADKSSFISVLQTSSSSLRMGAYVFIGVGAVTMLMGFLGCIGAVNEVRCLLGLYFAFLLLILIAQVTAGALFYFNMGKVSP

SEQ ID NO: 1014 - protein, 207 aa, Homo sapiens
MAPTQGPRAPLEFGGPLGAAALLLLLPATMFHLLLAARSGPARLLGPPASLPGLEVLWSPRALLLWLAWLGLQAALYLLPARKVAEGQELKDKSRLRYPINGFQALVLTALLVGLGMSAGLPLGALPEMLLPLAFVATLTAFIFSLFLYMKAQVAPVSALAPGGNSELNPRICFFDFKYFCELRPGLIGWVLINLALLMKEAELRGS

SEQ ID NO: 1015 - protein, 292 aa, Homo sapiens
MFHLLLAARSGPARLLGPPASLPGLEVLWSPRALLLWLAWLGLQAALYLLPARKVAEGQELKDKSRLRYPINGFQALVLTALLVGLGMSAGLPLGALPEMLLPLAFVATLTAFIFSLFLYMKAQVAPVSALAPGGNSGNPIYDFFLGRELNPRICFFDFKYFCELRPGLIGWVLINLALLMKEAELRGSPSLAMWLVNGFQLLYVGDALWHEEAVLTTMDITHDGFGFMLAFGDMAWVPFTYSLQAQFLLHHPQPLGLPMASVICLINATGYYIFRGANSQKNTFRKNPSDP

SEQ ID NO: 1016 - protein, 790 aa, Homo sapiens
MEPNGPSLPRDEGPPTPSSATKVPPAEYRLCNGSDKECVSPTARVTKKETLKAQKENYRQEKKRATRQLLSALTDPSVVIMADSLKIRGTLKSWTKLWCVLKPGVLLIYKTPKGPKGESVGSITQPLPSSYLIFRAASESDGRCWLDALELALRCSSLLRLGTCKPGRDGEPGTSPDASPSSLCGLPASATVHPDQDLFPLNGSSLENDAFSDKSERENPEESDTETQDHSRKTESGSDQSETPGAPVRRGTTYVEQVQEELGELGEASQVETVSEENKSLMWTLLKQLRPGMDLSRVVLPTFVLEPRSFLNKLSDYYYHADLLSRAAVEEDAYSRMKLVLRWYLSGFYKKPKGIKKPYNPILGETFRCCWFHPQTDSRTFYIAEQVSHHPPVSAFHVSNRKDGFCISGSITAKSRFYGNSLSALLDGKATLTFLNRAEDYTLTMPYAHCKGILYGTMTLELGGKVTIECAKNNFQAQLEFKLKPFFGGSTSINQISGKITSGEEVLASLSGHWDRDVFIKEEGSGSSALFWTPSGEVRRQRLRQHTVPLEEQTELESERLWQHVTRAISKGDQHRATQEKFALEEAQRQRARERQESLMPWKPQLFHLDPITQEWHYRYEDHSPWDPLKDIAQFEQDGILRTLQQEAVARQTTFLGSPGPRHERSGPDQRLRKASDQPSGHSQATESSGSTPESCPELSDEEQDGDFVPGGESPCPRCRKEARRLQALHEAILSIREAQQELHRHLSAMLSSTARAAQAPTPGLLQSPRSWFLLCVFLACQLFINHILK

SEQ ID NO: 1017 - protein, 639 aa, Homo sapiens
MLLWLLLLILTPGREQSGVAPKAVLLLNPPWSTAFKGEKVALICSSISHSLAQGDTYWYHDEKLLKIKHDKIQITEPGNYQCKTRGSSLSDAVHVEFSPDWLILQALHPVFEGDNVILRCQGKDNKNTHQKVYYKDGKQLPNSYNLEKITVNSVSRDNSKYHCTAYRKFYILDIEVTSKPLNIQVQGVPVSNVNLEIRPTGGQLIEGENMVLICSVAQGSGTVTFSWHKEGRVRSLGRKTQRSLLAELHVLTVKESDAGRYYCAADNVHSPILSTWIRVTVRIPVSHPVLTFRAPRAHTVVGDLLELHCESLRGSPPILYRFYHEDVTLGNSSAPSGGGASFNLSLTAEHSGNYSCDADNGLGAQHSHGVSLRVTVPVSRPVLTLRAPGAQAVVGDLLELHCESLRGSFPILYWFYHEDDTLGNISAHSGGGASFNLSLTTEHSGNYSCEADNGLGAQHSKVVTLNVTGTSRNRTGLTAAGITGLVLSILVLAAAAALLHYARARRKPGGLSATGTSSHSPSECQEPSSSRPSRIDPQEPTHSKPLAPMELEPMYSNVNPGDSNPIYSQIWSIQHTKENSANCPMMHQEHEELTVLYSELKKTHPDDSAGEASSRGRAHEEDDEENYENVPRVLLASDH

SEQ ID NO: 1018 - protein, 158 aa, Homo sapiens
MAAKQPPPLMKKHSQTDLVSRLKTRKILGVGGEDDDGEVHRSKISQVLGNEIKFTIREPLGLRVWQFVSAVLFSGIAIMALAFPDQLYDAVFDGAQVTSKTPIRLYGGALLSISLIMWNALYTAEKVIIRWTLLTEACYFGVQFLVVTATLAETGLMS

SEQ ID NO: 1019 - protein, 284 aa, Homo sapiens
MTTPRNSVNGTFPAEPMKGPIAMQSGPKPLFRRMSSLVGPTQSFFMRESKTLGAVQIMNGLFHIALGGLLMIPAGIYAPICVTVWYPLWGGIMYIISGSLLAATEKNSRKCLVKGKMIMNSLSLFAAISGMILSIMDILNIKISHFLKMESLNFIRAHTPYINIYNCEPANPSEKNSPSTQYCYSIQSLFLELVIAGIVENEWKRTCSRPKSNIVLLSAEEKKEQTIEIKEEVVGLTETSSQPKNEEDIEIIPIQEEEEEETETNFPEPPQDQESSPIENDSSP

SEQ ID NO: 1020 - protein, 136 aa, Homo sapiens
MAFWTQLMLLLWKNFMYRRRQPLLVELLWPLFLFFILVAVRHSHPPLEHHECHFPNKPLPSAGTVPWLQGLICNVNNTCFPQLTPGEEPGRLSNFNDSLVSRLLADARTVLGGASAHRTLAGLGKLIATLRAARST

SEQ ID NO: 1021 - protein, 194 aa, Homo sapiens
MWVKLLSIVAEFCFSPFLVTDEETASDALERNSLSSQDPQQPTSTVSVTEDSSTSEIDKEEKEQTTQDPDLTTEANPQYLGLARKKSGILLLTLVSFLIFILFIIVQLFIMKLRKAHVIWKKENEVSEHTLESYRSRSNNEETSSEEKNGQSSHPMRCMNYITKLYSEAKTKRKENVQHSKLEEKHIQVPESIV

SEQ ID NO: 1022 - protein, 157 aa, Homo sapiens
MEILGAVILGFGVWILADKSSFISVLQTSSSSLRMGAYVFIGVGAVTMLMGFLGCIGAVNEVRCLLGLYFAFLLLILIAQVTAGALFYFNMGKLKQEMGGIVTELIRDYNSSREDSLQDAWDYVQAQVKCCGWVSFYNWTDNAELMNRPEVTYPCSC

SEQ ID NO: 1023 - protein, 104 aa, Homo sapiens
MGSACIKVTKYFLFLFNLIFFILGAVILGFGVWILADKSSFISVLQTSSSSLRMGAYVFIGVGAVTMLMGFLGCIGAVNEVRCLLGLYFAFLLLILIAQVTAGA

SEQ ID NO: 1024 - protein, 479 aa, Homo sapiens
MLTSKGQGFLHGGLCLWLCVFTPFFKGCVGCATEERLFHKLFSHYNQFIRPVENVSDPVTVHFEVAITQLANVIWNDYKLRWDPMEYDGIETLRVPADKIWKPDIVLYNNAVGDFQVEGKTKALLKYNGMITWTPPAIFKSSCPMDITFFPFDHQNCSLKFGSWTYDKAEIDLLIIGSKVDMNDFWENSEWEIIDASGYKHDIKYNCCEEIYTDITYSFYIRRLPMFYTINLIIPCLFISFLTVLVFYLPSDCGEKVTLCISVLLSLTVFLLVITETIPSTSLVVPLVGEYLLFTMIFVTLSIVVTVFVLNIHYRTPTTHTMPRWVKTVFLKLLPQVLLMRWPLDKTRGTGSDAVPRGLARRPAKGKLASHGEPRHLKECFHCHKSNELATSKRRLSHQPLQWVVENSEHSPEVEDVINSVQFIAENMKSHNETKEVEDDWKYVAMVVDRVFLWVFIIVCVFGTAGLFLQPLLGNTGKS

SEQ ID NO: 1025 - protein, 119 aa, Homo sapiens
MAGQGLPLHVATLLTGLLECLGFAGVLFGWPSLVFVFKNEDYFKDLCGPDAGPIGNATGQADCKAQDERFSLIFTLGSFMNNFMTFPTGYIFDRFKTTVARLIAIFFYTTATLIIAFTS

SEQ ID NO: 1026 - protein, 467 aa, Homo sapiens
MSAVAQLWEDEWEVLLISLQGTAPFLHVGAVAAVTMLSWIVAGQFARAERTSSQVTILCTFFTVVFALYLAPLTISSPCIMEKKDLGPKPALIGHRGAPMLAPEHTLMSFRKALEQKLYGLQADITISLDGVPFLMHDTTLRRTTNVEEEFPELARRPASMLNWTTLQRLNAGQWFLKTDPFWTASSLSPSDHREAQNQSICSLAELLELAKGNATLLLNLRDPPREHPYRSSFINVTLEAVLHSGFPQHQVMWLPSRQRPLVRKVAPGFQQTSGSKEAVASLRRGHIQRLNLRYTQVSRQELRDYASWNLSVNLYTVNAPWLFSLLWCAGVPSVTSDNSHALSQVPSPLWIMPPDEYCLMWVTADLVSFTLIVGIFVLQKWRLGGIRSYNPEQIMLSAAVRRTSRDVSIMKEKLIFSEISDGVEVSDVLSVCSDNSYDTYANSTATPVGPRGGGSHTKTLIERSGR

SEQ ID NO: 1027 - protein, 620 aa, Homo sapiens
MPLHQLGDKPLTFPSPNSAMENGLDHTPPSRRASPGTPLSPGSLRSAAHSPLDTSKQPLCQLWAEKHGARGTHEVRYVSAGQSVACGWWAFAPPCLQVLNTPKGILFFLCAAAFLQGMTVNGFINTVITSLERRYDLHSYQSGLIASSYDIAACLCLTFVSYFGGSGHKPRWLGWGVLLMGTGSLVFALPHFTAGRYEVELDAGVRTCPANPGAVCADSTSGLSRYQLVFMLGQFLHGVGATPLYTLGVTYLDENVKSSCSPVYIAIFYTAAILGPAAGYLIGGALLNIYTEMGRRTELTTESPLWVGAWWVGFLGSGAAAFFTAVPILGYPRQLPGSQRYAVMRAAEMHQLKDSSRGEASNPDFGKTIRDLPLSIWLLLKNPTFILLCLAGATEATLITGMSTFSPKFLESQFSLSASEAATLFGYLVVPAGGGGTFLGGFFVNKLRLRGSAVIKFCLFCTVVSLLGILVFSLHCPSVPMAGVTASYGGSLLPEGHLNLTAPCNAACSCQPEHYSPVCGSDGLMYFSLCHAGCPAATETNVDGQKVSGAAAYRPCPPLDPGKGPPCLPLVIGAIVGLPRCTETVAVSLRIFPLVLAMPLQGNALQLVRESPSFWFSYSL

SEQ ID NO: 1028 - protein, 126 aa, Homo sapiens
MGDLFSTPDCKAQDERFSLIFTLGSFMNNFMTFPTGYIFDRFKTTVARLIAIFFYTTATLIIAFTSAGSAVLLFLAMPMLTIGGILFLITNLQIGNLFGQHRSTIITLYNGAFDSSSAVFLIIKLL

SEQ ID NO: 1029 - protein, 430 aa, Homo sapiens
MGQYGQELSWKCLVKAVCLQEHSQPSQLLCTLLLCWCVLGRERPFRKAQSTSSPLEGVPRFLKRLLLTWVNCSSVRWATRVQDIFTAGKLLALALIIIMGIVQICKGEYFWLEPKNAFENFQEPDIGLVALAFLQGSFAYGGWNFLNYVTEELVDPYKNLPRAIFISIPLVTFVYVFANVAYVTAMSPQELLASNAVAVTFGEKLLGVMAWIMPISVALSTFGGVNGSLFTSSRLFFAGAREGHLPSVLAMIHVKRCTPIPALLFTCISTLLMLVTSDMYTLINYVGFINYLFYGVTVAGQIVLRWKKPDIPRPIKINLLFPIIYLLFWAFLLVFSLWSEPVVCGIGLAIMLTGVPVYFLGVYWQHKPKCFSDFIELLTLVSQKMCVVVYPEVERGSGTEEANEDMEEQQQPMYQPTPTKDKDVAGQPQP

SEQ ID NO: 1030 - protein, 402 aa, Homo sapiens
MPRYGASLRQSCPRSGREQGQDGTAGAPGLLWMGLVLALALALALALALSDSRVLWAPAEAHPLSPQGHPARLHRIVPRLRDVFGWGNLTCPICKGLFTAINLGLKKEPNVARVGSVAIKLCNLLKIAPPAVCQSIVHLFEDDMVEVWRRSVLSPSEACGLLLGSTCGHWDIFSSWNISLPTVPKPPPKPPSPPAPGAPVSRILFLTDLHWDHDYLEGTDPDCADPLCCRRGSGLPPASRPGAGYWGEYSKCDLPLRTLESLLSGLGPAGPFDMVYWTGDIPAHDVWHQTRQDQLRALTTVTALVRKFLGPVPVYPAVGNHESTPVNSFPPPFIEGNHSSRWLYEAMAKAWEPWLPAEALRTLRYLSSVETQEGKRKNWGVLCSFPIPRSPPHLSQYEFLFP

SEQ ID NO: 1031 - protein, 522 aa, Homo sapiens
MMVVSTYIGIYYNVVICIAFYYFFSSMTHVLPWAYCNNPWNTHDCAGVLDASNLTNGSRPAALPSNLSHLLNHSLQRTSPSEEYWRLYVLKLSDDIGNFGEVRLPLLGCLGVSWLVVFLCLIRGVKSSGKVVYFTATFPYVVLTILFVRGVTLEGAFDGIMYYLTPQWDKILEAKVWGDAASQIFYSLGCAWGGLITMASYNKFHNNCYRDSVIISITNCATSVYAGFVIFSILGFMANHLGVDVSRVADHGPGLAFVAYPEALTLLPISPLWSLLFFFMLILLGLGTQFCLLETLVTAIVDEVGNEWILQKKTYVTLGVAVAGFLLGIPLTSQAGIYWLLLMDNYAASFSLVVISCIMCVAIMYIYGHRNYFQDIQMMLGFPPPLFFQICWRFVSPAIIFFILVFTVIQYQPITYNHYQYPGWAVAIGFLMALSSVLCIPLYAMFRLCRTDGDTLLQRLKNATKPSRDWGPALLEHRTGRYAPTIAPSPEDGFEVQPLHPDKAQIPIVGSNGSSRLQDSRI

SEQ ID NO: 1032 - protein, 504 aa, Homo sapiens
MAGQGLPLHVATLLTGLLECLGFAGVLFGWPSLVFVFKNEDYFKDLCGPDAGPIGNATGQAGRLGCMGDLFSTPDCKAQDERFSLIFTLGSFMNNFMTFPTGYIFDRFKTTVARLIAIFFYTTATLIIAFTSAGSAVLLFLAMPMLTIGGILFLITNLQIGNLFGQHRSTIITLYNGAFDSSSAVFLIIKLLYEKGISLRASFIFISVCSTWHVARTFLLMPRGHIPYPLPPNYSYGLCPGNGTTKEEKETAEHENRELQSKEFLSAKEETPGAGQKQELRSFWSYAFSRRFAWHLVWLSVIQLWHYLFIGTLNSLLTNMAGGDMARVSTYTNAFAFTQFGVLCAPWNGLLMDRLKQKYQKEARKTGSSTLAVALCSTVPSLALTSLLCLGFALCASVPILPLQYLTFILQVISRSFLYGSNAAFLTLAFPSEHFGKLFGLVMALSAVVSLLQFPIFTLIKGSLQNDPFYVNVMFMLAILLTFFHPFLVYRECRTWKESPSAIA

SEQ ID NO: 1033 - protein, 101 aa, Homo sapiens
MAGQGLPLHVATLLTGLLECLGFAGVLFGWPSLVFVFKNEDYFKDLCGPDAGPIGNATGQADCKAQDERFSLIFTLGSFMNNFMTFPTGYIFDRFKTTVAR

SEQ ID NO: 1034 - protein, 1158 aa, Homo sapiens
MCDCPQGYQLKNNTCVKQENTCLRNQYRCSNGNCINSIWWCDFDNDCGDMSDERNCPTTICDLDTQFRCQESGTCIPLSYKCDLEDDCGDNSDESHCEMHQCRSDEYNCSSGMCIRSSWVCDGDNDCRDWSDEANCTAIYHTCEASNFQCRNGHCIPQRWACDGDTDCQDGSDEDPVNCEKKCNGFRCPNGTCIPSSKHCDGLRDCSDGSDEQHCEPLCTHFMDFVCKNRQQCLFHSMVCDGIIQCRDGSDEDAAFAGCSQDPEFHKVCDEFGFQCQNGVCISLIWKCDGMDDCGDYSDEANCENPTEAPNCSRYFQFRCENGHCIPNRWKCDRENDCGDWSDEKDCGDSHILPFSTPGPSTCLPNYYRCSSGTCVMDTWVCDGYRDCADGSDEEACPLLANVTAASTPTQLGRCDRFEFECHQPKTCIPNWKRCDGHQDCQDGRDEANCPTHSTLTCMSREFQCEDGEACIVLSERCDGFLDCSDESDEKACSDELTVYKVQNLQWTADFSGDVTLTWMRPKKMPSASCVYNVYYRVVGESIWKTLETHSNKTNTVLKVLKPDTTYQVKVQVQCLSKAHNTNDFVTLRTPEGLPDAPRNLQLSLPREAEGVIVGHWAPPIHTHGLIREYIVEYSRSGSKMWASQRAASNFTEIKNLLVNTLYTVRVAAVTSRGIGNWSDSKSITTIKGKVIPPPDIHIDSYGENYLSFTLTMESDIKVNGYVVNLFWAFDTHKQERRTLNFRGSILSHKVGNLTAHTSYEISAWAKTDLGDSPLAFEHVMTRGVRPPAPSLKAKAINQTAVECTWTGPRNVVYGIFYATSFLDLYRNPKSLTTSLHNKTVIVSKDEQYLFLVRVVVPYQGPSSDYVVVKMIPDSRLPPRHLHVVHTGKTSVVIKWESPYDSPDQDLLYAVAVKDLIRKTDRSYKVKSRNSTVEYTLNKLEPGGKYHIIVQLGNMSKDSSIKITTVSLSAPDALKIITENDHVLLFWKSLALKEKHFNESRGYEIHMFDSAMNITAYLGNTTDNFFKISNLKMGHNYTFTVQARCLFGNQICGEPAILLYDELGSGADASATQAARSTDVAAVVVPILFLILLSLGVGFAILYTKHRRLQSSFTAFANSHYSSRLGSAIFSSGDDLGEDDEDAPMITGFSDDVPMVIA

SEQ ID NO: 1035 - protein, 192 aa, Homo sapiens
MAVPFVEDWDLVQTLGEEPDIGMPEPDAQRFFHQLMAGVVYLHGIGITHRDIKPENLLLDERDNLKISDFGLATVFRYNNRERLLNKMCGTLPYVAPELLKRREFHAEPVDVWSCGIVLTAMLAGELPWDQPSDSCQEYSDWKEKKTYLNPWKKIDSAPLALLHKILVENPSARITIPDIKKDRWYNKPLKK

SEQ ID NO: 1036 - protein, 63 aa, Homo sapiens
MAGQGLPLHVATLLTGLLECLGFAGVLFGWPSLVFVFKNEDYFKDLCGPDAGPIGNATGQAGR

SEQ ID NO: 1037 - protein, 410 aa, Homo sapiens
MEFVKCLGHPEEFYNLVRFRIGGKRKDSLSSSLKTCYKYLNQTSRSFAAVIQALDGEMRNAVCIFYLVLRALDTLEDDMTISVEKKVPLLHNFHSFLYQPDWRFMESKEKDRQVLEDFPTISLEFRNLAEKYQTVIADICRRMGIGMAEFLDKHVTSEQEWDKYCHYVAGLVGIGLSRLFSASEFEDPLVGEDTERANSMGLFLQKTNIIRDYLEDQQGGREFWPQEVWSRYVKKLGDFAKPENIDLAVQCLNELITNALHHIPDVITYLSRLRNQSVFNFCAIPQVMAIATLAACYNNQQVFKGAVKIRKGQAVTLMMDATNMPAVKAIIYQYMEEIYHRIPDSDPSSSKTRQIISTIRTQNLPNCQLISRSHYSPIYLSFVMLLAALSWQYLTTLSQVTEDYVQTGEH

SEQ ID NO: 1038 - protein, 659 aa, Homo sapiens
SLLAVVVLLALPVAWGQCNAPEWLPFARPTNLTDEFEFPIGTYLNYECRPGYSGRPFSIICLKNSVWTGAKDRCRRKSCRNPPDPVNGMVHVIKGIQFGSQIKYSCTKGYRLIGSSSATCIISGDTVIWDNETPICDRIPCGLPPTITNGDFISTNRENFHYGSVVTYRCNPGSGGRKVFELVGEPSIYCTSNDDQVGIWSGPAPQCIIPNKCTPPNVENGILVSDNRSLFSLNEVVEFRCQPGFVMKGPRRVKCQALNKWEPELPSCSRVCQPPPDVLHAERTQRDKDNFSPGQEVFYSCEPGYDLRGAASMRCTPQGDWSPAAPTCEVKSCDDFMGQLLNGRVLFPVNLQLGAKVDFVCDEGFQLKGSSASYCVLAGMESLWNSSVPVCEQIFCPNPPAILNGRHTGTPFGDIPYGKEISYACDTHPDRGMTFNLIGESSIRCTSDPQGNGVWSSPAPRCELSVPAACPHPPKIQNGHYIGGHVSLYLPGMTISYICDPGYLLVGKGFIFCTDQGIWSQLDHYCKEVNCSFPLFMNGISKELEMKKVYHYGDYVTLKCEDGYTLEGSPWSQCQADDRWDPPLAKCTSRTHDALIVGTLSGTIFFILLIIFLSWIILKHRKGNNAHENPKEVAIHLHSQGGSSVHPRTLQTNEENSRY

SEQ ID NO: 1039 - protein, 148 aa, Homo sapiens
MAGQGLPLHVATLLTGLLECLGFAGVLFGWPSLVFVFKNEDYFKDLCGPDAGPIGNATGQADCKAQDERFSLIFTLGSFMNNFMTFPTGYIFDRFKTTVARLIAIFFYTTATLIIAFTSAGSAVLLFLAMPMLTIGGILFLITNLQIG

SEQ ID NO: 1040 - protein, 221 aa, Homo sapiens
INLSFAAKQRELHSHVTNAMVLVNVLQAIYVIDFFWNETWYLKTIDICHDHFGWYLGWGDCVWLPYLYTLQGLYLVYHPVQLSTPHAVGVLLLGLVGYYIFRVANHQKDLFRRTDGRCLIWGRKPKVIECSYTSADGQRHHSKLLVSGFWGVARHFNYVGDLMGSLAYCLACGGGHLLPYFYIIYMAILLTHRCLRDEHRCASKEFRVSSTAVLPAQTDFL

SEQ ID NO: 1041 - protein, 258 aa, Homo sapiens
MAAKSQPNIPKAKSLDGVTNDRTASQGQWGRACCALTGPVVDIVTGHARLSDIWAKTPPITRKAAQLYTLWVTFQVLLYTSLPDFCHKFLPGYVGGIQEGAVTPAGVVNKYQINGLQAWLLTHLLWFANAHLLSWFSPTIIFDNWIPLLWCANILGYAVSTFAMVKGYFFPTSARDCKFTGNFFYNYMMGIEFNPRIGKWFDFKLFFNGRPGIVAWTLINLSFAAKQRELHSHVTNAMVLVNVLQAIYVIDFFWNETW

SEQ ID NO: 1042 - protein, 73 aa, Homo sapiens
MGPSVTACIRPRREVDWFSLASVIFLLLFAPFIVYYFIMACDQYSCALTGPVVDIVTGHARLSDIWAKTPPIT

SEQ ID NO: 1043 - protein, 97 aa, Homo sapiens
MAGQGLPLHVATLLTGLLECLGFAGVLFGWPSLVFVFKNEDYFKDLCGPDAGPIGNATGQADCKAQDERFSLIFTLGSFMNNFMTFPTGYIFDRFKT

SEQ ID NO: 1044 - protein, 289 aa, Homo sapiens
MEEGARHRNNTEKKHPGGGESDASPEAGSGGGGVALKKEIGLVSACGIIVGNIIGSGIFVSPKGVLENAGSVGLALIVWIVTGFITVVGALCYAELGVTIPKSGGDYSYVKDIFGGLAGFLRLWIAVLVIYPTNQAVIALTFSNYVLQPLFPTCFPPESGLRLLAAICLLLLTWVNCSSVRWATRVQDIFTAGKLLALALIIIMGIVQICKGEYFWLEPKNAFENFQEPDIGLVALAFLQGSFAYGGWNFLNYVTEELVDPYKAANPGEPEDVCGRVPRGGAGLRDRGG

SEQ ID NO: 1045 - protein, 107 aa, Homo sapiens
MAGQGLPLHVATLLTGLLECLGFAGVLFGWPSLVFVFKNEDYFKDLCGPDAGPIGNATGQADCKAQDERFSLIFTLGSFMNNFMTFPTGYIFDRFKTTVARLIAIFF

SEQ ID NO: 1046 - protein, 133 aa, Homo sapiens
MAGQGLPLHVATLLTGLLECLGFAGVLFGWPSLVFVFKNEDYFKDLCGPDAGPIGNATGQAGRLGCMGDLFSTPDCKAQDERFSLIFTLGSFMNNFMTFPTGYIFDRFKTTVARLIAIFFYTTATLIIAFTSA

SEQ ID NO: 1047 - protein, 630 aa, Homo sapiens
MPRYGASLRQSCPRSGREQGQDGTAGAPGLLWMGLVLALALALALALALSDSRVLWAPAEAHPLSPQGHPARLHRIVPRLRDVFGWGNLTCPICKGLFTAINLGLKEPNVARVGSVAIKLCNLLKIAPPAVCQSIVHLFEDDMVEVWRRSVLSPSEACGLLLGSTCGHWDIFSSWNISLPTVPKPPPKPPSPPAPGAPVSRILFLTDLHWDHDYLEGTDPDCADPLCCRRGSGLPPASRPGAGYWGEYSKCDLPLRTLESLLSGLGPAGPFDMVYWTGDIPAHDVWHQTRQDQLRALTTVTALVRKFLGPVPVYPAVGNHESTPVNSFPPPFIEGNHSSRWLYEAMAKAWEPWLPAEALRTLRIGGFYALSPYPGLRLISLNMNFCSRENFWLLINSTDPAGQLQWLVGELQAAEDRGDKVHIIGHIPPGHCLKSWSWNYYRIVARYENTLAAQFFGHTHVDEFEVFYDEETLSRPLAVAFLAPSATTYIGLNPGYRVYQIDGNYSGSSHVVLDHETYILNLTQANIPGAIPHWQLLYRARETYGLPNTLPTAWHNLVYRMRGDMQLFQTFWFLYHKGHPPSEPCGTPCRLATLCAQLSARADSPALCRHLMPDGSLPEAQSLWPRPLFC

SEQ ID NO: 1048 - protein, 829 aa, Homo sapiens
MISRLAAAQSCASHWPPSADSHILPFSTPGPSTCLPNYYRCSSGTCVMDTWVCDGYRDCADGSDEEACPLLANVTAASTPTQLGRCDRFEFECHQPKTCIPNWKRCDGHQDCQDGRDEANCPTHSTLTCMSREFQCEDGEACIVLSERCDGFLDCSDESDEKACSDELTVYKVQNLQWTADFSGDVTLTWMRPKKMPSASCVYNVYYRVVGESIWKTLETHSNKTNTVLKVLKPDTTYQVKVQVQCLSKAHNTNDFVTLRTPEGLPDAPRNLQLSLPREAEGVIVGHWAPPIHTHGLIREYIVEYSRSGSKMWASQRAASNFTEIKNLLVNTLYTVRVAAVTSRGIGNWSDSKSITTIKGKVIPPPDIHIDSYGENYLSFTLTMESDIKVNGYVVNLFWAFDTHKQERRTLNFRGSILSHKVGNLTAHTSYEISAWAKTDLGDSPLAFEHVMTRGVRPPAPSLKAKAINQTAVECTWTGPRNVVYGIFYATSFLDLYRNPKSLTTSLHNKTVIVSKDEQYLFLVRVVVPYQGPSSDYVVVKMIPDSRLPPRHLHVVHTGKTSVVIKWESPYDSPDQDLLYAVAVKDLIRKTDRSYKVKSRNSTVEYTLNKLEPGGKYHIIVQLGNMSKDSSIKITTVSLSAPDALKIITENDHVLLFWKSLALKEKHFNESRGYEIHMFDSAMNITAYLGNTTDNFFKISNLKMGHNYTFTVQARCLFGNQICGEPAILLYDELGSGADASATQAARSTDVAAVVVPILFLILLSLGVGFAILYTKHRRLQSSFTAFANSHYSSRLGSAIFSSGDDLGEDDEDAPMITGFSDDVPMVIA

SEQ ID NO: 1049 - protein, 740 aa, Homo sapiens
MLLWLLLLILTPGREQSGVAPKAVLLLNPPWSTAFKGEKVALICSSISHSLAQGDTYWYHDEKLLKIKHDKIQITEPGNYQCKTRGSSLSDAVHVEFSPDWLILQALHPVFEGDNVILRCQGKDNKNTHQKVYYKDGKQLPNSYNLEKITVNSVSRDNSKYHCTAYRKFYILDIEVTSKPLNIQVQELFLHPVLRASSSTPIEGSPMTLTCETQLSPQRPDVQLQFSLFRDSQTLGLGWSRSPRLQIPAMWTEDSGSYWCEVETVTHSIKKRSLRSQIRVQRVPVSNVNLEIRPTGGQLIEGENMVLICSVAQGSGTVTFSWHKEGRVRSLGRKTQRSLLAELHVLTVKESDAGRYYCAADNVHSPILSTWIRVTVRTLLSPSVPVSHPVLTFRAPRAHTVVGDLLELHCESLRGSPPILYRFYHEDVTLGNSSAPSGGGASFNLSLTAEHSGNYSCDADNGLGAQHSHGVSLRVTVPVSRPVLTLRAPGAQAVVGDLLELHCESLRGSFPILYWFYHEDDTLGNISAHSGGGASFNLSLTTEHSGNYSCEADNGLGAQHSKVVTLNVTGTSRNRTGLTAAGITGLVLSILVLAAAAALLHYARARRKPGGLSATGTSSHSPSECQEPSSSRPSRIDPQEPTHSKPLAPMELEPMYSNVNPGDSNPIYSQIWSIQHTKENSANCPMMHQEHEELTVLYSELKKTHPDDSAGEASSRGRAHEEDDEENYENVPRVLLASDH

SEQ ID NO: 1050 - protein, 78 aa, Homo sapiens
MAGQGLPLHVATLLTGLLECLGFAGVLFGWPSLVFVFKNEDYFKDLCGPDAGPIGNATGQADCKAQDERFSLIFTLGS

SEQ ID NO: 1051 - protein, 38 aa, Homo sapiens
MGSACIKVTKYFLFLFNLIFFILGAVILGFGVWILADK

SEQ ID NO: 1052 - protein, 164 aa, Homo sapiens
MAAKSQPNIPKAKSLDGVTNDRTASQGQWGRAWEVDWFSLASVIFLLLFAPFIVYYFIMACDQYSCALTGPVVDIVTGHARLSDIWAKTPPITRKAAQLYTLWVTFQVLLYTSLPDFCHKFLPGYVGGIQEGAVTPAGVVNKYQINGLQAWLLTHLLWFANAHL

SEQ ID NO: 1053 - protein, 161 aa, Homo sapiens
MPLVINQSPPCCCVDDTWAQAEVGPVTSCTGFVEGSSRTGGMGSACIKVTKYFLFLFNLIFFILGAVILGFGVWILADKSSFISVLQTSSSSLRMGAYVFIGVGAVTMLMGFLGCIGAVNEVRCLLGLYFAFLLLILIAQVTAGALFYFNMGKLKQEMGGI

SEQ ID NO: 1054 - protein, 107 aa, Homo sapiens
MAAKSQPNIPKAKSLDGVTNDRTASQGQWGRAWEVDWFSLASVIFLLLFAPFIVYYFIMACDQYSCALTGPVVDIVTGHARLSDIWAKTPPITRKAAQLYTLWVTFQ

SEQ ID NO: 1055 - protein, 198 aa, Homo sapiens
MAGGRCGPQLTALLAAWIAAVAATAGPEEAALPPEQSRVQPMTASNWTLVMEGEWMLKFYAPWCPSCQQTDSEWEAFAKNGEILQISVGKVDVIQEPGIFEDLQNYILEKKWQSVEPLTGWKSPASLTMSGMAGLFSISGKIWHLHNYFTVTLGIPAWCSYVFFVIATLVFGLFMGLVLVVISECFYVPLPRHLSERS

SEQ ID NO: 1056 - protein, 47 aa, Homo sapiens
MRQLKGKPKKETSKDKKERKQAMQEARQQITTVVLPTLAVVVLLIVV

SEQ ID NO: 1057 - protein, 331 aa, Homo sapiens
MAGQGLPLHVATLLTGLLECLGFAGVLFGWPSLVFVFKNEDYFKDLCGPDAGPIGNATGQADCKAQDERFSLIFTLGSFMNNFMTFPTGYIFDRFKTTVARLIAIFFYTTATLIIAFTSAGSAVLLFLAMPMLTIGGILFLITNLQIGNLFGQHRSTIITLYNGAFDSSSAVFLIIKLLYEKGISLRASFIFISVCSTWHVARTFLLMPRGHIPYPLPPNYSYGLCPGNGTTKEEKETAEHENRELQSKEFLSAKEETPGAGQKQELRSFWSYAFSRRFAWHLVWLSVIQLWHYLFIGTLNSLLTNMAGGDMARVSTYTNAFAFTQFGVLC

SEQ ID NO: 1058 - protein, 366 aa, Homo sapiens
MPRYGASLRQSCPRSGREQGQDGTAGAPGLLWMGLVLALALALALALALSDSRVLWAPAEAHPLSPQGHPARLHRIVPRLRDVFGWGNLTCPICKGLFTAINLGLKKEPNVARVGSVAIKLCNLLKIAPPAVCQSIVHLFEDDMVEVWRRSVLSPSEACGLLLGSTCGHWDIFSSWNISLPTVPKPPPKPPSPPAPGAPVSRILFLTDLHWDHDYLEGTDPDCADPLCCRRGSGLPPASRPGAGYWGEYSKCDLPLRTLESLLSGLGPAGPFDMVYWTGDIPAHDVWHQTRQDQLRALTTVTALVRKFLGPVPVYPAVGNHESTPVNSFPPPFIEGNHSSRWLYEAMAKAWEPWLPAEALRTLRCI

SEQ ID NO: 1059 - protein, 223 aa, Homo sapiens
MFHLLLAARSGPARLLGPPASLPGLEVLWSPRALLLWLAWLGLQAALYLLPARKVAEGQELKDKSRLRYPINGFQALVLTALLVGLGMSAGLPLGALPEMLLPLAFVATLTAFIFSLFLYMKAQVAPVSALAPGGNSGNPIYDFFLGRELNPRICFFDFKYFCELRPGLIGWVLINLALLMKEAELRGSPSLAMWLVNGFQLLYVGDALWHEEAVLTTMDITH

SEQ ID NO: 1060 - protein, 91 aa, Homo sapiens
MAAKSQPNIPKAKSLDGVTNDRTASQGQWGRAWEVDWFSLASVIFLLLFAPFIVYYFIMACDQYSCALTGPVVDIVTGHARLSDIWAKTPP

SEQ ID NO: 1061 - protein, 169 aa, Homo sapiens
MAGQGLPLHVATLLTGLLECLGFAGVLFGWPSLVFVFKNEDYFKDLCGPDAGPIGNATGQADCKAQDERFSLIFTLGSFMNNFMTFPTGYIFDRFKTTVARLIAIFFYTTATLIIAFTSAGSAVLLFLAMPMLTIGGILFLITNLQIGNLFGQHRSTIITLYNGAFDSS

SEQ ID NO: 1062 - protein, 207 aa, Homo sapiens
FLGRELNPRICFFDFKYFCELRPGLIGWVLINLALLMKEAELRGSPSLAMWLVNGFQLLYVGDALWHEEAVLTTMDITHDGFGFMLAFGDMAWVPFTYSLQAQFLLHHPQPLGLPMASVICLINATGYYIFRGANSQKNTFRKNPSDPRVAGLETISTATGRKLLVSGWWGMVRHPNYLGDLIMALAWSLPCDPGAFAAEPRCPHEP

SEQ ID NO: 1063 - protein, 68 aa, Homo sapiens
MGSACIKVTKYFLFLFNLIFFILGAVILGFGVWILADKSSFISVLQTSSSSLRMGAYVFIGVGAVTML

SEQ ID NO: 1064 - protein, 1124 aa, Homo sapiens
MQTSRHSFSQTTGCVCRSPLFLESSTSWPPLSLLPNLLPIIASIENNICGEHWDEWTRMLLSREMHQCRSDEYNCSSGMCIRSSWVCDGDNDCRDWSDEANCTAIYHTCEASNFQCRNGHCIPQRWACDGDTDCQDGSDEDPVNCEKKCNGFRCPNGTCIPSSKHCDGLRDCSDGSDEQHCEPLCTHFMDFVCKNRQQCLFHSMVCDGIIQCRDGSDEDAAFAGCSQDPEFHKVCDEFGFQCQNGVCISLIWKCDGMDDCGDYSDEANCENPTEAPNCSRYFQFRCENGHCIPNRWKCDRENDCGDWSDEKDCGDSHILPFSTPGPSTCLPNYYRCSSGTCVMDTWVCDGYRDCADGSDEEACPLLANVTAASTPTQLGRCDRFEFECHQPKTCIPNWKRCDGHQDCQDGRDEANCPTHSTLTCMSREFQCEDGEACIVLSERCDGFLDCSDESDEKACSDELTVYKVQNLQWTADFSGDVTLTWMRPKKMPSASCVYNVYYRVVGESIWKTLETHSNKTNTVLKVLKPDTTYQVKVQVQCLSKAHNTNDFVTLRTPEGLPDAPRNLQLSLPREAEGVIVGHWAPPIHTHGLIREYIVEYSRSGSKMWASQRAASNFTEIKNLLVNTLYTVRVAAVTSRGIGNWSDSKSITTIKGKVIPPPDIHIDSYGENYLSFTLTMESDIKVNGYVVNLFWAFDTHKQERRTLNFRGSILSHKVGNLTAHTSYEISAWAKTDLGDSPLAFEHVMTRGVRPPAPSLKAKAINQTAVECTWTGPRNVVYGIFYATSFLDLYRNPKSLTTSLHNKTVIVSKDEQYLFLVRVVVPYQGPSSDYVVVKMIPDSRLPPRHLHVVHTGKTSVVIKWESPYDSPDQDLLYAVAVKDLIRKTDRSYKVKSRNSTVEYTLNKLEPGGKYHIIVQLGNMSKDSSIKITTVSLSAPDALKIITENDHVLLFWKSLALKEKHFNESRGYEIHMFDSAMNITAYLGNTTDNFFKISNLKMGHNYTFTVQARCLFGNQICGEPAILLYDELGSGADASATQAARSTDVAAVVVPILFLILLSLGVGFAILYTKHRRLQSSFTAFANSHYSSRLGSAIFSSGDDLGEDDEDAPMITGFSDDVPMVIA

SEQ ID NO: 1065 - protein, 1437 aa, Homo sapiens
MIWYVATFIASVIGTRGLAAEGAHGLREEPEFVTARAGESVVLRCDVIHPVTGQPPPYVVEWFKFGVPIPIFIKFGYYPPHVDPEYAGRASLHDKASLRLEQVRSEDQGWYECKVLMLDQQYDTFHNGSWVHLTINAPPTFTETPPQYIEAKEGGSITMTCTAFGNPKPIVTWLKEGTLLGASGKYQVSDGSLTVTSVSREDRGAYTCRAYSIQGEAVHTTHLLVQGPPFIVSPPENITVNISQDALLTCRAEAYPGNLTYTWYWQDENVYFQNDLKLRVRILIDGTLIIFRVKPEDSGKYTCVPSNSLGRSPSASAYLTVQYPARVLNMPPVIYVPVGIHGYIRCPVDAEPPATVVKWNKDGRPLQVEKNLGWTLMEDGSIRIEEATEEALGTYTCVPYNTLGTMGQSAPARLVLKDPPYFTVLPGWEYRQEAGRELLIPCAAAGDPFPVITWRKVGKPSRSKHSALPSGSLQFRALSKEDHGEWECVATNVVTSITASTHLTVIGTSPHAPGSVRVQVSMTTANVSWEPGYDGGYEQTFSVWMKRAQFGPHDWLSLPVPPGPSWLLVDTLEPETAYQFSVLAQNKLGTSAFSEVVTVNTLAFPITTPEPLVLVTPPRCLIANRTQQGVLLSWLPPANHSFPIDRYIMEFRVAERWELLDDGIPGTEGEFFAKDLSQDTWYEFRVLAVMQDLISEPSNIAGVSSTDIFPQPDLTEDGLARPVLAGIVATICFLAAAILFSTLAACFVNKQRKRKLKRKKDPPLSITHCRKSLESPLSSGKVSPESIRTLRAPSESSDDQGQPAAKRMLSPTREKELSLYKKTKRAISSKKYSVAKAEAEAEATTPIELISRGPDGRFVMDPAEMEPSLKSRRIEGFPFAEETDMYPEFRQSDEENEDPLVPTSVAALKSQLTPLSSSQESYLPPPAYSPRFQPRGLEGPGGLEGRLQATGQARPPAPRPFHHGQYYGYLSSSSPGEVEPPPFYVPEVGSPLSSVMSSPPLPTEGPFGHPTIPEENGENASNSTLPLTQTPTGGRSPEPWGRPEFPFGGLETPAMMFPHQLPPCDVPESLQPKAGLPRGLPPTSLQVPAAYPGILSLEAPKGWAGKSPGRGPVPAPPAAKWQDRPMQPLVSQGQLRHTSQGMGIPVLPYPEPAEPGAHGGPSTFGLDTRWYEPQPRPRPSPRQARRAEPSLHQVVLQPSRLSPLTQSPLSSRTGSPELAARARPRPGLLQQAEMSEITLQPPAAVSFSRKSTPSTGSPSQSSRSGSPSYRPAMGFTTLATGYPSPPPGPAPAGPGDSLDVFGQTPSPRRTGEELLRPETPPPTLPTSGTLPPAPGNAAAPERLEALKYQRIKKPKKSSKGSSKSKKRSDDSASQTQQLPNSQVLWPDEAVCLRKKKRHSRPDPFARLSDLCHRQLPEDQTAILNSVDHDDPGHATLL

SEQ ID NO: 1066 - protein, 139 aa, Homo sapiens
MGRVSGLVPSRFLTLLAHLVVVITLFWSRDSNIQACLPLTFTPEEYDKQDIHPLPLCRLVAALSVTLGLFAVELAGFLSGVSMFNSTQSLISIGAHCSASVALSFFIFERWECTTYCALPAVTEMALFVTVFGLKKKPF

SEQ ID NO: 1067 - protein, 467 aa, Homo sapiens
MNENIDILETAIKQAAEQGARIIVTPEDALYGWKFTRETVFPYLEDIPDPQVNWIPCQDPHRFGHTPVQARLSCLAKDNSIYVLANLGDKKPCNSRDSTCPPNGYFQYNTNVVYNTEGKLVARYHKYHLYSEPQFNVPEKPELVTFNTAFGRFGIFTCFDIFFYDPGVTLVKDFHVDTILFPTAWMNVLPLLTAIEFHSAWAMGMGVNLLVANTHHVSLNMTGSGIYAPNGPKVYHYDMKTELGKLLLSEVDSHPLSSLAYPTAVNWNAYATTIKPFPVQKNTFRGFISRDGFNFTELFENAGNLTVCQKELCCHLSYRMLQKEENEVYVLGAFTGLHGRRRREYWQVCTLLKCKTTNLTTCGRPVETASTRFEMFSLSGTFGTEYVFPEVLLTEIHLSPGKFEVLKDGRLVNKNGSSGPILTVSLFGRWYTKDSLYSSCGTSNSAITYLLIFILLMIIALQNIVML

SEQ ID NO: 1068 - protein, 199 aa, Homo sapiens
MKLFDASPTFFAFLLGHILAMEVLAWLLIYLLGPGWVPSALAAFILAISQAQSWCLQHDLGHASIFKKSWWNHVAQKFVMGQLKGFSAHWWNFRHFQHHAKPNIFHKDPDVTVAPVFLLGESSVEYGKKKRRYLPYNQQHLYFFLIGPPLLTLVNFEVENLAYMLVCMQWADLLWAASFYARFFLSYLPFYGVPGVLLF

SEQ ID NO: 1069 - protein, 60 aa, Homo sapiens
MDAVSQVPMEVVLPKHILDIWVIVLIILATIVIMTSLLLCPATAVIIYRMRTHPILSGAV

SEQ ID NO: 1070 - protein, 299 aa, Homo sapiens
MVTSSFPISVAVFALITLQVGTQDSFIAAVYEHAVILPNKTETPVSQEDALNLMNENIDILETAIKQAAEQGARIIVTPEDALYGWKFTRETVFPYLEDIPDPQVNWIPCQDPHRFGHTPVQARLSCLAKDNSIYVLANLGDKKPCNSRDSTCPPNGYFQYNTNVVYNTEGKLVARYHKVCTLLKCKTTNLTTCGRPVETASTRFEMFSLSGTFGTEYVFPEVLLTEIHLSPGKFEVLKDGRLVNKNGSSGPILTVSLFGRWYTKDSLYSSCGTSNSAITYLLIFILLMIIALQNIVML

SEQ ID NO: 1071 - protein, 841 aa, Homo sapiens
GPLRLLALLLLLLLLLLLQLQHLAAAAADPLLGGQGPAKDCEKDQFQCRNERCIPSVWRCDEDDDCLDHSDEDDCPKKTCADSDFTCDNGHCIHERWKCDGEEECPDGSDESEATCTKQVCPAEKLSCGPTSHKCVPASWRCDGEKDCEGGADEAGCATSLGTCRGDEFQCGDGTCVLAIKHCNQEQDCPDGSDEAGCLQVPPTFLGNRRRPRGLNECLHNNGGCSHICTDLKIGFECTCPAGFQLLDQKTCGDIDECKDPDACSQICVNYKGYFKCECYPGYEMDLLTKNCKAAAGKSPSLIFTNRHEVRRIDLVKRNYSRLIPMLKNVVALDVEVATNRIYWCDLSYRKIYSAYMDKASDPKEQEVLIDEQLHSPEGLAVDWVHKHIYWTDSGNKTISVATVDGGRRRTLFSRNLSEPRAIAVDPLRGFMYWSDWGDQAKIEKSGLNGVDRQTLVSDNIEWPNGITLDLLSQRLYWVDSKLHQLSSIDFSGGNRKTLISSTDFLSHPFGIAVFEDKVFWTDLENEAIFSANRLNGLEISILAENLNNPHDIVIFHELKQPRAPDACELSVQPNGGCEYLCLPAPQISSHSPKYTCACPDTMWLGPDMKRCYRAPQSTSTTTLASTMTRTVPATTRAPGTTVHRSTYQNHSTETPSLTAAVPSSVSVPRAPSISPSTLSPATSNHSQHYANEDSKMGSTVTAAVIGIIVPIVVIALLCMSGYLIWRNWKRKNTKSMNFDNPVYRKTTEEEDEDELHIGRTAQIGHVYPAAISSFDRPLWAEPCLGETREPEDPAPALKELFVLPGEPRSQLHQLPKNPLSELPVVKSKRVALSLEDDGLP

SEQ ID NO: 1072 - protein, 486 aa, Homo sapiens
MVRHQPLQYYEPQLCLSCLTGIYGCRWKRYQRSHDDTTPGTAPFLHVGAVAAVTMLSWIVAGQFARAERTSSQVTILCTFFTVVFALYLAPLTISSPCIMEKKDLGPKPALIGHRGAPMLAPEHTLMSFRKALEQKLYGLQADITISLDGVPFLMHDTTLRRTTNVEEEFPELARRPASMLNWTTLQRLNAGQWFLKTDPFWTASSLSPSDHREAQNQSICSLAELLELAKGNATLLLNLRDPPREHPYRSSFINVTLEAVLHSGFPQHQVMWLPSRQRPLVRKVAPGFQQTSGSKEAVASLRRGHIQRLNLRYTQVSRQELRDYASWNLSVNLYTVNAPWLFSLLWCAGVPSVTSDNSHALSQVPSPLWIMPPDEYCLMWVTADLVSFTLIVGIFVLQKWRLGGIRSYNPEQIMLSAAVRRTSRDVSIMKEKLIFSEISDGVEVSDVLSVCSDNSYDTYANSTATPVGPRGGGSHTKTLIERSGR

SEQ ID NO: 1073 - protein, 1263 aa, Homo sapiens
MGDSPGRGAPERRHKAQPGRARKYEWRPEGPTSMGSLGQREDLQDEDRNSAFTWKVQANNRAYNGQFKEKVILCWQRKKYKTNVIRTAKYNFYSFLPLNLYEQFHRVSNLFFLIIIILQSIPDISTLPWFSLSTPMVCLLFIRATRDLVDDMGRHKSDRAINNRPCQILMGKSFKQKKWQDLCVGDVVCLRKDNIVPADMLLLASTEPSSLCYVETVDIDGETNLKFRQALMVTHKELATIKKMASFQGTVTCEAPNSRMHHFVGCLEWNDKKYSLDIGNLLLRGCRIRNTDTCYGLVIYADGYMFVGFDTKIMKNCGKIHLKRTKLDLLMNKLVVVIFISVVLVCLVLAFGFGFSVKEFKDHHYYLSGVHGSSVAAESFFVFWSFLILLSVTIPMSMFILSEFIYLGNSVFIDWDVQMYYKPQDVPAKARSTSLNDHLGQVEYIFSDKTGTLTQNILTFNKCCISGRVYGPDSEATTRPKENPYLWNKFADGKLLFHNAALLHLVRTNGDEAVREFWRLLAICHTVMVRESPRERPDQLLYQAASPDEGALVTAARNFGYVFLSRTQDTVTIMELGEERVYQVLAIMDFNSTRKRMSVLVRKPEGAICLYTKGADTVIFERLHRRGAMEFATEEALAAFAQETLRTLCLAYREVAEDIYEDWQQRHQEASLLLQNRAQALQQVYNEMEQDLRLLGATAIEDRLQDGVPETIKCLKKSNIKIWVLTGDKQETAVNIGFACELLSENMLILEEKEISRILETYWENSNNLLTRESLSQVKLALVINGDFLDKLLVSLRKEPRALAQNVNMDEAWQELGQSRRDFLYARRLSLLCRRFGLPLAAPPAQDSRARRSSEVLQERAFVDLASKCQAVICCRVTPKQKALIVALVKKYHQVVTLAIGDGANDINMIKTADVGVGLAGQEGMQAVQNSDFVLGQFCFLQRLLLVHGRWSYVRICKFLRYFFYKSMASMMVQVWFACYNGFTGQPLYEGWFLALFNLLYSTLPVLYIGLFEQDVSAEQSLEKPELYVVGQKDELFNYWVFVQAIAHGVTTSLVNFFMTLWISRDTAGPASFSDHQSFAVVVALSCLLSITMEVILIIKYWTALCVATILLSLGFYAIMTTTTQSFWLFRVSPTTFPFLYADLSVMSSPSILLVVLLSVSINTFPVLALRVIFPALKELRAKEEKVEEGPSEEIFTMEPLPHVHRESRARRSSYAFSHREGYANLITQGTILRRGPGVSSDIASESLDPSDEEAASSPKESQ

SEQ ID NO: 1074 - protein, 333 aa, Homo sapiens
MTLELGGKVTIECAKNNFQAQLEFKLKPFFGGSTSINQISGKITSGEEVLASLSGHWDRDVFIKEEGSGSSALFWTPSGEVRRQRLRQHTVPLEEQTELESERLWQHVTRAISKGDQHRATQEKFALEEAQRQRARERQESLMPWKPQLFHLDPITQEWHYRYEDHSPWDPLKDIAQFEQDGILRTLQQEAVARQTTFLGSPGPRHERSGPDQRLRKASDQPSGHSQATESSGSTPESCPELSDEEQDGDFVPGGESPCPRCRKEARRLQALHEAILSIREAQQELHRHLSAMLSSTARAAQAPTPGLLQSPRSWFLLCVFLACQLFINHILK

SEQ ID NO: 1075 - protein, 85 aa, Homo sapiens
MARACLQAVKYLMFAFNLLFWLGGCGVLGVGIWLAATQGSFATLSSSFPSLSAANLLIITGAFVMAIGFVGCLGAIKENKCLLLT

SEQ ID NO: 1076 - protein, 240 aa, Homo sapiens
MNKQRGTFSEVSLAQDPKRQQRKPKGNKSSISGTEQEIFQVELNLQNPSLNHQGIDKIYDCQGLLPPPEKLTAEVLGIICIVLMATVLKTIVLIPFLEQNNFSPNTRTQKARHCGHCPEEWITYSNSCYYIGKERRTWEESLQACASKNSSSLLCIDNEEEMKFLASILPSSWIGVFRNSSHHPWVTINGLAFKHEIKDSDHAERNCAMLHVRGLISDQCGSSRIIRRGFIMLTRLVLNS

SEQ ID NO: 1077 - protein, 377 aa, Homo sapiens
MVTEMNPNVVVISVLAILSTLLIGLLLVTLIILRKKHLQMARECGAGTFVNFASLERDGKLPYNWSKNGLKKRKLTNPVQLDDFDAYIKDMAKDSDYKFSLQFEELKLIGLDIPHFAADLPLNRCKNRYTNILPYDFSRVRLVSMNEEEGADYINANYIPGYNSPQEYIATQGPLPETRNDFWKMVLQQKSQIIVMLTQCNEKRRVKCDHYWPFTEEPIAYGDITVEMISEEEQDDWACRHFRINYADEMQDVMHFNYTAWPDHGVPTANAAESILQFVHMVRQQATKSKGPMIIHCSAGVGRTGTFIALDRLLQHIRDHEFVDILGLVSEMRSYRMSMVQTEEQYIFIHQCVQLMWMKKKQQFCISDVIYENVSKS

SEQ ID NO: 1078 - protein, 570 aa, Homo sapiens
MNISIDLDTNYAELVLNVGRVTLGENNRKKMKDCQLRKQQNENVSRAVCALLNSGGGVIKAEVENKGYSYKKDGIGLDLENSFSNMLPFVPNFLDFMQNGNYFHIFVKSWSLETSGPQIATLSSSLYKRDVTSAKVMNASAALEFLKDMEKTGGRAYLRPEFPAKRACVDVQEESNMEALAADFFNRTELGYKEKLTFTESTHVEIKNFSTEKLLQRITEILPQYVSAFANTDGGYLFVGLNEDKEVIGFKAEKSYLTKLEEVTKNSIGKLPVHHFCVEKGTINYLCKFLGVYDKGRLCGYVYALRVERFCCAVFAKKPDSWHVKDNRVKQLTEKEWIQFMVDSEPVCEELPSPASTSSPVSQSYPLREYINFKIQPLRYHLPGLSEKITCAPKTFCRNLFSQHEGLKQLICEEMGSVNKGSLIFSRSWSLDLGLQENHKVLCDALLISQDKPPVLYTFHMVQDEEFKDYSTQTAQTLKQKLAKIGGYTKKVCVMTKIFYLSPEGKTSCQYDLNSQVIYPESYYWTTAQTMKDLEKALSNILPKENQIFLFVCLFRFCLFVCWFVCFFLR

SEQ ID NO: 1079 - protein, 682 aa, Homo sapiens
MGPWGWKLRWTVALLLAAAGTAVGDRCERNEFQCQDGKCISYKWVCDGSAECQDGSDESQETCLSVTCKSGDFSCGGRVNRCIPQFWRCDGQVDCDNGSDEQGCPVATCRPDEFQCSDGNCIHGSRQCDREYDCKDMSDEVGCVNVTLCEGPNKFKCHSGECITLDKVCNMARDCRDWSDEPIKECGTNECLDNNGGCSHVCNDLKIGYECLCPDGFQLVAQRRCEDIDECQDPDTCSQLCVNLEGGYKCQCEEGFQLDPHTKACKAVGSIAYLFFTNRHEVRKMTLDRSEYTSLIPNLRNVVALDTEVASNRIYWSDLSQRMICSTQLDRAHGVSSYDTVISRDIQAPDGLAVDWIHSNIYWTDSVLGTVSVADTKGVKRKTLFRENGSKPRAIVVDPVHGFMYWTDWGTPAKIKKGGLNGVDIYSLVTENIQWPNGITLDLLSGRLYWVDSKLHSISSIDVNGGNRKTILEDEKRLAHPFSLAVFEDKVFWTDIINEAIFSANRLTGSDVNLLAENLLSPEDMVLFHNLTQPREAEAAVATQETSTVRLKVSSTAVRTQHTTTRPVPDTSRLPGATPGLTTVEIVTMSHQALGDVAGRGNEKKPSSVRALSIVLPIVLLVFLCLGVFLLWKNWRLKNINSINFDNPVYQKTTEDEVHICHNQDGYSYPSRQMVSLEDDVA

SEQ ID NO: 1080 - protein, 610 aa, Homo sapiens
MKDYDELLKYYELHETIGTGGFAKVKLACHILTGEMVAIKIMDKNTLGSDLPRIKTEIEALKNLRHQHICQLYHVLETANKIFMVLEYCPGGELFDYIISQDRLSEEETRVVFRQIVSAVAYVHSQGYAHRDLKPENLLFDEYHKLKLIDFGLCAKPKGNKDYHLQTCCGSLAYAAPELIQGKSYLGSEADVWSMGILLYVLMCGFLPFDDDNVMALYKKIMRGKYDVPKWLSPSSILLLQQMLQVDPKKRISMKNLLNHPWIMQDYNYPVEWQSKNPFIHLDDDCVTELSVHHRNNRQTMEDLISLWQYDHLTATYLLLLAKKARGKPVRLRLSSFSCGQASATPFTDIKFTKYWTESNGVESKSLTPALCRTPANKLKNKENVYTPKSAVKNEEYFMFPEPKTPVNKNQHKREILTTPNRYTTPSKARNQCLKETPIKIPVNSTGTDKLMTGVISPERRCRSVELDLNQAHMEETPKRKGAKVFGSLERGLDKVITVLTRSKRKGSARDGPRRLKLHYNVTTTRLVNPDQLLNEIMSILPKKHVDFVQKGYTLKCQTQSDFGKVTMQFELEVCQLQKPDVVGIRRQRLKGDAWVYKRLVEDILSSCKV

SEQ ID NO: 1081 - protein, 151 aa, Homo sapiens
MLHVFVLGEWQPIEYGKKKLKYLPYNHQHEYFFLIGPPLLIPMYFQYQIIMTMIVHKNWVDLAWAVSYYIRFFITYIPFYGILGALLFLNFIRFLESHWFVWVTQMNHIVMEIDQEAYRDWFSSQLTATCNVEQSFFNDWFSGHLNFQIEH

SEQ ID NO: 1082 - protein, 106 aa, Homo sapiens
MAVFKTTLWRLISGTLGIICLSLMSTLGILLKNSFTKLSIEPAFTPGPNIELQKDSDCCSCQEKWVGYRCNCYFISSEQKTWNESRHLCASQKSSLLQLQNTDELA

SEQ ID NO: 1083 - protein, 694 aa, Homo sapiens
MTFGQSKLYRSEDYGKNFKDITDLINNTFIRTEFGMAIGPENSGKVVLTAEVSGGSRGGRIFRSSDFAKNFVQTDLPFHPLTQMMYSPQNSDYLLALSTENGLWVSKNFGGKWEEIHKAVCLAKWGSDNTIFFTTYANGSCTDLGALELWRTSDLGKSFKTIGVKIYSFGLGGRFLFASVMADKDTTRRIHVSTDQGDTWSMAQLPSVGQEQFYSILAANDDMVFMHVDEPGDTGFGTIFTSDDRGIVYSKSLDRHLYTTTGGETDFTNVTSLRGVYITSVLSEDNSIQTMITFDQGGRWTHLRKPENSECDATAKNKNECSLHIHASYSISQKLNVPMAPLSEPNAVGIVIAHGSVGDAISVMVPDVYISDDGGYSWTKMLEGPHYYTILDSGGIIVAIEHSSRPINVIKFSTDEGQCWQTYTFTRDPIYFTGLASEPGARSMNISIWGFTESFLTSQWVSYTIDFKDILERNCEEKDYTIWLAHSTDPEDYEDGCILGYKEQFLRLRKSSVCQNGRDYVVTKQPSICLCSLEDFLCDFGYYRPENDSKCVEQPELKGHDLEFCLYGREEHLTTNGYRKIPGDKCQGGVNPVREVKDLKKKCTSNFLSPEKQNSKSNSVPIILAIVGLMLVTVVAGVLIVKKYVCGGRFLVHRYSVLQQHAEANGVDGVDALDTASHTNKSGYHDDSDEDLLE

SEQ ID NO: 1084 - protein, 219 aa, Homo sapiens
MESNLSGLVPAAGLVPALPPAVTLGLTAAYTTLYALLFFSVYAQLWLVLLYGHKRLSYQTVFLALCLLWAALRTTLFSFYFRDTPRANRLGPLPFWLLYCCPVCLQFFTLTLMNLYFAQVVFKAKVKRRPEMSRGLLAVRGAFVGASLLFLLVNVLCAVLSHRRRAQPWALLLVRVLVSDSLFVICALSLAACLCLVARRAPSTSIYLEAKGTSVCQAA

SEQ ID NO: 1085 - protein, 106 aa, Homo sapiens
MLDVALFMSNAMRLKAVLEQGPSSHYYTTLVTLISLSLLLQVVIGVLLVVIARLNLNEVEKQWRLNQLNNAATILVFFTVVINVFITAFGAHKTGFLAARASRNPL

SEQ ID NO: 1086 - protein, 652 aa, Homo sapiens
MTPPPPGRAAPSAPRARVPGPPARLGLPLRLRLLLLLWAAAASAQGHLRSGPRIFAVWKGHVGQDRVDFGQTEPHTVLFHEPGSSSVWVGGRGKVYLFDFPEGKNASVRTDCENYITLLERRSEGLLACGTNARHPSCWNLVNGTVVPLGEMRGYAPFSPDENSLVLFEGDEVYSTIRKQEYNGKIPRFRRIRGESELYTSDTVMQNPQFIKATIVHQDQAYDDKIYYFFREDNPDKNPEAPLNVSRVAQLCRGDQGGESSLSVSKWNTFLKAMLVCSDAATNKNFNRLQDVFLLPDPSGQWRDTRVYGVFSNPWNYSAVCVYSLGDIDKVFRTSSLKGYHSSLPNPRPGKCLPDQQPIPTETFQVADRHPEVAQRVEPMGPLKTPLFHSKYHYQKVAVHRMQASHGETFHVLYLTTDRGTIHKVVEPGEQEHSFAFNIMEIQPFRRAAAIQTMSLDAERRKLYVSSQWEVSQVPLDLCEVYGGGCHGCLMSRDPYCGWDQGRCISIYSSERSVLQSINPAEPHKECPNPKPDKAPLQKVSLAPNSRYYLSCPMESRHATYSWRHKENVEQSCEPGHQSPNCILFIENLTAQQYGHYFCEAQEGSYFREAQHWQLLPEDGIMAEHLLGHACALAASLWLGVLPTLTLGLLVH

SEQ ID NO: 1087 - protein, 86 aa, Homo sapiens
MNSLLIGELSPEQPSFEPTKNKELTDEFRELRATVERMGLMKANHVFFLLYLLHILLLDGAAWLTLWVFGTSFLPFLLCAVLLSAV

SEQ ID NO: 1088 - protein, 192 aa, Homo sapiens
MTFLCSCLLFVSVSSPVGPPALLPLYFQWYIFYFVIQRKKWVDLAWMITFYVRFFLTYVPLLGLKAFLGLFFIVRFLESNWFVWVTQMNHIPMHIDHDRNMDWVSTQLQATCNVHKSAFNDWFSGHLNFQIEHHLFPTMPRHNYHKVAPLVQSLCAKHGIEYQSKPLLSAFADIIHSLKESGQLWLDAYLHQ

SEQ ID NO: 1089 - protein, 520 aa, Homo sapiens
MVLEENLLFDEYHKLKLIDFGLCAKPKGNKDYHLQTCCGSLAYAAPELIQGKSYLGSEADVWSMGILLYVLMCGFLPFDDDNVMALYKKIMRGKYDVPKWLSPSSILLLQQMLQVDPKKRISMKNLLNHPWIMQDYNYPVEWQSKNPFIHLDDDCVTELSVHHRNNRQTMEDLISLWQYDHLTATYLLLLAKKARGKPVRLRLSSFSCGQASATPFTDIKSNNWSLEDVTASDKNYVAGLIDYDWCEDDLSTGAATPRTSQFTKYWTESNGVESKSLTPALCRTPANKLKNKENVYTPKSAVKNEEYFMFPEPKTPVNKNQHKREILTTPNRYTTPSKARNQCLKETPIKIPVNSTGTDKLMTGVISPERRCRSVELDLNQAHMEETPKRKGAKVFGSLERGLDKVITVLTRSKRKGSARDGPRRLKLHYNVTTTRLVNPDQLLNEIMSILPKKHVDFVQKGYTLKCQTQSDFGKVTMQFELEVCQLQKPDVVGIRRQRLKGDAWVYKRLVEDILSSCKV

SEQ ID NO: 1090 - protein, 109 aa, Homo sapiens
MNSLLIGELSPEQPSFEPTKNKELTDEFRELRATVERMGLMKANHVFFLLYLLHILLLDGAAWLTLWVFGTSFLPFLLCAVLLSAVQAQAGWLQHDFGHLSVFSTSKWN

SEQ ID NO: 1091 - protein, 528 aa, Homo sapiens
MEPAVSLAVCALLFLLWVRLKGLEFVLIHQRWVFVCLFLLPLSLIFDIYYYVRAWVVFKLSSAPRLHEQRVRDIQKQVREWKEQGSKTFMCTGRPGWLTVSLRVGKYKKTHKNIMINLMDILEVDTKKQIVRVEPLVTMGQVTALLTSIGWTLPVLPELDDLTVGGLIMGTGIESSSHKYGLFQHICTAYELVLADGSFVRCTPSENSDLFYAVPWSCGTLGFLVAAEIRIIPAKKYVKLRFEPVRGLEAICAKFTHESQRQENHFVEGLLYSLDEAVIMTGVMTDEAEPSKLNSIGNYYKPWFFKHVENYLKTNREGLEYIPLRHYYHRHTRSIFWELQLLCFSVSDVPQRDIIPFGNNPIFRYLFGWMVPPKISLLKLTQGETLRKLYEQHHVVQDMLVPMKCLQQALHTFQNDIHVYPIWLCPFILPSQPGLVHPKGNEAELYIDIGAYGEPRVKHFEARSCMRQLEKFVRSVHGFQMLYADCYMNREEFWEMFDGSLYHKLREKLGCQDAFPEVYDKICKAARH

SEQ ID NO: 1092 - protein, 163 aa, Homo sapiens
AALLKVAQMVTLLIAFICVRSSLWTNYSAYSYFEVVTICDLIMILAFYLVHLFRFYRVLTCISWPLSMQPSDEATTPRPLRSFAERRTCTPGEASGPVFLCQSPVRLVGTRKGLHPLPALPGSQLPELLSQPETLPPAFRGEHPSHSGKGKQPPGKCFLPSCF

SEQ ID NO: 1093 - protein, 225 aa, Homo sapiens
MRLREPLLSGSAAMPGASLQRACRLLVAVCALHLGVTLVYYLAGRDLSRLPQLVGVSTPLQGGSNSAAAIGQSSGELRTGGARPPPPLGASSQPRPGGDSSPVVDSGPGPASNLTSVPVPHTTALSLPACPEESPLLVGPMLIEFNMPVDLELVAKQNPNVKMGGRYAPRDCVSPHKVAIIIPFRNRQEHLKYWLYYLHPVLQRQQLDYGIYVINQYEKIRRLLW

SEQ ID NO: 1094 - protein, 46 aa, Homo sapiens
MATLKDQLIYNLLKEEQTPQNKITVVGVGAVGMACAITVLIWSSVT

SEQ ID NO: 1095 - protein, 819 aa, Homo sapiens
MGPWGWKLRWTVALLLAAAGTAVGDRCERNEFQCQDGKCISYKWVCDGSAECQDGSDESQETCSPKTCSQDEFRCHDGKCISRQFVCDSDRDCLDGSDEASCPVLTCGPASFQCNSSTCIPQLWACDNDPDCEDGSDEWPQRCRGLYVFQGDSSPCSAFEFHCLSGECIHSSWRCDGGPDCKDKSDEENCAVATCRPDEFQCSDGNCIHGSRQCDREYDCKDMSDEVGCVNVTLCEGPNKFKCHSGECITLDKVCNMARDCRDWSDEPIKECGTNECLDNNGGCSHVCNDLKIGYECLCPDGFQLVAQRRCEDIDECQDPDTCSQLCVNLEGGYKCQCEEGFQLDPHTKACKAVGSIAYLFFTNRHEVRKMTLDRSEYTSLIPNLRNVVALDTEVASNRIYWSDLSQRMICSTQLDRAHGVSSYDTVISRDIQAPDGLAVDWIHSNIYWTDSVLGTVSVADTKGVKRKTLFRENGSKPRAIVVDPVHGFMYWTDWGTPAKIKKGGLNGVDIYSLVTENIQWPNGITLDLLSGRLYWVDSKLHSISSIDVNGGNRKTILEDEKRLAHPFSLAVFEDKVFWTDIINEAIFSANRLTGSDVNLLAENLLSPEDMVLFHNLTQPRGVNWCERTTLSNGGCQYLCLPAPQINPHSPKFTCACPDGMLLARDMRSCLTEAEAAVATQETSTVRLKVSSTAVRTQHTTTRPVPDTSRLPGATPGLTTVEIVTMSHQALGDVAGRGNEKKPSSVRALSIVLPIVLLVFLCLGVFLLWKNWRLKNINSINFDNPVYQKTTEDEVHICHNQDGYSYPSRQMVSLEDDVA

SEQ ID NO: 1096 - protein, 858 aa, Homo sapiens
MGDHLDLLLGVVLMAGPVFGIPSCSFDGRIAFYRFCNLTQVPQVLNTTERLLLSFNYIRTVTASSFPFLEQLQLLELGSQYTPLTIDKEAFRNLPNLRILDLGSSKIYFLHPDAFQGLFHLFELRLYFCGLSDAVLKDGYFRNLKALTRLDLSKNQIRSLYLHPSFGKLNSLKSIDFSSNQIFLVCEHELEPLQGKTLSFFSLAANSLYSRVSVDWGKCMNPFRNMVLEILDVSGNGWTVDITGNFSNAISKSQAFSLILAHHIMGAGFGFHNIKDPDQNTFAGLARSSVRHLDLSHGFVFSLNSRVFETLKDLKVLNLAYNKINKIADEAFYGLDNLQVLNLSYNLLGELYSSNFYGLPKVAYIDLQKNHIAIIQDQTFKFLEKLQTLDLRDNALTTIHFIPSIPDIFLSGNKLVTLPKINLTANLIHLSENRLENLDILYFLLRVPHLQILILNQNRFSSCSGDQTPSENPSLEQLFLGENMLQLAWETELCWDVFEGLSHLQVLYLNHNYLNSLPPGVFSHLTALRGLSLNSNRLTVLSHNDLPANLEILDISRNQLLAPNPDVFVSLSVLDITHNKFICECELSTFINWLNHTNVTIAGPPADIYCVYPDSFSGVSLFSLSTEGCDEEEVLKSLKFSLFIVCTVTLTLFLMTILTVTKFRGFCFICYKTAQRLVFKDHPQGTEPDMYKYDAYLCFSSKDFTWVQNALLKHLDTQYSDQNRFNLCFEERDFVPGENRIANIQDAIWNSRKIVCLVSRHFLRDGWCLEAFSYAQGRCLSDLNSALIMVVVGSLSQYQLMKHQSIRGFVQKQQYLRWPEDLQDVGWFLHKLSQQILKKEKEKKKDNNIPLQTVATIS

SEQ ID NO: 1097 - protein, 153 aa, Homo sapiens
MNSLLIGELSPEQPSFEPTKNKELTDEFRELRATVERMGLMKANHVFFLLYLLHILLLDGAAWLTLWVFGTSFLPFLLCAVLLSAVQAQAGWLQHDFGHLSVFSTSKWNHLLHHFVIGHLKGAPASWWNHMHFQHHAKPNCFRKDPDINMHPF

SEQ ID NO: 1098 - protein, 652 aa, Homo sapiens
MTSAQYKIKILIEGLHHGQRPGPAPPRQPGSFCWALKADGIMWLAKACWSIQSEMPCIQAQYGTPAPSPGPRDHLASDPLTPEFIKPTMDLASPEAAPAAPTALPSFSTFMDGYTGEFDTFLYQLPGTVQPCSSASSSASSTSSSSATSPASASFKFEDFQVYGCYPGPLSGPVDEALSSSGSDYYGSPCSAPSPSTPSFQPPQLSPWDGSFGHFSPSQTYEGLRAWTEQLPKASGPPQPPAFFSFSPPTGPSPSLAQSPLKLFPSQATHQLGEGESYSMPTAFPGLAPTSPHLEGSGILDTPVTSTKARSGAPGGSEGRCAVCGDNASCQHYGVRTCEGCKGFFKRTVQKNAKYICLANKDCPVDKRRRNRCQFCRFQKCLAVGMVKEVVRTDSLKGRRGRLPSKPKQPPDASPANLLTSLVRAHLDSGPSTAKLDYSKFQELVLPHFGKEDAGDVQQFYDLLSGSLEVIRKWAEKIPGFAELSPADQDLLLESAFLELFILRLAYRSKPGEGKLIFCSGLVLHRLQCARGFGDWIDSILAFSRSLHSLLVDVPAFACLSALVLITDRHGLQEPRRVEELQNRIASCLKEHVAAVAGEPQPASCLSRLLGKLPELRTLCTQGLQRIFYLKLEDLVPPPPIIDKIFMDTLPF

SEQ ID NO: 1099 - protein, 165 aa, Homo sapiens
MPVKGGTKCIKYLLFGFNFIFWVGVSGTLFGSTTGLFNQSLAETGFTPYTQKSNDFLVKSLKIWLAGIAVLAIGLWLRFDSQTKSIFEQETNNNNSSFYTGVYILIGAGALMMLVGFLGCCGAVQESQCMLGLFFGFLLVIFAIEIAAAIWGYSHKDEVIKEVQE

SEQ ID NO: 1100 - protein, 240 aa, Homo sapiens
MESNLSGLVPAAGLVPALPPAVTLGLTAAYTTLYALLFFSVYAQLWLVLLYGHKRLSYQTVFLALCLLWAALRTTLFSFYFRDTPRANRLGPLPFWLLYCCPVCLQFFTLTLMNLYFAQVVFKAKVKRRPEMSRGLLAVRGAFVGASLLFLLVNVLCAVLSHRRRAQPWALLLVRVLVSDSLFVICALSLAACLCLVARRAPSTSIYLEAKGTSVCQAAAMGGAMVLLYASRACYNLTAL

SEQ ID NO: 1101 - protein, 45 aa, Homo sapiens
MATLKDQLIYNLLKEEQTPQNKITVVGVGAVGMACAISILMKWIS

SEQ ID NO: 1102 - protein, 146 aa, Homo sapiens
MLVLLAGIFVVHIATVIMLFVSTIANVWLVSNTVDASVGLWKNCTNISCSDSLSYASEDALKTVQAFMILSIIFCVIALLVFVFQLFTMEKGNRFFLSGATTLVCCEYLMGRLQFTLLSPSYHGCFWQLEQISTWFSETSLCNFLL

SEQ ID NO: 1103 - protein, 615 aa, Homo sapiens
MATSRGASRCPRDIANVMQRLQDEQEIVQKRTFTKWINSHLAKRKPPMVVDDLFEDMKDGVKLLALLEVLSGQKLPCEQGRRMKRIHAVANIGTALKFLEGRKIKLVNINSTDIADGRPSIVLGLMWTIILYFQIEELTSNLPQLQSLSSSASSVDSIVSSETPSPPSKRKVTTKIQGNAKKALLKWVQYTAGKQTGIEVKDFGKSWRSGVAFHSVIHAIRPELVDLETVKGRSNRENLEDAFTIAETELGIPRLLDPEDVDVDKPDEKSIMTYVAQFLKHYPDIHNASTDGQEDDREDRVIFKEMKVWIEQFERDLTRAQMVESNLQDKYQSFKHFRVQYEMKRKQIEHLIQPLHRDGKLSLDQALVKQSWDRVTSRLFDWHIQLDKSLPAPLGTIGAWLYRAEVALREEITVQQVHEETANTIQRKLEQHKDLLQNTDAHKRAFHEIYRTRSVNGIPVPPDQLEDMAERFHFVSSTSELHLMKMEFLELKYRLLSLLVLAESKLKSWIIKYGRRESVEQLLQNYVSFIENSKFFEQYEVTYQILKQTAEMYVKADGSVEEAENVMKFMNETTAQWRNLSVEVRSVRSMLEEVISNWDRYGNTVASLQAWLEDA

SEQ ID NO: 1104 - protein, 501 aa, Homo sapiens
MRGYAPFSPDENSLVLFEGDEVYSTIRKQEYNGKIPRFRRIRGESELYTSDTVMQNPQFIKATIVHQDQAYDDKIYYFFREDNPDKNPEAPLNVSRVAQLCRGDQGGESSLSVSKWNTFLKAMLVCSDAATNKNFNRLQDVFLLPDPSGQWRDTRVYGVFSNPWNYSAVCVYSLGDIDKVFRTSSLKGYHSSLPNPRPGKCLPDQQPIPTETFQVADRHPEVAQRVEPMGPLKTPLFHSKYHYQKVAVHRMQASHGETFHVLYLTTDRGTIHKVVEPGEQEHSFAFNIMEIQPFRRAAAIQTMSLDAERRKLYVSSQWEVSQVPLDLCEVYGGGCHGCLMSRDPYCGWDQGRCISIYSSERSVLQSINPAEPHKECPNPKPDKAPLQKVSLAPNSRYYLSCPMESRHATYSWRHKENVEQSCEPGHQSPNCILFIENLTAQQYGHYFCEAQEGSYFREAQHWQLLPEDGIMAEHLLGHACALAASLWLGVLPTLTLGLLVH

SEQ ID NO: 1105 - protein, 619 aa, Homo sapiens
MMNFSNIMNYMKLLGQSDLPRIKTEIEALKNLRHQHICQLYHVLETANKIFMVLEYCPGGELFDYIISQDRLSEEETRVVFRQIVSAVAYVHSQGYAHRDLKPENLLFDEYHKLKLIDFGLCAKPKGNKDYHLQTCCGSLAYAAPELIQGKSYLGSEADVWSMGILLYVLMCGFLPFDDDNVMALYKKIMRGKYDVPKWLSPSSILLLQQMLQVDPKKRISMKNLLNHPWIMQDYNYPVEWQSKNPFIHLDDDCVTELSVHHRNNRQTMEDLISLWQYDHLTATYLLLLAKKARGKPVRLRLSSFSCGQASATPFTDIKSNNWSLEDVTASDKNYVAGLIDYDWCEDDLSTGAATPRTSQFTKYWTESNGVESKSLTPALCRTPANKLKNKENVYTPKSAVKNEEYFMFPEPKTPVNKNQHKREILTTPNRYTTPSKARNQCLKETPIKIPVNSTGTDKLMTGVISPERRCRSVELDLNQAHMEETPKRKGAKVFGSLERGLDKVITVLTRSKRKGSARDGPRRLKLHYNVTTTRLVNPDQLLNEIMSILPKKHVDFVQKGYTLKCQTQSDFGKVTMQFELEVCQLQKPDVVGIRRQRLKGDAWVYKRLVEDILSSCKV

SEQ ID NO: 1106 - protein, 376 aa, Homo sapiens
MPFGIRMLLRAHKPGSSRRSEMTTSLDTVETFGTTSYYDDVGLLCEKADTRALMAQFVPPLYSLVFTVGLLGNVVVVMILIKYRRLRIMTNIYLLNLAISDLLFLVTLPFWIHYVRGHNWVFGHGMCKLLSGFYHTGLYSEIFFIILLTIDRYLAIVHAVFALRARTVTFGVITSIVTWGLAVLAALPEFIFYETEELFEETLCSALYPEDTVYSWRHFHTLRMTIFCLVLPLLVMAICYTGIIKTLLRCPSKKKYKAIRLIFVIMAVFFIFWTPYNVAILLSSYQSILFGNDCERSKHLDLVMLVTEVIAYSHCCMNPVIYAFVGERFRKYLRHFFHRHLLMHLGRYIPFLPSEKLERTSSVSPSTAEPELSIVF

SEQ ID NO: 1107 - protein, 1152 aa, Homo sapiens
MALRVLLLTALTLCHGFNLDTENAMTFQENARGFGQSVVQLQGSRVVVGAPQEIVAANQRGSLYQCDYSTGSCEPIRLQVPVEAVNMSLGLSLAATTSPPQLLACGPTVHQTCSENTYVKGLCFLFGSNLRQQPQKFPEALRGCPQEDSDIAFLIDGSGSIIPHDFRRMKEFVSTVMEQLKKSKTLFSLMQYSEEFRIHFTFKEFQNNPNPRSLVKPITQLLGRTHTATGIRKVVRELFNITNGARKNAFKILVVITDGEKFGDPLGYEDVIPEADREGVIRYVIGVGDAFRSEKSRQELNTIASKPPRDHVFQVNNFEALKTIQNQLREKIFAIEGTQTGSSSSFEHEMSQEGFSAAITSNGPLLSTVGSYDWAGGVFLYTSKEKSTFINMTRVDSDMNDAYLGYAAAIILRNRVQSLVLGAPRYQHIGLVAMFRQNTGMWESNANVKGTQIGAYFGASLCSVDVDSNGSTDLVLIGAPHYYEQTRGGQVSVCPLPRGRARWQCDAVLYGEQGQPWGRFGAALTVLGDVNGDKLTDVAIGAPGEEDNRGAVYLFHGTSGSGISPSHSQRIAGSKLSPRLQYFGQSLSGGQDLTMDGLVDLTVGAQGHVLLLRSQPVLRVKAIMEFNPREVARNVFECNDQVVKGKEAGEVRVCLHVQKSTRDRLREGQIQSVVTYDLALDSGRPHSRAVFNETKNSTRRQTQVLGLTQTCETLKLQLPNCIEDPVSPIVLRLNFSLVGTPLSAFGNLRPVLAEDAQRLFTALFPFEKNCGNDNICQDDLSITFSFMSLDCLVVGGPREFNVTVTVRNDGEDSYRTQVTFFFPLDLSYRKVSTLQNQRSQRSWRLACESASSTEVSGALKSTSCSINHPIFPENSEVTFNITFDVDSKASLGNKLLLKANVTSENNMPRTNKTEFQLELPVKYAVYMVVTSHGVSTKYLNFTASENTSRVMQHQYQVSNLGQRSLPISLVFLVPVRLNQTVIWDRPQVTFSENLSSTCHTKERLPSHSDFLAELRKAPVVNCSIAVCQRIQCDIPFFGIQEEFNATLKGNLSFDWYIKTSHNHLLIVSTAEILFNDSVFTLLPGQGAFVRSQTETKVEPFEVPNPLPLIVGSSVGGLLLLALITAALYKLGFFKRQYKDMMSEGGPPGAEPQ

SEQ ID NO: 1108 - protein, 45 aa, Homo sapiens
MATLKDQLIYNLLKEEQTPQNKITVVGVGAVGMACAISILMKTIM

SEQ ID NO: 1109 - protein, 551 aa, Homo sapiens
MRPQPAEPAPGGRGNEACSIHSEVTNEITPVLSYSYLAVLVPVFLLTDYLRYTPVLLLQGLSFVSVWLLLLLGHSVAHMQLMELFYSVTMAARIAYSSYIFSLVRPARYQRVAGYSRAAVLLGVFTSSVLGQLLVTVGRVSFSTLNYISLAFLTFSVVLALFLKRPKRSLFFNRDDRGRCETSASELERMNPGPGGKLGHALRVACGDSVLARMLRELGDSLRRPQLRLWSLWWVFNSAGYYLVVYYVHILWNEVDPTTNSARVYNGAADAASTLLGAITSFAAGFVKIRWARWSKLLIAGVTATQAGLVFLLAHTRHPSSIWLCYAAFVLFRGSYQFLVPIATFQIASSLSKELCALVFGVNTFFATIVKTIITFIVSDVRGLGLPVRKQFQLYSVYFLILSIIYFLGAMLDGLRHCQRGHHPRQPPAQGLRSAAEEKAAQALSVQDKGLGGLQPAQSPPLSPEDSLGAVGPASLEQRQSDPYLAQAPAPQAAEFLSPVTTPSPCTLCSAQASGPEAADETCPQLAVHPPGVSKLGLQCLPSDGVQNVNQ

SEQ ID NO: 1110 - protein, 165 aa, Homo sapiens
MNSLLIGELSPEQPSFEPTKNKELTDEFRELRATVERMGLMKANHVFFLLYLLHILLLDGAAWLTLWVFGTSFLPFLLCAVLLSAVQAQAGWLQHDFGHLSVFSTSKWNHLLHHFVIGHLKGAPASWWNHMHFQHHAKPNCFRKDPDINMHPFFFALGKILSVEV

SEQ ID NO: 1111 - protein, 257 aa, Homo sapiens
MAVFSDKGDYFWWLLLPVCAMSMTCPIFSSALNSMLSKWDLPVFTLPFNMALSMYLSATGHYNPFFPAKLVIPITTAPNISWSDLSALELLKSIPVGVGQIYGCDNPWTGGIFLGAILLSSPLMCLHAAIGSLLGIAAGLSLSAPFEDIYFGLWGFNSSLACIAMGGMFMALTWQTHLLALGCALFTAYLGVGMANFMAEVGLPACTWPFCLATLLFLIMTTKNSNIYKMPLSKVTYPEENRIFYLQAKKRMVESPL

SEQ ID NO: 1112 - protein, 712 aa, Homo sapiens
MQTQEILRILRLPELGDLGQFFRSLSATTLVSMGALAAILAYWFTHRPKALQPPCNLLMQSEEVEDSGGARRSVIGSGPQLLTHYYDDARTMYQVFRRGLSISGNGPCLGFRKPKQPYQWLSYQEVADRAEFLGSGLLQHNCKACTDQFIGVFAQNRPEWIIVELACYTYSMVVVPLYDTLGPGAIRYIINTGLSCQEGASATASTQADISTVIVDKPQKAVLLLEHVERKETPGLKLIILMDPFEEALKERGQKCGVVIKSMQAVEDCGQENHQAPVPPQPDDLSIVCFTSGTTGNPKGAMLTHGNVVADFSGFLKVTEKVIFPRQDDVLISFLPLAHMFERVIQSVVYCHGGRVGFFQGDIRLLSDDMKALCPTIFPVVPRLLNRMYDKIFSQANTPLKRWLLEFAAKRKQAEVRSGIIRNDSIWDELFFNKIQASLGGCVRMIVTGAAPASPTVLGFLRAALGCQVYEGYGQTECTAGCTFTTPGDWTSGHVGAPLPCNHIKLVDVEELNYWACKGEGEICVRGPNVFKGYLKDPDRTKEALDSDGWLHTGDIGKWLPAGTLKIIDRKKHIFKLAQGEYVAPEKIENIYIRSQPVAQIYVHGDSLKAFLVGIVVPDPEVMPSWAQKRGIEGTYADLCTNKDLKKAILEDMVRLGKESGLHSFEQVKAIHIHSDMFSVQNGLLTPTLKAKRPELREYFKKQIEELYSISM

SEQ ID NO: 1113 - protein, 164 aa, Homo sapiens
MNSLLIGELSPEQPSFEPTKNKELTDEFRELRATVERMGLMKANHVFFLLYLLHILLLDGAAWLTLWVFGTSFLPFLLCAVLLSAVQAQAGWLQHDFGHLSVFSTSKWNHLLHHFVIGHLKGAPASWWNHMHFQHHAKPNCFRKDPDINMHPFFFALGKILSVE

SEQ ID NO: 1114 - protein, 776 aa, Homo sapiens
MAHTFRGCSLAFMFIITWLLIKAKIDACKRGDVTVKPSHVILLGSTVNITCSLKPRQGCFHYSRRNKLILYKFDRRINFHHGHSLNSQVTGLPLGTTLFVCKLACINSDEIQICGAEIFVGVAPEQPQNLSCIQKGEQGTVACTWERGRDTHLYTEYTLQLSGPKNLTWQKQCKDIYCDYLDFGINLTPESPESNFTAKVTAVNSLGSSSSLPSTFTFLDIVRPLPPWDIRIKFQKASVSRCTLYWRDEGLVLLNRLRYRPSNSRLWNMVNVTKAKGRHDLLDLKPFTEYEFQISSKLHLYKGSWSDWSESLRAQTPEEEPTGMLDVWYMKRHIDYSRQQISLFWKNLSVSEARGKILHYQVTLQELTGGKAMTQNITGHTSWTTVIPRTGNWAVAVSAANSKGSSLPTRINIMNLCEAGLLAPRQVSANSEGMDNILVTWQPPRKDPSAVQEYVVEWRELHPGGDTQVPLNWLRSRPYNVSALISEIPYRVSQNSHPINSLQPRVTYVLWMTALTAAGESSHGNEREFCLQGKANWMAFVAPSICIAIIMVGIFSTHYFQQKVFVLLAALRPQWCSREIPDPANSTCAKKYPIAEEKTQLPLDRLLIDWPTPEDPEPLVISEVLHQVTPVFRHPPCSNWPQREKGIQGHQASEKDMMHSASSPPPPRALQAESRQLVDLYKVLESRGSDPKPENPACPWTVLPAGDLPTHDGYLPSNIDDLPSHEAPLADSLEELEPQHISLSVFPSSSLHPLTFSCGDKLTLDQLKMRCDSLML

SEQ ID NO: 1115 - protein, 1568 aa, Homo sapiens
MGAVLRSLLACSFCVLLRAAPLLLYANRRDLRLVDATNGKENATIVVGGLEDAAAVDFVFSHGLIYWSDVSEEAIKRTEFNKTESVQNVVVSGLLSPDGLACDWLGEKLYWTDSETNRIEVSNLDGSLRKVLFWQELDQPRAIALDPSSGFMYWTDWGEVPKIERAGMDGSSRFIIINSEIYWPNGLTLDYEEQKLYWADAKLNFIHKSNLDGTNRQAVVKGSLPHPFALTLFEDILYWTDWSTHSILACNKYTGEGLREIHSDIFSPMDIHAFSQQRQPNATNPCGIDNGGCSHLCLMSPVKPFYQCACPTGVKLLENGKTCKDGATELLLLARRTDLRRISLDTPDFTDIVLQLEDIRHAIAIDYDPVEGYIYWTDDEVRAIRRSFIDGSGSQFVVTAQIAHPDGIAVDWVARNLYWTDTGTDRIEVTRLNGTMRKILISEDLEEPRAIVLDPMVGYMYWTDWGEIPKIERAALDGSDRVVLVNTSLGWPNGLALDYDEGKIYWGDAKTDKIEVMNTDGTGRRVLVEDKIPHIFGFTLLGDYVYWTDWQRRSIERVHKRSAEREVIIDQLPDLMGLKATNVHRVIGSNPCAEENGGCSHLCLYRPQGLRCACPIGFELISDMKTCIVPEAFLLFSRRADIRRISLETNNNNVAIPLTGVKEASALDFDVTDNRIYWTDISLKTISRAFMNGSALEHVVEFGLDYPEGMAVDWLGKNLYWADTGTNRIEVSKLDGQHRQVLVWKDLDSPRALALDPAEGFMYWTEWGGKPKIDRAAMDGSERTTLVPNVGRANGLTIDYAKRRLYWTDLDTNLIESSNMLGLNREVIADDLPHPFGLTQYQDYIYWTDWSRRSIERANKTSGQNRTIIQGHLDYVMDILVFHSSRQSGWNECASSNGHCSHLCLAVPVGGFVCGCPAHYSLNADNRTCSAPTTFLLFSQKSAINRMVIDEQQSPDIILPIHSLRNVRAIDYDPLDKQLYWIDSRQNMIRKAQEDGSQGFTVVVSSVPSQNLEIQPYDLSIDIYSRYIYWTCEATNVINVTRLDGRSVGVVLKGEQDRPRAVVVNPEKGYMYFTNLQERSPKIERAALDGTEREVLFFSGLSKPIALALDSRLGKLFWADSDLRRIESSDLSGANRIVLEDSNILQPVGLTVFENWLYWIDKQQQMIEKIDMTGREGRTKVQARIAQLSDIHAVKELNLQEYRQHPCAQDNGGCSHICLVKGDGTTRCSCPMHLVLLQDELSCGESQFQCASGQCIDGALRCNGDANCQDKSDEKNCEVLCLIDQFRCANGQCIGKHKKCDHNVDCSDKSDELDCYPTEEPAPQATNTVGSVIGVIVTIFVSGTVYFICQRMLCPRMKGDGETMTNDYVVHGPASVPLGYVPHPSSLSGSLPGMSRGKSMISSLSIMGGSSGPPYDRAHVTGASSSSSSSTKGTYFPAILNPPPSPATERSHYTMEFGYSSNSPSTHRSYSYRPYSYRHFAPPTTPCSTDVCDSDYAPSRRMTSVATAKGYTSDLNYDSEPVPPPPTPRSQYLSAEENYESCPPSPYTERSYSHHLYPPPPSPCTDSS

SEQ ID NO: 1116 - protein, 747 aa, Homo sapiens
MPLGRQSHRHHRTHGQKHRRRGRGKGASQGEEGLEALAHDTPSQRVQFILGTEEDEEHVPHELFTELDEICMKEGEDAEWKETARWLKFEEDVEDGGERWSKPYVATLSLHSLFELRSCLINGTVLLDMHANSIEEISDLILDQQELSSDLNDSMRVKVREALLKKHHHQNEKKRNNLIPIVRSFAEVGKKQSDPHLMDKHGQTVSPQSVPTTNLEVKNGVNCEHSPVDLSKVDLHFMKKIPTGAEASNVLVGEVDILDRPIVAFVRLSPAVLLSGLTEVPIPTRFLFILLGPVGKGQQYHEIGRSMATIMTDEIFHDVAYKAKERDDLLAGIDEFLDQVTVLPPGEWDPSIRIEPPKNVPSQEKRKMPGVPNGNVCHIEQEPHGGHSGPELQRTGRLFGGLVLDIKRKAPWYWSDYRDALSLQCLASFLFLYCACMSPVITFGGLLGEATEGRISAIESLFGASMTGIAYSLFAGQALTILGSTGPVLVFEKILFKFCKDYALSYLSLRACIGLWTAFLCIVLVATDASSLVCYITRFTEEAFASLICIIFIYEAIEKLIHLAETYPIHMHSQLDHLSLYYCRCTLPENPNNHTLQYWKDHNIVTAEVHWANLTVSECQEMHGEFMGSACGHHGPYTPDVLFWSCILFFTTFILSSTLKTFKTSRYFPTRMESCSVAWLECGGVILAHCNLRLLPSSWDYRHAPPQPANFCIFSRDGVSPCWPGWSQSLDLVICLPRPPKMLGLQA

SEQ ID NO: 1117 - protein, 164 aa, Homo sapiens
MSSENCFVAENSSLHPESGQENDATSPHFSTRHEGSFQVPVLCAVMNVVFITILIIALIALSVGQYNCPGQYTFSMPSDSHVSSCSEDWVGYQRKCYFISTVKRSWTSAQNACSEHGATLAVIDSEKDMNFLKRYAGREEHWVGLKKEPGHPWKWSNGKEFNNW

SEQ ID NO: 1118 - protein, 318 aa, Homo sapiens
MKQKTKPGTGPLSSLEFGVSFLAPSPHMELLASCPRSRLSPWGGWAPPPSHSRDLRPLPQDDGVCLSMEGGAAAATPTALPYYVAFSQLLGLTLVAMTGAWLGLYRGGIAWESDLQFNAHPLCMVIGLIFLQGNALLVYRVFRNEAKRTTKVLHGLLHIFALVIALVGLVAVFDYHRKKGYADLYSLHSWCGILVFVLYFVQWLVGFSFFLFPGASFSLRSRYRPQHIFFGATIFLLSVGTALLGLKEALLFNLGGKYSAFEPEGVLANVLGLLLACFGGAVLYILTRADWKRPSQAEEQALSMDFKTLTEGDSPGSQ

SEQ ID NO: 1119 - protein, 320 aa, Homo sapiens
MESNLSGLVPAAGLVPALPPAVTLGLTAAYTTLYALLFFSVYAQLWLVLLYGHKRLSYQTVFLALCLLWAALRTTLFSFYFRDTPRANRLGPLPFWLLYCCPVCLQFFTLTLMNLYFAQVVFKAKVKRRPEMSRGLLAVRGAFVGASLLFLLVNVLCAVLSHRRRAQPWALLLVRVLVSDSLFVICALSLAACLCLVARRAPSTSIYLEAKGTSVCQAAAMGGAMVLLYASRACYNLTALALAPQSRLDTFDYDWYNVSDQADLVNDLGNKGYLVFGLILFVWELLPTTLLVGFFRVHRPPQDLYVGQSRLWELVWCHRA

SEQ ID NO: 1120 - protein, 112 aa, Homo sapiens
MNSLLIGELSPEQPSFEPTKNKELTDEFRELRATVERMGLMKANHVFFLLYLLHILLLDGAAWLTLWVFGTSFLPFLLCAVLLSAVQAQAGWLQHDFGHLSVFSTSKWNHLL

SEQ ID NO: 1121 - protein, 114 aa, Homo sapiens
MQDEERYMTLNVQSKKRSSAQTSQLTFKDYSVTLHWYKILLGISGTVNGILTLTLISLILLVSQGVLLKCQKGSCSNATQYEDTGDLKVNNGTRRNISNKDLCASRSADQTDSS

SEQ ID NO: 1122 - protein, 42 aa, Homo sapiens
MATLKDQLIYNLLKEEQTPQNKITVVGVGAVGMACAISILMK

SEQ ID NO: 1123 - protein, 580 aa, Homo sapiens
MMNFSNIMNYMKLLGQYCPGGELFDYIISQDRLSEEETRVVFRQIVSAVAYVHSQGYAHRDLKPENLLFDEYHKLKLIDFGLCAKPKGNKDYHLQTCCGSLAYAAPELIQGKSYLGSEADVWSMGILLYVLMCGFLPFDDDNVMALYKKIMRGKYDVPKWLSPSSILLLQQMLQVDPKKRISMKNLLNHPWIMQDYNYPVEWQSKNPFIHLDDDCVTELSVHHRNNRQTMEDLISLWQYDHLTATYLLLLAKKARGKPVRLRLSSFSCGQASATPFTDIKSNNWSLEDVTASDKNYVAGLIDYDWCEDDLSTGAATPRTSQFTKYWTESNGVESKSLTPALCRTPANKLKNKENVYTPKSAVKNEEYFMFPEPKTPVNKNQHKREILTTPNRYTTPSKARNQCLKETPIKIPVNSTGTDKLMTGVISPERRCRSVELDLNQAHMEETPKRKGAKVFGSLERGLDKVITVLTRSKRKGSARDGPRRLKLHYNVTTTRLVNPDQLLNEIMSILPKKHVDFVQKGYTLKCQTQSDFGKVTMQFELEVCQLQKPDVVGIRRQRLKGDAWVYKRLVEDILSSCKV

SEQ ID NO: 1124 - protein, 124 aa, Homo sapiens
MHFQHHAKPNCFRKDPDINMHPFFFALGKILSVELGKQKKKYMPYNHQHKYFFLIGPPALLPLYFQWYIFYFVIQRKKWVDLAWMITFYVRFFLTYVPLLGLKAFLGLFFIVRFLESNWFVWVT

SEQ ID NO: 1125 - protein, 95 aa, Homo sapiens
MLHVFVLGEWQPIEYGKKKLKYLPYNHQHEYFFLIGPPLLIPMYFQYQIIMTMIVHKNWVDLAWAVSYYIRFFITYIPFYGILGALLFLNFIRCL

SEQ ID NO: 1126 - protein, 446 aa, Homo sapiens
MASCDLDRNSLCKKEEDTRSASPTIEAQGTSPAHDNIAFQDSTSKDKTILNLEAKEEPETIEEHKKEHASGDSVVSPLPVTTVKSVNLRQSENTSANEKEVEAEFLRLSLGFKCDWFTLEKRVKLEERSRDLAEENLKKEITNCLKLLESLTPLCEDDNQAQEIIKKLEKSIKFLSQCAARVASRAEMLGAINQESRVSKAVEVMIQHVENLKRMYAKEHAELEELKQVLLQNERSFNPLEDDDDCQIKKRSASLNSKPSSLRRVTIASLPRNIGNAGMVAGMENNDRFSRRSSSWRILGSKQSEHRPSLPRFISTYSWADAEEEKCELKTKDDSEPSGEETVERTRKPSLSEKKNNPSKWDVSSVYDTIASWATNLKSSIRKANKALWLSIAFIVLFAALMSFLTGQLFQKSVDAAPTQQEDSWTSLEHILWPFTRLRHNGPPPV

SEQ ID NO: 1127 - protein, 1216 aa, Homo sapiens
MDLEGDRNGGAKKKNFFKLNNKSEKDKKEKKPTVSVFSMFRYSNWLDKLYMVVGTLAAIIHGAGLPLMMLVFGEMTDIFANAGNLEDLMSNITNRSDINDTGFFMNLEEDMTSDVSKINEGIGDKIGMFFQSMATFFTGFIVGFTRGWKLTLVILAISPVLGLSAAVWAKILSSFTDKELLAYAKAGAVAEEVLAAIRTVIAFGGQKKELERYNKNLEEAKRIGIKKAITANISIGAAFLLIYASYALAFWYGTTLVLSGEYSIGQVLTVFFSVLIGAFSVGQASPSIEAFANARGAAYEIFKIIDNKPSIDSYSKSGHKPDNIKGNLEFRNVHFSYPSRKEVKILKGLNLKVQSGQTVALVGNSGCGKSTTVQLMQRLYDPTEGMVSVDGQDIRTINVRFLREIIGVVSQEPVLFATTIAENIRYGRENVTMDEIEKAVKEANAYDFIMKLPHKFDTLVGERGAQLSGGQKQRIAIARALVRNPKILLLDEATSALDTESEAVVQVALDKARKGRTTIVIAHRLSTVRNADVIAGFDDGVIVEKGNHDELMKEKGIYFKLVTMQTAGNEVELENAADESKSEIDALEMSSNDSRSSLIRKRSTRRSVRGSQAQDRKLSTKEALDESIPPVSFWRIMKLNLTEWPYFVVGVFCAIINGGLQPAFAIIFSKIIGVFTRIDDPETKRQNSNLFSLLFLALGIISFITFFLQGFTFGKAGEILTKRLRYMVFRSMLRQDVSWFDDPKNTTGALTTRLANDAAQVKGAIGSRLAVITQNIANLGTGIIISFIYGWQLTLLLLAIVPIIAIAGVVEMKMLSGQALKDKKELEGSGKIATEAIENFRTVVSLTQEQKFEHMYAQSLQVPYRNSLRKAHIFGITFSFTQAMMYFSYAGCFRFGAYLVAHKLMSFEDVLLVFSAVVFGAMAVGQVSSFAPDYAKAKISAAHIIMIIEKTPLIDSYSTEGLMPNTLEGNVTFGEVVFNYPTRPDIPVLQGLSLEVKKGQTLALVGSSGCGKSTVVQLLERFYDPLAGKVLLDGKEIKRLNVQWLRAHLGIVSQEPILFDCSIAENIAYGDNSRVVSQEEIVRAAKEANIHAFIESLPNKYSTKVGDKGTQLSGGQKQRIAIARALVRQPHILLLDEATSALDTESEKVVQEALDKAREGRTCIVIAHRLSTIQNADLIVVFQNGRVKEHGTHQQLLAQKGIYFSMVSVQAGTKRQ

SEQ ID NO: 1128 - protein, 116 aa, Homo sapiens
MSAPAQPPAEGTEGTAPGGGPPGPPPNMTSNRRLQQTQAQVEEVVDIIRVNVDKVLERDQKLSELDDRADALQAGASQFESSAAKLKRKYWWKNCKMMIMLGAICAIIVVVIVRRG

SEQ ID NO: 1129 - protein, 541 aa, Homo sapiens
MVADPPRDSKGLAAAEPTANGGLALASIEDQGAAAGGYCGSRDQVRRCLRANLLVLLTVVAVVAGVALGLGVSGAGGALALGPERLSAFVFPGELLLRLLRMIILPLVVCSLIGGAASLDPGALGRLGAWALLFFLVTTLLASALGVGLALALQPGAASAAINASVGAAGSAENAPSKEVLDSFLDLARNIFPSNLVSAAFRSYSTTYEERNITGTRVKVPVGQEVEGMNILGLVVFAIVFGVALRKLGPEGELLIRFFNSFNEATMVLVSWIMWYAPVGIMFLVAGKIVEMEDVGLLFARLGKYILCCLLGHAIHGLLVLPLIYFLFTRKNPYRFLWGIVTPLATAFGTSSSSATLPLMMKCVEENNGVAKHISRFILPIGATVNMDGAALFQCVAAVFIAQLSQQSLDFVKIITILVTATASSVGAAGIPAGGVLTLAIILEAVNLPVDHISLILAVDWLVDRSCTVLNVEGDALGAGLLQNYVDRTESRSTEPELIQVKSELPLDPLPVPTEEGNPLLKHYRGPAGDATVASEKESVM

SEQ ID NO: 1130 - protein, 65 aa, Homo sapiens
MGMTRMLLECSLSDKLCVIQEKQYEVIIVPTLLVTIFLILLGVILWLFIREQRTQQQRSGPQGKA

SEQ ID NO: 1131 - protein, 146 aa, Homo sapiens
MASFSAETNSTDLLSQPWNEPPVILSMVILSLTFLLGLPGNGLVLWVAGLKMQRTVNTIWFLHLTLADLLCCLSLPFSLAHLALQGQWPYGRFLCKLIPSIIVLNMFASVFLLTAISLDRCLVVFKPIWCQNHRNVGMACSICGCI

SEQ ID NO: 1132 - protein, 499 aa, Homo sapiens
MWKEIPIPFYLSVYFFDVMNPSEILKGEKPQVRERGPYVYREFRHKSNITFNNNDTVSFLEYRTFQFQPSKSHGSESDYIVMPNILVLGAAVMMENKPMTLKLIMTLAFTTLGERAFMNRTVGEIMWGYKDPLVNLINKYFPGMFPFKDKFGLFAELNNSDSGLFTVFTGVQNISRIHLVDKWNGLSKVDFWHSDQCNMINGTSGQMWPPFMTPESSLEFYSPEACRSMKLMYKESGVFEGIPTYRFVAPKTLFANGSIYPPNEGFCPCLESGIQNVSTCRFSAPLFLSHPHFLNADPVLAEAVTGLHPNQEAHSLFLDIHPVTGIPMNCSVKLQLSLYMKSVAGIGQTGKIEPVVLPLLWFAESGAMEGETLHTFYTQLVLMPKVMHYAQYVLLALGCVLLLVPVICQIRSQVGAGQRAARADSHSLACWGKGASDRTLWPTAAWSPPPAAVLRLCRSGSGHCWGLRSTLASFACRVATTLPVLEGLGPSLGGGTGGL

SEQ ID NO: 1133 - protein, 122 aa, Homo sapiens
MGMVVLLMGLVFASVYIYRYFFLAQLARDNFFRCGVLYEDSLSSQVRTQMELEEDVKIYLDENYERINVPVPQFGGGDPADIIHDFQRGLTAYHDISLDKCYVIELNTTIVLPPRNFWELLM

SEQ ID NO: 1134 - protein, 167 aa, Homo sapiens
MESNLSGLVPAAGLVPALPPAVTLGLTAAYTTLYALLFFSVYAQLWLVLLYGHKRLSYQTVFLALCLLWAALRTTLFSFYFRDTPRANRLGPLPFWLLYCCPVCLQFFTLTLMNLYFAQVVFKAKVKRRPEMSRGLLAVRGAFVGASLLFLLVNVLCAVLSHRRRAQ

SEQ ID NO: 1135 - protein, 124 aa, Homo sapiens
MQDEERYMTLNVQSKKRSSAQTSQLTFKDYSVTLHWYKILLGISGTVNGILTLTLISLILLVSQGVLLKCQKGSCSNATQYEDTGDLKVNNGTRRNISNKDLCASRSADQTVPRPHFRLLYRKT

SEQ ID NO: 1136 - protein, 3013 aa, Homo sapiens
MASQQDSGFFEISIKYLLKSWSNTSPVGNGYIKPPVPPASGTHREKGPPTMLPINVDPDSKPGEYVLKSLFVNFTTQAERKIRIIMAEPLEKPLTKSLQRGEDPQFDQVISSMSSLSEYCLPSILRTLFDWYKRQNGIEDESHEYRPRTSNKSKSDEQQRDYLMERRDLAIDFIFSLVLIEVLKQIPLHPVIDSLIHDVINLAFKHFKYKEGYLGPNTGNMHIVADLYAEVIGVLAQAKFPAVKKKFMAELKELRHKEQNPYVVQSIISLIMGMKFFRIKMYPVEDFEASLQFMQECAHYFLEVKDKDIKHALAGLFVEILVPVAAAVKNEVNVPCLRNFVESLYDTTLELSSRKKHSLALYPLVTCLLCVSQKQLFLNRWHIFLNNCLSNLKNKDPKMARVALESLYRLLWVYMIRIKCESNTATQSRLITIITTLFPKGSRGVVPRDMPLNIFVKIIQFIAQERLDFAMKEIIFDFLCVGKPAKAFSLNPERMNIGLRAFLVIADSLQQKDGEPPMPVTGAVLPSGNTLRVKKTYLSKTLTEEEAKMIGMSLYYSQVRKAVDNILRHLDKEVGRCMMLTNVQMLNKEPEDMITGERKPKIDLFRTCVAAIPRLLPDGMSKLELIDLLARLSIHMDDELRHIAQNSLQGLLVDFSDWREDVLFGFTNFLLREVNDMHHTLLDSSLKLLLQLLTQWKLVIQTQGKVYEQANKIRNSELIANGSSHRIQSERGPHCSVLHAVEGFALVLLCSFQVATRKLSVLILKEIRALFIALGQPEDDDRPMIDVMDQLSSSILESFIHVAVSDSATLPLTHNVDLQWLVEWNAVLVNSHYDVKSPSHVWIFAQSVKDPWVLCLFSFLRQENLPKHCPTALSYAWPYAFTRLQSVMPLVDPNSPINAKKTSTAGSGDNYVTLWRNYLILCFGVAKPSIMSPGHLRASTPEIMATTPDGTVSYDNKAIGTPSVGVLLKQLVPLMRLESIEITESLVLGFGRTNSLVFRELVEELHPLMKEALERRPENKKRRERRDLLRLQLLRIFELLADAGVISDSTNGALERDTLALGALFLEYVDLTRMLLEAENDKEVEILKDIRAHFSAMVANLIQCVPVHHRRFLFPQQSLRHHLFILFSQWAGPFSIMFTPLDRYSDRNHQITRYQYCALKAMSAVLCCGPVFDNVGLSPDGYLYKWLDNILACQDLRVHQLGCEVVVLLLELNPDQINLFNWAIDRCYTGSYQLASGCFKAIATVCGSRNYPFDIVTLLNLVLFKASDTNREIYEISMQLMQILEAKLFVYSKKVAEQRPGSILYGTHGPLPPLYSVSLALLSCELARMYPELTLPLFSEVSQRFPTTHPNGRQIMLTYLLPWLHNIELVDSRLLLPGSSPSSPEDEVKDREGDVTASHGLRGNGWGSPEATSLVLNNLMYMTAKYGDEVPGPEMENAWNALANNEKWSNNLRITLQFLISLCGVSSDTVLLPYIKKVAIYLCRNNTIQTMEELLFELQQTEPVNPIVQHCDNPPFYRFTASSKASAAASGTTSSSNTVVAGQENFPDAEENKILKESDERFSNVIRAHTRLESRYSNSSGGSYDEDKNDPISPYTGWLLTITETKQPQPLPMPCTGGCWAPLVDYLPETITPRGPLHRCNIAVIFMTEMVVDHSVREDWALHLPLLLHAVFLGLDHYRPEVFEHSKKLLLHLLIALSCNSNFHSIASVLLQTREMGEAKTLTVQPAYQPEYLYTGGFDFLREDQSSPVPDSGLSSSSTSSSISLGGSSGNLPQMTQEVEDVDTAAETDEKANKLIEFLTTRAFGPLWCHEDITPKNQNSKSAEQLTNFLRHVVSVFKDSKSGFHLEHQLSEVALQTALASSSRHYAGRSFQIFRALKQPLSAHALSDLLSRLVEVIGEHGDEIQGYVMEALLTLEAAVDNLSDCLKNSDLLTVLSRSSSPDLSSSSKLTASRKSTGQLNMNPGTTSGNTATAERSRHQRSFSVPKKFGVIDRSSDPPRSATLDRIQACTQQGLSSKTRSSSSLKDSLTDPSHINHPTNLLATIFWVTVALMESDFEFEYLMALRLLSRLLAHMPLDKAENREKLEKLQAQLKWADFSGLQQLLLKGFTSLTTTDLTLQLFSLLTPVSKISMVDASHAIGFPLNVLCLLPQLIQHFENPNQFCKDIAERIAQVCLEEKNPKLSNLAHVMTLYKTHSYTRDCATWVNVVCRYLHEAYADITLNMVTYLAELLEKGLPSVQQPLLQVIYSLLSYMDLSVVPVKQFNVEVLKTIEKYVQSVHWREALNILKLVVSRSASLVLPSYQHSDLSKIEIHRVWTSASKELPGKTLDFHFDISETPIIGRRYDELQNSSGRDGKPRAMAVTRSTSSTSSGSNSNVLVPVSWKRPQYSQKRTKEKLVHVLSLCGQEVGLSKNPSVIFSSCGDLDLLEHQTSLVSSEDGAREQENMDDTNSEQQFRVFRDFDFLDVELEDGEGESMDNFNWGVRRRSLDSLDKCDMQILEERQLSGSTPSLNKMHHEDSDESSEEEDLTASQILEHSDLIMTLSPSEETNPMELLTTACDSTPAEPHSFNTRMSSFDASLPDMNNLQISEGSKAEAVREEEDTTVHEDDLSSSINELPAAFECSDSFSLDMTEGEEKGNRALDQFTLASFGEGDRGVSPPPSPFFSAILAAFQPAACDDAEEAWRSHINQLMCDSDGSCAVYTFHVFSSLFKNIQKRFCFLTCDAASYLGDNLRGIGSKFVSSSQMLTSCSECPTLFVDAETLLSCGLLDKLKFSVLELQEYLDTYNNRKEATLSWLANCKATFAGGSRDGVITCQPGDSEEKQLELCQRLYKLHFQLLLLFQSYCKLIGQVHEVSSMPELLNMSRELSDLKKHLKEASAVIAADPLYSDGAWSEPTFTSTEAAIQSMLECLKNNELGKALRQIRECRSLWPNDIFGSSSDDEVQTLLNIYFRHQTLGQTGTYALVGSNQSLTEICTKLMELNMEIRDMIRRAQSYRVLTTFLPDSSVSGTSL

SEQ ID NO: 1137 - protein, 1477 aa, Homo sapiens
LDQPRAIALDPSSGFMYWTDWGEVPKIERAGMDGSSRFIIINSEIYWPNGLTLDYEEQKLYWADAKLNFIHKSNLDGTNRQAVVKGSLPHPFALTLFEDILYWTDWSTHSILACNKYTGEGLREIHSDIFSPMDIHAFSQQRQPNATNPCGIDNGGCSHLCLMSPVKPFYQCACPTGVKLLENGKTCKDGATELLLLARRTDLRRISLDTPDFTDIVLQLEDIRHAIAIDYDPVEGYIYWTDDEVRAIRRSFIDGSGSQFVVTAQIAHPDGIAVDWVARNLYWTDTGTDRIEVTRLNGTMRKILISEDLEEPRAIVLDPMVGYMYWTDWGEIPKIERAALDGSDRVVLVNTSLGWPNGLALDYDEGKIYWGDAKTDKIEVMNTDGTGRRVLVEDKIPHIFGFTLLGDYVYWTDWQRRSIERVHKRSAEREVIIDQLPDLMGLKATNVHRVIGSNPCAEENGGCSHLCLYRPQGLRCACPIGFELISDMKTCIVPEAFLLFSRRADIRRISLETNNNNVAIPLTGVKEASALDFDVTDNRIYWTDISLKTISRAFMNGSALEHVVEFGLDYPEGMAVDWLGKNLYWADTGTNRIEVSKLDGQHRQVLVWKDLDSPRALALDPAEGFMYWTEWGGKPKIDRAAMDGSERTTLVPNVGRANGLTIDYAKRRLYWTDLDTNLIESSNMLGLNREVIADDLPHPFGLTQYQDYIYWTDWSRRSIERANKTSGQNRTIIQGHLDYVMDILVFHSSRQSGWNECASSNGHCSHLCLAVPVGGFVCGCPAHYSLNADNRTCSAPTTFLLFSQKSAINRMVIDEQQSPDIILPIHSLRNVRAIDYDPLDKQLYWIDSRQNMIRKAQEDGSQGFTVVVSSVPSQNLEIQPYDLSIDIYSRYIYWTCEATNVINVTRLDGRSVGVVLKGEQDRPRAVVVNPEKGYMYFTNLQERSPKIERAALDGTEREVLFFSGLSKPIALALDSRLGKLFWADSDLRRIESSDLSGANRIVLEDSNILQPVGLTVFENWLYWIDKQQQMIEKIDMTGREGRTKVQARIAQLSDIHAVKELNLQEYRQHPCAQDNGGCSHICLVKGDGTTRCSCPMHLVLLQDELSCGEPPTCSPQQFTCFTGEIDCIPVAWRCDGFTECEDHSDELNCPVCSESQFQCASGQCIDGALRCNGDANCQDKSDEKNCEVLCLIDQFRCANGQCIGKHKKCDHNVDCSDKSDELDCYPTEEPAPQATNTVGSVIGVIVTIFVSGTVYFICQRMLCPRMKGDGETMTNDYVVHGPASVPLGYVPHPSSLSGSLPGMSRGKSMISSLSIMGGSSGPPYDRAHVTGASSSSSSSTKGTYFPAILNPPPSPATERSHYTMEFGYSSNSPSTHRSYSYRPYSYRHFAPPTTPCSTDVCDSDYAPSRRMTSVATAKGYTSDLNYDSEPVPPPPTPRSQYLSAEENYESCPPSPYTERSYSHHLYPPPPSPCTDSS

SEQ ID NO: 1138 - protein, 562 aa, Homo sapiens
MGDSPGRGAPERRHKAQPGRARKYEWRPEGPTSMGSLGQREDLQDEDRNSAFTWKVQANNRAYNGQFKEKVILCWQRKKYKTNVIRTAKYNFYSFLPLNLYEQFHRVSNLFFLIIIILQSIPDISTLPWFSLSTPMVCLLFIRATRDLVDDMGRHKSDRAINNRPCQILMGKSFKQKKWQDLCVGDVVCLRKDNIVPADMLLLASTEPSSLCYVETVDIDGETNLKFRQALMVTHKELATIKKMASFQGTVTCEAPNSRMHHFVGCLEWNDKKYSLDIGNLLLRGCRIRNTDTCYGLVIYAGFDTKIMKNCGKIHLKRTKLDLLMNKLVVVIFISVVLVCLVLAFGFGFSVKEFKDHHYYLSGVHGSSVAAESFFVFWSFLILLSVTIPMSMFILSEFIYLGNSVFIDWDVQMYYKPQDVPAKARSTSLNDHLGQVEYIFSDKTGTLTQNILTFNKCCISGRVYGAAPTPELPAGSSIFKGLRVPENQSHVWPHAQHLRPNLNQGTVARWPGFLWRGPGKFFFFFEAESHSVYPGRNAVVQSWLTAISTSQVQAILLAQPPE

SEQ ID NO: 1139 - protein, 146 aa, Homo sapiens
MITFYVRFFLTYVPLLGLKAFLGLFFIVRFLESNWFVWVTQMNHIPMHIDHDRNMDWVSTQLQATCNVHKSAFNDWFSGHLNFQIEHHLFPTMPRHNYHKVAPLVQSLCAKHGIEYQSKPLLSAFADIIHSLKESGQLWLDAYLHQ

SEQ ID NO: 1140 - protein, 635 aa, Homo sapiens
MAHTFRGCSLAFMFIITWLLIKAKIDACKRGDVTVKPSHVILLGSTVNITCSLKPRQGCFHYSRRNKLILYKFDRRINFHHGHSLNSQVTGLPLGTTLFVCKLACINSDEIQICGAEIFVGVAPEQPQNLSCIQKGEQGTVACTWERGRDTHLYTEYTLQLSGPKNLTWQKQCKDIYCDYLDFGINLTPESPESNFTAKVTAVNSLGSSSSLPSTFTFLDIVRPLPPWDIRIKFQKASVSRCTLYWRDEGLVLLNRLRYRPSNSRLWNMVNVTKAKGRHDLLDLKPFTEYEFQISSKLHLYKGSWSDWSESLRAQTPEEEPTGMLDVWYMKRHIDYSRQQISLFWKNLSVSEARGKILHYQVTLQELTGGKAMTQNITGHTSWTTVIPRTGNWAVAVSAANSKGSSLPTRINIMNLCEAGLLAPRQVSANSEGMDNILVTWQPPRKDPSAVQEYVVEWRELHPGGDTQVPLNWLRSRPYNVSALISENIKSYICYEIRVYALSGDQGGCSSILGNSKHKAPLSGPHINAITEEKGSILISWNSIPVQEQMGCLLHYRIYWKERDSNSQPQLCEIPYRVSQNSHPINSLQPRVTYVLWMTALTAAGESSHGNEREFCLQGEDTAALGQAPDRLAHA

SEQ ID NO: 1141 - protein, 69 aa, Homo sapiens
MLVLLAGIFVVHIATVIMLFVSTIANVWLVSNTVDASVGLWKNCTNISCSDSLSYASEDELCHYDFIIT

SEQ ID NO: 1142 - protein, 83 aa, Homo sapiens
MGMTRMLLECSLSDKLCVIQEKQYEVIIVPTLLVTIFLILLGVILWLFIREQRTQQQRSGPQGIAPVPPPRDLSWEAGHGGNV

SEQ ID NO: 1143 - protein, 94 aa, Homo sapiens
MILSIIFCVIALLVFVFQLFTMEKGNRFFLSGATTLVCCEYLMGRLQFTLLSPSYHGCFWQLEQISTWFSETSLCNFLLWLFVLLWRTLDCCLG

SEQ ID NO: 1144 - protein, 225 aa, Homo sapiens
MASLPDMESNLSGLVPAAGLVPALPPAVTLGLTAAYTTLYALLFFSVYAQLWLVLLYGHKRLSYQTVFLALCLLWAALRTTLFSFYFRDTPRANRLGPLPFWLLYCCPVCLQFFTLTLMNLYFAQVVFKAKVKRRPEMSRGLLAVRGAFVGASLLFLLVNVLCAVLSHRRRAQPWALLLVRVLVSDSLFVICALSLAACLCLVARRAPSTSIYLEAKGTSVCQAA

SEQ ID NO: 1145 - protein, 409 aa, Homo sapiens
MRAGRRPRLGPWAGGCSKMWDNLTCWPATPRGQVVVLACPLIFKLFSSIQGRNVSRSCTDEGWTHLEPGPYPIACGLDDKAASLDEQTMFYGSVKTGYTIGYGLSLATLLVATAILSLFRKLHCTRNYIHMHLFISFILRAAAVFIKDLALFDSGESDQCSEGSVGCKAAMVFFQYCVMANFFWLLVEGLYLYTLLAVSFFSERKYFWGYILIGWGVPSTFTMVWTIARIHFEDYGCWDTINSSLWWIIKGPILTSILVNFILFICIIRILLQKLRPPDIRKSDSSPYSRLARSTLLLIPLFGVHYIMFAFFPDNFKPEVKMVFELVVGSFQGFVVAILYCFLNGEVQAELRRKWRRWHLQGVLGWNPKYRHPSGGSNGATCSTQVSMLTRVSPGARRSSSFQAEVSLV

SEQ ID NO: 1146 - protein, 168 aa, Homo sapiens
MAEKRHTRDSEAQRLPDSFKDSPSKGLGPCGWILVAFSFLFTVITFPISIWMCIKIIKEYERAIIFRLGRILQGGAKGPGLFFILPCTDSFIKVDMRTISFDIPPQEILTKDSVTISVDGVVYYRVQNATLAVANITNADSATRLLAQTTLRNVLGTKNLSQISSLRL

SEQ ID NO: 1147 - protein, 754 aa, Homo sapiens
MATSRGASRCPRDIANVMQRLQDEQEIVQKRTFTKWINSHLAKRKPPMVVDDLFEDMKDGVKLLALLEVLSGQKLPCEQGRRMKRIHAVANIGTALKFLEGRKIKLVNINSTDIADGRPSIVLGLMWTIILYFQIEELTSNLPQLQSLSSSASSVDSIVSSETPSPPSKRKVTTKIQGNAKKALLKWVQYTAGKQTGIEVKDFGKSWRSGVAFHSVIHAIRPELVDLETVKGRSNRENLEDAFTIAETELGIPRLLDPEDVDVDKPDEKSIMTYVAQFLKHYPDIHNASTDGQEDDEILPGFPSFANSVQNFKREDRVIFKEMKVWIEQFERDLTRAQMVESNLQDKYQSFKHFRVQYEMKRKQIEHLIQPLHRDGKLSLDQALVKQSWDRVTSRLFDWHIQLDKSLPAPLGTIGAWLYRAEVALREEITVQQVHEETANTIQRKLEQHKDLLQNTDAHKRAFHEIYRTRSVNGIPVPPDQLEDMAERFHFVSSTSELHLMKMEFLELKYRLLSLLVLAESKLKSWIIKYGRRESVEQLLQNYVSFIENSKFFEQYEVTYQILKQTAEMYVKADGSVEEAENVMKFMNETTAQWRNLSVEVRSVRSMLEEVISNWDRYGNTVASLQAWLEDAEKMLNQSENAKKDFFRNLPHWIQQHTAMNDAGNFLIETCDEMVSRDLKQQLLLLNGRWRELFMEVKQYAQADEMDRMKKEYTDCVVTLSAFATEAHKKLSEPLEVSFMNVKLLIQDLEVRGF

SEQ ID NO: 1148 - protein, 74 aa, Homo sapiens
MKATGFFLGGVFVVLIGWPLIGMIFEIYGFFLLFRGFFPVVVGFIRRVPVLGSLLNLPGIRSFVDKVGESNNMV

SEQ ID NO: 1149 - protein, 87 aa, Homo sapiens
MGMTRMLLECSLSDKLCVIQEKQYEVIIVPTLLVTIFLILLGVILWLFIREQRTQQQRSGPQGIAPVPPPRDLSWEAGHGGNVALPL

SEQ ID NO: 1150 - protein, 110 aa, Homo sapiens
MNSLLIGELSPEQPSFEPTKNKELTDEFRELRATVERMGLMKANHVFFLLYLLHILLLDGAAWLTLWVFGTSFLPFLLCAVLLSAVQAQAGWLQHDFGHLSVFSTSKWNH

SEQ ID NO: 1151 - protein, 1860 aa, Homo sapiens
MGWGSRCCCPGRLDLLCVLALLGGCLLPVCRTRVYTNHWAVKIAGGFPEANRIASKYGFINIGQIGALKDYYHFYHSRTIKRSVISSRGTHSFISMEPKVEWIQQQVVKKRTKRDYDFSRAQSTYFNDPKWPSMWYMHCSDNTHPCQSDMNIEGAWKRGYTGKNIVVTILDDGIERTHPDLMQNYDALASCDVNGNDLDPMPRYDASNENKHGTRCAGEVAAAANNSHCTVGIAFNAKIGGVRMLDGDVTDMVEAKSVSFNPQHVHIYSASWGPDDDGKTVDGPAPLTRQAFENGVRMGRRGLGSVFVWASGNGGRSKDHCSCDGYTNSIYTISISSTAESGKKPWYLEECSSTLATTYSSGESYDKKIITTDLRQRCTDNHTGTSASAPMAAGIIALALEANPFLTWRDVQHVIVRTSRAGHLNANDWKTNAAGFKVSHLYGFGLMDAEAMVMEAEKWTTVPRQHVCVESTDRQIKTIRPNSAVRSIYKASGCSDNPNRHVNYLEHVVVRITITHPRRGDLAIYLTSPSGTRSQLLANRLFDHSMEGFKNWEFMTIHCWGERAAGDWVLEVYDTPSQLRNFKTPGKLKEWSLVLYGTSVQPYSPTNEFPKVERFRYSRVEDPTDDYGTEDYAGPCDPECSEVGCDGPGPDHCNDCLHYYYKLKNNTRICVSSCPPGHYHADKKRCRKCAPNCESCFGSHGDQCMSCKYGYFLNEETNSCVTHCPDGSYQDTKKNLCRKCSENCKTCTEFHNCTECRDGLSLQGSRCSVSCEDGRYFNGQDCQPCHRFCATCAGAGADGCINCTEGYFMEDGRCVQSCSISYYFDHSSENGYKSCKKCDISCLTCNGPGFKNCTSCPSGYLLDLGMCQMGAICKDGEYVDEHGHCQTCEASCAKCQGPTQEDCTTCPMTRIFDDGRCVSNCPSWKFEFENQCHPCHHTCQRCQGSGPTHCTSCGADNYGREHFLYQGECGDSCPEGHYATEGNTCLPCPDNCELCHSVHVCTRCMKGYFIAPTNHTCQKLECGQGEVQDPDYEECVPCEEGCLGCSLDDPGTCTSCAMGYYRFDHHCYKTCPEKTYSEEVECKACDSNCGSCDQNGCYWCEEGFFLLGGSCVRKCGPGFYGDQEMGECESCHRACETCTGPGHDECSSCQEGLQLLRGMCVHATKTQEEGKFWNDILRKLQPCHSSCKTCNGSATLCTSCPKGAYLLAQACVSSCPQGTWPSVRSGSCENCTEACAICSGADLCKKCQMQPGHPLFLHEGRCYSKCPEGSYAEDGICERCSSPCRTCEGNATNCHSCEGGHVLHHGVCQENCPERHVAVKGVCKHCPEMCQDCIHEKTCKECTPEFFLHDDMCHQSCPRGFYADSRHCVPCHKDCLECSGPKADDCELCLESSWVLYDGLCLEECPAGTYYEKETKECRDCHKSCLTCSSSGTCTTCQKGLIMNPRGSCMANEKCSPSEYWDEDAPGCKPCHVKCFHCMGPAEDQCQTCPMNSLLLNTTCVKDCPEGYYADEDSNRCAHCHSSCRTCEGRHSRQCHSCRPGWFQLGKECLLQCREGYYADNSTGRCERCNRSCKGCQGPRPTDCLSCDRFFFLLRSKGECHRSCPDHYYVEQSTQTCERCHPTCDQCKGKGALNCLSCVWSYHLMGGICTSDCLVGEYRVGEGEKFNCEKCHESCMECKGPGAKNCTLCPANLVLHMDDSHCLHCCNTSDPPSAQECCDCQDTTDECILRTSKVRPATEHFKTALFITSSMMLVLLLGAAVVVWKKSRGRVQPAAKAGYEKLADPNKSYSSYKSSYRESTSFEEDQVIEYRDRDYDEDDDDDIVYMGQDGTVYRKFKYGLLDDDDIDELEYDDESYSYYQ

SEQ ID NO: 1152 - protein, 1240 aa, Homo sapiens
MPRGSWKPQVCTGTDMKLRLPASPETHLDMLRHLYQGCQVVQGNLELTYLPTNASLSFLQDIQEVQGYVLIAHNQVRQVPLQRLRIVRGTQLFEDNYALAVLDNGDPLNNTTPVTGASPGGLRELQLRSLTEILKGGVLIQRNPQLCYQDTILWKDIFHKNNQLALTLIDTNRSRACHPCSPMCKGSRCWGESSEDCQSLTRTVCAGGCARCKGPLPTDCCHEQCAAGCTGPKHSDCLACLHFNHSGICELHCPALVTYNTDTFESMPNPEGRYTFGASCVTACPYNYLSTDVGSCTLVCPLHNQEVTAEDGTQRCEKCSKPCARVCYGLGMEHLREVRAVTSANIQEFAGCKKIFGSLAFLPESFDGDPASNTAPLQPEQLQVFETLEEITGYLYISAWPDSLPDLSVFQNLQVIRGRILHNGAYSLTLQGLGISWLGLRSLRELGSGLALIHHNTHLCFVHTVPWDQLFRNPHQALLHTANRPEDECVGEGLACHQLCARGHCWGPGPTQCVNCSQFLRGQECVEECRVLQGLPREYVNARHCLPCHPECQPQNGSVTCFGPEADQCVACAHYKDPPFCVARCPSGVKPDLSYMPIWKFPDEEGACQPCPINCTHSCVDLDDKGCPAEQRASPLTSIISAVVGILLVVVLGVVFGILIKRRQQKIRKYTMRRLLQETELVEPLTPSGAMPNQAQMRILKETELRKVKVLGSGAFGTVYKGIWIPDGENVKIPVAIKVLRENTSPKANKEILDEAYVMAGVGSPYVSRLLGICLTSTVQLVTQLMPYGCLLDHVRENRGRLGSQDLLNWCMQIAKGMSYLEDVRLVHRDLAARNVLVKSPNHVKITDFGLARLLDIDETEYHADGGKVPIKWMALESILRRRFTHQSDVWSYGVTVWELMTFGAKPYDGIPAREIPDLLEKGERLPQPPICTIDVYMIMVKCWMIDSECRPRFRELVSEFSRMARDPQRFVVIQNEDLGPASPLDSTFYRSLLEDDDMGDLVDAEEYLVPQQGFFCPDPAPGAGGMVHHRHRSSSTRSGGGDLTLGLEPSEEEAPRSPLAPSEGAGSDVFDGDLGMGAAKGLQSLPTHDPSPLQRYSEDPTVPLPSETDGYVAPLTCSPQPEYVNQPDVRPQPPSPREGPLPAARPAGATLERPKTLSPGKNGVVKDVFAFGGAVENPEYLTPQGGAAPQPHPPPAFSPAFDNLYYWDQDPPERGAPPSTFKGTPTAENPEYLGLDVPV

SEQ ID NO: 1153 - protein, 383 aa, Homo sapiens
MEAAVAAPRPRLLLLVLAAAAAAAAALLPGATALQCFCHLCTKDNFTCVTDGLCFVSVTETTDKVIHNSMCIAEIDLIPRDRPFVCAPSSKTGSVTTTYCCNQDHCNKIELPTTGPFSVKSSPGLGPVELAAVIAGPVCFVCISLMLMVYICHNRTVIHHRVPNEEDPSLDRPFISEGTTLKDLIYDMTTSGSGSGLPLLVQRTIARTIVLQESIGKGRFGEVWRGKWRGEEVAVKIFSSREERSWFREAEIYQTVMLRHENILGFIAADNKDNGTWTQLWLVSDYHEHGSLFDYLNRYTVTVEGMIKLALSTASGLAHLHMEIVGTQGKPAIAHRDLKSKNILVKKNGTCCIADLGLAVRHDSATDTIDIAPNHRVGTKRNS

SEQ ID NO: 1154 - protein, 126 aa, Homo sapiens
MCIAEIDLIPRDRPFVCAPSSKTGSVTTTYCCNQDHCNKIELPTTGPFSVKSSPGLGPVELAAVIAGPVCFVCISLMLMVYICHNRTVIHHRVPNEEDPSLDRPFISEGTTLKDLIYDMTTSGSGS

SEQ ID NO: 1155 - protein, 507 aa, Homo sapiens
MEAAVAAPRPRLLLLVLAAAAAAAAALLPGATALQCFCHLCTKDNFTCVTDGLCFVSVTETTDKVIHNSMCIAEIDLIPRDRPFVCAPSSKTGSVTTTYCCNQDHCNKIELPTTGPFSVKSSPGLGPVELAAVIAGPVCFVCISLMLMVYICHNRTVIHHRVPNEEDPSLDRPFISEGTTLKDLIYDMTTSGSGSGLPLLVQRTIARTIVLQESIGKGRFGEVWRGKWRGEEVAVKIFSSREERSWFREAEIYQTVMLRHENILGFIAADNKDNGTWTQLWLVSDYHEHGSLFDYLNRYTVTVEGMIKLALSTASGLAHLHMEIVGTQGKPAIAHRDLKSKNILVKKNGTCCIADLGLAVRHDSATDTIDIAPNHRVGTKRYMAPEVLDDSINMKHFESFKRADIYAMGLVFWEIARRCSIGGIHEDYQLPYYDLVPSDPSVEEMRKVVCEQKLRPNIPNRWQSCEALRVMAKIMRECWYANGAARLTALRIKKTLSQLSQQEGIKM

SEQ ID NO: 1156 - protein, 371 aa, Homo sapiens
MEDEDYNTSISYGDEYPDYLDSIVVLEDLSPLEARVTRIFLVVVYSIVCFLGILGNGLVIIIATFKMKKTVNMVWFLNLAVADFLFNVFLPIHITYAAMDYHWVFGTAMCKISNFLLIHNMFTSVFLLTIISSDRCISVLLPVWSQNHRSVRLAYMACMVIWVLAFFLSSPSLVFRDTANLHGKISCFNNFSLSTPGSSSWPTHSQMDPVGYSRHMVVTVTRFLCGFLVPVLIITACYLTIVCKLQRNRLAKTKKPFKIIVTIIITFFLCWCPYHTLNLLELHHTAMPGSVFSLGLPLATALAIANSCMNPILYVFMGQDFKKFKVALFSRLVNALSEDTGHSSYPSHRSFTKMSSMNERTSMNERETGML

SEQ ID NO: 1157 - protein, 122 aa, Homo sapiens
MCIAEIDLIPRDRPFVCAPSSKTGSVTTTYCCNQDHCNKIELPTTVKSSPGLGPVELAAVIAGPVCFVCISLMLMVYICHNRTVIHHRVPNEEDPSLDRPFISEGTTLKDLIYDMTTSGSGS

SEQ ID NO: 1158 - protein, 412 aa, Homo sapiens
MPLQLLLLLILLGPGNSLQLWDTWADEAEKALGPLLARDRRQATEYEYLDYDFLPETEPPEMLRNSTDTTPLTGPGTPESTTVEPAARRSTGLDAGGAVTELTTELANMGNLSTDSAAMEIQTTQPAATEAQTTQPVPTEAQTTPLAATEAQTTRLTATEAQTTPLAATEAQTTPPAATEAQTTQPTGLEAQTTAPAAMEAQTTAPAAMEAQTTPPAAMEAQTTQTTAMEAQTTAPEATEAQTTQPTATEAQTTPLAAMEALSTEPSATEALSMEPTTKRGLFIPFSVSSVTHKGIPMAASNLSVNYPVGAPDHISVKQCLLAILILALVATIFFVCTVVLAVRLSRKGHMYPVRNYSPTEMVCISSLLPDGGEGPSATANGGLSKAKSPGLTPEPREDREGDDLTLHSFLP

SEQ ID NO: 1159 - protein, 749 aa, Homo sapiens
MTHEEHHAAKTLGIGKAIAVLTSGGDAQGMNAAVRAVVRVGIFTGARVFFVHEGYQGLVDGGDHIKEATWESVSMMLQLGGTVIGSARCKDFREREGRLRAAYNLVKRGITNLCVIGGDGSLTGADTFRSEWSDLLSDLQKAGKITDEEATKSSYLNIVGLVGSIDNDFCGTDMTIGTDSALHRIMEIVDAITTTAQSHQRTFVLEVMGRHCGYLALVTSLSCGADWVFIPECPPDDDWEEHLCRRLSETRTRGSRLNIIIVAEGAIDKNGKPITSEDIKNGSRMGVEAVMALLEGTPDTPACVVSLSGNQAVRLPLMECVQVTKDVTKAMDEKKFDEALKLRGRSFMNNWEVYKLLAHVRPPVSKSGSHTVAVMNVGAPAAGMNAAVRSTVRIGLIQGNRVLVVHDGFEGLAKGQIEEAGWSYVGGWTGQGGSKLGTKRTLPKKSFEQISANITKFNIQGLVIIGGFEAYTGGLELMEGRKQFDELCIPFVVIPATVSNNVPGSDFSVGADTALNTICTTCDRIKQSAAGTKRRVFIIETMGGYCGYLATMAGLAAGADAAYIFEEPFTIRDLQANVEHLVQKMKTTVKRGLVLRNEKCNENYTTDFIFNLYSEEGKGIFDSRKNVLGHMQQGGSPTPFDRNFATKMGAKAMNWMSGKIKESYRNGRIFANTPDSGCVLGMRKRALVFQPVAELKDQTDFEHRIPKEQWWLKLRPILKILAKYEIDLDTSDHAHLEHITRKRSGEAAV

SEQ ID NO: 1160 - protein, 243 aa, Homo sapiens
ELTIFILRLAIYILTFPLYLLNFLGLWSWICKKWFPYFLVRFTVIYNEQMASKKRELFSNLQEFAGPSGKLSLLEVGCGTGANFKFYPPGCRVTCIDPNPNFEKFLIKSIAENRHLQFERFVVAAGENMHQVADGSVDVVVCTLVLCSVKNQERILREVCRVLRPGGAFYFMEHVAAECSTWNYFWQQVLDPAWHLLFDGCNLTRESWKALERASFSKLKLQHIQAPLSWELVRPHIYGYAVK

SEQ ID NO: 1161 - protein, 143 aa, Homo sapiens
MRMEDEDYNTSISYGDEYPDYLDSIVVLEDLSPLEARVTRIFLVVVYSIVCFLGILGNGLVIIIATFKMKKTVNMVWFLNLAVADFLFNVFLPIHITYAAMDYHWVFGTAMCKISNFLLIHNMFTSVFLLTIISSDRCISVLL

SEQ ID NO: 1162 - protein, 921 aa, Homo sapiens
MRANDALQVLGLLFSLARGSEVGNSQAVCPGTLNGLSVTGDAENQYQTLYKLYERCEVVMGNLEIVLTGHNADLSFLQWIREVTGYVLVAMNEFSTLPLPNLRVVRGTQVYDGKFAIFVMLNYNTNSSHALRQLRLTQLTEILSGGVYIEKNDKLCHMDTIDWRDIVRDRDAEIVVKDNGRSCPPCHEVCKGRCWGPGSEDCQTLTKTICAPQCNGHCFGPNPNQCCHDECAGGCSGPQDTDCFACRHFNDSGACVPRCPQPLVYNKLTFQLEPNPHTKYQYGGVCVASCPHNFVVDQTSCVRACPPDKMEVDKNGLKMCEPCGGLCPKACEGTGSGSRFQTVDSSNIDGFVNCTKILGNLDFLITGLNGDPWHKIPALDPEKLNVFRTVREITGYLNIQSWPPHMHNFSVFSNLTTIGGRSLYNRGFSLLIMKNLNVTSLGFRSLKEISAGRIYISANRQLCYHHSLNWTKVLRGPTEERLDIKHNRPRRDCVAEGKVCDPLCSSGGCWGPGPGQCLSCRNYSRGGVCVTHCNFLNGEPREFAHEAECFSCHPECQPMEGTATCNGSGSDTCAQCAHFRDGPHCVSSCPHGVLGAKGPIYKYPDVQNECRPCHENCTQGCKGPELQDCLGQTLVLIGKTHLTMALTVIAGLVVIFMMLGGTFLYWRGRRIQNKRAMRRYLERGESIEPLDPSEKANKVLARIFKETELRKLKVLGSGVFGTVHKGVWIPEGESIKIPVCIKVIEDKSGRQSFQAVTDHMLAIGSLDHAHIVRLLGLCPGSSLQLVTQYLPLGSLLDHVRQHRGALGPQLLLNWGVQIAKGMYYLEEHGMVHRNLAARNVLLKSPSQVQVADFGVADLLPPDDKQLLYSEAKTPIKWMALESIHFGKYTHQSDVWSYGQCIWMPSLPSLAPVSNLPFETPS

SEQ ID NO: 1163 - protein, 114 aa, Homo sapiens
MCIAEIDLIPRDRPFVCAPSSKTGSVTTTYCCNQDHCNKIELPTTGPFSVKSSPGLGPVELAAVIAGPVCFVCISLMLMVYICHNRTVIHHRVPNEEDPSLDRPFISEGTTLKD

SEQ ID NO: 1164 - protein, 147 aa, Homo sapiens
MRMEDEDYNTSISYGDEYPDYLDSIVVLEDLSPLEARVTRIFLVVVYSIVCFLGILGNGLVIIIATFKMKKTVNMVWFLNLAVADFLFNVFLPIHITYAAMDYHWVFGTAMCKISNFLLIHNMFTSVFLLTIISSDRCISVLLPVWS

SEQ ID NO: 1165 - protein, 446 aa, Homo sapiens
MNTLSLPLNIRRGGSDTNLNFDVPDGILDFHKVKLTADSLKQKILKVTEQIKIEQTSRDGNVAEYLKLVNNADKQQAGRIKQVFEKKNQKSAHSIAQLQKKLEQYHRKLREIEQNGASRSSKDISKDHLKDIHRSLKDAHVKSRTAPHCMESSKSGMPGVSLTPPVFVFNKSREFANLIRNKFGSADNIAHLKNSLEEFRPEASARAYGGSATIVNKPKYGSDDECSSGTSGSADSNGNQSFGAGGASTLDSQGKLAVILEELREIKDTQAQLAEDIEALKVQFKREYGFISQTLQEERYRYERLEDQLHDLTDLHQHETANLKQELASIEEKVAYQAYERSRDIQEALESCQTRISKLELHQQEQQALQTDTVNAKVLLGRCINVILAFMTVILVCVSTIAKFVSPMMKSRCHILGTFFAVTLLAIFCKNWDHILCAIERMIIPR

SEQ ID NO: 1166 - protein, 118 aa, Homo sapiens
MCIAEIDLIPRDRPFVCAPSSKTGSVTTTYCCNQDHCNKIELPTTVKSSPGLGPVELAAVIAGPVCFVCISLMLMVYICHNRTVIHHRVPNEEDPSLDRPFISEGTTLKDLIYDMTTS

SEQ ID NO: 1167 - protein, 434 aa, Homo sapiens
MCIAEIDLIPRDRPFVCAPSSKTGSVTTTYCCNQDHCNKIELPTTVKSSPGLGPVELAAVIAGPVCFVCISLMLMVYICHNRTVIHHRVPNEEDPSLDRPFISEGTTLKDLIYDMTTSGSGSGLPLLVQRTIARTIVLQESIGKGRFGEVWRGKWRGEEVAVKIFSSREERSWFREAEIYQTVMLRHENILGFIAADNKDNGTWTQLWLVSDYHEHGSLFDYLNRYTVTVEGMIKLALSTASGLAHLHMEIVGTQGKPAIAHRDLKSKNILVKKNGTCCIADLGLAVRHDSATDTIDIAPNHRVGTKRYMAPEVLDDSINMKHFESFKRADIYAMGLVFWEIARRCSIGGIHEDYQLPYYDLVPSDPSVEEMRKVVCEQKLRPNIPNRWQSCEALRVMAKIMRECWYANGAARLTALRIKKTLSQLSQQEGIKM

SEQ ID NO: 1168 - protein, 180 aa, Homo sapiens
MELTIFILRLAIYILTFPLYLLNFLGLWSWICKKWFPYFLVRFTVIYNEQMASKKRELFSNLQEFAGPSGKLSLLEVGCGTGANFKFYPPGCRVTCIDPNPNFEKFLIKSIAENRHLQFERFVVAAGENMHQVADGSVDVVVCTLVLCSVKNQERILREVCRVLRPGGAFYFMEHVAAEC

SEQ ID NO: 1169 - protein, 562 aa, Homo sapiens
MPIQIFCSMSFSSGEEAPGPLGDIWGPHHHQQQQDISESEEEEEEKEKEAVRKEASEGHSPMDLVAFANSCTLHGTNHIFVEGGPGPRQVLWAVAFVLALGAFLCQVGDRVAYYLSYPHVTLLNEVATTELAFPAVTLCNTNAVRLSQLSYPDLLYLAPMLGLDESDDPGVPLAPPGPEAFSGEPFNLHRFYNRSCHRLEDMLLYCSYQGGPCGPHNFSVVFTRYGKCYTFNSGRDGRPRLKTMKGGTGNGLEIMLDIQQDEYLPVWGETDETSFEAGIKVQIHSQDEPPFIDQLGFGVAPGFQTFVACQEQRLIYLPPPWGTCKAVTMDSDLDFFDSYSITACRIDCETRYLVENCNCRMVHMPGDAPYCTPEQYKECADPALDFLVEKDQEYCVCEMPCNLTRYGKELSMVKIPSKASAKYLAKKFNKSEQYIGENILVLDIFFEVLNYETIEQKKAYEIAGLLGDIGGQMGLFIGASILTVLELFDYAYEVIKHKLCRRGKCQKEAKRSSADKGVALSLDDVKRHNPCESLRGHPAGMTYAANILPHHPARGTFEDFTC

SEQ ID NO: 1170 - protein, 245 aa, Homo sapiens
MKHTQSGQSTSPLVIDYTCRVCQMAFVFSSLIPLLLMTPVFCLGNTSECFQNFSQSHKCILMHSPPSAMAELPPSANTSVCSTLYFYGIAIFLGSFVLSLLTIMVLLIRAQTLYKKFVKSTGFLGSEQWAVIHIVDQRVRFYPVAFFCCWGPAVILMIIKLTKPQDTKLHMALYVLQALTATSQGLLNCGVYGWTQHKFHQLKQEARRDADTQTPLLCSQKRFYSRGLNSLESTLTFPASTSTIF

SEQ ID NO: 1171 - protein, 50 aa, Homo sapiens
MGKESGWDSGRAAVAAVVGGGAAGLSVTSKVIGGFAGTALGAWLGSPPSS

SEQ ID NO: 1172 - protein, 797 aa, Homo sapiens
MAVQGSQRRLLGSLNSTPTAIPQLGLAANQTGARCLEVSISDGLFLSLGLVSLVENALVVATIAKNRNLHSPMYCFICCLALSDLLVSGSNVLETAVILLLEAGALVARAAVLQQLDNVIDVITCSSMLSSLCFLGAIAVDRYISIFYALRYHSIVTLPRARRAVAAIWVASVVFSTLFIAYYDHVAVLLCLVVFFLAMLVLMAVLYVHMLARACQHAQGIARLHKRQRPVHQGFGLKGAVTLTILLGIFFLCWGPFFLHLTLIVLCPEHPTCGCIFKNFNLFLALIICNAIIDPLIYAFHSQELRRTLKEVLTCSCSQDRALVSWDVKSLGGSVCQELLPQQPQEKGLCDQKASSTALQRLLQKEFWEVISDEHGIDPSGNYVGDSDLQLERISVYYNEASSHKYVPRAILVDLEPGTMDSVRSGAFGHLFRPDNFIFGQSGAGNNWAKGHYTEGAELVDSVLDVVRKECENCDCLQGFQLTHSLGGGTGSGMGTLLISKVREEYPDRIMNTFSVVPSPKVSDTVVEPYNATLSIHQLVENTDETYCIDNEALYDICFRTLKLATPTYGDLNHLVSATMSGVTTSLRFPGQLNADLRKLAVNMVPFPRLHFFMPGFAPLTARGSQQYRALTVPELTQQMFDAKNMMAACDPRHGRYLTVATVFRGRMSMKEVDEQMLAIQSKNSSYFVEWIPNNVKVAVCDIPPRGLKMSSTFIGNSTAIQELFKRISEQFTAMFRRKAFLHWYTGEGMDEMEFTEAESNMNDLVSEYQQYQDATAEEEGEMYEDDEEESEAQGPK

SEQ ID NO: 1173 - protein, 95 aa, Homo sapiens
MVRLDISEGRAAVAAVVGGVVAVGTVLVALSAMGFTSVGIAASSIAAKMMSTAAIANGGGVAAGSLVAILQSVGAAGLSVTSKVIGGFAGTALGA

SEQ ID NO: 1174 - protein, 136 aa, Homo sapiens
DGANDVSMIQVADVGVGISGQEGMQEMLRETTAMETLAGHARTVFRMGIFLPCCVPCILRREDKSDARSASPVTGIPLPLKAVMASDFAVPKFRYLERLLILHGHWCYSRLANMVLYFFYKNTMFVGLLFWFQFFC

SEQ ID NO: 1175 - protein, 60 aa, Homo sapiens
MEFYESAYFIVLIPSIVITVIFLFFWLFMKETLYDEVLAKQKREQKLIPTKTDKKKAEKK

SEQ ID NO: 1176 - protein, 39 aa, Homo sapiens
MGKESGWDSGAAGLSVTSKVIGGFAGTALGAWLGSPPSS

SEQ ID NO: 1177 - protein, 93 aa, Homo sapiens
MVRLDISEGRAAVAAVVGGVVAVGTVLVALSAMGFTSVGIAASSIAAKMMSTAAIANGGGVAAGSLVAILQSVGAAGLSVTSKVIGGFAGTAL

SEQ ID NO: 1178 - protein, 296 aa, Homo sapiens
MKSPFYRCQNTTSVEKGNSAVMGGVLFSTGLLGNLLALGLLARSGLGWCSRRPLRPLPSVFYMLVCGLTVTDLLGKCLLSPVVLAAYAQNRSLRVLAPALDNSLCQAFAFFMSFFGLSSTLQLLAMALECWLSLGHPFFYRRHITLRLGALVAPVVSAFSLAFCALPFMGFGKFVQYCPGTWCFIQMVHEEGSLSVLGYSVLYSSLMALLVLATVLCNLGAMRNLYAMHRRLQRHPRSCTRDCAEPRADGREASPQPLEELDHLLLLALMTVLFTMCSLPVIAFVPGVPAKTPGSR

SEQ ID NO: 1179 - protein, 33 aa, Homo sapiens
MAFTFAAFCYMLALLLTAALIFFAIWHDKEEFG

SEQ ID NO: 1180 - protein, 122 aa, Homo sapiens
MFCSEKKLREVERIVKANDREYNEKFQYADNRIHTSKYNILTFLPINLFEQFQRVANAYFLCLLILQLIPEISSLTWFTTIVPLVLVITMTAVKDATDDYFRHKSDNQVNNRQSEVLINSKC

SEQ ID NO: 1181 - protein, 94 aa, Homo sapiens
ANAYFLCLLILQLIPEISSLTWFTTIVPLVLVITMTAVKDATDDYFRHKSDNQVNNRQSEVLINSKLQNEKWMNVKVGDIIKLENNQFVALIKD

SEQ ID NO: 1182 - protein, 858 aa, Homo sapiens
MGPWGWKLRWTVALLLAAAGTAVGDRCERNEFQCQDGKCISYKWVCDGSAECQDGSDESQETCLSVTCKSGDFSCGGRVNRCIPQFWRCDGQVDCDNGSDEQGCPPKTCSQDEFRCHDGKCISRQFVCDSDRDCLDGSDEASCPVLTCGPASFQCNSSTCIPQLWACDNDPDCEDGSDEWPQRCRGLYVFQGDSSPCSAFEFHCLSGECIHSSWRCDGGPDCKDKSDEENCAVATCRPDEFQCSDGNCIHGSRQCDREYDCKDMSDEVGCVNVTLCEGPNKFKCHSGECITLDKVCNMARDCRDWSDEPIKECGTNECLDNNGGCSHVCNDLKIGYECLCPDGFQLVAQRRCEDIDECQDPDTCSQLCVNLEGGYKCQCEEGFQLDPHTKACKAVGSIAYLFFTNRHEVRKMTLDRSEYTSLIPNLRNVVALDTEVASNRIYWSDLSQRMICSTQLDRAHGVSSYDTVISRDIQAPDGLAVDWIHSNIYWTDSVLGTVSVADTKGVKRKTLFRENGSKPRAIVVDPVHGFMYWTDWGTPAKIKKGGLNGVDIYSLVTENIQWPNGITLDLLSGRLYWVDSKLHSISSIDVNGGNRKTILEDEKRLAHPFSLAVFEDKVFWTDIINEAIFSANRLTGSDVNLLAENLLSPEDMVLFHNLTQPRGVNWCERTTLSNGGCQYLCLPAPQINPHSPKFTCACPDGMLLARDMRSCLTEAEAAVATQETSTVRLKVSSTAVRTQHTTTRPVPDTSRLPGATPGLTTVEIVTMSHQALGDVAGRGNEKKPSSVRALSIVLPIVLLVFLCLGVFLLWKNWRLKNINSINFDNPVYQKTTEDEVHICHNQDGYSYPSMVSLEDDVA

SEQ ID NO: 1183 - protein, 717 aa, Homo sapiens
MFCSEKKLREVERIVKANDREYNEKFQYADNRIHTSKYNILTFLPINLFEQFQRVANAYFLCLLILQLIPEISSLTWFTTIVPLVLVITMTAVKDATDDYFRHKSDNQVNNRQSEVLINSKLQNEKWMNVKVGDIIKLENNQFVAADLLLLSSSEPHGLCYVETAELDGETNLKVRHALSVTSELGADISRLAGFDGIVVCEVPNNKLDKFMGILSWKDSKHSLNNEKIILRGCILRNTSWCFGMVIFAGPDTKLMQNSGKTKFKRTSIDRLMNTLVLWIFGFLICLGIILAIGNSIWESQTGDQFRTFLFWNEGEKSSVFSGFLTFWSYIIILNTVVPISLYVSVEVIRLGHSYFINWDRKMYYSRKAIPAVARTTTLNEELGQIEYIFSDKTGTLTQNIMTFKRCSINGRIYGEVHDDLDQKTEITQEKEPVDFSVKSQADREFQFFDHHLMESIKMGDPKVHEFLRLLALCHTVMSEENSAGELIYQVQSPDEGALVTAARNFGFIFKSRTPETITIEELGTLVTYQLLAFLDFNNTRKRMSVIVRNPEGQIKLYSKGADTILFEKLHPSNEVLLSLTSDHLSEFAGEGLRTLAIAYRDLDDKYFKEWHKMLEDANAATEERDERIAGLYEEIERDLMLLGATAVEDKLQEGVIETVTSLSLANIKIWVLTGDKQETAINIGYACNMLTDDMNDVFVIAGNNAVEVREELRLMP

SEQ ID NO: 1184 - protein, 59 aa, Homo sapiens
MSQGRGKYDFYIGLGLAMSSSIFIGGSFILKKKGLLRLARKGSMRAGQGGHAYLKEWLW

SEQ ID NO: 1185 - protein, 860 aa, Homo sapiens [sequence omitted]

SEQ ID NO: 1186 - protein, 364 aa, Homo sapiens
LIDRYCGVKSPPLIRSTGRFMWIKFSSDEELEGLGFRAKYSFIPDPDFTYLGDCQFELSGADGIVRSSQVEQEEKTKPGQAVDCIWTIKATPKAKIYLRFLDYQMEHSNECKRNFVAVYDGSSSIENLKAKFCSTVANDVMLKTGIGVIRMWADEGSRLSRFRMLFTSFVEQKKKAGVFEQITKTHGTIIGITSGIVLVLLIISILVQVKQPRKKVMACKTAFNKTGFQEVFDPPHYELFSLRDKEISADLADLSEELDNYQKMRRSSTASRCIHDHHCGSQASSVKQSRTNLSSMELPFRNDFAQPQPMKTFNSTFKKSSYTFKQGHECPEQALEDRVMEEIPCEIYVRGREDSAQASISIDF

SEQ ID NO: 1187 - protein, 63 aa, Homo sapiens
MGYARKVGWVTAGLVIGAGACYCIYRLTRGRKQNKEKMAEGGSGDVDDAGDCSGARYNDWSDD

SEQ ID NO: 1188 - protein, 166 aa, Homo sapiens
MTHYLREGEPYLNTAYGHMICYWDGSAHYLMYLVMVAAIAWEETYRTIGLYWVGSIIMSVVVFVPGNIVGKYGTRICPAFFLSIPYTCLPVWAGFRIYNQPSENYNYPSKVIQEAQAKDLLRRPFDLMLVVCLLLATGFCLFRGLIALDCPSELCRLYTQFQEPYL

SEQ ID NO: 1189 - protein, 132 aa, Homo sapiens
QNEYFDSLLHACIPCQLRCSSNTPPLTCQRYCNASVTNSVKGTNAILWTCLGLSLIISLAVFVLMFLLRKINSEPLKDEFKNTEMESRSVAQAGVQWRDLNSLQPLPLGFKQFSHLSLLSNWDYRIRSPGHG

SEQ ID NO: 1190 - protein, 241 aa, Homo sapiens
MINPYRNLPLAIIISLPIVTLVYVLTNLAYFTTLSTEQMLSSEAVAVDFGNYHLGVMSWIIPVFVGLSCFGSVNGSLFTSSRLFFVGSREGHLPSILSMIHPQLLTPVPSLVFTCVMTLLYAFSKDIFSVINFFSFFNWLCVALAIIGMIWLRHRKPELERPIKVNLALPVFFILACLFLIAVSFWKTPVECGIGFTIILSGLPVYFFGVWWKNKPKWLLQGIFSTTVLCQKLMQVVPQET

SEQ ID NO: 1191 - protein, 1077 aa, Homo sapiens
PYKPQWCRSREAWALYLFSPQNRFRVSCQKVITHKMFDHVVLVFIFLNCVTIALERPDIDPGSTERVFLSVSNYIFTAIFVAEMMVKVVALGLLSGEHAYLQSSWNLLDGLLVLVSLVDIVVAMASAGGAKILGVLRVLRLLRTLRPLRVISRAPGLKLVVETLISSLRPIGNIVLICCAFFIIFGILGVQLFKGKFYYCEGPDTRNISTKAQCRAAHYRWVRRKYNFDNLGQALMSLFVLSSKDGWVNIMYDGLDAVGVDQQPVQNHNPWMLLYFISFLLIVSFFVLNMFVGVVVENFHKCRQHQEAEEARRREEKRLRRLERRRRKAQRRPYYADYSPTRRSIHSLCTSHYLDLFITFIICVNVITMSMEHYNQPKSLDEALKYCNYVFTIVFVFEAALKLVAFGFRRFFKDRWNQLDLAIVLLSLMGITLEEIEMSAALPINPTIIRIMRVLRIARVLKLLKMATGMRALLDTVVQALPQVGNLGLLFMLLFFIYAALGVELFGRLECSEDNPCEGLSRHATFSNFGMAFLTLFRVSTGDNWNGIMKDTLRECSREDKHCLSYLPALSPVYFVTFVLVAQFVLVNVVVAVLMKHLEESNKEAREDAELDAEIELEMAQGPGSARRVDADRPPLPQESPGARDAPNLVARKVSVSRMLSLPNDSYMFRPVVPASAPHPRPLQEVEMETYGAGTPLESCASLQIPLAVSSPARSGEPLHALSPRGTARSPSLSRLLCRQEAVHTDSLEGKIDSPRDTLDPAEPGEKTPVRPVTQGGSLQSPPRSPRPASVRTRKHTFGQRCVSSRPAAPGGEEAEASDPADEEVSHITSSACPWQPTAEPHGPEASPVAGGERDLRRLYSVDAQGFLDKPGRADEQWRPSAELGSGEPGEAKAWGPEAEPALGARRKKKMSPPCISVEPPAEDEGSARPSAAEGGSTTLRRRTPSCEATPHRDSLEPTEGSGAGGDPAAKGERWGQASCRAEHLTVPSFAFEPLDLGVPSGDPFLDGSHSVTPESRASSSGAIVPLEPPESEPPMPVGDPPEKRRGLYLTVPQCPLEKPGSPSATPAPGGGADDPV

SEQ ID NO: 1192 - protein, 1169 aa, Homo sapiens
MTRTRAALLLFTALATSLGFNLDTEELTAFRVDSAGFGDSVVQYANSWVVVGAPQKITAANQTGGLYQCGYSTGACEPIGLQVPPEAVNMSLGLSLASTTSPSQLLACGPTVHHECGRNMYLTGLCFLLGPTQLTQRLPVSRQECPRQEQDIVFLIDGSGSISSRNFATMMNFVRAVISQFQRPSTQFSLMQFSNKFQTHFTFEEFRRSSNPLSLLASVHQLQGFTYTATAIQNVVHRLFHASYGARRDAAKILIVITDGKKEGDSLDYKDVIPMADAAGIIRYAIGVGLAFQNRNSWKELNDIASKPSQEHIFKVEDFDALKDIQNQLKEKIFAIEGTETTSSSSFELEMAQEGFSAVFTPDGPVLGAVGSFTWSGGAFLYPPNMSPTFINMSQENVDMRDSYLGYSTELALWKGVQSLVLGAPRYQHTGKAVIFTQVSRQWRMKAEVTGTQIGSYFGASLCSVDVDSDGSTDLVLIGAPHYYEQTRGGQVSVCPLPRGWRRWWCDAVLYGEQGHPWGRFGAALTVLGDVNGDKLTDVVIGAPGEEENRGAVYLFHGVLGPSISPSHSQRIAGSQLSSRLQYFGQALSGGQDLTQDGLVDLAVGARGQVLLLRTRPVLWVGVSMQFIPAEIPRSAFECREQVVSEQTLVQSNICLYIDKRSKNLLGSRDLQSSVTLDLALDPGRLSPRATFQETKNRSLSRVRVLGLKAHCENFNLLLPSCVEDSVTPITLRLNFTLVGKPLLAFRNLRPMLAADAQRYFTASLPFEKNCGADHICQDNLGISFSFPGLKSLLVGSNLELNAEVMVWNDGEDSYGTTITFSHPAGLSYRYVAEGQKQGQLRSLHLTCDSAPVGSQGTWSTSCRINHLIFRGGAQITFLATFDVSPKAVLGDRLLLTANVSSENNTPRTSKTTFQLELPVKYAVYTVVSSHEQFTKYLNFSESEEKESHVAMHRYQVNNLGQRDLPVSINFWVPVELNQEAVWMDVEVSHPQNPSLRCSSEKIAPPASDFLAHIQKNPVLDCSIAGCLRFRCDVPSFSVQEELDFTLKGNLSFGWVRQILQKKVSVVSVAEITFDTSVYSQLPGQEAFMRAQTTTVLEKYKVHNPTPLIVGSSIGGLLLLALITAVLYKVGFFKRQYKEMMEEANGQIAPENGTQTPSPPTPHYPQDNV

SEQ ID NO: 1193 - protein, 1099 aa, Homo sapiens
PYKPQWCRSREAWALYLFSPQNRFRVSCQKVITHKMFDHVVLVFIFLNCVTIALERPDIDPGSTERVFLSVSNYIFTAIFVAEMMVKVVALGLLSGEHAYLQSSWNLLDGLLVLVSLVDIVVAMASAGGAKILGVLRVLRLLRTLRPLRVISRAPGLKLVVETLISSLRPIGNIVLICCAFFIIFGILGVQLFKGKFYYCEGPDTRNISTKAQCRAAHYRWVRRKYNFDNLGQALMSLFVLSSKDGWVNIMYDGLDAVGVDQQPVQNHNPWMLLYFISFLLIVSFFVLNMFVGVVVENFHKCRQHQEAEEARRREEKRLRRLERRRRSKALPVAVAVAEAQRRPYYADYSPTRRSIHSLCTSHYLDLFITFIICVNVITMSMEHYNQPKSLDEALKYCNYVFTIVFVFEAALKLVAFGFRRFFKDRWNQLDLAIVLLSLMGITLEEIEMSAALPINPTIIRIMRVLRIARVLKLLKMATGMRALLDTVVQALPQVGNLGLLFMLLFFIYAALGVELFGRLECSEDNPCEGLSRHATFSNFGMAFLTLFRVSTGDNWNGIMKDTLRECSREDKHCLSYLPALSPVYFVTFVLVAQFVLVNVVVAVLMKHLEESNKEAREDAELDAEIELEMAQGPGSARRVDADRPPLPQESPGARDAPNLVARKVSVSRMLSLPNDSYMFRPVVPASAPHPRPLQEVEMETYGAGTPLGSVASVHSPPAESCASLQIPLAVSSPARSGEPLHALSPRGTARSPSLSRLLCRQEAVHTDSLEGKIDSPRDTLDPAEPGEKTPVRPVTQGGSLQSPPRSPRPASVRTRKHTFGQRCVSSRPAAPGGEEAEASDPADEEVSHITSSACPWQPTAEPHGPEASPVAGGERDLRRLYSVDAQGFLDKPGRADEQWRPSAELGSGEPGEAKAWGPEAEPALGARRKKKMSPPCISVEPPAEDEGSARPSAAEGGSTTLRRRTPSCEATPHRDSLEPTEGSGAGGDPAAKGERWGQASCRAEHLTVPSFAFEPLDLGVPSGDPFLDGSHSVTPESRASSSGAIVPLEPPESEPPMPVGDPPEKRRGLYLTVPQCPLEKPGSPSATPAPGGGADDPV

SEQ ID NO: 1194 - protein, 189 aa, Homo sapiens
MLFPISMSATEFLLASVIFCLVFWVIRASRPQVPKGLKNPPGPWGWPLIGHMLTLGKNPHLALSRMSQQYGDVLQIRIGSTPVVVLSGLDTIRQALVRQGDDFKGRPDLYTFTLISNGQSMSFSPDSGPVWAARRRLAQNGLKSFSIASDPASSTSCYLEEHVSKEAEVLISTLQELMAGPGHFNPYRT

SEQ ID NO: 1195 - protein, 525 aa, Homo sapiens
MALERLCSVLKVLLITVLVVEGIAVAQKTQDGQNIGIKHIPATQCGIWVRTSNGGHFASPNYPDSYPPNKECIYILEAAPRQRIELTFDEHYYIEPSFECRFDHLEVRDGPFGFSPLIDRYCGVKSPPLIRSTGRFMWIKFSSDEELEGLGFRAKYSFIPDPDFTYLGGILNPIPDCQFELSGADGIVRSSQVEQEEKTKPGQAVDCIWTIKATPKAKIYLRFLDYQMEHSNECKRNFVAVYDGSSSIENLKAKFCSTVANDVMLKTGIGVIRMWADEGSRLSRFRMLFTSFVEPPCTSSTFFCHSNMCINNSLVCNGVQNCAYPWDENHCKEKKKAGVFEQITKTHGTIIGITSGIVLVLLIISILVQVKQPRKKVMACKTAFNKTGFQEVFDPPHYELFSLRDKEISADLADLSEELDNYQKMRRSSTASRCIHDHHCGSQASSVKQSRTNLSSMELPFRNDFAQPQPMKTFNSTFKKSSYTFKQGHECPEQALEDRVMEEIPCEIYVRGREDSAQASISIDF

SEQ ID NO: 1196 - protein, 7555 aa, Homo sapiens
MPLLDSSYLPPTIFILTHVLGVAGVLYWKRHARGRADERDRVQKKTFTKWVNKHLMKVRKHINDLYEDLRDGHNLISLLEVLSGIKLEPAGLKTLRLVSMPSWCHTNNEEQAEEDDDDVPREKGRMRFHRLQNVQIALDFLKQRQVKLVNIRNDDITDGNPKLTLGLIWTIILHFQISDIYISGESGDMSAKEKLLLWTQKVTAGYTGIKCTNFSSCWSDGKMFNALIHRYRPDLVDMERVQIQSNRENLEQAFEVAERLGVTRLLDAEDVDVPSPDEKSVITYVSSIYDAFPKVPEGGEGISATEVDSRWQEYQSRVDSLIPWIKQHTILMSDKTFPQNPVELKALYNQYIHFKETEILAKEREKGRIEELYKLLEVWIEFGRIKLPQGYHPNDVEEEWGKLIIEMLEREKSLRPAVERLELLLQIANKIQNGALNCEEKLTLAKNTLQADAAHLESGQPVQCESDVIMYIQECEGLIRQLQVDLQILRDENYYQLEELAFRVMRLQDELVTLRLECTNLYRKGHFTSLELVPPSTLTTTHLKAEPLTKATHSSSTSWFRKPMTRAELVAISSSEDEGNLRFVYELLSWVEEMQMKLERAEWGNDLPSVELQLETQQHIHTSVEELGSSVKEARLYEGKMSQNFHTSYAETLGKLETQYCKLKETSSFRMRHLQSLHKFVSRATAELIWLNEKEEEELAYDWSDNNSNISAKRNYFSELTMELEEKQDVFRSLQDTAELLSLENHPAKQTVEAYSAAVQSQLQWMKQLCLCVEQHVKENTAYFQFFSDARELESFLRNLQDSIKRKYSCDHNTSLSRLEDLLQDSMDEKEQLIQSKSSVASLVGRSKTIVQLKPRSPDHVLKNTISVKAVCDYRQIEITICKNDECVLEDNSQRTKWKVISPTGNEAMVPSVCFLIPPPNKDAIEMASRVEQSYQKVMALWHQLHVNTKSLISWNYLRKDLDLVQTWNLEKLRSSAPGECHQIMKNLQAHYEDFLQDSRDSVLFSVADRLRLEEEVEACKARFQHLMKSMENEDKEETVAKMYISELKNIRLRLEEYEQRVVKRIQSLASSRTDRDAWQDNALRIAEQEHTQEDLQQLRSDLDAVSMKCDSFLHQSPSSSSVPTLRSELNLLVEKMDHVYGLSTVYLNKLKTVDVIVRSIQDAELLVKGYEIKLSQEEVVLADLSALEAHWSTLRHWLSDVKDKNSVFSVLDEEIAKAKVVAEQMSRLTPERNLDLERYQEKGSQLQERWHRVIAQLEIRQSELESIQEVLGDYRACHGTLIKWIEETTAQQEMMKPGQAEDSRVLSEQLSQQTALFAEIERNQTKLDQCQKFSQQYSTIVKDYELQLMTYKAFVESQQKSPGKRRRMLSSSDAITQEFMDLRTRYTALVTLTTQHVKYISDALRRLEEEEKVVEEEKQEHVEKVKELLGWVSTLARNTQGKATSSETKESTDIEKAILEQQVLSEELTTKKEQVSEAIKTSQIFLAKHGHKLSEKEKKQISEQLNALNKAYHDLCDGSANQLQQLQSQLAHQTEQKECRAVAGVIDLGTVEIFPIFKAMQKGLLDQDTGLVLLESQVIMSGLIAPETGENLSLEEGIARNLINPQMYQQLRELQDALALISRLTESRGPLSVVEAIEKRIISETVGLKILEAHLATGGFSLSPSENCINLEEAFHQGLISAWLHSVLESYLRTSKNLIDPNTAEKIGLLDLMQRCIVHQESGFKLLPVKQLAGGMVSLKSGRKVSIFRAVQEGLIDRQVTVRLLEAQLFAGGIVDPRTGHRLTVEEAVRHNLIDQDMACAILIRQLQTGGIIDTVTGQRLTIDEAVSNDLVAAKIALVILESLWSFMGLLWPESGEILPITDALEQGIVSTELAHKILSNRQHIKALFLPATTEILSWKKAIESGILDRDLANNLKSICIPDVMPHMQLADSAEQNINPGAAVLPCSKSHPKATASQSENLLFQLMTHSYINVQNGQRLLLLDKELMETLTSRDEYQTSPPKVVEIGHQRQKTPEGLQESANVKISGTFSSGWTVRLPEFQFSSQNKEYPDREDCTTEKGKKTTVETEDSSVENPEQDLFVEQKERNPNIDALKVINKVKLEVQRQLIGTQREDQTAVSVRENASRGHLLTIPPAEAEGVPLVVDKDVFSVETPKKEHQPLRNTSFTCQNEQAHTLETEYIHDETGGSHIKPQSKKLQVQVKKTLGIKLELKSETDGNVHPLDKKEMLKKTFLAKDDHKESQEAQNIAGGSMMMSEKTDEEDSGREIFLSCSHPLELLEEATLNVLSAQLLDGGIFHEQTGQKLLLNEAISRGIVPSHTAVKLMEKLNMFQGFFDSQTCESLTTEEVINEGLMDEKLLHNVLMADKAISGVLDPRTQTLCSVKDAVTVGLLDKETATRILERQVVTGGIIDLKRGKKVSVTLASTLGLVDVADQPELINLEKASKGRDAEKTVRERLISLQMETTGLIDPDSKAPLTVVQSIDRGLLEREEAVRLLTKQVVDGGIIHHISGMRLSVDNAFRHGLIGEDLAEKLKRVENLNIHQIFNPETKENISLPKAIKLDLITSDLKREIQEVQAFTGNFVDLISGQRLTLAEAKKEGLLTNEAVLSPGMMHGIVDPENCRIVPYSELVKKCKIDIESGQRYLEVIPFSDIKDGVSDKVLTLSQAIQLGKVDFASTLKVLEAQANTGGIIDTATGKRLTLASALEEKLVDENMVRIIASHQVLNGGIVDIFSDQRVTLVEAIEKRLISPELANMIQIDSSEFSDHRAQIEKQEGIEVCALQNEFLGKDMLIACNQTAEMSCNKVEESERLFQVENQSAQEKVKVRVSDGEQAKKSREISLKEFGCKDQRKPRMSSDAKEFISIINPHNLKGKSLGQVSLTHPYSECDFKLKEVARNNMGNDTNEEQEKAVTKIEIISHMKQSTSCLDSEEIRENQGEVILEVQETYCETSGKLPSEQVLQQPMNARVKSKREKREVIVEESIRTCKPAFLSEEKLYQETAIRDEHDSHIKSQPREMTSSEKGKEADTEMGFSITFKIEESSSQVVPQGISVKHLDALTLFSSKQANEGKVNNLSLCLTLKPEENLSREIACGAQSEPFPCMTPRPEGLHYQESDGKAQVTGPSQISKTDKSFQGTTRQETNYQDSWVTSKTKETKHQISSSNECKEKSYQEVSFDPARGLKLEEITVSRPDSKEVRYLEFSDRKDLHHQGSKSDDKLCGTLKSEIATQELTGEKFLEMANPNVAGLEAGSIEDIVTQRGSRVLGSFLPEKLFKGVSQKENTGQQNAIISPTVLETSEEKTVSLTVCSAVKTEKTPQEKLRESPGSEQTPFMTAPEGKGNGGVNPEPFRATQNVFTRQLCLEHDEKLVSYLSLLRNIEMRTKQIQPLELNLAELQDLLCQAKVLERELKDLTTLVSQELECVNQIIISQPQEVPAQLLKALEKDAKNLQKSLSSVSDTWNSRLLHFQNAVEIEKTKVLNQHTQLEGRLQDLRAWVGNKNLILNSKGSNSEIDVDSLNLCLQQYEDLKQPMAERKAQLDALAFDIQFFISEHAQDLSPQQNRQMLRLLNELQRSFQDILEQTAAQVDALQGHLQQMEQEALVKTLQKQQNTCHQQLEDLCSWVGQAERALAGHQGRTTQQDLSALQKNQSDLKDLQDDIQNRATSFATVVKDIEGFMEENQTKLSPRELTALREKLHQAKEQYEALQEETRVAQKELEEAVTSALQQETEKSKAAKELAENKKKIDALLDWVTSVGSSGGQLLTNLPGMEQLSGASLEKGALDTTDGYMGVNQAPEKLDKQCEMMKARHQELLSQQQNFILATQSAQAFLDQHGHNLTPEEQQMLQQKLGELKEQYSTSLAQSEAELKQVQTLQDELQKFLQDHKEFESWLERSEKELENMHKGGSSPETLPSLLKRQGSFSEDVISHKGDLRFVTISGQKVLDMENSFKEGKEPSEIGNLVKDKLKDATERYTALHSKCTRLGSHLNMLLGQYHQFQNSADSLQAWMQACEANVEKLLSDTVASDPGVLQEQLATTKQLQEELAEHQVPVEKLQKVARDIMEIEGEPAPDHRHVQETTDSILSHFQSLSYSLAERSSLLQKAIAQSQSVQESLESLLQSIGEVEQNLEGKQVSSLSSGVIQEALATNMKLKQDIARQKSSLEATREMVTRFMETADSTTAAVLQGKLAEVSQRFEQLCLQQQEKESSLKKLLPQAEMFEHLSGKLQQFMENKSRMLASGNQPDQDITHFFQQIQELNLEMEDQQENLDTLEHLVTELSSCGFALDLCQHQDRVQNLRKDFTELQKTVKEREKDASSCQEQLDEFRKLVRTFQKWLKETEGSIPPTETSMSAKELEKQIEHLKSLLDDWASKGTLVEEINCKGTSLENLIMEITAPDSQGKTGSILPSVGSSVGSVNGYHTCKDLTEIQCDMSDVNLKYEKLGGVLHERQESLQAILNRMEEVHKEANSVLQWLESKEEVLKSMDAMSSPTKTETVKAQAESNKAFLAELEQNSPKIQKVKEALAGLLVTYPNSQEAENWKKIQEELNSRWERATEVTVARQRQLEESASHLACFQAAESQLRPWLMEKELMMGVLGPLSIDPNMLNAQKQQVQFMLKEFEARRQQHEQLNEAAQGILTGPGDVSLSTSQVQKELQSINQKWVELTDKLNSRSSQIDQAIVKSTQYQELLQDLSEKVRAVGQRLSVQSAISTQPEAVKQQLEETSEIRSDLEQLDHEVKEAQTLCDELSVLIGEQYLKDELKKRLETVALPLQGLEDLAADRINRLQAALASTQQFQQMFDELRTWLDDKQSQQAKNCPISAKLERLQSQLQENEEFQKSLNQHSGSYEVIVAEGESLLLSVPPGEEKRTLQNQLVELKNHWEELSKKTADRQSRLKDCMQKAQKYQWHVEDLVPWIEDCKAKMSELRVTLDPVQLESSLLRSKAMLNEVEKRRSLLEILNSAADILINSSEADEDGIRDEKAGINQNMDAVTEELQAKTGSLEEMTQRLREFQESFKNIEKKVEGAKHQLEIFDALGSQACSNKNLEKLRAQQEVLQALEPQVDYLRNFTQGLVEDAPDGSDASQLLHQAEVAQQEFLEVKQRVNSGCVMMENKLEGIGQFHCRVREMFSQLADLDDELDGMGAIGRDTDSLQSQIEDVRLFLNKIHVLKLDIEASEAECRHMLEEEGTLDLLGLKRELEALNKQCGKLTERGKARQEQLELTLGRVEDFYRKLKGLNDATTAAEEAEALQWVVGTEVEIINQQLADFKMFQKEQVDPLQMKLQQVNGLGQGLIQSAGKDCDVQGLEHDMEEINARWNTLNKKVAQRIAQLQEALLHCGKFQDALEPLLSWLADTEELIANQKPPSAEYKVVKAQIQEQKLLQRLLDDRKATVDMLQAEGGRIAQSAELADREKITGQLESLESRWTELLSKAAARQKQLEDILVLAKQFHETAEPISDFLSVTEKKLANSEPVGTQTAKIQQQIIRHKALEEDIENHATDVHQAVKIGQSLSSLTSPAEQGVLSEKIDSLQARYSEIQDRCCRKAALLDQALSNARLFGEDEVEVLNWLAEVEDKLSSVFVKDFKQDVLHRQHADHLALNEEIVNRKKNVDQAIKNGQALLKQTTGEEVLLIQEKLDGIKTRYADITVTSSKALRTLEQARQLATKFQSTYEELTGWLREVEEELATSGGQSPTGEQIPQFQQRQKELKKEVMEHRLVLDTVNEVSRALLELVPWRAREGLDKLVSDANEQYKLVSDTIGQRVDEIDAAIQRSQQYEQAADAELAWVAETKRKLMALGPIRLEQDQTTAQLQVQKAFSIDIIRHKDSMDELFSHRSEIFGTCGEEQKTVLQEKTESLIQQYEAISLLNSERYARLERAQVLVNQFWETYEELSPWIEETRALIAQLPSPAIDHEQLRQQQEEMRQLRESIAEHKPHIDKLLKIGPQLKELNPEEGEMVEEKYQKAENMYAQIKEEVRQRALALDEAVSQSTQFHDKIEPMLETLENLSSRLRMPPLIPAEVDKIRECISDNKSATVELEKLQPSFEALKRRGEELIGRSQGADKDLAAKEIQDKLDQMVFFWEDIKARAEEREIKFLDVLELAEKFWYDMAALLTTIKDTQDIVHDLESPGIDPSIIKQQVEAAETIKEETDGLHEELEFIRILGADLIFACGETEKPEVRKSIDEMNNAWENLNKTWKERLEKLEDAMQAAVQYQDTLQAMFDWLDNTVIKLCTMPPVGTDLNTVKDQLNEMKEFKVEVYQQQIEMEKLNHQGELMLKKATDETDRDIIREPLTELKHLWENLGEKIAHRQHKLEGALLALGQFQHALEELMSWLTHTEELLDAQRPISGDPKVIEVELAKHHVLKNDVLAHQATVETVNKAGNELLESSAGDDASSLRSRLEAMNQCWESVLQKTEEREQQLQSTLQQAQGFHSEIEDFLLELTRMESQLSASKPTGGLPETAREQLDTHMELYSQLKAKEETYNQLLDKGRLMLLSRDDSGSGSKTEQSVALLEQKWHVVSSKMEERKSKLEEALNLATEFQNSLQEFINWLTLAEQSLNIASPPSLILNTVLSQIEEHKVFANEVNAHRDQIIELDQTGNQLKFLSQKQDVVLIKNLLVSVQSRWEKVVQRSIERGRSLDDARKRAKQFHEAWKKLIDWLEDAESHLDSELEISNDPDKIKLQLSKHKEFQKTLGGKQPVYDTTIRTGRALKEKTLLPEDSQKLDNFLGEVRDKWDTVCGKSVERQHKLEEALLFSGQFMDALQALVDWLYKVEPQLAEDQPVHGDLDLVMNLMDAHKVFQKELGKRTGTVQVLKRSGRELIENSRDDTTWVKGQLQELSTRWDTVCKLSVSKQSRLEQALKQAEVFRDTVHMLLEWLSEAEQTLRFRGALPDDTEALQSLIDTHKEFMKKVEEKRVDVNSAVAMGEVILAVCHPDCITTIKHWITIIRARFEEVLTWAKQHQQRLETALSELVANAELLEELLAWIQWAETTLIQRDQEPIPQNIDRVKALIAEHQTFMEEMTRKQPDVDRVTKTYKRKNIEPTHAPFIEKSRSGGRKSLSQPTPPPMPILSQSEAKNPRINQLSARWQQVWLLALERQRKLNDALDRLEELKEFANFDFDVWRKKYMRWMNHKKSRVMDFFRRIDKDQDGKITRQEFIDGILASKFPTTKLEMTAVADIFDRDGDGYIDYYEFVAALHPNKDAYRPTTDADKIEDEVTRQVAQCKCAKRFQVEQIGENKYRFFLGNQFGDSQQLRLVRILRSTVMVRVGGGWMALDEFLVKNDPCRVHHPGSKIKRSDSSSSISSQSPIARGRTNIELREKFILPEGASQGMTPFRSRGRRSKPSSRAASPTRSSSSASQSNHSCTSMPSSPATPASGTKTSLQFSRCYDKPWLVNSKAGTPIRDSHSPDLQLPTPEVIPSSGSKLKRPTPTFHSSRTSLAGDTSNSSSPASTGAKTNRADPKKSASRPGSRAGSRAGSRASSRRGSDASDFDLLETQSACSDTSESSAAGGQGNSRRGLNKPSKIPTMSKKTTTASPRTPGPKR

SEQ ID NO: 1197 - protein, 149 aa, Homo sapiens
EVSLAQDPKRQQRKLKGNKISISGTKQEIFQVELNLQNASSDHQGNDKTYHCKGLLPPPEKLTAEVLGIICIVLMATVLKTIVLIPCIGVLEQNNFSLNRRMQKARHCGHCPEEWITYSNSCYYIGKERRTWEERVCWPVLRRTLICFL

SEQ ID NO: 1198 - protein, 545 aa, Homo sapiens
MVPSSPAVEKQVPVEPGPDPELRSWRHLVCYLCFYGFMAQIRPGESFITPYLLGPDKNFTREQVTNEITPVLSYSYLAVLVPVFLLTDYLRYTPVLLLQGLSFVSVWLLLLLGHSVAHMQLMELFYSVTMAARIAYSSYIFSLVRPARYQRVAGYSRAAVLLGVFTSSVLGQLLVTVGRVSFSTLNYISLAFLTFSVVLALFLKRPKRSLFFNRDDRGRCETSASELERMNPGPGGKLGHALRVACGDSVLARMLRELGDSLRRPQLRLWSLWWVFNSAGYYLVVYYVHILWNEVDPTTNSARVYNGAADAASTLLGAITSFAAGFVKIRWARWSKLLIAGVTATQAGLVFLLAHTRHPSSIWLCYAAFVLFRGSYQFLVPIATFQIASSLSKELCALVFGVNTFFATIVKTIITFIVSDVRGLGLPVRKQALRMSRPRLGLCLPGPFPPQSAAPARAGMAASSAEDPGSERGPWRRAGTVAARGDPGGERGPWRREGTLAARGDPGGERGPWWREGTLAVRGDPGGERGPWRREGTLVVKGARG

SEQ ID NO: 1199 - protein, 638 aa, Homo sapiens
MVLYTTPFPNSCLSALHCVSWALIFPCYWLVDRLAASFIPTTYEKRQRADDPCCLQLLCTALFTPIYLALLVASLPFAFLGFLFWSPLQSARRPYIYSRLEDKGLAGGAALLSEWKGTGPGKSFCFATANVCLLPDSLARVNNLFNTQARAKEIGQRIRNGAARPQIKIYIDSPTNTSISAASFSSLVSPQGGDGVARAVPGSIKRTASVEYKGDGGRHPGDEAANGPASGDPVDSSSPEDACIVRIGGEEGGRPPEADDPVPGGQARNGAGGGPRGQTPNHNQQDGDSGSLGSPSASRESLVKGRAGPDTSASGEPGANSKLLYKASVVKKAAARRRRHPDEAFDHEVSAFFPANLDFLCLQEVFDKRAATKLKEQLHGYFEYILYDVGVYGCQGCCSFKCLNSGLLFASRYPIMDVAYHCYPNKCNDDALASKGALFLKVQVGSTPQDQRIVGYIACTHLHAPQEDSAIRCGQLDLLQDWLADFRKSTSSSSAANPEELVAFDVVCGDFNFDNCSSDDKLEQQHSLFTHYRDPCRLGPGEEKPWAIGTLLDTNGLYDEDVCTPDNLQNKSSGQKGRKELLKGNGRRIDYMLHAEEGLCPDWKAEVEEFSFITQLSGLTDHLPVAMRLMVSSGEEEA

SEQ ID NO: 1200 - protein, 339 aa, Homo sapiens
MSASAATGVFVLSLSAIPVTYVFNHLAAQHDSWTIVGVAALILFLVALLARVLVKRKPPRDPLFYVYAVFGFTSVVNLIIGLEQDGIIDGFMTHYLREGEPYLNTAYGHMICYWDGSAHYLMYLVMVAAIAWEETYRTIGLYWVGSIIMSVVVFVPGNIVGKYGTRICPAFFLSIPYTCLPVWAGFRIYNQPSENYNYPSKVIQEAQAKDLLRRPFDLMLVVCLLLATGFCLFRGLMLAYMFYSVPYFVTALYGLVVPGCSWMPDITLIHAGGLAQAQFSHIGASLHARTAYVYRVPEEAKILFLALNIAYGVLPQLLAYRCIYKPEFFIKTKAEEKVE

SEQ ID NO: 1201 - protein, 1083 aa, Homo sapiens
PYKPQWCRSREAWALYLFSPQNRFRVSCQKVITHKMFDHVVLVFIFLNCVTIALERPDIDPGSTERVFLSVSNYIFTAIFVAEMMVKVVALGLLSGEHAYLQSSWNLLDGLLVLVSLVDIVVAMASAGGAKILGVLRVLRLLRTLRPLRVISRAPGLKLVVETLISSLRPIGNIVLICCAFFIIFGILGVQLFKGKFYYCEGPDTRNISTKAQCRAAHYRWVRRKYNFDNLGQALMSLFVLSSKDGWVNIMYDGLDAVGVDQQPVQNHNPWMLLYFISFLLIVSFFVLNMFVGVVVENFHKCRQHQEAEEARRREEKRLRRLERRRRSTFPSPEAQRRPYYADYSPTRRSIHSLCTSHYLDLFITFIICVNVITMSMEHYNQPKSLDEALKYCNYVFTIVFVFEAALKLVAFGFRRFFKDRWNQLDLAIVLLSLMGITLEEIEMSAALPINPTIIRIMRVLRIARVLKLLKMATGMRALLDTVVQALPQVGNLGLLFMLLFFIYAALGVELFGRLECSEDNPCEGLSRHATFSNFGMAFLTLFRVSTGDNWNGIMKDTLRECSREDKHCLSYLPALSPVYFVTFVLVAQFVLVNVVVAVLMKHLEESNKEAREDAELDAEIELEMAQGPGSARRVDADRPPLPQESPGARDAPNLVARKVSVSRMLSLPNDSYMFRPVVPASAPHPRPLQEVEMETYGAGTPLESCASLQIPLAVSSPARSGEPLHALSPRGTARSPSLSRLLCRQEAVHTDSLEGKIDSPRDTLDPAEPGEKTPVRPVTQGGSLQSPPRSPRPASVRTRKHTFGQRCVSSRPAAPGGEEAEASDPADEEVSHITSSACPWQPTAEPHGPEASPVAGGERDLRRLYSVDAQGFLDKPGRADEQWRPSAELGSGEPGEAKAWGPEAEPALGARRKKKMSPPCISVEPPAEDEGSARPSAAEGGSTTLRRRTPSCEATPHRDSLEPTEGSGAGGDPAAKGERWGQASCRAEHLTVPSFAFEPLDLGVPSGDPFLDGSHSVTPESRASSSGAIVPLEPPESEPPMPVGDPPEKRRGLYLTVPQCPLEKPGSPSATPAPGGGADDPV

SEQ ID NO: 1202 - protein, 134 aa, Homo sapiens
MAEAHQAVAFQFTVTPDGIDLRLSHEALRQIYLSGLHSWKKKFIRFKNGIITGVYPASPSSWLIVVVGVMTTMYAKIDPSLGIIAKINRTLETANCMSSQTKNVVSGVLFGTGLWVALIVTMRYSLKVLLSYHG

SEQ ID NO: 1203 - protein, 94 aa, Homo sapiens
MGYARKVGWVTAGLVIGAGACYCIYRLTRGRKQNKEKMAEGGSGDVDDAGDCSGARYNDWSDDDDDSNESKSIVWYPPWARIGTEAGTRARARA

SEQ ID NO: 1204 - protein, 57 aa, Homo sapiens
CGVISPRFDVQLKDLEKWQNNLLPSRQFGIYTLQIMRLVPWLKVFSLHGCCITVSLY

SEQ ID NO: 1205 - protein, 562 aa, Homo sapiens
MGCWGQLLVWFGAAGGDASETDNLWADGEDGVSFIHPSSELFLQPLAVTENHGEVEIRRHLNCSHCPLRDCQWQAELQLAECLCPEGMELAVDNVTCMDLHKPPGPLVLMVAVVATSTLSLLMVCGVLILGTKRLAGTVDSRLLLSMKQKKWQGLQEMRLPSPELELSKLRTSAIRTAPNPYYCQVGLGPAQSWPLPPGVTEVSPANVTLLRALGHGAFGEVYEGLVIGLPGDSSPLQVAIKTLPELCSPQDELDFLMEALIISKFRHQNIVRCVGLSLRATPRLILLELMSGGDMKSFLRHSRPHLGQPSPLVMRDLLQLAQDIAQGCHYLEENHFIHRDIAARNCLLSCAGPSRVAKIGDFGMARDIYRASYYRRGDRALLPVKWMPPEAFLEGIFTSKTDSWSFGVLLWEIFSLGYMPYPGRTNQEVLDFVVGGGRMDPPRGCPGPVYRIMTQCWQHEPELRPSFASILERLQYCTQDPDVLNSLLPMELGPTPEEEGTSGLGNRSLECLRPPQPQELSPEKLKSWGGSPLGPWLSSGLKPLKSRGLQPQNLWNPTYRS

SEQ ID NO: 1206 - protein, 206 aa, Homo sapiens
MTMPWGQLGKDGWLGGTHCVACLAPPAGSVLYHLFMCHQGGSAVYARLLALDMCGVCLVNTLGALPIIHCTLACRPWLRPAALVGYTVLSGVAGWRALTAPSTSARLRAFGWQAAARLLVFGARGVGLGSGAPGSLPCYLRMDALALLGGLVNVARLPERWGPGRFDYWGNSHQIMHLLSVGSILQLHAGVVPDLLWAAHHACPRD

SEQ ID NO: 1207 - protein, 199 aa, Homo sapiens
MAFLAGPRLLDWASSPPHLQFNKFVLTGYRPASSGSGCLRSLFYLHNELGNIYTHGALPIIHCTLACRPWLRPAALVGYTVLSGVAGWRALTAPSTSARLRAFGWQAAARLLVFGARGVGLGSGAPGSLPCYLRMDALALLGGLVNVARLPERWGPGRFDYWGNSHQIMHLLSVGSILQLHAGVVPDLLWAAHHACPRD

SEQ ID NO: 1208 - protein, 1399 aa, Homo sapiens
MAGGAWGRLACYLEFLKKEELKEFQLLLANKAHSRSSSGETPAQPEKTSGMEVASYLVAQYGEQRAWDLALHTWEQMGLRSLCAQAQEGAGHSPSFPYSPSEPHLGSPSQPTSTAVLMPWIHELPAGCTQGSERRVLRQLPDTSGRRWREISASLLYQALPSSPDHESPSQESPNAPTSTAVLGSWGSPPQPSLAPREQEAPGTQWPLDETSGIYYTEIREREREKSEKGRPPWAAVVGTPPQAHTSLQPHHHPWEPSVRESLCSTWPWKNEDFNQKFTQLLLLQRPHPRSQDPLVKRSWPDYVEENRGHLIEIRDLFGPGLDTQEPRIVILQGAAGIGKSTLARQVKEAWGRGQLYGDRFQHVFYFSCRELAQSKVVSLAELIGKDGTATPAPIRQILSRPERLLFILDGVDEPGWVLQEPSSELCLHWSQPQPADALLGSLLGKTILPEASFLITARTTALQNLIPSLEQARWVEVLGFSESSRKEYFYRYFTDERQAIRAFRLVKSNKELWALCLVPWVSWLACTCLMQQMKRKEKLTLTSKTTTTLCLHYLAQALQAQPLGPQLRDLCSLAAEGIWQKKTLFSPDDLRKHGLDGAIISTFLKMGILQEHPIPLSYSFIHLCFQEFFAAMSYVLEDEKGRGKHSNCIIDLEKTLEAYGIHGLFGASTTRFLLGLLSDEGEREMENIFHCRLSQGRNLMQWVPSLQLLLQPHSLESLHCLYETRNKTFLTQVMAHFEEMGMCVETDMELLVCTFCIKFSRHVKKLQLIEGRQHRSTWSPTMVVLFRWVPVTDAYWQILFSVLKVTRNLKELDLSGNSLSHSAVKSLCKTLRRPRCLLETLRLAGCGLTAEDCKDLAFGLRANQTLTELDLSFNVLTDAGAKHLCQRLRQPSCKLQRLQLVSCGLTSDCCQDLASVLSASPSLKELDLQQNNLDDVGVRLLCEGLRHPACKLIRLGKPSVMTPTEGLDTGEMSNSTSSLKRQRLGSERAASHVAQANLKLLDVSKIFPIAEIAEESSPEVVPVELLCVPSPASQGDLHTKPLGTDDDFWGPTGPVATEVVDKEKNLYRVHFPVAGSYRWPNTGLCFVMREAVTVEIEFCVWDQFLGEINPQHSWMVAGPLLDIKAEPGAVEAVHLPHFVALQGGHVDTSLFQMAHFKEEGMLLEKPARVELHHIVLENPSFSPLGVLLKMIHNALRFIPVTSVVLLYHRVHPEEVTFHLYLIPSDCSIRKELELCYRSPGEDQLFSEFYVGHLGSGIRLQVKDKKDETLVWEALVKPGDLMPATTLIPPARIAVPSPLDAPQLLHFVDQYREQLIARVTSVEVVLDKLHGQVLSQEQYERVLAENTRPSQMRKLFSLSQSWDRKCKDGLYQALKETHPHLIMELWEKGSKKGLLPLSS

SEQ ID NO: 1209 - protein, 1473 aa, Homo sapiens
MAGGAWGRLACYLEFLKKEELKEFQLLLANKAHSRSSSGETPAQPEKTSGMEVASYLVAQYGEQRAWDLALHTWEQMGLRSLCAQAQEGAGHSPSFPYSPSEPHLGSPSQPTSTAVLMPWIHELPAGCTQGSERRVLRQLPDTSGRRWREISASLLYQALPSSPDHESPSQESPNAPTSTAVLGSWGSPPQPSLAPREQEAPGTQWPLDETSGIYYTEIREREREKSEKGRPPWAAVVGTPPQAHTSLQPHHHPWEPSVRESLCSTWPWKNEDFNQKFTQLLLLQRPHPRSQDPLVKRSWPDYVEENRGHLIEIRDLFGPGLDTQEPRIVILQGAAGIGKSTLARQVKEAWGRGQLYGDRFQHVFYFSCRELAQSKVVSLAELIGKDGTATPAPIRQILSRPERLLFILDGVDEPGWVLQEPSSELCLHWSQPQPADALLGSLLGKTILPEASFLITARTTALQNLIPSLEQARWVEVLGFSESSRKEYFYRYFTDERQAIRAFRLVKSNKELWALCLVPWVSWLACTCLMQQMKRKEKLTLTSKTTTTLCLHYLAQALQAQPLGPQLRDLCSLAAEGIWQKKTLFSPDDLRKHGLDGAIISTFLKMGILQEHPIPLSYSFIHLCFQEFFAAMSYVLEDEKGRGKHSNCIIDLEKTLEAYGIHGLFGASTTRFLLGLLSDEGEREMENIFHCRLSQGRNLMQWVPSLQLLLQPHSLESLHCLYETRNKTFLTQVMAHFEEMGMCVETDMELLVCTFCIKFSRHVKKLQLIEGRQHRSTWSPTMVVLFRWVPVTDAYWQILFSVLKVTRNLKELDLSGNSLSHSAVKSLCKTLRRPRCLLETLRLAGCGLTAEDCKDLAFGLRANQTLTELDLSFNVLTDAGAKHLCQRLRQPSCKLQRLQLVSCGLTSDCCQDLASVLSASPSLKELDLQQNNLDDVGVRLLCEGLRHPACKLIRLGLDQTTLSDEMRQELRALEQEKPQLLIFSRRKPSVMTPTEGLDTGEMSNSTSSLKRQRLGSERAASHVAQANLKLLDVSKIFPIAEIAEESSPEVVPVELLCVPSPASQGDLHTKPLGTDDDFWGPTGPVATEVVDKEKNLYRVHFPVAGSYRWPNTGLCFVMREAVTVEIEFCVWDQFLGEINPQHSWMVAGPLLDIKAEPGAVEAVHLPHFVALQGGHVDTSLFQMAHFKEEGMLLEKPARVELHHIVLENPSFSPLGVLLKMIHNALRFIPVTSVVLLYHRVHPEEVTFHLYLIPSDCSIRKAIDDLEMKFQFVRIHKPPPLTPLYMGCRYTVSGSGSGMLEILPKELELCYRSPGEDQLFSEFYVGHLGSGIRLQVKDKKDETLVWEALVKPGDLMPATTLIPPARIAVPSPLDAPQLLHFVDQYREQLIARVTSVEVVLDKLHGQVLSQEQYERVLAENTRPSQMRKLFSLSQSWDRKCKDGLYQALKETHPHLIMELWEKGSKKGLLPLSS

SEQ ID NO: 1210 - protein, 447 aa, Homo sapiens
MTPQPAGPPDGGWGWVVAAAAFAINGLSYGLLRSLGLAFPDLAEHFDRSAQDTAWISALALAVQQAASPVGSALSTRWGARPVVMVGGVLASLGFVFSAFASDLLHLYLGLGLLAGFGWALVFAPALGTLSRYFSRRRVLAVGLALTGNGASSLLLAPALQLLLDTFGWRGALLLLGAITLHLTPCGALLLPLVLPGDPPAPPRSPLAALGLSLFTRRAFSIFALGTALVGGGYFVPYVHLAPHALDRGLGGYGAALVVAVAAMGDAGARLVCGWLADQGWVPLPRLLAVFGALTGLGLWVVGLVPVVGGEESWGGPLLAAAVAYGLSAGSYAPLVFGVLPGLVGVGGVVQATGLVMMLMSLGGLLGPPLSGFLRDETGDFTASFLLSGSLILSGSFIYIGLPRALPSCGPASPPATPPPETGELLPAPQAVLLSPGGPGSTLDTTC

SEQ ID NO: 1211 - protein, 117 aa, Homo sapiens
ATLKGNLSFDWYIKTSHNHLLIVSTAEILFNDSVFTLLPGQGAFVRSQTETKVEPFEVPNPLPLIVGSSVGGLLLLALITAALYKVLPAAPPPPPFILSGLALQLRASVSPAGLPAV

SEQ ID NO: 1212 - protein, 103 aa, Homo sapiens
MSSMARAAFSEDGALMDGGMDLNMEQGMAEHLKDVILLTAIVQVLSCFSLYVWSFWLLAPGRALYLLWVNVLGPWFTADSGTPAPEHNEKRQRRQERRQMKRL

SEQ ID NO: 1213 - protein, 85 aa, Homo sapiens
MTQNKLKLCSKANVYTEVPDGGWGWAVAVSFFFVEVFTYGIIKTFGVFFNDLMDSFNESNSRISWIISICVFVLTFSAPLATVLS

SEQ ID NO: 1214 - protein, 304 aa, Homo sapiens
FLAPSPHMELLASCPRSRLSPWGGWAPPPSHSRDLRPLPQDDGWEGACGVCLSMEGGAAAATPTALPYYVAFSQLLGLTLVAMTGAWLGLYRGGIAWESDLQFNAHPLCMVIGLIFLQGNALLVYRVFRNEAKRTTKVLHGLLHIFALVIALVGLVAVFDYHRKKGYADLYSLHSWCGILVFVLYFVQWLVGFSFFLFPGASFSLRSRYRPQHIFFGATIFLLSVGTALLGLKEALLFNLGGKYSAFEPEGVLANVLGLLLACFGGAVLYILTRADWKRPSQAEEQALSMDFKTLTEGDSPGSQ

SEQ ID NO: 1215 - protein, 169 aa, Homo sapiens
MCVQPEFHCGDPCCTTCRHHPCPPGQGVQSQGKFSFGFQCIDCASGTFSGGHEGHCKPWTDCTQFGFLTVFPGNKTHNAVCVPGSPPAEPLGWLTVVLLAVAACVLLLTSAQLGLHIWQLRSQCMWPRETQLLLEVPPSTEDARSCQFPEEERGERSAEEKGRLGDLWV

SEQ ID NO: 1216 - protein, 92 aa, Homo sapiens
MGAPATRRCVEWLLGLYFLSHIPITLFMDLQAVLPRELYPVEFRNLLKWYAKEFKDPLLQEPPAWFKSFLFCELVFQLPFFPIATYAFLKGW

SEQ ID NO: 1217 - protein, 219 aa, Homo sapiens
MGGAVVDEGPTGVKAPDGGWGWAVLFGCFVITGFSYAFPKAVSVFFKELIQEFGIGYSDTAWISSILLAMLYGTGPLCSVCVNRFGCRPVMLVGGLFASLGMVAASFCRSIIQVYLTTGVITGLGLALNFQPSLIMLNRYFSKRRPMANGLAAAGSPVFLCALSPLGQLLQDRYGWRGGFLILGGLLLNCCVCAALMRPLVVTAQPGSGPPRPSRRLLD

SEQ ID NO: 1218 - protein, 118 aa, Homo sapiens
GVAAGPLLPQPHPHHPVHGPAGGAAARALPSRGSCKWIRTPAIIYSVHTMTTLIPILSTFLFEDFSKASGFKGQRPETLHERLTLVSVYAPYLLIPFILLIFMLRSPYYKYEEKRKKK

SEQ ID NO: 1219 - protein, 306 aa, Homo sapiens
LIMLNRYFSKRRPMANGLAAAGSPVFLCALSPLGQLLQDRYGWRGGFLILGGLLLNCCVCAALMRPLVVTAQPGSGPPRPSRRLLDLSVFRDRGFVLYAVAASVMVLGLFVPPVFVVSYAKDLGVPDTKAAFLLTILGFIDIFARPAAGFVAGLGKVRPYSVYLFSFSMFFNGLADLAGSTAGDYGGLVVFCIFFGISYGMVGALQFEVLMAIVGTHKFSSAIGLVLLMEAVAVLVGPPSGGVLLSPRLEGSGTITAPCSLNLPNSSHPPASASRVAETTDVSHCTWPVSFSSLPPKCLSRNHPFC

SEQ ID NO: 1220 - protein, 157 aa, Homo sapiens
MGGAVVDEGPTGVKAVSVFFKELIQEFGIGYSDTAWISSILLAMLYGTGPLCSVCVNRFGCRPVMLVGGLFASLGMVAASFCRSIIQVYLTTGVITGLGLALNFQPSLIMLNRYFSKRRPMANGLAAAGSPVFLCALSPLGQLLQDRYGWRGGFLIL

SEQ ID NO: 1221 - protein, 178 aa, Homo sapiens
MQTCPLAFPGHVSQALGTLLFLAASLSAQNEGWDSPICTEGVVSVSWGENTVMSCNISNAFSHVNIKLRAHGQESAIFNEVAPGYFSRDGWQLQVQGGVAQLVIKGARDSHAGLYMWHLVGHQRNNRQVTLEVSGAEPQSAPDTGFWPVPAVVTAVFILLVALVMFAWYRCRCSQQRR

SEQ ID NO: 1222 - protein, 169 aa, Homo sapiens
MTPASITAAKTSTITTAFPPVSSTTLFAVGATHSASIQEETEEVVNSQLPLLLSLLALLLLLLVGASLLAWRMFQKWIKAGDHSELSQNPKQAATQSELHYANLELLMWPLQEKPAPPREVEVEYSTVASPREELHYASVVFDSNTNRIAAQRPREEEPDSDYSVIRKT

SEQ ID NO: 1223 - protein, 1465 aa, Homo sapiens
MRGLGTCLATLAGLLLTAAGETFSGGCLFDEPYSTCGYSQSEGDDFNWEQVNTLTKPTSDPWMPSGSFMLVNASGRPEGQRAHLLLPQLKENDTHCIDFHYFVSSKSNSPPGLLNVYVKVNNGPLGNPIWNISGDPTRTWNRAELAISTFWPNFYQVIFEVITSGHQGYLAIDEVKVLGHPCTRTPHFLRIQNVEVNAGQFATFQCSAIGRTVAGDRLWLQGIDVRDAPLKEIKVTSSRRFIASFNVVNTTKRDAGKYRCMIRTEGGVGISNYAELVVKEPPVPIAPPQLASVGATYLWIQLNANSINGDGPIVAREVEYCTASGSWNDRQPVDSTSYKIGHLDPDTEYEISVLLTRPGEGGTGSPGPALRTRTKCADPMRGPRKLEVVEVKSRQITIRWEPFGYNVTRCHSYNLTVHYCYQVGGQEQVREEVSWDTENSHPQHTITNLSPYTNVSVKLILMNPEGRKESQELIVQTDEDLPGAVPTESIQGSTFEEKIFLQWREPTQTYGVITLYEITYKAVSSFDPEIDLSNQSGRVSKLGNETHFLFFGLYPGTTYSFTIRASTAKGFGPPATNQFTTKISAPSMPAYELETPLNQTDNTVTVMLKPAHSRGAPVSVYQIVVEEERPRRTKKTTEILKCYPVPIHFQNASLLNSQYYFAAEFPADSLQAAQPFTIGDNKTYNGYWNTPLLPYKSYRIYFQAASRANGETKIDCVQVATKGAATPKPVPEPEKQTDHTVKIAGVIAGILLFVIIFLGVVLVMKKRKLAKKRKETMSSTRQEMTVMVNSMDKSYAEQGTNCDEAFSFMDTHNLNGRSVSSPSSFTMKTNTLSTSVPNSYYPDPFVPTAILVPINDETHTMASDTSSLVQSHTYKKREPADVPYQTGQLHPAIRVADLLQHITQMKCAEGYGFKEEYESFFEGQSAPWDSAKKDENRMKNRYGNIIAYDHSRVRLQTIEGDTNSDYINGNYIDGYHRPNHYIATQGPMQETIYDFWRMVWHENTASIIMVTNLVEVGRVKCCKYWPDDTEIYKDIKVTLIETELLAEYVIRTFAVEKRGVHEIREIRQFHFTGWPDHGVPYHATGLLGFVRQVKSKSPPSAGPLVVHCSAGAGRTGCFIVIDIMLDMAEREGVVDIYNCVRELRSRRVNMVQTEEQYVFIHDAILEACLCGDTSVPASQVRSLYYDMNKLDPQTNSSQIKEEFRTLNMVTPTLRVEDCSIALLPRNHEKNRCMDILPPDRCLPFLITIDGESSNYINAALMDSYKQPSAFIVTQHPLPNTVKDFWRLVLDYHCTSVVMLNDVDPAQLCPQYWPENGVHRHGPIQVEFVSADLEEDIISRIFRIYNAARPQDGYRMVQQFQFLGWPMYRDTPVSKRSFLKLIRQVDKWQEEYNGGEGRTVVHCLNGGGRSGTFCAISIVCEMLRHQRTVDVFHAVKTLRNNKPNMVDLLDQYKFCYEVALEYLNSG

SEQ ID NO: 1224 - protein, 136 aa, Homo sapiens
MQRLAMDLRMLSRELSLYLEHQVRVGFFGSGVGLSLILGFSVAYAFYYLSSIAKKRTTRRSGAGRVEDRPCLDLSSLRSPRCSTGMNLLKLQMEDRFHWTGLIMITVRVIWMPAPDLLSYCCLASREQARSHISFI

SEQ ID NO: 1225 - protein, 135 aa, Homo sapiens
MGGAVVDEGPTGVKAPDGGWGWAVLFGCFVITGFSYAFPKAVSVFFKELIQEFGIGYSDTAWISSILLAMLYGTGPLCSVCVNRFGCRPVMLVGGLFASLGMVAASFCRSIIQVYLTTGVITGLGLALNFQPSLI

SEQ ID NO: 1226 - protein, 235 aa, Homo sapiens
MGGAVVDEGPTGVKAPDGGWGWAVLFGCFVITGFSYAFPKAVSVFFKELIQEFGIGYSDTAWISSILLAMLYGTGPLCSVCVNRFGCRPVMLVGGLFASLGMVAASFCRSIIQVYLTTGVITGLGLALNFQPSLIMLNRYFSKRRPMANGLAAAGSPVFLCALSPLGQLLQDRYGWRGGFLILGGLLLNCCVCAALMRPLVVTAQPGSGPPRPSRRLLDLSVFRDRGFVLYAVAA

SEQ ID NO: 1227 - protein, 263 aa, Homo sapiens
MGGAVVDEGPTGVKAPDGGWGWAVLFGCFVITGFSYAFPKAVSVFFKELIQEFGIGYSDTAWISSILLAMLYGTGLGLALNFQPSLIMLNRYFSKRRPMANGLAAAGSPVFLCALSPLGQLLQDRYGWRGGFLILGGLLLNCCVCAALMRPLVVTAQPGSGPPRPSRRLLDLSVFRDRGFVLYAVAASVMVLGLFVPPVFVVSYAKDLGVPDTKAAFLLTILGFIDIFARPAAGFVAGLGKVRPYSVYLFSFSMFFNGLADLA

SEQ ID NO: 1228 - protein, 223 aa, Homo sapiens
MGGAVVDEGPTGVKAPDGGWGWAVLFGCFVITGFSYAFPKAVSVFFKELIQEFGIGYSDTAWISSILLAMLYGTGPLCSVCVNRFGCRPVMLVGGLFASLGMVAASFCRSIIQVYLTTGVITGLGLALNFQPSLIMLNRYFSKRRPMANGLAAAGSPVFLCALSPLGQLLQDRYGWRGGFLILGGLLLNCCVCAALMRPLVVTAQPGSGPPRPSRRLLDLSVF

SEQ ID NO: 1229 - protein, 258 aa, Homo sapiens
MSSVCLSMEGGAAAATPTALPYYVAFSQLLGLTLVAMTGAWLGLYRGGIAWESDLQFNAHPLCMVIGLIFLQGNALLVYRVFRNEAKRTTKVLHGLLHIFALVIALVGLVAVFDYHRKKGYADLYSLHSWCGILVFVLYFVQWLVGFSFFLFPGASFSLRSRYRPQHIFFGATIFLLSVGTALLGLKEALLFNLGGKYSAFEPEGVLANVLGLLLACFGGAVLYILTRADWKRPSQAEEQALSMDFKTLTEGDSPGSQ

SEQ ID NO: 1230 - protein, 79 aa, Homo sapiens
MGGAVVDEGPTGVKAPDGGWGWAVLFGCFVITGFSYAFPKPVLPWAHMGPVPTPLECLGDSSFHPWKMEINLRVGGVLG

SEQ ID NO: 1231 - protein, 121 aa, Homo sapiens
SDIPILFSLQRVLLILGLFFTGLLPFVPIREQFFEIPMPSIILKLKEPHTMSRSQKFLIWLSDLLLMRKALFDHLTARGIQVYIWVLNEEQEYKRAFDLGATGVMTDYPTKLRDFLHNFSA

SEQ ID NO: 1232 - protein, 163 aa, Homo sapiens
MGGAVVDEGPTGVKAPDGGWGWAVLFGCFVITGFSYAFPKAVSVFFKELIQEFGIGYSDTAWISSILLAMLYGTGPLCSVCVNRFGCRPVMLVGGLFASLGMVAASFCRSIIQVYLTTGVITGLGLALNFQPSLIMLNRYFSKRRPMANGLAAAGSPVFLCAL

SEQ ID NO: 1233 - protein, 210 aa, Homo sapiens
MEGGAAAATPTALPYYVAFSQLLGLTLVAMTGAWLGLYRGGIAWESDLQFNAHPLCMVIGLIFLQGNALLVYRVFRNEAKRTTKVLHGLLHIFALVIALVGLVAVFDYHRKKGYADLYSLHSWCGILVFVLYFVQWLVGFSFFLFPGASFSLRSRYRPQHIFFGATIFLLSVGTALLGLKEALLFNLGKSGWSQNNYSHPPWCLHITPAP

SEQ ID NO: 1234 - protein, 222 aa, Homo sapiens
MTGAWLGLYRGGIAWESDLQFNAHPLCMVIGLIFLQGNALLVYRVFRNEAKRTTKVLHGLLHIFALVIALVGLVAVFDYHRKKGYADLYSLHSWCGILVFVLYFVQWLVGFSFFLFPGASFSLRSRYRPQHIFFGATIFLLSVGTALLGLKEALLFNLGGKYSAFEPEGVLANVLGLLLACFGGAVLYILTRADWKRPSQAEEQALSMDFKTLTEGDSPGSQ

SEQ ID NO: 1235 - protein, 291 aa, Homo sapiens
MGGAVVDEGPTGVKAPDGGWGWAVLFGCFVITGFSYAFPKAVSVFFKELIQEFGIGYSDTAWISSILLAMLYGTGPLCSVCVNRFGCRPVMLVGGLFASLGMVAASFCRSIIQVYLTTGVITGLGLALNFQPSLIMLNRYFSKRRPMANGLAAAGSPVFLCALSPLGQLLQDRYGWRGGFLILGGLLLNCCVCAALMRPLVVTAQPGSGPPRPSRRLLDLSVFRDRGFVLYAVAASVMVLGLFVPPVFVVSYAKDLGVPDTKAAFLLTILGFIDIFARPAAGFVAGLGKVR

SEQ ID NO: 1236 - protein, 384 aa, Homo sapiens
MAHSFGESYRVGSTSGIHAITVFCSWDYKVTQKRASRLQQDNIRTRLKELLAEWQLRHSPRSVCGRLRQAAVLGLVWLLCLGTALGCAVAVHVFSEFMIQSPEAAGQEAVLLVLPLVVGLLNLGAPYLCRVLAALEPHDSPVLEVYVAICRIISEKKLKRRRKPEFDIARNVLELIYGQTLTWLGVLFSPLLPAVQIIKLLLVFYVKKTSLLANCQAPRRPWLASHMSTVFLTLLCFPAFLGAAVFLCYAVWQVKPSSTCGPFRTLDTMYEAGRVWVRHLEAAGPRVSWLPWVHRYLMENTFFVFLVSALLLAVIYLNIQVVRGQRKVICLLKEQISNEGEDKIFLINKLHSIYERKEREERSRVGTTEEAAAPPALLTDEQDA

SEQ ID NO: 1237 - protein, 75 aa, Homo sapiens
MCNPVSLYLGSPPPAWPWGARPMESGLLRPAPVSEVIVLHYNYTGKLRGARYQPGAGLRADAVVCLAVCAFIVLE

SEQ ID NO: 1238 - protein, 120 aa, Homo sapiens
MIIVCIDQWKNKIWPEIKVPRPDALDNESWGFVHPRLLSVPELCHHVAEVWVSGTIFIRNVLLFKKQNPGKFCLLSCGILTFLAVLGRYVPGLLLSYLMLVTVMMWPLAVYHRLWDRAYV

SEQ ID NO: 1239 - protein, 205 aa, Homo sapiens
MGTGPAQTPRSTRAGPEPSPAPPGPGDTGDSDVTQEGSGPAGIRGGETVIRAGMGDSPGRGAPERRHKAQPGRARKYEWRPEGPTSMGSLGQREDLQDEDRNSAFTWKVQANNRAYNGQFKEKVILCWQRKKYKTNVIRTAKYNFYSFLPLNLYEQFHRVSNLFFLIIIILQSIPDISTLPWFSLSTPMVCLLFIRATRDLVDDM

SEQ ID NO: 1240 - protein, 87 aa, Homo sapiens
ERDVVCGPSPADLSPGASSVTPPAPAREPGHSPQIISFFLALTSTALLFLLFFLTLRFSVVKRGRKKLLYIFKQHGSSGDTFTILES

SEQ ID NO: 1241 - protein, 298 aa, Homo sapiens
MPWRYALKRIGGQFGSSVLSYFLFLKTLLAFNALLLLLLVAFIMGPQVAFPPALPGPAPVCTGLELLTGAGCFTHTVMYYGHYSNATLNQPCGSPLDGSQCTPRVGGLPYNMPLAYLSTVGVSFFITCITLVYSMAHSFGESYRVGSTSGIHAITVFCSWDYKVTQKRASRLQQDNIRTRLKELLAEWQLRHSPRSVCGRLRQAAVLGLVWLLCLGTALGCAVAVHVFSEFMIQSPEAAGQEAVLLVLPLVVGLLNLGAPYLCRVLAALEPHDSPVLEVYVAICRCVAAHENIIWCWS

SEQ ID NO: 1242 - protein, 1910 aa, Homo sapiens
MAPTWGPGMVSVVGPMGLLVVLLVGGCAAEEPPRFIKEPKDQIGVSGGVASFVCQATGDPKPRVTWNKKGKKVNSQRFETIEFDESAGAVLRIQPLRTPRDENVYECVAQNSVGEITVHAKLTVLREDQLPSGFPNIDMGPQLKVVERTRTATMLCAASGNPDPEITWFKDFLPVDPSASNGRIKQLRSGALQIESSEETDQGKYECVATNSAGVRYSSPANLYVRVRRVAPRFSILPMSHEIMPGGNVNITCVAVGSPMPYVKWMQGAEDLTPEDDMPVGRNVLELTDVKDSANYTCVAMSSLGVIEAVAQITVKSLPKAPGTPMVTENTATSITITWDSGNPDPVSYYVIEYKSKSQDGPYQIKEDITTTRYSIGGLSPNSEYEIWVSAVNSIGQGPPSESVVTRTGEQAPASAPRNVQARMLSATTMIVQWEEPVEPNGLIRGYRVYYTMEPEHPVGNWQKHNVDDSLLTTVGSLLEDETYTVRVLAFTSVGDGPLSDPIQVKTQQGVPGQPMNLRAEARSETSITLSWSPPRQESIIKYELLFREGDHGREVGRTFDPTTSYVVEDLKPNTEYAFRLAARSPQGLGAFTPVVRQRTLQSKPSAPPQDVKCVSVRSTAILVSWRPPPPETHNGALVGYSVRYRPLGSEDPEPKEVNGIPPTTTQILLEALEKWTQYRITTVAHTEVGPGPESSPVVVRTDEDVPSAPPRKVEAEALNATAIRVLWRSPAPGRQHGQIRGYQVHYVRMEGAEARGPPRIKDVMLADAQEMVITNLQPETAYSITVAAYTMKGDGARSKPKVVVTKGAVLGRPTLSVQQTPEGSLLARWEPPAGTAEDQVLGYRLQFGREDSTPLATLEFPPSEDRYTASGVHKGATYVFRLAARSRGGLGEEAAEVLSIPEDTPRGHPQILEAAGNASAGTVLLRWLPPVPAERNGAIVKYTVAVREAGALGPARETELPAAAEPGAENALTLQGLKPDTAYDLQVRAHTRRGPGPFSPPVRYRTFLRDQVSPKNFKVKMIMKTSVLLSWEFPDNYNSPTPYKIQYNGLTLDVDGRTTKKLITHLKPHTFYNFVLTNRGSSLGGLQQTVTAWTAFNLLNGKPSVAPKPDADGFIMVYLPDGQSPVPVQSYFIVMVPLRKSRGGQFLTPLGSPEDMDLEELIQDISRLQRRSLRHSRQLEVPRPYIAARFSVLPPTFHPGDQKQYGGFDNRGLEPGHRYVLFVLAVLQKSEPTFAASPFSDPFQLDNPDPQPIVDGEEGLIWVIGPVLAVVFIICIVIAILLYKNKPDSKRKDSEPRTKCLLNNADLAPHHPKDPVEMRRINFQTPGMLSHPPIPIADMAEHTERLKANDSLKLSQEYESIDPGQQFTWEHSNLEVNKPKNRYANVIAYDHSRVILQPIEGIMGSDYINANYVDGYRCQNAYIATQGPLPETFGDFWRMVWEQRSATIVMMTRLEEKSRIKCDQYWPNRGTETYGFIQVTLLDTIELATFCVRTFSLHKNGSSEKREVRQFQFTAWPDHGVPEYPTPFLAFLRRVKTCNPPDAGPIVVHCSAGVGRTGCFIVIDAMLERIKPEKTVDVYGHVTLMRSQRNYMVQTEDQYSFIHEALLEAVGCGNTEVPARSLYAYIQKLAQVEPGEHVTGMELEFKRLANSKAHTSRFISANLPCNKFKNRLVNIMPYESTRVCLQPIRGVEGSDYINASFIDGYRQQKAYIATQGPLAETTEDFWRMLWENNSTIVVMLTKLREMGREKCHQYWPAERSARYQYFVVDPMAEYNMPQYILREFKVTDARDGQSRTVRQFQFTDWPEQGVPKSGEGFIDFIGQVHKTKEQFGQDGPISVHCSAGVGRTGVFITLSIVLERMRYEGVVDIFQTVKMLRTQRPAMVQTEDEYQFCYQAALEYLGSFDHYAT

SEQ ID NO: 1243 - protein, 616 aa, Homo sapiens
MAPRARRRRPLFALLLLCALLARLQVALQIAPPCTSEKHYEHLGRCCNKCEPGKYMSSKCTTTSDSVCLPCGPDEYLDSWNEEDKCLLHKVCDTGKALVAVVAGNSTTPRRCACTAGYHWSQDCECCRRNTECAPGLGAQHPLQLNKDTVCKPCLAGYFSDAFSSTDKCRPWTNCTFLGKRVEHHGTEKSDAVCSSSLPARKPPNEPHVYLPGLIILLLFASVALVAAIIFGVCYRKKGKALTANLWHWINEACGRLSGDKESSGDSCVSTHTANFGQQGACEGVLLLTLEEKTFPEDMCYPDQGGVCQGTCVGGGPYAQGEDARMLSLVSKTEIEEDSFRQMPTEDEYMDRPSQPTDQLLFLTEPGSKSTPPFSEPLEVGENDSLSQCFTGTQSTVGSESCNCTEPLCRTDWTPMSSENYLQKEVDSGHCPHWAASPSPNWADVCTGCRNPPGEDCEPLVGSPKRGPLPQCAYGMGLPPEEEASRTEARDQPEDGADGRLPSSARAGAGSGSSPGGQSPASGNVTGNSNSTFISSGQVMNFKGDIIVVYVSQTSQEGAAAAAEPMGRPVQEETLARRDSFAGNGPRFPDPCGGPEGLREPEKASRPVQEQGGAKA

SEQ ID NO: 1244 - protein, 117 aa, Homo sapiens
MATPTQTPTKAPEEPDPFYYDYNTVQTVGMTLATILFLLGILIVISKCDPFLGCLSLRFLCWLSSISYPLCPVFLFCLSLPTGKKVKCRKADSRSESPTCKSCKSELPSSAPGGGGV

SEQ ID NO: 1245 - protein, 269 aa, Homo sapiens
MSSDHLNNSTLKEAQFKDLFLKKAELEFAQIIIIVVVVTVMVVVIVCLLNHYKVSTRSFINRPNQSRRREDGLPQEGCLWPSDSAAPRLGASEIMHAPRSRDRFTAPSFIQRDRFSRFQPTYPYVQHEIDLPPTISLSDGEEPPPYQGPCTLQLRDPEQQMELNRESVRAPPNRTIFDSDLIDIAMYSGGPCPPSSNSGISASTCSSNGRMEGPPPTYSEVMGHHPGASFLHHQRSNAHRGSRLQFQQNNAESTIVPIKGKDRKPGNLV

SEQ ID NO: 1246 - protein, 69 aa, Homo sapiens
MTTLIPILSTFLFEDFSKASGFKGQRPETLHERLTLVSVYAPYLLIPFILLIFMLRSPYYKYEEKRKKK

SEQ ID NO: 1247 - protein, 147 aa, Homo sapiens
MLVEIETAWSLSGYLLVCFSAGYFIHDTVDIVASGQTRASWEYLVHHVMAMGAFFSGIFWSSFVGGGVLTLLVEVSNIFLTIRMMMKISNAQDHLLYRVNKYVNLVMYFLFRLAPQAYLTHFFLRYVNQRTLGTFLLGILLMLDVMI

SEQ ID NO: 1248 - protein, 202 aa, Homo sapiens
MPRWWYNVTDGSCQLFVYGGCDGNSNNYLTKEECLKKCATVTENATGDLATSRNAADSSVPSAPRRQDSEDHSSDMFNYEEYCTANAVTGPCRASFPRWYFDVERNSCNNFIYGGCRGNKNSYRSEEACMLRCFRQQENPPLPLGSKVVVLAGLFVMVLILFLGASMVYLIRVARRNQERALRTVWSSGDDKEQLVKNTYVL

SEQ ID NO: 1249 - protein, 271 aa, Homo sapiens
MEWLKTSLLLAVYKTVPILELSPPLWTAIGWVQRGPTPPTPVLRVLLKWAKSPRSSGVPSLSLGADMGSKVADLLYWKDTRTSGVVFTGLMVSLLCLLHFSIVSVAAHLALLLLCGTISLRVYRKVLQAVHRGDGANPFQAYLDVDLTLTREQTERLSHQITSRVVSAATQLRHFFLVEDLVDSLKLALLFYILTFVGAIFNGLTLLILGVIGLFTIPLLYRQHQAQIDQYVGLVTNQLSHIKAKIRAKIPGTGALASAAAAVSGSKAKAE

SEQ ID NO: 1250 - protein, 77 aa, Homo sapiens
MATPTQTPTKAPEEPDPFYYDYNTVQTVGMTLATILFLLGILIVISKKVKCRKADSSPTCKSCKSELPSSAPGGGGV

SEQ ID NO: 1251 - protein, 83 aa, Homo sapiens
MVACYALLGRTLLAARGPERRRALRVVVALVAAFVVLQLPYSLALLLDTADLLAARERSCPASKRKDVALLVTSGLALARCGL

SEQ ID NO: 1252 - protein, 1501 aa, Homo sapiens
MAPTWGPGMVSVVGPMGLLVVLLVGGCAAEEPPRFIKEPKDQIGVSGGVASFVCQATGDPKPRVTWNKKGKKVNSQRFETIEFDESAGAVLRIQPLRTPRDENVYECVAQNSVGEITVHAKLTVLREDQLPSGFPNIDMGPQLKVVERTRTATMLCAASGNPDPEITWFKDFLPVDPSASNGRIKQLRSGALQIESSEETDQGKYECVATNSAGVRYSSPANLYVRVRRVAPRFSILPMSHEIMPGGNVNITCVAVGSPMPYVKWMQGAEDLTPEDDMPVGRNVLELTDVKDSANYTCVAMSSLGVIEAVAQITVKSLPKAPGTPMVTENTATSITITWDSGNPDPVSYYVIEYKSKSQDGPYQIKEDITTTRYSIGGLSPNSEYEIWVSAVNSIGQGPPSESVVTRTGEQAPASAPRNVQARMLSATTMIVQWEEPVEPNGLIRGYRVYYTMEPEHPVGNWQKHNVDDSLLTTVGSLLEDETYTVRVLAFTSVGDGPLSDPIQVKTQQGVPGQPMNLRAEARSETSITLSWSPPRQESIIKYELLFREGDHGREVGRTFDPTTSYVVEDLKPNTEYAFRLAARSPQGLGAFTPVVRQRTLQSISPKNFKVKMIMKTSVLLSWEFPDNYNSPTPYKIQYNGLTLDVDGRTTKKLITHLKPHTFYNFVLTNRGSSLGGLQQTVTAWTAFNLLNGKPSVAPKPDADGFIMVYLPDGQSPVPVQSYFIVMVPLRKSRGGQFLTPLGSPEDMDLEELIQDISRLQRRSLRHSRQLEVPRPYIAARFSVLPPTFHPGDQKQYGGFDNRGLEPGHRYVLFVLAVLQKSEPTFAASPFSDPFQLDNPDPQPIVDGEEGLIWVIGPVLAVVFIICIVIAILLYKNKPDSKRKDSEPRTKCLLNNADLAPHHPKDPVEMRRINFQTPGMLSHPPIPIADMAEHTERLKANDSLKLSQEYESIDPGQQFTWEHSNLEVNKPKNRYANVIAYDHSRVILQPIEGIMGSDYINANYVDGYRCQNAYIATQGPLPETFGDFWRMVWEQRSATIVMMTRLEEKSRIKCDQYWPNRGTETYGFIQVTLLDTIELATFCVRTFSLHKNGSSEKREVRQFQFTAWPDHGVPEYPTPFLAFLRRVKTCNPPDAGPIVVHCSAGVGRTGCFIVIDAMLERIKPEKTVDVYGHVTLMRSQRNYMVQTEDQYSFIHEALLEAVGCGNTEVPARSLYAYIQKLAQVEPGEHVTGMELEFKRLANSKAHTSRFISANLPCNKFKNRLVNIMPYESTRVCLQPIRGVEGSDYINASFIDGYRQQKAYIATQGPLAETTEDFWRMLWENNSTIVVMLTKLREMGREKCHQYWPAERSARYQYFVVDPMAEYNMPQYILREFKVTDARDGQSRTVRQFQFTDWPEQGVPKSGEGFIDFIGQVHKTKEQFGQDGPISVHCSAGVGRTGVFITLSIVLERMRYEGVVDIFQTVKMLRTQRPAMVQTEDEYQFCYQAALEYLGSFDHYAT

SEQ ID NO: 1253 - protein, 503 aa, Homo sapiens
MVKGLPQKTLLGQGYQAPLSAKVFSSWDFCIRVQEAATIKKHEISNEFKVELEEGRRFQLMQQQTRAQTACRLLSYLRVNVLNGLLVVGAISAIFWATKYSQDNKEESLFLLLQYLPPGVIALVNFLGPLLFTFLVQLENYPPNTEVNLTLIWCVVLKLASLGMFSVSLGQTILCIGRDKSSCESYGYNVCDYQCWENSVGEELYKLSIFNFLLTVAFAFLVTLPRRLLVDRFSGRFWAWLEREEFLVPKNVLDIVAGQTVTWMGLFYCPLLPLLNSVFLFLTFYIKKYTLLKNSRASSRPFRASSSTFFFQLVLLLGLLLAAVPLGYVVSSIHSSWDCGLFTNYSAPWQVVPELVALGLPPIGQRALHYLGSHAFSFPLLIMLSLVLTVCVSQTQANARAIHRLRKQLVWQVQEKWHLVEDLSRLLPEPGPSDSPGPKYPASQASRPQSFCPGCPCPGSPGHQAPRPGPSVVDAAGLRSPCPGQHGAPASARRFRFPSGAEL

SEQ ID NO: 1254 - protein, 1948 aa, Homo sapiens
MAPTWGPGMVSVVGPMGLLVVLLVGGCAAEEPPRFIKEPKDQIGVSGGVASFVCQATGDPKPRVTWNKKGKKVNSQRFETIEFDESAGAVLRIQPLRTPRDENVYECVAQNSVGEITVHAKLTVLREDQLPSGFPNIDMGPQLKVVERTRTATMLCAASGNPDPEITWFKDFLPVDPSASNGRIKQLRSETFESTPIRGALQIESSEETDQGKYECVATNSAGVRYSSPANLYVRELREVRRVAPRFSILPMSHEIMPGGNVNITCVAVGSPMPYVKWMQGAEDLTPEDDMPVGRNVLELTDVKDSANYTCVAMSSLGVIEAVAQITVKSLPKAPGTPMVTENTATSITITWDSGNPDPVSYYVIEYKSKSQDGPYQIKEDITTTRYSIGGLSPNSEYEIWVSAVNSIGQGPPSESVVTRTGEQAPASAPRNVQARMLSATTMIVQWEEPVEPNGLIRGYRVYYTMEPEHPVGNWQKHNVDDSLLTTVGSLLEDETYTVRVLAFTSVGDGPLSDPIQVKTQQGVPGQPMNLRAEARSETSITLSWSPPRQESIIKYELLFREGDHGREVGRTFDPTTSYVVEDLKPNTEYAFRLAARSPQGLGAFTPVVRQRTLQSKPSAPPQDVKCVSVRSTAILVSWRPPPPETHNGALVGYSVRYRPLGSEDPEPKEVNGIPPTTTQILLEALEKWTQYRITTVAHTEVGPGPESSPVVVRTDEDVPSAPPRKVEAEALNATAIRVLWRSPAPGRQHGQIRGYQVHYVRMEGAEARGPPRIKDVMLADAQWETDDTAEYEMVITNLQPETAYSITVAAYTMKGDGARSKPKVVVTKGAVLGRPTLSVQQTPEGSLLARWEPPAGTAEDQVLGYRLQFGREDSTPLATLEFPPSEDRYTASGVHKGATYVFRLAARSRGGLGEEAAEVLSIPEDTPRGHPQILEAAGNASAGTVLLRWLPPVPAERNGAIVKYTVAVREAGALGPARETELPAAAEPGAENALTLQGLKPDTAYDLQVRAHTRRGPGPFSPPVRYRTFLRDQVSPKNFKVKMIMKTSVLLSWEFPDNYNSPTPYKIQYNGLTLDVDGRTTKKLITHLKPHTFYNFVLTNRGSSLGGLQQTVTAWTAFNLLNGKPSVAPKPDADGFIMVYLPDGQSPVPVQSYFIVMVPLRKSRGGQFLTPLGSPEDMDLEELIQDISRLQRRSLRHSRQLEVPRPYIAARFSVLPPTFHPGDQKQYGGFDNRGLEPGHRYVLFVLAVLQKSEPTFAASPFSDPFQLDNPDPQPIVDGEEGLIWVIGPVLAVVFIICIVIAILLYKNKPDSKRKDSEPRTKCLLNNADLAPHHPKDPVEMRRINFQTPDSGLRSPLREPGFHFESMLSHPPIPIADMAEHTERLKANDSLKLSQEYESIDPGQQFTWEHSNLEVNKPKNRYANVIAYDHSRVILQPIEGIMGSDYINANYVDGYRCQNAYIATQGPLPETFGDFWRMVWEQRSATIVMMTRLEEKSRIKCDQYWPNRGTETYGFIQVTLLDTIELATFCVRTFSLHKNGSSEKREVRQFQFTAWPDHGVPEYPTPFLAFLRRVKTCNPPDAGPIVVHCSAGVGRTGCFIVIDAMLERIKPEKTVDVYGHVTLMRSQRNYMVQTEDQYSFIHEALLEAVGCGNTEVPARSLYAYIQKLAQVEPGEHVTGMELEFKRLANSKAHTSRFISANLPCNKFKNRLVNIMPYESTRVCLQPIRGVEGSDYINASFIDGYRQQKAYIATQGPLAETTEDFWRMLWENNSTIVVMLTKLREMGREKCHQYWPAERSARYQYFVVDPMAEYNMPQYILREFKVTDARDGQSRTVRQFQFTDWPEQGVPKSGEGFIDFIGQVHKTKEQFGQDGPISVHCSAGVGRTGVFITLSIVLERMRYEGVVDIFQTVKMLRTQRPAMVQTEDEYQFCYQAALEYLGSFDHYAT

SEQ ID NO: 1255 - protein, 94 aa, Homo sapiens
MAGCAARAPPGSEARLSLATFLLGASVLALPLLTRAGLQGRTGLALYVAGLNALLLLLYRPPRYQIAIRACFLGFVFGCGTLLSFSQSSWSHFG

SEQ ID NO: 1256 - protein, 140 aa, Homo sapiens
MVACYALLGRTLLAARGPERRRALRVVVALVAAFVVLQLPYSLALLLDTADLLAARERSCPASKRKDVALLVTSGLALARCGLNPVLYAFLGLRFRQDLRRLLRGGSCPSGPQPRRGCPRRPRLSSCSAPTETHSLSWDN

SEQ ID NO: 1257 - protein, 285 aa, Homo sapiens
MAQPLAFILDVPETPGDQGQGPSPYDESEVHDSFQQLIQEQSQCTAQEGLELQQREREVTGSSQQTLWRPEGTQSTATLRILASMPSRTIGRSRGAIISQYYNRTVQLRCRSSRPLLGNFVRSAWPSLRLYDLELDPTALEEEEKQSLLVKELQSLAVAQRDHMLRGMPLSLAEKRSLREKSRTPRGKWRGQPGSGGVCSCCGRLRYACVLALHSLGLALLSALQALMPWRYALKRIGGQFGSSVLSYFLFLKTLLAFNALLLLLLVAFIMGPQVAFPPALPGPA

SEQ ID NO: 1258 - protein, 105 aa, Homo sapiens
RGTPAITSSMEAAGAIRTATALRRPACSAASAVCSLPGQQENPPLPLGSKVVVLAGLFVMVLILFLGASMVYLIRVARRNQERALRTVWSSGDDKEQLVKNTYVL

SEQ ID NO: 1259 - protein, 257 aa, Homo sapiens
HASLLGLKEADSPSPAKGCKPSSNPAGLRNIFPSNLVSAAFRSYSTTYEERNITGTRVKVPVGQEVEGMNILGLVVFAIVFGVALRKLGPEGELLIRFFNSFNEATMVLVSWIMWYAPVGIMFLVAGKIVEMEDVGLLFARLGKYILCCLLGHAIHGLLVLPLIYFLFTRKNPYRFLWGIVTPLATAFGTSSSSATLPLMMKCVEENNGVAKHISRFILPIGATVNMDGAALFQCVAAVFIAQLSQQSLDFVKIITI

SEQ ID NO: 1260 - protein, 307 aa, Homo sapiens
MGEQNHSPGKELQHRTRAEAPGKKSWHSQAYALGAVSNFMSTFLTFPIYKVVFRQQIHAMAVSEAVRQLWHEGPQYFYRGIYPPLLSKTLQGTLLFGTYDSLLCFLSPVGPHTLGHRWAAGLMSGVVEAVALSPFERVQNVLQDGRKQARFPSTFSILKEFNSYGLWGRLSLGYYRGFWPVLARNSLGSALYFSFKDPIQDGLAEQGLPHWVPALVSGSVNGTITCLVLYPLIVLVANMQSHIGWQNMPSLWASAQDVWNTRGRKLLLIYRGGSLVILRSSVTWGLTTAIHDFLQRKSHSRKELKTD

SEQ ID NO: 1261 - protein, 240 aa, Homo sapiens
MEESVVRPSVFVVDGQTDIPFTRLGRSHRRQSCSVARVGLGLLLLLMGAGLAVQGWFLLQLHWRLGEMVTRLPDGPAGSWEQLIQERRSHEVNPAAHLTGANSSLTGSGGPLLWETQLGLAFLRGLSYHDGALVVTKAGYYYIYSKVQLGGVGCPLGLASTITHGLYKRTPRYPEELELLVSQQSPCGRATSSSRVWWDSSFLGGVVHLEAGEKVVVRVLDERLVRLRDGTRSYFGAFMV

SEQ ID NO: 1262 - protein, 110 aa, Homo sapiens
LRSGLRLGSRGLCTRLATPPRRAPDQAAEIGSRGSTKAQGPQQQPGSEGPSYAKKVALWLAGLLGAGGTVSVVYIFGNNPVDENGAKIPDEFDNETEFHHVGQDGLDLTS

SEQ ID NO: 1263 - protein, 365 aa, Homo sapiens
MVSNNPLCVCLCRNIFPSNLVSAAFRSYSTTYEERNITGTRVKVPVGQEVEGMNILGLVVFAIVFGVALRKLGPEGELLIRFFNSFNEATMVLVSWIMWYAPVGIMFLVAGKIVEMEDVGLLFARLGKYILCCLLGHAIHGLLVLPLIYFLFTRKNPYRFLWGIVTPLATAFGTSSSSATLPLMMKCVEENNGVAKHISRFILPIGATVNMDGAALFQCVAAVFIAQLSQQSLDFVKIITILVTATASSVGAAGIPAGGVLTLAIILEAVNLPVDHISLILAVDWLVDRSCTVLNVEGDALGAGLLQNYVDRTESRSTEPELIQVKSELPLDPLPVPTEEGNPLLKHYRGPAGDATVASEKESVM

SEQ ID NO: 1264 - protein, 681 aa, Homo sapiens
MGGRVFLVFLAFCVWLTLPGAETQDSRGCARWCPQDSSCVNATACRCNPGFSSFSEIITTPMETCDDINECATLSKVSCGKFSDCWNTEGSYDCVCSPGYEPVSGAKTFKNESENTCQDMTFSTWTPPPGVHSQTLSRFFDKVQDLGRDYKPGLANNTIQSILQALDELLEAPGDLETLPRLQQHCVASHLLDGLEDVLRGLSKNLSNGLLNFSYPAGTELSLEVQKQVDRSVTLRQNQAVMQLDWNQAQKSGDPGPSVVGLVSIPGMGKLLAEAPLVLEPEKQMLLHETHQGLLQDGSPILLSDVISAFLSNNDTQNLSSPVTFTFSHRSVIPRQKVLCVFWEHGQNGCGHWATTGCSTIGTRDTSTICRCTHLSSFAVLMAHYDVQEEDPVLTVITYMGLSVSLLCLLLAALTFLLCKAIQNTSTSLHLQLSLCLFLAHLLFLVAIDQTGHKVLCSIIAGTLHYLYLATLTWMLLEALYLFLTARNLTVVNYSSINRFMKKLMFPVGYGVPAVTVAISAASRPHLYGTPSRCWLQPEKGFIWGFLGPVCAIFSVNLVLFLVTLWILKNRLSSLNSEVSTLRNTRMLAFKATAQLFILGCTWCLGILQVGPAARVMAYLFTIINSLQGVFIFLVYCLLSQQVREQYGKWSKGIRKLKTESEMHTLSSSAKADTSKPSTVN

SEQ ID NO: 1265 - protein, 291 aa, Homo sapiens
MSSTLPALLCVETLPKPFIWAEPHFMVPKEKQVTICCQGNYGAVEYQLHFEGSLFAVDRPKPPERINKVQFYIPDMNSRMAGQYSCIYRVGELWSEPSNLLDLVVTEMYDTPTLSVHPGPEVISGEKVTFYCRLDTATSMFLLLKEGRSSHVQRGYGKVQAEFPLGPVTTAHRGTYRCFGSYNNHAWSFPSEPVKLLVTGDIENTSLAPEDPTFPDTWGTYLLTTETGLQKDHALWDHTAQNLLRMGLAFLVLVALVWFLVEDWLSRKRTRERASRASTWEGRRRLNTQTL

SEQ ID NO: 1266 - protein, 581 aa, Homo sapiens
MAEAASGAGGTSLEGERGKRPPPEGEPAAPASGVLDKLFGKRLLQAGRYLVSHKAWMKTVPTENCDVLMTFPDTTDDHTLLWLLNHIRVGIPELIVQVRHHRHTRAYAFFVTATYESLLRGADELGLRKAVKAEFGGGTRGFSCEEDFIYENVESELRFFTSQERQSIIRFWLQNLRAKQGEALHNVRFLEDQPIIPELAARGIIQQVFPVHEQRILNRLMKSWVQAVCENQPLDDICDYFGVKIAMYFAWLGFYTSAMVYPAVFGSVLYTFTEADQTSRDVSCVVFALFNVIWSTLFLEEWKRRGAELAYKWGTLDSPGEAVEEPRPQFRGVRRISPITRAEEFYYPPWKRLLFQLLVSLPLCLACLVCVFLLMLGCFQLQELVLSVKGLPRLARFLPKVMLALLVSVSAEGYKKLAIWLNDMENYRLESAYEKHLIIKVVLFQFVNSYLSLFYIGFYLKDMERLKELLLVLSLSQSLERQLQAVLVPLAALRFRLLLLSLRGLLLAARAKVRAGGEPVGPRRGGQRGCAGGLARRAEGACAEGIWGRGRPASRCRRLGAHAAQCTDRARGGVETRWACP

SEQ ID NO: 1267 - protein, 162 aa, Homo sapiens
MGSPGMVLGLLVQIWDDPTQNRNRIASFPGFLFVLLGVGSMGVAAIVWGAWFWGRRSCQQRDSGNSPGNAFYSNVLYRPRGAPKKSEDCSGEGKDQRGQSIYSTSFPQPAPRQPHLASRPCPSPRPCPSPRPGHPVSMVRVSPRPSPTQQPRPKGFPKVGEE

SEQ ID NO: 1268 - protein, 774 aa, Homo sapiens
MGGRVFLVFLAFCVWLTLPGAETQDSRGCARWCPQDSSCVNATACRCNPGFSSFSEIITTPMETCDDINECATLSKVSCGKFSDCWNTEGSYDCVCSPGYEPVSGAKTFKNESENTCQDVDECQQNPRLCKSYGTCVNTLGSYTCQCLPGFKLKPEDPKLCTDVDECSSGQHQCDSSTVCFNTVGSYSCRCRPGWKPRHGIPNNQKDTVCEDMTFSTWTPPPGVHSQTLSRFFDKVQDLGRDYKPGLANNTIQSILQALDELLEAPGDLETLPRLQQHCVASHLLDGLEDVLRGLSKNLSNGLLNFSYPAGTELSLEVQKQVDRSVTLRQNQAVMQLDWNQAQKSGDPGPSVVGLVSIPGMGKLLAEAPLVLEPEKQMLLHETHQGLLQDGSPILLSDVISAFLSNNDTQNLSSPVTFTFSHRSVIPRQKVLCVFWEHGQNGCGHWATTGCSTIGTRDTSTICRCTHLSSFAVLMAHYDVQEEDPVLTVITYMGLSVSLLCLLLAALTFLLCKAIQNTSTSLHLQLSLCLFLAHLLFLVAIDQTGHKVLCSIIAGTLHYLYLATLTWMLLEALYLFLTARNLTVVNYSSINRFMKKLMFPVGYGVPAVTVAISAASRPHLYGTPSRCWLQPEKGFIWGFLGPVCAIFSVNLVLFLVTLWILKNRLSSLNSEVSTLRNTRMLAFKATAQLFILGCTWCLGILQVGPAARVMAYLFTIINSLQGVFIFLVYCLLSQQVREQYGKWSKGIRKLKTESEMHTLSSSAKADTSKPSTVN

SEQ ID NO: 1269 - protein, 65 aa, Homo sapiens
MPEEGSGCSVRRRPYGCVLRAALVPLVAGLVICLVVCIQRFAQAQQQLPLESLGWDVAELQLNHT

SEQ ID NO: 1270 - protein, 597 aa, Homo sapiens
MCSEARLARRLRDALREEEPWAVEELLRCGADPNLVLEDGAAAVHLAAGARHPRGLRCLGALLRQGGDPNARSVEALTPLHVAAAWGCRRGLELLLSQGADPALRDQDGLRPLDLALQQGHLECARVLQDLDTRTRTRTRIGAETQEPEPAPGTPGLSGPTDETLDSIALQKQPCRGDNRDIGLEADPGPPSLPVPLETVDKHGSSASPPGHWDYSSDASFVTAVEVSGAEDPASDTPPWAGSLPPTRQGLLHVVHANQRVPRSQGTEAELNARLQALTLTPPNAAGFQSSPSSMPLLDRSPAHSPPRTPTPGASDCHCLWEHQTSIDSDMATLWLTEDEASSTGGREPVGPCRHLPVSTVSDLELLKGLRALGPEFSGHSLELAAALRTGCIPDVQADEDALAQQFEQPDPARRWREGVVKSSFTYLLLDPRETQDLPARAFSLTPAERLQTFIRAIFYVGKGTRARPYVHLWEALGHHGRSRKQGSRRSPTRSKGTAMEWWQAGHLLVAGAWGCTCCTVPSLSSWLKASDSFIPRTSRPGAECWGVGHPAWGEMFECSSCPMLTAAPISGFRRGVCVCVCVCVCVCVCLCVCVCV

SEQ ID NO: 1271 - protein, 273 aa, Homo sapiens
MGVPRPQPWALGLLLFLLPGSLGAESHLSLLYHLTAVSSPAPGTPAFWVSGWLGPQQYLSYNSLRGEAEPCGAWVWENQVSWYWEKETTDLRIKEKLFLEAFKALGGKEPPSMRLKARPSSPGFSVLTCSAFSFYPPELQLRFLRNGLAAGTGQGDFGPNSDGSFHASSSLTVKSGDEHHYCCIVQHAGLAQPLRVELESPAKSSVLVVGIVIGVLLLTAAAVGGALLWRRMRSGLPAPWISLRGDDTGVLLPTPGEAQDADLKDVNVIPATA

SEQ ID NO: 1272 - protein, 831 aa, Homo sapiens
MGGRVFLVFLAFCVWLTLPGAETQDSRGCARWCPQDSSCVNATACRCNPGFSSFSEIITTPMETCDDINECATLSKVSCGKFSDCWNTEGSYDCVCSPGYEPVSGAKTFKNESENTCQDVDECQQNPRLCKSYGTCVNTLGSYTCQCLPGFKLKPEDPKLCTDVNECTSGQNPCHSSTHCLNNVGSYQCRCRPGWQPIPGSPNGPNNTVCEDVDECSSGQHQCDSSTVCFNTVGSYSCRCRPGWKPRHGIPNNQKDTVCEDMTFSTWTPPPGVHSQTLSRFFDKVQDLGRDYKPGLANNTIQSILQALDELLEAPGDLETLPRLQQHCVASHLLDGLEDVLRGLSKNLSNGLLNFSYPAGTELSLEVQKQVDRSVTLRQNQAVMQLDWNQAQKSGDPGMGKLLAEAPLVLEPEKQMLLHETHQGLLQDGSPILLSDVISAFLSNNDTQNLSSPVTFTFSHRSVIPRQKVLCVFWEHGQNGCGHWATTGCSTIGTRDTSTICRCTHLSSFAVLMAHYDVQEEDPVLTVITYMGLSVSLLCLLLAALTFLLCKAIQNTSTSLHLQLSLCLFLAHLLFLVAIDQTGHKVLCSIIAGTLHYLYLATLTWMLLEALYLFLTARNLTVVNYSSINRFMKKLMFPVGYGVPAVTVAISAASRPHLYGTPSRCWLQPEKGFIWGFLGPVCAIFSVNLVLFLVTLWILKNRLSSLNSEVSTLRNTRMLAFKATAQLFILGCTWCLGILQVGPAARVMAYLFTIINSLQGVFIFLVYCLLSQQVREQYGKWSKGIRKLKTESEMHTLSSSAKADTSKPSTPGTVVQACNASTLGGQSRKIT

SEQ ID NO: 1273 - protein, 472 aa, Homo sapiens
MELQDPKMNGALPSDAVGYRQEREGFLPSRGPAPGSKPVQFMDFEGKTSFGMSVFNLSNAIMGSGILGLAYAMAHTGVIFFLALLLCIALLSSYSIHLLLTCAGIAGIRAYEQLGQRAFGPAGKVVVATVICLHNVGAMSSYLFIIKSELPLVIGTFLYMDPEGDWFLKGNLLIIIVSVLIILPLALMKHLGYLGYTSGLSLTCMLFFLVSVIYKKFQLGCAIGHNETAMESEALVGLPSQGLNSSCEAQMFTVDSQMSYTVPIMAFAFVCHPEVLPIYTELCRPSKRRMQAVANVSIGAMFCMYGLTATFGYLTFYSSVKAEMLHMYSQKDPLILCVRLAVLLAVTLTVPVVLFPIRRALQQLLFPGKAFSWPRHVAIALILLVLVNVLVICVPTIRDIFGVIGSTSAPSLIFILPSIFYLRIVPSEVEPFLSWPKIQALCFGVLGVLFMAVSLGFMFANWATGQSRMSGH

SEQ ID NO: 1274 - protein, 106 aa, Homo sapiens
MPNDDFCPGLTIKAMGAERAPQRQPCTLHLLVLVPILLSLVASQDWKAERSQDPFEKCMQDPDYEQLLKVVTWGLNRTLKPQRVIVVGAGVAGLVAAKVLSDAGHK

SEQ ID NO: 1275 - protein, 303 aa, Homo sapiens
MSSTLPALLCVGLCLSQRISAQQQTLPKPFIWAEPHFMVPKEKQVTICCQGNYGAVEYQLHFEGSLFAVDRPKPPERINKVQFYIPDMNSRMAGQYSCIYRVGELWSEPSNLLDLVVTEMYDTPTLSVHPGPEVISGEKVTFYCRLDTATSMFLLLKEGRSSHVQRGYGKVQAEFPLGPVTTAHRGTYRCFGSYNNHAWSFPSEPVKLLVTGDIENTSLAPEDPTFPDTWGTYLLTTETGLQKDHALWDHTAQNLLRMGLAFLVLVALVWFLVEDWLSRKRTRERASRASTWEGRRRLNTQTL

SEQ ID NO: 1276 - protein, 812 aa, Homo sapiens
MGGRVFLVFLAFCVWLTLPGAETQDSRGCARWCPQDSSCVNATACRCNPGFSSFSEIITTPMETCDDINECATLSKVSCGKFSDCWNTEGSYDCVCSPGYEPVSGAKTFKNESENTCQDVDECQQNPRLCKSYGTCVNTLGSYTCQCLPGFKLKPEDPKLCTDVNECTSGQNPCHSSTHCLNNVGSYQCRCRPGWQPIPGSPNGPNNTVCEDVDECSSGQHQCDSSTVCFNTVGSYSCRCRPGWKPRHGIPNNQKDTVCEDMTFSTWTPPPGVHSQTLSRFFDKVQDLGRDYKPGLANNTIQSILQALDELLEAPGDLETLPRLQQHCVASHLLDGLEDVLRGLSKNLSNGLLNFSYPAGTELSLEVQKQVDRSVTLRQNQAVMQLDWNQAQKSGDPGMGKLLAEAPLVLEPEKQMLLHETHQGLLQDGSPILLSDVISAFLSNNDTQNLSSPVTFTFSHRSVIPRQKVLCVFWEHGQNGCGHWATTGCSTIGTRDTSTICRCTHLSSFAVLMAHYDVQEEDPVLTVITYMGLSVSLLCLLLAALTFLLCKAIQNTSTSLHLQLSLCLFLAHLLFLVAIDQTGHKVLCSIIAGTLHYLYLATLTWMLLEALYLFLTARNLTVVNYSSINRFMKKLMFPVGYGVPAVTVAISAASRPHLYGTPSRCWLQPEKGFIWGFLGPVCAIFSVNLVLFLVTLWILKNRLSSLNSEVSTLRNTRMLAFKATAQLFILGCTWCLGILQVGPAARVMAYLFTIINSLQGVFIFLVYCLLSQQVREQYGKWSKGIRKLKTESEMHTLSSSAKADTSKPSTVN

SEQ ID NO: 1277 - protein, 141 aa, Homo sapiens
MAASAAVFSRLRSGLRLGSRGLCTRLATPPRRAPDQAAEIGSRGSTKAQGPQQQPGSEGPSYAKKVALWLAGLLGAGGTVSVVYIFGNNPVDENGAKIPDEFDNDDHRAHQPLPSPRPSAGTVLPATLHARFGAHRRPLAS

SEQ ID NO: 1278 - protein, 730 aa, Homo sapiens
MGGRVFLVFLAFCVWLTLPGAETQDSRGCARWCPQDSSCVNATACRCNPGFSSFSEIITTPMETCDDINECATLSKVSCGKFSDCWNTEGSYDCVCSPGYEPVSGAKTFKNESENTCQDVDECSSGQHQCDSSTVCFNTVGSYSCRCRPGWKPRHGIPNNQKDTVCEDMTFSTWTPPPGVHSQTLSRFFDKVQDLGRDYKPGLANNTIQSILQALDELLEAPGDLETLPRLQQHCVASHLLDGLEDVLRGLSKNLSNGLLNFSYPAGTELSLEVQKQVDRSVTLRQNQAVMQLDWNQAQKSGDPGPSVVGLVSIPGMGKLLAEAPLVLEPEKQMLLHETHQGLLQDGSPILLSDVISAFLSNNDTQNLSSPVTFTFSHRSVIPRQKVLCVFWEHGQNGCGHWATTGCSTIGTRDTSTICRCTHLSSFAVLMAHYDVQEEDPVLTVITYMGLSVSLLCLLLAALTFLLCKAIQNTSTSLHLQLSLCLFLAHLLFLVAIDQTGHKVLCSIIAGTLHYLYLATLTWMLLEALYLFLTARNLTVVNYSSINRFMKKLMFPVGYGVPAVTVAISAASRPHLYGTPSRCWLQPEKGFIWGFLGPVCAIFSVNLVLFLVTLWILKNRLSSLNSEVSTLRNTRMLAFKATAQLFILGCTWCLGILQVGPAARVMAYLFTIINSLQGVFIFLVYCLLSQQVREQYGKWSKGIRKLKTESEMHTLSSSAKADTSKPSTVN

SEQ ID NO: 1279 - protein, 115 aa, Homo sapiens
LATPPRRAPDQAAEIGSRGSTKAQGPQQQPGSEGPSYAKKVALWLAGLLGAGGTVSVVYIFGNNPVDENGAKVRGKETEALPGVLVCGFLMSSTMIQFWYSSCAGHTNISKIIDR

SEQ ID NO: 1280 - protein, 116 aa, Homo sapiens
LATPPRRAPDQAAEIGSRGSTKAQGPQQQPGSEGPSYAKKVALWLAGLLGAGGTVSVVYIFGNNPVDENGAKIPDEFDNDDHRAHQPLPSPRPSAGTVLPATLHARFGAHRRPLAS

SEQ ID NO: 1281 - protein, 54 aa, Homo sapiens
VIHIRSETSVPDHVVWSLFNTLFMNPCCLGFIAFAYSVKTGTQALPESEKGTHR

SEQ ID NO: 1282 - protein, 177 aa, Homo sapiens
MSGELPPNINIKEPRWDQSTFIGRANHFFTVTDPRNILLTNEQLESARKIVHDYRQGIVPPGLTENELWRAKYIYDSAFHPDTGEKMILIGRMSAQVPMNMTITGCMMTFYRTTPAVLFWQWINQSFNAVVNYTNRSGDAPLTVNELGTAYVSATTGAVATALGLNALTKVLRFLFP

SEQ ID NO: 1283 - protein, 104 aa, Homo sapiens
MKHTQSGQSTSPLVIDYTCRVCQMAFVFSSLIPLLLMTPVFCLGNTSECFQNFSQSHKCILMHSPPSAMAELPPSANTSVCSTLYFYGIAIFLGSFVLSLLTIM

SEQ ID NO: 1284 - protein, 50 aa, Homo sapiens
MTSLLTTPSPREELMTTPILQPTEALSPEDGASTALIAVVITVVFLTLLS

SEQ ID NO: 1285 - protein, 456 aa, Homo sapiens
MVVLNPMTLGIYLQLFFLSIVSQPTFINSVLPISAALPSLDQKKRGGHKACCLLTPPPPPLFPPPFFRGGRSPLLSPDMKNLMLELETSQSPCMQGSLGSPGPPGPQGPPGLPGKTGPKGEKGELGRPGRKGRPGPPGVPGMPGPIGWPGPEGPRGEKGDLGMMGLPGSRGPMGSKGYPGSRGEKGSRGEKGDLGPKGEKGFPGFPGMLGQKGEMGPKGEPGIAGHRGPTGRPGKRGKQGQKGDSGVMGPPGKPGPSGQPGRPGPPGPPPAGQLIMGPKGERGFPGPPGRCLCGPTMNVNNPSYGESVYGPSSPRVPVIFVVNNQEELERLNTQNAIAFRRDQRSLYFKDSLGWLPIQLTPFYPVDYTADQHGTCGDGLLQPGEECDDGNSDVGDDCIRDCHRAYCGDGHRHEGVEDCDGSDFGYLTCETYLPGSYGDLQCTQYCYIDSTPCRYFT

SEQ ID NO: 1286 - protein, 118 aa, Homo sapiens
VPPHETFGFKVAVIASIVSCAIILLMSMAFLTCCLLKCVKKSKRRRSNRDHGESTSKLASVTRSVDKDPGIPRALSLSGSSSSPQAQVMVHMANPRQPLPASGLATGMPQQPAAYALG

SEQ ID NO: 1287 - protein, 251 aa, Homo sapiens
MSSDHLNNSTLKEAQFKDLFLKKAELEFAQIIIIVVVVTVMVVVIVCLLNHYKVSTRSFINRPNQSRRREDGLPQIMHAPRSRDRFTAPSFIQRDRFSRFQPTYPYVQHEIDLPPTISLSDGEEPPPYQGPCTLQLRDPEQQMELNRESVRAPPNRTIFDSDLIDIAMYSGGPCPPSSNSGISASTCSSNGRMEGPPPTYSEVMGHHPGASFLHHQRSNAHRGSRLQFQQNNAESTIVPIKGKDRKPGNLV

SEQ ID NO: 1288 - protein, 154 aa, Homo sapiens
RPRGRAGVTTPAPGNRTVVPPHETFGFKVAVIASIVSCAIILLMSMAFLTCCLLKCVKKSKRRRSNRSAQLWSQLKDEDLETVQAAYLGLKHFNKPVSGPSQAHDNHSFTTDHGESTSKLASVTRSVDKDPGIPRALSLSGSSSSPQAQVMVHM

SEQ ID NO: 1289 - protein, 310 aa, Homo sapiens
MLYSGTWRTVGIRCPRKKAQICQQQECCIERPPLRLRGFGAALTTTPRLHRPCPPTSGADFTSRNLFPPGIKDFLLLCGRILLLLALLTLTISVTTSWLNSFKSPQVYLKEEEEKNEKRQKLVRKKQQEAQGEKASRYIENVLKPHQEMKLRKLEERFYQMTGEAWKLSSGHKLGGDEGTSQTSFETSNREAAKSQNLPKPLTEFPSPAEQPTCKEIPDLPEEPSQTAEEVVTVALRCPSGNVLRRRFLKSYSSQVLFDWMTRIGYHISLYSLSTSFPRRPLAVEGGQSLEDIGITVDTVLILEEKEQTN

SEQ ID NO: 1290 - protein, 314 aa, Homo sapiens
MVVVGILLAYLAGWVLEWRWLAVLGCVPPSLMLLLMCFMPETPRFLLTQHRRQEAMAALRFLWGSEQGWEDPPIGAEQSFHLALLRQPGIYKPFIIGVSLMAFQQLSGVNAVMFYAETIFEEAKFKDSSLASVVVGVIQVLFTAVAALIMDRAGRRLLLVLSGVVMVFSTSAFGAYFKLTQGGPGNSSHVAISAPVSAQPVDASVGLAWLAVGSMCLFIAGFAVGWGPIPWLLMSEIFPLHVKGVATGICVLTNWLMAFLVTKEFSSLMEVLRPYGAFWLASAFCIFSVLFTLFCVPETKGKTLEQITAHFEGR

SEQ ID NO: 1291 - protein, 761 aa, Homo sapiens [sequence omitted]

SEQ ID NO: 1292 - protein, 848 aa, Homo sapiens [sequence omitted]

SEQ ID NO: 1293 - protein, 814 aa, Homo sapiens
MLERKYGGRLVTRHAARTIQTAFRQYQMNKNFERLRSSMSENRMSRRIVLSNMRMQFSFEGPEKVHSSYFEGKQVSVTNDGSQLGALVSPECGDLSEPTTLKSPAPSSDFADAITELEDAFSRQVKSLAESIDDALNCRSLHTEEAPALDAARARDTEPQTALHGMDHRKLDEMTASYSDVTLYIDEEELSPPLPLSQAGDRPSSTESDLRLRAGGAAPDYWALAHKEDKADTDTSCRSTPSLERQEQRLRVEHLPLLTIEPPSDSSVDLSDRSERGSLKRQSAYERSLGGQQGSPKHGPHSGAPKSLPREEPELRPRPPRPLDSHLAINGSANRQSKSESDYSDGDNDSINSTSNSNDTINCSSESSSRDSLREQTLSKQTYHKEARNSWDSPAFSNDVIRKRHYRIGLNLFNKKPEKGVQYLIERGFVPDTPVGVAHFLLQRKGLSRQMIGEFLGNRQKQFNRDVLDCVVDEMDFSTMELDEALRKFQAHIRVQGEAQKVERLIEAFSQRYCICNPGVVRQFRNPDTIFILAFAIILLNTDMYSPNVKPERKMKLEDFIKNLRGVDDGEDIPREMLMGIYERIRKRELKTNEDHVSQVQKVEKLIVGKKPIGSLHPGLGCVLSLPHRRLVCYCRLFEVPDPNKPQKLGLHQREIFLFNDLLVVTKIFQKKKNSVTYSFRQSFSLYGMQVLLFENQYYPNGIRLTSSVPGADIKVLINFNAPNPQDRKKFTDDLRESIAEVQEMEKHRIESELEKQKGVVRPSMSQCSSLKKESGNGTLSRACLDDSYASGEGLKRSALSSSLRDLSEAGVHH

SEQ ID NO: 1294 - protein, 182 aa, Homo sapiens
MPVKGGTKCIKYLLFGFNFIFWLAGIAVLAIGLWLRFDSQTKSIFEQETNNNNSSFYTGVYILIGAGALMMLVGFLGCCGAVQESQCMLGLFFGFLLVIFAIEIAAAIWGYSHKDEVIKEVQEFYKDTYNKLKTKDEPQRETLKAIHYAVELLWFGWGRGTVYLRHLPQEGRTRNLHREVLS

SEQ ID NO: 1295 - protein, 1079 aa, Homo sapiens
MVKSPMNRELVATYEVTLSVIDNASDLPERSVSVPNAKLTVNVLDVNDNTPQFKPFGITYYMERILEGATPGTTLIAVAAVDPDKGLNGLVTYTLLDLVPPGYVQLEDSSAGKVIANRTVDYEEVHWLNFTVRASDNGSPPRAAEIPVYLEIVDINDNNPIFDQPSYQEAVFEDVPVGTIILTVTATDADSGNFALIEYSLGDGESKFAINPTTGDIYVLSSLDREKKDHYILTALAKDNPGDVASNRRENSVQVVIQVLDVNDCRPQFSKPQFSTSVYENEPAGTSVITMMATDQDEGPNGELTYSLEGPGVEAFHVDMDSGLVTTQRPLQSYEKFSLTVVATDGGEPPLWGTTMLLVEVIDVNDNRPVFVRPPNGTILHIREEIPLRSNVYEVYATDKDEGLNGAVRYSFLKTAGNRDWEFFIIDPISGLIQTAQRLDRESQAVYSLILVASDLGQPVPYETMQPLQVALEDIDDNEPLFVRPPKGSPQYQLLTVPEHSPRGTLVGNVTGAVDADEGPNAIVYYFIAAGNEEKNFHLQPDGCLLVLRDLDREREAIFSFIVKASSNRSWTPPRGPSPTLDLVADLTLQEVRVVLEDINDQPPRFTKAEYTAGVATDAKVGSELIQVLALDADIGNNSLVFYSILAIHYFRALANDSEDVGQVFTMGSMDGILRTFDLFMAYSPGYFVVDIVARDLAGHNDTAIIGIYILRDDQRVKIVINEIPDRVRGFEEEFIHLLSNITGAIVNTDNVQFHVDKKGRVNFAQTELLIHVVNRDTNRILDVDRVIQMIDENKEQLRNLFRNYNVLDVQPAISVRLPDDMSALQMAIIVLAILLFLAAMLFVLMNWYYRTVHKRKLKAIVAGSAGNRGFIDIMDMPNTNKYSFDGANPVWLDPFCRNLELAAQAEHEDDLPENLSEIADLWNSPTRTHGTFGREPAAVKPDDDRYLRAAIQEYDNIAKLGQIIREGPIKLIQTELDEEPGDHSPGQGSLRFRHKPPVELKGPDGIHVVHGSTGTLLATDLNSLPEEDQKGLGRSLETLTAAEATAFERNARTESAKSTPLHKLRDVIMETPLEITEL

SEQ ID NO: 1296 - protein, 543 aa, Homo sapiens
MGTSLSPNDPWPLNPLSIQQTTLLLLLSVLATVHVGQRLLRQRRRQLRSAPPGPFAWPLIGNAAAVGQAAHLSFARLARRYGDVFQIRLGSCPIVVLNGERAIHQALVQQGSAFADRPAFASFRVVSGGRSMAFGHYSEHWKVQRRAAHSMMRNFFTRQPRSRQVLEGHVLSEARELVALLVRGSADGAFLDPRPLTVVAVANVMSAVCFGCRYSHDDPEFRELLSHNEEFGRTVGAGSLVDVMPWLQYFPNPVRTVFREFEQLNRNFSNFILDKFLRHCESLRPGAAPRDMMDAFILSAEKKAAGDSHGGGARLDLENVPATITDIFGASQDTLSTALQWLLLLFTRYPDVQTRVQAELDQVVGRDRLPCMGDQPNLPYVLAFLYEAMRFSSFVPVTIPHATTANTSVLGYHIPKDTVVFVNQWSVNHDPLKWPNPENFDPARFLDKDGLINKDLTSRVMIFSVGKRRCIGEELSKMQLFLFISILAHQCDFRANPNEPAKMNFSYGLTIKPKSFKVNVTLRESMELLDSAVQNLQAKETCQ

SEQ ID NO: 1297 - protein, 70 aa, Homo sapiens
KKQLRETKDKKNENSFEKQVSCHENSKSCIRRKAIVREDLLSAKVCDLKWIHSKLLFACGFYLFFCCFLI

SEQ ID NO: 1298 - protein, 421 aa, Homo sapiens
MSVFNLSNAIMGSGILGLAYAMAHTGVIFFLALLLCIALLSSYSIHLLLTCAGIAGIRAYEQLGQRAFGPAGKVVVATVICLHNVGAMSSYLFIIKSELPLVIGTFLYMDPEGDWFLKGNLLIIIVSVLIILPLALMKHLGYLGYTSGLSLTCMLFFLVSVIYKKFQLGCAIGHNETAMESEALVGLPSQGLNSSCEAQMFTVDSQMSYTVPIMAFAFVCHPEVLPIYTELCRPSKRRMQAVANVSIGAMFCMYGLTATFGYLTFYSSVKAEMLHMYSQKDPLILCVRLAVLLAVTLTVPVVLFPIRRALQQLLFPGKAFSWPRHVAIALILLVLVNVLVICVPTIRDIFGVIGSTSAPSLIFILPSIFYLRIVPSEVEPFLSWPKIQALCFGVLGVLFMAVSLGFMFANWATGQSRMSGH

SEQ ID NO: 1299 - protein, 143 aa, Homo sapiens
MGTSLSPNDPWPLNPLSIQQTTLLLLLSVLATVHVGQRLLRQRRRQLRSAPPGPFAWPLIGNAAAVGQAAHLSFARLARRYGDVFQIRLGSCPIVVLNGERAIHQALVQQGSAFADRPAFASFRVVSGGRSMAFGHYSEHWKV

SEQ ID NO: 1300 - protein, 884 aa, Homo sapiens [sequence omitted]

SEQ ID NO: 1301 - protein, 211 aa, Homo sapiens
MRWAAATLRGKARPRGRAGVTTPAPGNRTGTCAKLRLPPQATFQVLRGNGASVGTVLMFRCPSNHQMVGSGLLTCTWKGSIAEWSSGSPVCKLVPPHETFGFKVAVIASIVSCAIILLMSMAFLTCCLLKCVKKSKRRRSNRDHGESTSKLASVTRSVDKDPGIPRALSLSGSSSSPQAQVMVHMANPRQPLPASGLATGMPQQPAAYALG

SEQ ID NO: 1302 - protein, 263 aa, Homo sapiens
MAPRARRRRPLFALLLLCALLARLQVALQIAPPCTSEKHYEHLGRCCNKCEPGKYMSSKCTTTSDSVCLPCGPDEYLDSWNEEDKCLLHKVCDTGKALVAVVAGNSTTPRRCACTAGYHWSQDCECCRRNTECAPGLGAQHPLQLNKDTVCKPCLAGYFSDAFSSTDKCRPWTNCTFLGKRVEHHGTEKSDAVCSSSLPARKPPNEPHVYLPGLIILLLFASVALVAAIIFGVCYRKKGKALTANLWHWINEACGRLSGDKEM

SEQ ID NO: 1303 - protein, 484 aa, Homo sapiens
MLFPISMSATEFLLASVIFCLVFWVIRASRPQVPKGLKNPPGPWGWPLIGHMLTLGKNPHLALSRMSQQYGDVLQIRIGSTPVVVLSGLDTIRQALVRQGDDFKGRPDLYTFTLISNGQSMSFSPDSGPVWAARRRLAQNGLKSFSIASDPASSTSCYLEEHVSKEAEVLISTLQELMAGPGHFNPYRYVVVSVTNVICAICFGRRYDHNHQELLSLVNLNAFKDLNEKFYSFMQKMVKEHYKTFEKGHIRDITDSLIEHCQEKQLDENANVQLSDEKIINIVLDLFGAGFDTVTTAISWSLMYLVMNPRVQRKIQEELDTVIGRSRRPRLSDRSHLPYMEAFILETFRHSSFVPFTIPHSTTRDTSLKGFYIPKGRCVFVNQWQINHDQKLWVNPSEFLPERFLTPDGAIDKVLSEKVIIFGMGKRKCIGETIARWEVFLFLAILLQRVEFSVPLGVKVDMTPIYGLTMKHACCEHFQMQLRS

SEQ ID NO: 1304 - protein, 218 aa, Homo sapiens
MLTFNHDAPWHTQKTLKTSEFGKSFGTLGHIGNISHQCWAGCAAGGRAVLSGEPEANMDQETVGNVVLLAIVTLISVVQNGFFAHKVEHESRTQNGRSFQRTGTLAFERVYTANQNCVDAYPTFLAVLWSAGLLCSQVPAAFAGLMYLFVRQKYFVGYLGERTQSTPGYIFGKRIILFLFLMSVAGIFNYYLIFFFGSDFENYIKTISTTISPLLLIP

SEQ ID NO: 1305 - protein, 396 aa, Homo sapiens
MAGYEYVSPEQLAGFDKYKYSAVDTNPLSLYVMHPFWNTIVKVFPTWLAPNLITFSGFLLVVFNFLLMAYFDPDFYASAPGHKHVPDWVWIVVGILNFVAYTLDGVDGKQARRTNSSTPLGELFDHGLDSWSCVYFVVTVYSIFGRGSTGVSVFVLYLLLWVVLFSFILSHWEKYNTGILFLPWGYDISQVTISFVYIVTAVVGVEAWYEPFLFNFLYRDLFTAMIIGCALCVTLPMSLLNFFRSYKNNTLKLNSVYEAMVPLFSPCLLFILSTAWILWSPSDILELHPRVFYFMVGTAFANSTCQLIVCQMSSTRCPTLNWLLVPLFLVVLVVNLGVASYVESILLYTLTTAFTLAHIHYGVRVVKQLSSHFQIYPFSLRKPNSDLGMEEKNIGL

SEQ ID NO: 1306 - protein, 884 aa, Homo sapiens
MLQTKDLIWTLFFLGTAVSLQVDIVPSQGEISVGESKFFLCQVAGDAKDKDISWFSPNGEKLTPNQQRISVVWNDDSSSTLTIYNANIDDAGIYKCVVTGEDGSESEATVNVKIFQKLMFKNAPTPQEFREGEDAVIVCDVVSSLPPTIIWKHKGRDVILKKDVRFIVLSNNYLQIRGIKKTDEGTYRCEGRILARGEINFKDIQVIVNVPPTIQARQNIVNATANLGQSVTLVCDAEGFPEPTMSWTKDGEQIEQEEDDEKYIFSDDSSQLTIKKVDKNDEAEYICIAENKAGEQDATIHLKVFAKPKITYVENQTAMELEEQVTLTCEASGDPIPSITWRTSTRNISSEEKASWTRPEKQEVHAPWNWQVGRQKGQAGSAGFPGSHETLDGHMVVRSHARVSSLTLKSIQYTDAGEYICTASNTIGQDSQSMYLEVQYAPKLQGPVAVYTWEGNQVNITCEVFAYPSATISWFRDGQLLPSSNYSNIKIYNTPSASYLEVTPDSENDFGNYNCTAVNRIGQESLEFILVQADTPSSPSIDQVEPYSSTAQVQFDEPEATGGVPILKYKAEWRAVGEEVWHSKWYDAKEASMEGIVTIVGLKPETTYAVRLAALNGKGLGEISAASEFKTQPVQGEPSAPKLEGQMGEDGNSIKVNLIKQDDGGSPIRHYLVRYRALSSEWKPEIRLPSGSDHVMLKSLDWNAEYEVYVVAENQQGKSKAAHFVFRTSAQPTAIPANGSPTSGLSTGAIVGILIVIFVLLLVVVDITCYFLNKCGLFMCIAVNLCGKAGPGAKGKDMEEGKAAFSKDESKEPIVEVRTEEERTPNHDGGKHTEPNETTPLTEPEKGPVEAKPECQETETKPAPAEVKTVPNDATQTKENESKA

SEQ ID NO: 1307 - protein, 1114 aa, Homo sapiens
MACRRRYFVEGEAPSSETGTSLDSPSAYPQGPLVPGSSLSPDHYEHTSVGAYGLYSGPPGQQQRTRRPKLQHSTSILRKQAEEEAIKRSRSLSESYELSSDLQDKQVEMLERKYGGRLVTRHAARTIQTAFRQYQMNKNFERLRSSMSENRMSRRIVLSNMRMQFSFEGPEKVHSSYFEGKQVSVTNDGSQLGALVSPECGDLSEPTTLKSPAPSSDFADAITELEDAFSRQVKSLAESIDDALNCRSLHTEEAPALDAARARDTEPQTALHGMDHRKLDEMTASYSDVTLYIDEEELSPPLPLSQAGDRPSSTESDLRLRAGGAAPDYWALAHKEDKADTDTSCRSTPSLERQEQRLRVEHLPLLTIEPPSDSSVDLSDRSERGSLKRQSAYERSLGGQQGSPKHGPHSGAPKSLPREEPELRPRPPRPLDSHLAINGSANRQSKSESDYSDGDNDSINSTSNSNDTINCSSESSSRDSLREQTLSKQTYHKEARNSWDSPAFSNDVIRKRHYRIGLNLFNKKPEKGVQYLIERGFVPDTPVGVAHFLLQRKGLSRQMIGEFLGNRQKQFNRDVLDCVVDEMDFSTMELDEALRKFQAHIRVQGEAQKVERLIEAFSQRYCICNPGVVRQFRNPDTIFILAFAIILLNTDMYSPNVKPERKMKLEDFIKNLRGVDDGEDIPREMLMGIYERIRKRELKTNEDHVSQVQKVEKLIVGKKPIGSLHPGLGCVLSLPHRRLVCYCRLFEVPDPNKPQKLGLHQREIFLFNDLLVVTKIFQKKKNSVTYSFRQSFSLYGMQVLLFENQYYPNGIRLTSSVPGADIKVLINFNAPNPQDRKKFTDDLRESIAEVQEMEKHRIESELEKQKGVVRPSMSQCSSLKKESGNGTLSRACLDDSYASGEGLKRSALSSSLRDLSEAGKRGRRSSAGSLESNVEGSIISSPHMRRRATSTRECPSRPHQTMPNSSSLLGSLFGSKRGKPPPQAHLPSAPALPPPHPPVVLPHLQHSVAGHHLGPPEGLPQAAMHGHHTQYCHMQNPPPYHHHHHHHPPQHIQHAHQYHHGPHGGHPAYGAHAHGHPPLPSAHVGHTVHHHGQPPAPPPPTSSKAKPSGISTIV

SEQ ID NO: 1308 - protein, 400 aa, Homo sapiens [sequence omitted]

SEQ ID NO: 1309 - protein, 146 aa, Homo sapiens
METPQEDHLRGQHYHQKGQNGSFDAPNERPYSLKIRNTTSCNSGTYRCTLQDPDGQRNLSGKVILRVTGCPAQRKEETFKKYRAEIVLLLALVIFYLTLIIFTCKFARLQSIFPDFSKAGMERAFLPVTSPNKHLGLVTPHKTELV

SEQ ID NO: 1310 - protein, 761 aa, Homo sapiens
MLQTKDLIWTLFFLGTAVSLQVDIVPSQGEISVGESKFFLCQVAGDAKDKDISWFSPNGEKLTPNQQRISVVWNDDSSSTLTIYNANIDDAGIYKCVVTGEDGSESEATVNVKIFQKLMFKNAPTPQEFREGEDAVIVCDVVSSLPPTIIWKHKGRDVILKKDVRFIVLSNNYLQIRGIKKTDEGTYRCEGRILARGEINFKDIQVIVNVPPTIQARQNIVNATANLGQSVTLVCDAEGFPEPTMSWTKDGEQIEQEEDDEKYIFSDDSSQLTIKKVDKNDEAEYICIAENKAGEQDATIHLKVFAKPKITYVENQTAMELEEQVTLTCEASGDPIPSITWRTSTRNISSEEKTLDGHMVVRSHARVSSLTLKSIQYTDAGEYICTASNTIGQDSQSMYLEVQYAPKLQGPVAVYTWEGNQVNITCEVFAYPSATISWFRDGQLLPSSNYSNIKIYNTPSASYLEVTPDSENDFGNYNCTAVNRIGQESLEFILVQADTPSSPSIDQVEPYSSTAQVQFDEPEATGGVPILKYKAEWRAVGEEVWHSKWYDAKEASMEGIVTIVGLKPETTYAVRLAALNGKGLGEISAASEFKTQPVHSPPPPASASSSTPVPLSPPDTTWPLPALATTEPAKGEPSAPKLEGQMGEDGNSIKVNLIKQDDGGSPIRHYLVRYRALSSEWKPEIRLPSGSDHVMLKSLDWNAEYEVYVVAENQQGKSKAAHFVFRTSAQPTAIPATLGGNSASYTFVSLLFSAVTLLLLC

SEQ ID NO: 1311 - protein, 310 aa, Homo sapiens
MAPPPARVHLACKSDEEERSPCTTTRNTACQCKPGTFRNDNSAEMCRKCSRGCPRGMVKVKDCTPWSDIECVHKESGNGHNIWVILVVTLVVPLLLVAVLIVCCCIGSGCGGDPKCMDRVCFWRLGLLRGPGAEDNAHNEILSNADSLSTFVSEQQMESQEPADLTGVTVQSPGEAQCLLGPAEAEGSQRRRLLVPANGADPTETLMLFFDKFANIVPFDSWDQLMRQLDLTKNEIDVVRAGTAGPGDALYAMLMKWVNKTGRNASIHTLLDALERMEERHAREKIQDLLVDSGKFIYLEDGTGSAVSLE

SEQ ID NO: 1312 - protein, 858 aa, Homo sapiens [sequence omitted]

SEQ ID NO: 1313 - protein, 242 aa, Homo sapiens
MDHHQPGTGRYQVLLNEEDNSESSAIEQPPTSNPAPQIVQAASSAPALETDSSPPPYSSITVEVPTTSDTEVYGEFYPVPPPYSVATSLPTYDEAEKAKAAAMAAAAAETSQRIQEEECPPRDDFSDADQLRVGNDGIFMLAFFMAFIFNWLGFCLSFCITNTIAGRYGAICGFGLSLIKWILIVRFSDYFTGYFNGQYWLWWIFLVLGLLLFFRGFVNYLKVRNMSESMAAAHRTRYFFLL

SEQ ID NO: 1314 - protein, 4204 aa, Homo sapiens
MGALWSWWILWAGATLLWGLTQEASVDLKNTGREEFLTAFLQNYQLAYSKAYPRLLISSLSESPASVSILSQADNTSKKVTVRPGESVMVNISAKAEMIGSKIFQHAVVIHSDYAISVQALNAKPDTAELTLLRPIQALGTEYFVLTPPGTSARNVKEFAVVAGAAGASVSVTLKGSVTFNGKFYPAGDVLRVTLQPYNVAQLQSSVDLSGSKVTASSPVAVLSGHSCAQKHTTCNHVVEQLLPTSAWGTHYVVPTLASQSRYDLAFVVASQATKLTYNHGGITGSRGLQAGDVVEFEVRPSWPLYLSANVGIQVLLFGTGAIRNEVTYDPYLVLIPDVAAYCPAYVVKSVPGCEGVALVVAQTKAISGLTIDGHAVGAKLTWEAVPGSEFSYAEVELGTADMIHTAEATTNLGLLTFGLAKAIGYATAADCGRTVLSPVEPSCEGMQCAAGQRCQVVGGKAGCVAESTAVCRAQGDPHYTTFDGRRYDMMGTCSYTMVELCSEDDTLPAFSVEAKNEHRGSRRVSYVGLVTVRAYSHSVSLTRGEVGFVLVDNQRSRLPVSLSEGRLRVYQSGPRAVVELVFGLVVTYDWDCQLALSLPARFQDQVCGLCGNYNGDPADDFLTPDGALAPDAVEFASSWKLDDGDYLCEDGCQNNCPACTPGQAQHYEGDRLCGMLTKLDGPFAVCHDTLDPRPFLEQCVYDLCVVGGERLSLCRGLSAYAQACLELGISVGDWRSPANCPLSCPANSRYELCGPACPTSCNGAAAPSNCSGRPCVEGCVCLPGFVASGGACVPASSCGCTFQGLQLAPGQEVWADELCQRRCTCNGATHQVTCRDKQSCPAGERCSVQNGLLGCYPDRFGTCQGSGDPHYVSFDGRRFDFMGTCTYLLVGSCGQNAALPAFRVLVENEHRGSQTVSYTRAVRVEARGVKVAVRREYPGQVLVDDVLQYLPFQAADGQVQVFRQGRDAVVRTDFGLTVTYDWNARVTAKVPSSYAEALCGLCGNFNGDPADDLALRGGGQAANALAFGNSWQEETRPGCGATEPGDCPKLDSLVAQQLQSKNECGILADPKGPFRECHSKLDPQGAVRDCVYDRCLLPGQSGPLCDALATYAAACQAAGATVHPWRSEELCPLSCPPHSHYEACSYGCPLSCGDLPVPEGCESACREGCVCDAGFVLSGDTCVPVGQCGCLHDDRYYPLGQTFYPGPGCDSLCRCREGGEVSCEPSSCGPHETCRPSGGSLGCVAVGSTTCQASGDPHYTTFDGHRFDFMGTCVYVLAQTCGTRPGLHRFAVLQENVAWGNGRVSVTRVITVQVANFTLRLEQRQWKVTVNGVDMKLPVVLANGQIRASQHGSDVVIETDFGLRVAYDLVYYVRVTVPGNYYQLMCGLCGNYNGDPKDDFQKPNGSQAGNANEFGNSWEEVVSDSPCLPPPTCPPGSEGCIPSEECPPELEKKYQKEEFCGLLSSPTGPLSSCHKLVDPQGPLKDCIFDLCLGGGNLSILCSNIHAYVSACQVAGGHVEPWRNETFCPMECPQNSHYELCADTCSLGCSALSAPLQCPDGCAEGCQCDSGFLYNGQACVPIQQCGCYHNGAYYEPEQTVLIDNCRQQCTCHAGKVVVCQEHSCKPGQVCQPSGGILSCVTKDPCHGVTCRPQETCKEQGGQGVCLPNYEATCWLWGDPHYHSFDGRKFDFQGTCNYVLATTGCPGVSTQGLTPFTVTTKNQNRGNPAVSYVRVVTVAALGTNISIHKDEIGKVRVNGVLTALPVSVADGRISVTQGASKALLVADFGLQVSYDWNWRVDVTLPSSYHGAVCGLCGNMDRNPNNDQVFPNGTLAPSIPIWGGSWRAPGWDPLCWDECRGSCPTCPEDRLEQYEGPGFCGPLAPGTGGPFTTCHAHVPPESFFKGCVLDVCMGGGDRDILCKALASYVAACQAAGVVIEDWRAQVGCEITCPENSHYEVCGPPCPASCPSPAPLTTPAVCEGPCVEGCQCDAGFVLSADRCVPLNNGCGCWANGTYHEAGSEFWADGTCSQWCRCGPGGGSLVCTPASCGLGEVCGLLPSGQHGCQPVSTAECQAWGDPHYVTLDGHRFDFQGTCEYLLSAPCHGPPLGAENFTVTVANEHRGSQAVSYTRSVTLQIYNHSLTLSARWPRKLQVDGVFVTLPFQLDSLLHAHLSGADVVVTTTSGLSLAFDGDSFVRLRVPAAYAGSLCGLCGNYNQDPADDLKAVGGKPAGWQVGGAQGCGECVSKPCPSPCTPEQQESFGGPDACGVISATDGPLAPCHGLVPPAQYFQGCLLDACQVQGHPGGLCPAVATYVAACQAAGAQLREWRRPDFCPFQCPAHSHYELCGDSCPGSCPSLSAPEGCESACREGCVCDAGFVLSGDTCVPVGQCGCLHDDRYYPLGQTFYPGPGCDSLCRCREGGEVSCEPSSCGPHETCRPSGGSLGCVAVGSTTCQASGDPHYTTFDGHRFDFMGTCVYVLAQTCGTRPGLHRFAVLQENVAWGNGRVSVTRVITVQVANFTLRLEQRQWKVTVNGVDMKLPVVLANGQIRASQHGSDVVIETDFGLRVAYDLVYYVRVTVPGNYYQLMCGLCGNYNGDPKDDFQKPNGSQAGNANEFGNSWEEVVPDSPCLPPPTCPPGSAGCIPSDKCPPELEKKYQKEEFCGLLSSPTGPLSSCHKLVDPQGPLKDCIFDLCLGGGNLSILCSNIHAYVSACQAAGGHVEPWRNETFCPMECPQNSHYELCADTCSLGCSALSAPLQCPDGCAEGCQCDSGFLYNGQACVPIQQCGCYHNGVYYEPEQTVLIDNCRQQCTCHVGKVVVCQEHSCKPGQVCQPSGGILSCVTKDPCHGVTCRPQETCKEQGGQGVCLPNYEATCWLWGDPHYHSFDGRKFDFQGTCNYVLATTGCPGVSTQGLTPFTVTTKNQNRGNPAVSYVRVVTVAALGTNISIHKDEIGKVRVNGVLTALPVSVADGRISVAQGASKALLVADFGLQVSYDWNWRVDVTLPSSYHGAVCGLCGNMDRNPNNDQVFPNGTLAPSIPIWGGSWRAPGWDPLCWDECRGSCPTCPEDRLEQYEGPGFCGPLSSGTGGPFTTCHAHVPPESFFKGCVLDVCMGGGDRDILCKALASYVAACQAAGVVIEDWRAQVGCEITCPENSHYEVCGPPCPASCPSPAPLTTPAVCEGPCVEGCQCDAGFVLSADRCVPLNNGCGCWANGTYHEAGSEFWADGTCSQWCRCGPGGGSLVCTPASCGLGEVCGLLPSGQHGCQPVSTAECQAWGDPHYVTLDGHRFDFQGTCEYLLSAPCHGPPLGAENFTVTVANEHRGSQAVSYTRSVTLQIYNHSLTLSARWPRKLQVDGVFVALPFQLDSLLHAHLSGADVVVTTTSGLSLAFDGDSFVRLRVPAAYAASLCGLCGNYNQDPADDLKAVGGKPAGWQVGGAQGCGECVSKPCPSPCTPEQQESFGGPDACGVISATDGPLAPCHGLVPPAQYFQGCLLDACQVQGHPGGLCPAVATYVAACQAAGAQLGEWRRPDFCPLQCPAHSHYELCGDSCPVSCPSLSAPEGCESACREGCVCDAGFVLSGDTCVPVGQCGCLHDGRYYPLGEVFYPGPECERRCECGPGGHVTCQEGAACGPHEECRLEDGVQACHATGCGRCLANGGIHYITLDGRVYDLHGSCSYVLAQVCHPKPGDEDFSIVLEKNAAGDLQRLLVTVAGQVVSLAQGQQVTVDGEAVALPVAVGRVRVTAEGRNMVLQTTKGLRLLFDGDAHLLMSIPSPFRGRLCGLCGNFNGNWSDDFVLPNGSAASSVETFGAAWRAPGSSKGCGEGCGPQGCPVCLAEETAPYESNEACGQLRNPQGPFATCQAVLSPSEYFRQCVYDLCAQKGDKAFLCRSLAAYTAACQAAGVAVKPWRTDSFCPLHCPAHSHYSICTRTCQGSCAALSGLTGCTTRCFEGCECDDRFLLSQGVCIPVQDCGCTHNGRYLPVNSSLLTSDCSERCSCSSSSGLTCQAAGCPPGRVCEVKAEARNCWATRGLCVLSVGANLTTFDGARGATTSPGVYELSSRCPGLQNTIPWYRVVAEVQICHGKTEAVGQVHIFFQDGMVTLTPNKGVWVNGLRVDLPAEKLASVSVSRTPDGSLLVRQKAGVQVWLGANGKVAVIVSNDHAGKLCGACGNFDGDQTNDWHDSQEKPAMEKWRAQDFSPCYG

SEQ ID NO: 1315 - protein, 726 aa, Homo sapiens
MLQTKDLIWTLFFLGTAVSLQVDIVPSQGEISVGESKFFLCQVAGDAKDKDISWFSPNGEKLTPNQQRISVVWNDDSSSTLTIYNANIDDAGIYKCVVTGEDGSESEATVNVKIFQKLMFKNAPTPQEFREGEDAVIVCDVVSSLPPTIIWKHKGRDVILKKDVRFIVLSNNYLQIRGIKKTDEGTYRCEGRILARGEINFKDIQVIVNVPPTIQARQNIVNATANLGQSVTLVCDAEGFPEPTMSWTKDGEQIEQEEDDEKYIFSDDSSQLTIKKVDKNDEAEYICIAENKAGEQDATIHLKVFAKPKITYVENQTAMELEEQVTLTCEASGDPIPSITWRTSTRNISSEEKTLDGHMVVRSHARVSSLTLKSIQYTDAGEYICTASNTIGQDSQSMYLEVQYAPKLQGPVAVYTWEGNQVNITCEVFAYPSATISWFRDGQLLPSSNYSNIKIYNTPSASYLEVTPDSENDFGNYNCTAVNRIGQESLEFILVQADTPSSPSIDQVEPYSSTAQVQFDEPEATGGVPILKYKAEWRAVGEEVWHSKWYDAKEASMEGIVTIVGLKPETTYAVRLAALNGKGLGEISAASEFKTQPVQGEPSAPKLEGQMGEDGNSIKVNLIKQDDGGSPIRHYLVRYRALSSEWKPEIRLPSGSDHVMLKSLDWNAEYEVYVVAENQQGKSKAAHFVFRTSAQPTAIPATLGGNSASYTFVSLLFSAVTLLLLC

SEQ ID NO: 1316 - protein, 29 aa, Homo sapiens
MFRRLTFAQLLFATVLGIAGGVYIFQPVF

SEQ ID NO: 1317 - protein, 842 aa, Homo sapiens
MNSNLPAENLTIAVNMTKTLPTAVTHGFNSTNDPPSMSITRLFPALLECFGIVLCGYIAGRANVITSTQAKGLGNFVSRFALPALLFKNMVVLNFSNVDWSFLYSILIAKASVFFIVCVLTLLVASPDSRFSKAGLFPIFATQSNDFALGYPIVEALYQTTYPEYLQYIYLVAPISLMMLNPIGFIFCEIQKWKDTQNASQNKIKIVGLGLLRVLQNPIVFMVFIGIAFNFILDRKVPVYVENFLDGLGNSFSGSALFYLGLTMVGKIKRLKKSAFVVLILLITAKLLVLPLLCREMVELLDKGDSVVNHTSLSNYAFLYGVFPVAPGVAIFATQFNMEVEIITSGMVISTFVSAPIMYVSAWLLTFPTMDPKPLAYAIQNVSFDISIVSLISLSIVCAGMMIWNFVKEKNFVGQILVFVLLYSSLYSTYLWTGLLAISLFLLKKRERVQIPVGIIIISGWGIPALLVGVLLITGKHNGDSIDSAFFYGKEQMITTAVTLFCSILIAGISLMCMNQTAQAGSYEGFDQSQSHKVVEPGNTAFEESPAPVNEPELFTSSIPETSCCSCSMGNGELHCPSIEPIANTSTSEPVIPSFEKNNHCVSRCNSQSCILAQEEEQYLQSGDQQLTRHVLLCLLLIIGLFANLSSCLWWLFNQEPGRLYVELQFFCAVFNFGQGFISFGIFGLDKHLIILPFKRRLEFLWNNKDTAENRDSPVSEEIKMTCQQFIHYHRDLCIRNIVKERRCGAKTSAGTFCGCDLVSWLIEVGLASDRGEAVIYGDRLVQGGVIQHITNEYEFRDEYLFYRFLQKSPEQSPPAINANTLQQERYKEIEHSSPPSHSPKT

SEQ ID NO: 1318 - protein, 2466 aa, Homo sapiens
MGRKTSRVQQGPPRSPACSAHGERSWGLEFPPFRWLLGIAGRTHLAALPPFQWVLAFEIFIPLVLFFILLGLRQKKPTISVKEVAFYTAAPLTSAGILPVMQSLCPDGQRDEFGFLQYANSTVTQLLERLDRVVEEGNLFDPARPSLGSELEALRQHLEALSAGPGTSGSHLDRSTVSSFSLDSVARNPQELWRFLTQNLSLPNSTAQALLAARVDPPEVYHLLFGPSSALDSQSGLHKGQEPWSRLGGNPLFRMEELLLAPALLEQLTCTPGSGELGRILTVPESQKGALQGYRDAVCSGQAAARARRFSGLSAELRNQLDVAKVSQQLGLDAPNGSDSSPQAPPPRRLQALLGDLLDAQKVLQDVDVLSALALLLPQGACTGRTPGPPASGAGGAANGTGAGAVMGPNATAEEGAPSAAALATPDTLQGQCSAFVQLWAGLQPILCGNNRTIEPEALRRGNMSSLGFTSKEQRNLGLLVHLMTSNPKILYAPAGSEVDRVILKANETFAFVGNVTHYAQVWLNISAEIRSFLEQGRLQQHLRWLQQYVAELRLHPEALNLSLDELPPALRQDNFSLPSGMALLQQLDTIDNAACGWIQFMSKVSVDIFKGFPDEESIVNYTLNQAYQDNVTVFASVIFQTRKDGSLPPHVHYKIRQNSSFTEKTNEIRRAYWRPGPNTGGRFYFLYGFVWIQDMMERAIIDTFVGHDVVEPGSYVQMFPYPCYTRDDFLFVIEHMMPLCMVISWVYSVAMTIQHIVAEKEHRLKEVMKTMGLNNAVHWVAWFITGFVQLSISVTALTAILKYGQVLMHSHVVIIWLFLAVYAVATIMFCFLVSVLYSKAKLASACGGIIYFLSYVPYMYVAIREEVAHDKITAFEKCIASLMSTTAFGLGSKYFALYEVAGVGIQWHTFSQSPVEGDDFNLLLAVTMLMVDAVVYGILTWYIEAVHPGMYGLPRPWYFPLQKSYWLGSGRTEAWEWSWPWARTPRLSVMEEDQACAMESRRFEETRGMEEEPTHLPLVVCVDKLTKVYKDDKKLALNKLSLNLYENQVVSFLGHNGAGKTTTMSILTGLFPPTSGSATIYGHDIRTEMDEIRKNLGMCPQHNVLFDRLTVEEHLWFYSRLKSMAQEEIRREMDKMIEDLELSNKRHSLVQTLSGGMKRKLSVAIAFVGGSRAIILDEPTAGVDPYARRAIWDLILKYKPGRTILLSTHHMDEADLLGDRIAIISHGKLKCCGSPLFLKGTYGDGYRLTLVKRPAEPGGPQEPGLASSPPGRAPLSSCSELQVSQFIRKHVASCLLVSDTSTELSYILPSEAAKKGAFERLFQHLERSLDALHLSSFGLMDTTLEEVFLKVSEEDQSLENSEADVKESRKDVLPGAEGPASGEGHAGNLARCSELTQSQASLQSASSVGSARGDEGAGYTDVYGDYRPLFDNPQDPDNVSLQEVEAEALSRVGQGSRKLDGGWLKVRQFHGLLVKRFHCARRNSKALFSQILLPAFFVCVAMTVALSVPEIGDLPPLVLSPSQYHNYTQPRGNFIPYANEERREYRLRLSPDASPQQLVSTFRLPSGVGATCVLKSPANGSLGPTLNLSSGESRLLAARFFDSMCLESFTQGLPLSNFVPPPPSPAPSDSPASPDEDLQAWNVSLPPTAGPEMWTSAPSLPRLVREPVRCTCSAQGTGFSCPSSVGGHPPQMRVVTGDILTDITGHNVSEYLLFTSDRFRLHRYGAITFGNVLKSIPASFGTRAPPMVRKIAVRRAAQVFYNNKGYHSMPTYLNSLNNAILRANLPKSKGNPAAYGITVTNHPMNKTSASLSLDYLLQGTDVVIAIFIIVAMSFVPASFVVFLVAEKSTKAKHLQFVSGCNPIIYWLANYVWDMLNYLVPATCCVIILFVFDLPAYTSPTNFPAVLSLFLLYGWSITPIMYPASFWFEVPSSAYVFLIVINLFIGITATVATFLLQLFEHDKDLKVVNSYLKSCFLIFPNYNLGHGLMEMAYNEYINEYYAKIGQFDKMKSPFEWDIVTRGLVAMAVEGVVGFLLTIMCQYNFLRRPQRMPVSTKPVEDDVDVASERQRVLRGDADNDMVKIENLTKVYKSRKIGRILAVDRLCLGVRPGECFGLLGVNGAGKTSTFKMLTGDESTTGGEAFVNGHSVLKELLQVQQSLGYCPQCDALFDELTAREHLQLYTRLRGISWKDEARVVKWALEKLELTKYADKPAGTYSGGNKRKLSTAIALIGYPAFIFLDEPTTGMDPKARRFLWNLILDLIKTGRSVVLTSHSMEECEALCTRLAIMVNGRLRCLGSIQHLKNRFGDGYMITVRTKSSQSVKDVVRFFNRNFPEAMLKERHHTKVQYQLKSEHISLAQVFSKMEQVSGVLGIEDYSVSQTTLDNVFVNFAKKQSDNLEQQETEPPSALQSPLGCLLSLLRPRSAPTELRALVADEPEDLDTEDEGLISFEEERAQLSFNTDTLC

SEQ ID NO: 1319 - protein, 254 aa, Homo sapiens
MESGLLRPAPVSEVIVLHYNYTGKLRGARYQPGAGLRADAVVCLAVCAFIVLENLAVLLVLGRHPRFHAPMFLLLGSLTLSDLARPGTAGTTSTRARRKPRSLALLRTLSVVLLAFVACWGPLFLLLLLDVACPARTCPVLLQADPFLGLAMANSLLNPIIYTLTNRDLRHALLRLVCCGRHSCGRDPSGSQQSASAAEASGGLRRCLPPGLDGSFSGSERSSPQRDGLDTSGSTGSPGAPTAARTLVSEPAAD

SEQ ID NO: 1320 - protein, 921 aa, Homo sapiens
MTANRDAALSSHRHPGCAQRPRTPTFASSSQRRSAFGFDDGNFPGLGERSHAPGSRLGARRRAKTARGLRGHRQRGAGAGLSRPGSARAPSPPRPGAPENPGGVLSVELPGLLAQLARSFALLLPVYALGYLGLSFSWVLLALALLAWCRRSRGLKALRLCRALALLEDEERVVRLGVRACDLPAWVHFPDTERAEWLNKTVKHMWPFICQFIEKLFRETIEPAVRGANTHLSTFSFTKVDVGQQPLRINGVKVYTENVDKRQIILDLQISFVGNCEIDLEIKRYFCRAGVKSIQIHGTMRVILEPLIGDMPLVGALSIFFLRKPLLEINWTGLTNLLDVPGLNGLSDTIILDIISNYLVLPNRITVPLVSEVQIAQLRFPVPKGVLRIHFIEAQDLQGKDTYLKGLVKGKSDPYGIIRVGNQIFQSRVIKENLSPKWNEVYEALVYEHPGQELEIELFDEDPDKDDFLGSLMIDLIEVEKERLLDEWFTLDEVPKGKLHLRLEWLTLMPNASNLDKVLTDIKADKDQANDGLSSALLILYLDSARNLPSGKKISSNPNPVVQMSVGHKAQESKIRYKTNEPVWEENFTFFIHNPKRQDLEVEVRDEQHQCSLGNLKVPLSQLLTSEDMTVSQRFQLSNSGPNSTIKMKIALRVLHLEKRERPPDHQHSAQVKRPSVSKEGRKTSIKSHMSGSPGPGGSNTAPSTPVIGGSDKPGMEEKAQPPEAGPQGLHDLGRSSSSLLASPGHISVKEPTPSIASDISLPIATQELRQRLRQLENGTTLGQSPLGQIQLTIRHSSQRNKLIVVVHACRNLIAFSEDGSDPYVRMYLLPDKRRSGRRKTHVSKKTLNPVFDQSFDFSVSLPEVQRRTLDVAVKNSGGFLSKDKGLLGKVLVALASEELAKGWTQWYDLTEDGTRPQAMT

SEQ ID NO: 1321 - protein, 224 aa, Homo sapiens
MNQADPRLRAVCLWTLTSAAMSRGDNCTDLLALGIPSITQAWGLWVLLGAVTLLFLISLAAHLSQWTRGRSRSHPGQGRWVKDNRDGLTESSLLPRSPHSSPKLCVASGESVEEVPLYGNLHYLQTGRLSQDPEPDQQDPTLGGPARAAEEVMCYTSLQLRPPQGRIPGPGTPVKYSEVVLDSEPKSQASGPEPELYASVCAQTRRARASFPDQAYANSQPAAS

SEQ ID NO: 1322 - protein, 477 aa, Homo sapiens
MQRLQDEQEIVQKRTFTKWINSHLAKRKPPMVVDDLFEDMKDGVKLLALLEVLSGQKLPCEQGRRMKRIHAVANIGTALKFLEGRKSMHRGSPIKLVNINSTDIADGRPSIVLGLMWTIILYFQIEELTSNLPQLQSLSSSASSVDSIVSSETPSPPSKRKVTTKIQGNAKKALLKWVQYTAGKQTGIEVKDFGKSWRSGVAFHSVIHAIRPELVDLETVKGRSNRENLEDAFTIAETELGIPRLLDPEDVDVDKPDEKSIMTYVAQFLKHYPDIHNASTDGQEDDEILPGFPSFANSVQNFKREDRVIFKEMKVWIEQFERDLTRAQMVESNLQDKYQSFKHFRVQYEMKRKQIEHLIQPLHRDGKLSLDQALVKQSWDRVTSRLFDWHIQLDKSLPAPLGTIGAWLYRAEVALREEITVQQVHEETANTIQRKLEQHKKIEAIRKELPPAPTATSTHLRNCICARIHALHFCYYG

SEQ ID NO: 1323 - protein, 129 aa, Homo sapiens
MLKLYAMFLTLVFLVELVAAIVGFVFRHEIKNSFKNNYEKALKQYNSTGDYRSHAVDKIQNTLHCCGVTDYRDWTDTNYYSEKGFPKSCCKLEDCTPQRDADKVNNELIGIFLAYCLSRAITNNQYEIV

SEQ ID NO: 1324 - protein, 144 aa, Homo sapiens
MELVLVFLCSLLAPMVLASAAEKEKEMDPFHYDYQTLRIGGLVFAVVLFSVGILLILSRRCKCSFNQKPRNRAPESRELKCSHQVEGGSPKGDVDPFYYDYETVRNGGLIFAGLAFIVGLLILLSRRFRCGGNKKRRQINEDEP

SEQ ID NO: 1325 - protein, 337 aa, Homo sapiens
MAPRARRRRPLFALLLLCALLARLQVALQIAPPCTSEKHYEHLGRCCNKCEPGKYMSSKCTTTSDSVCLPCGPDEYLDSWNEEDKCLLHKVCDTGKALVAVVAGNSTTPRRCACTAGYHWSQDCECCRRNTECAPGLGAQHPLQLNKDTVCKPCLAGYFSDAFSSTDKCRPWTNCTFLGKRVEHHGTEKSDAVCSSSLPARKPPNEPHVYLPGLIILLLFASVALVAAIIFGVCYRKKGKALTGNVTGNSNSTFISSGQVMNFKGDIIVVYVSQTSQEGAAAAAEPMGRPVQEETLARRDSFAGNGPRFPDPCGGPEGLREPEKASRPVQEQGGAKA

SEQ ID NO: 1326 - protein, 216 aa, Homo sapiens
MRTEDLPKAVVFLEPQWYSVLEKDSVTLKCQGAYSPEDNSTQWFHNENLISSQASSYFIDAATVNDSGEYRCQTNLSTLSDPVQLEVHIGWLLLQAPRWVFKEEDPIHLRCHSWKNTALHKVTYLQNGKDRKYFHHNSDFHIPKATLKDSGSYFCRGLVGSKNVSSETVNITITQGLAVSTISSFSPPGYQVSFCLVMVLLFAVDTGLYFSVKTNI

SEQ ID NO: 1327 - protein, 137 aa, Homo sapiens
MLKLYAMFLTLVFLVELVAAIVGFVFRHEIKNSFKNNYEKALKQYNSTGDYRSHAVDKIQNTLHCCGVTDYRDWTDTNYYSEKGFPKSCCKLEDCTPQRDADKVNNEGCFIKVMTIIESEMGVVAGISFGVACFQDI

SEQ ID NO: 1328 - protein, 3354 aa, Homo sapiens
MGRHVATSCHVAWLLVLISGCWGQVNRLPFFTNHFFDTYLLISEDTPVGSSVTQLLAQDMDNDPLVFGVSGEEASRFFAVEPDTGVVWLRQPLDRETKSEFTVEFSVSDHQGVITRKVNIQVGDVNDNAPTFHNQPYSVRIPENTPVGTPIFIVNATDPDLGAGGSVLYSFQPPSQFFAIDSARGIVTVIRELDYETTQAYQLTVNATDQDKTRPLSTLANLAIIITDVQDMDPIFINLPYSTNIYEHSPPGTTVRIITAIDQDKGRPRGIGYTIVSGNTNSIFALDYISGVLTLNGLLDRENPLYSHGFILTVKGTELNDDRTPSDATVTTTFNILVIDINDNAPEFNSSEYSVAITELAQVGFALPLFIQVVDKDETQGLNSMFEVYLVGNNSHHFIISPTSVQGKADIRIRVAIPLDYETVDRYDFDLFANESVPDHVGYAKVKITLINENDNRPIFSQPLYNISLYENVTVGTSVLTVLATDNDAGTFGEVSYFFSDDPDRFSLDKDTGLIMLIARLDYELIQRFTLTIIARDGGGEETTGRVRINVLDVNDNVPTFQKDAYVGALRENEPSVTQLVRLRATDEDSPPNNQITYSIVSASAFGSYFDISLYEGYGVISVSRPLDYEQISNGLIYLTVMAMDAGNPPLNSTVPVTIEVFDENDNPPTFSKPAYFVSVVENIMAGATVLFLNATDLDRSREYGQESIIYSLEGSTQFRINARSGEITTTSLLDRETKSEYILIVRAVDGGVGHNQKTGIATVNITLLDINDNHPTWKDAPYYINLVEMTPPDSDVTTVVAVDPDLGENGTLVYSIQPPNKFYSLNSTTGKIRTTHAMLDRENPDPHEAELMRKIVVSVTDCGRPPLKATSSATVFVNLLDLNDNDPTFQNLPFVAEVLEGIPAGVSIYQVVAIDLDEGLNGLVSYRMPVGMPRMDFLINSSSGVVVTTTELDRERIAEYQLRVVASDAGTPTKSSTSTLTIHVLDVNDETPTFFPAVYNVSVSEDVPREFRVVWLNCTDNDVGLNAELSYFITGGNVDGKFSVGYRDAVVRTVVGLDRETTAAYMLILEAIDNGPVGKRHTGTATVFVTVLDVNDNRPIFLQSSYEASVPEDIPEGHSILQLKATDADEGEFGRVWYRILHGNHGNNFRIHVSNGLLMRGPRPLDRERNSSHVLIVEAYNHDLGPMRSSVRVIVYVEDINDEAPVFTQQQYSRLGLRETAGIGTSVIVVQATDRDSGDGGLVNYRILSGAEGKFEIDESTGLIITVNYLDYETKTSYMMNVSATDQAPPFNQGFCSVYITLLNELDEAVQFSNASYEAAILENLALGTEIVRVQAYSIDNLNQITYRFNAYTSTQAKALFKIDAITGVITVQGLVDREKGDFYTLTVVADDGGPKVDSTVQVYITVLDENDNSPRFDFTSDSAVSIPEDCPVGQRVATVKAWDPDAGSNGQVVFSLASGNIAGAFEIVTTNDSIGEVFVARPLDREELDHYILQVVASDRGTPPRKKDHILQVTILDINDNPPVIESPFGYNVSVNENVGGGTAVVQVRATDRDIGINSVLSYYITEGNKDMAFRMDRISGEIATRPAPPDRERQSFYHLVATVEDEGTPTLSATTHVYVTIVDENDNAPMFQQPHYEVLLDEGPDTLNTSLITIQALDLDEGPNGTVTYAIVAGNIVNTFRIDRHMGVITAAKELDYEISHGRYTLIVTATDQCPILSHRLTSTTTVLVNVNDINDNVPTFPRDYEGPFEVTEGQPGPRVWTFLAHDRDSGPNGQVEYSIMDGDPLGEFVISPVEGVLRVRKDVELDRETIAFYNLTICARDRGMPPLSSTMLVGIRVLDINDNDPVLLNLPMNITISENSPVSSFVAHVLASDADSGCNARLTFNITAGNRERAFFINATTGIVTVNRPLDRERIPEYKLTISVKDNPENPRIARRDYDLLLIFLSDENDNHPLFTKSTYQAEVMENSPAGTPLTVLNGPILALDADQDIYAVVTYQLLGAQSGLFDINSSTGVVTVRSGVIIDREAFSPPILELLLLAEDIGLLNSTAHLLITILDDNDNRPTFSPATLTVHLLENCPPGFSVLQVTATDEDSGLNGELVYRIEAGAQDRFLIHLVTGVIRVGNATIDREEQESYRLTVVATDRGTVPLSGTAIVTILIDDINDSRPEFLNPIQTVSVLESAEPGTVIANITAIDHDLNPKLEYHIVGIVAKDDTDRLVPNQEDAFAVNINTGSVMVKSPMNRELVATYEVTLSVIDNASDLPERSVSVPNAKLTVNVLDVNDNTPQFKPFGITYYMERILEGATPGTTLIAVAAVDPDKGLNGLVTYTLLDLVPPGYVQLEDSSAGKVIANRTVDYEEVHWLNFTVRASDNGSPPRAAEIPVYLEIVDINDNNPIFDQPSYQEAVFEDVPVGTIILTVTATDADSGNFALIEYSLGDGESKFAINPTTGDIYVLSSLDREKKDHYILTALAKDNPGDVASNRRENSVQVVIQVLDVNDCRPQFSKPQFSTSVYENEPAGTSVITMMATDQDEGPNGELTYSLEGPGVEAFHVDMDSGLVTTQRPLQSYEKFSLTVVATDGGEPPLWGTTMLLVEVIDVNDNRPVFVRPPNGTILHIREEIPLRSNVYEVYATDKDEGLNGAVRYSFLKTAGNRDWEFFIIDPISGLIQTAQRLDRESQAVYSLILVASDLGQPVPYETMQPLQVALEDIDDNEPLFVRPPKGSPQYQLLTVPEHSPRGTLVGNVTGAVDADEGPNAIVYYFIAAGNEEKNFHLQPDGCLLVLRDLDREREAIFSFIVKASSNRSWTPPRGPSPTLDLVADLTLQEVRVVLEDINDQPPRFTKAEYTAGVATDAKVGSELIQVLALDADIGNNSLVFYSILAIHYFRALANDSEDVGQVFTMGSMDGILRTFDLFMAYSPGYFVVDIVARDLAGHNDTAIIGIYILRDDQRVKIVINEIPDRVRGFEEEFIHLLSNITGAIVNTDNVQFHVDKKGRVNFAQTELLIHVVNRDTNRILDVDRVIQMIDENKEQLRNLFRNYNVLDVQPAISVRLPDDMSALQMAIIVLAILLFLAAMLFVLMNWYYRTVHKRKLKAIVAGSAGNRGFIDIMDMPNTNKYSFDGANPVWLDPFCRNLELAAQAEHEDDLPENLSEIADLWNSPTRTHGTFGREPAAVKPDDDRYLRAAIQEYDNIAKLGQIIREGPIKGSLLKVVLEDYLRLKKLFAQRMVQKASSCHSSISELIQTELDEEPGDHSPGQGSLRFRHKPPVELKGPDGIHVVHGSTGTLLATDLNSLPEEDQKGLGRSLETLTAAEATAFERNARTESAKSTPLHKLRDVIMETPLEITEL

SEQ ID NO: 1329 - protein, 231 aa, Homo sapiens
MQDEERYMTLNVQSKKRSSAQTSQLTFKDYSVTLHWYKILLGISGTVNGILTLTLISLILLVSQGVLLKCQKGSCSNATQYEDTGDLKVNNGTRRNISNKDLCASRSADQTVLCQSEWLKYQGKCYWFSNEMKSWSDSYVYCLERKSHLLIIHDQLEMAFIQKNLRQLNYVWIGLNFTSLKMTWTWVDGSPIDSKIFFIKGPAKENSCAAIKESKIFSETCSSVFKWICQY

SEQ ID NO: 1330 - protein, 241 aa, Homo sapiens
MAGSPTCLTLIYILWQLTEHLSKPKVTMGLQSNKNGTCVTNLTCCMEHGEEDVIYTWKALGQAANESHNGSILPISWRWGESDMTFICVARNPVSRNFSSPILARKLCEGDCLSPLHRRLCPGAADDPDSSMVLLCLLLVPLLLSLFVLGLFLWFLKRERQEEYIEEKKRVDICRETPNICPHSGENTEYDTIPHTNRTILKEDPANTVYSTVEIPKKMENPHSLLTMPDTPRLFAYENVI

SEQ ID NO: 1331 - protein, 78 aa, Homo sapiens
MQDEERYMTLNVQSKKRSSAQTSQLTFKDYSVTLHWYKILLGISGTVNGILTLTLISLILLGFYTEKPKTIKLRMDWA

SEQ ID NO: 1332 - protein, 142 aa, Homo sapiens [sequence omitted]

SEQ ID NO: 1333 - protein, 732 aa, Homo sapiens
MVSWGRFICLVVVTMATLSLARPSFSLVEDTTLEPEDAISSGDDEDDTDGAEDFVSENSNNKRAPYWTNTEKMEKRLHAVPAANTVKFRCPAGGNPMPTMRWLKNGKEFKQEHRIGGYKVRNQHWSLIMESVVPSDKGNYTCVVENEYGSINHTYHLDVVERSPHRPILQAGLPANASTVVGGDVEFVCKVYSDAQPHIQWIKHVEKNGSKYGPDGLPYLKVLKAAGVNTTDKEIEVLYIRNVTFEDAGEYTCLAGNSIGISFHSAWLTVLPAPGREKEITASPDYLEIAIYCIGVFLIACMVVTVILCRMKNTTKKPDFSSQPAVHKLTKRIPLRRQVTVSAESSSSMNSNTPLVRITTRLSSTADTPMLAGVSEYELPEDPKWEFPRDKLTLGKPLGEGCFGQVVMAEAVGIDKDKPKEAVTVAVKMLKDDATEKDLSDLVSEMEMMKMIGKHKNIINLLGACTQDGPLYVIVEYASKGNLREYLRARRPPGMEYSYDINRVPEEQMTFKDLVSCTYQLARGMEYLASQKCIHRDLAARNVLVTENNVMKIADFGLARDINNIDYYKKTTNGRLPVKWMAPEALFDRVYTHQSDVWSFGVLMWEIFTLGGSPYPGIPVEELFKLLKEGHRMDKPANCTNELYMMMRDCWHAVPSQRPTFKQLVEDLDRILTLTTNEEYLDLSQPLEQYSPSYPDTRSSCSSGDDSVFSPDPMPYEPCLPQYPHINGSVKT

SEQ ID NO: 1334 - protein, 403 aa, Homo sapiens
MLGPCPVTCSSSNLSSPWLSAPSCTWTPRGDWFLKGNLLIIIVSVLIILPLALMKHLGYLGYTSGLSLTCMLFFLVSVIYKKFQLGCAIGHNETAMESEALVGLPSQGLNSSCEAQMFTVDSQMSYTVPIMAFAFVCHPEVLPIYTELCRPSKRRMQAVANVSIGAMFCMYGLTATFGYLTFYSSVKAEMLHMYSQKDPLILCVRLAVLLAVTLTVPVVLFPIRRALQQLLFPGKAFSWPRHVAIALILLVLVNVLVICVPTIRDIFGVIGSTSAPSLIFILPSIFYLRIVPSEVEPFLSWPKIQALCFGVLGVLFMAVSLGFMFANWATGRAACLDTDQALLAQVPVRMHMEGSGPLPRVPPAQHVEVAGSHERGCQRRGTAEAADWPTSLLPRDAKLGSWP

SEQ ID NO: 1335 - protein, 626 aa, Homo sapiens
MPLLLLLLLLPSPLHPHPICEVSKVASHLEVNCDKRNLTALPPDLPKDTTILHLSENLLYTFSLATLMPYTRLTQLNLDRCELTKLQVDGTLPVLGTLDLSHNQLQSLPLLGQTLPALTVLDVSFNRLTSLPLGALRGLGELQELYLKGNELKTLPPGLLTPTPKLEKLSLANNNLTELPAGLLNGLENLDTLLLQENSLYTIPKGFFGSHLLPFAFLHGNPWLCNCEILYFRRWLQDNAENVYVWKQGVDVKAMTSNVASVQCDNSDKFPVYKYPGKGCPTLGDEGDTDLYDYYPEEDTEGDKVRATRTVVKFPTKAHTTPWGLFYSWSTASLDSQMPSSLHPTQESTKEQTTFPPRWTPNFTLHMESITFSKTPKSTTEPTPSPTTSEPVPEPAPNMTTLEPTPSPTTPEPTSEPAPSPTTPEPTPIPTIATSPTILVSATSLITPKSTFLTTTKPVSLLESTKKTIPELDQPPKLRGVLQGHLESSRNDPFLHPDFCCLLPLGFYVLGLFWLLFASVVLILLLSWVGHVKPQALDSGQGAALTTATQTTHLELQRGRQVTVPRAWLLFLRGSLPTFRSSLFLWVRPNGRVGPLVAGRRPSALSQGRGQDLLSTVSIRYSGHSL

SEQ ID NO: 1336 - protein, 164 aa, Homo sapiens
MDPGLQQALNGMAPPGDTAMHVPAGSVASHLGTTSRSYFYLTTATLALCLVFTVATIMVLVVQRTDSIPNSPDNVPLKGGNCSEDLLCILKRAPFKKSWAYLQVAKHLNKTKLSWNKDGILHGVRYQDGNLVIQFPDYCGMILHHSHSTLDSGKGHCCLETLQP

SEQ ID NO: 1337 - protein, 128 aa, Homo sapiens
MQDEERYMTLNVQSKKRSSAQTSQLTFKDYSVTLHWYKILLGISGTVNGILTLTLISLILLVSQGVLLKCQKGSCSNATQYEDTGDLKVNNGTRRNISNKDLCASRSADQTGFYTEKPKTIKLRMDWA

SEQ ID NO: 1338 - protein, 848 aa, Homo sapiens
MLQTKDLIWTLFFLGTAVSLQVDIVPSQGEISVGESKFFLCQVAGDAKDKDISWFSPNGEKLTPNQQRISVVWNDDSSSTLTIYNANIDDAGIYKCVVTGEDGSESEATVNVKIFQKLMFKNAPTPQEFREGEDAVIVCDVVSSLPPTIIWKHKGRDVILKKDVRFIVLSNNYLQIRGIKKTDEGTYRCEGRILARGEINFKDIQVIVNVPPTIQARQNIVNATANLGQSVTLVCDAEGFPEPTMSWTKDGEQIEQEEDDEKYIFSDDSSQLTIKKVDKNDEAEYICIAENKAGEQDATIHLKVFAKPKITYVENQTAMELEEQVTLTCEASGDPIPSITWRTSTRNISSEEKTLDGHMVVRSHARVSSLTLKSIQYTDAGEYICTASNTIGQDSQSMYLEVQYAPKLQGPVAVYTWEGNQVNITCEVFAYPSATISWFRDGQLLPSSNYSNIKIYNTPSASYLEVTPDSENDFGNYNCTAVNRIGQESLEFILVQADTPSSPSIDQVEPYSSTAQVQFDEPEATGGVPILKYKAEWRAVGEEVWHSKWYDAKEASMEGIVTIVGLKPETTYAVRLAALNGKGLGEISAASEFKTQPVQGEPSAPKLEGQMGEDGNSIKVNLIKQDDGGSPIRHYLVRYRALSSEWKPEIRLPSGSDHVMLKSLDWNAEYEVYVVAENQQGKSKAAHFVFRTSAQPTAIPANGSPTSGLSTGAIVGILIVIFVLLLVVVDITCYFLNKCGLFMCIAVNLCGKAGPGAKGKDMEEGKAAFSKDESKEPIVEVRTEEERTPNHDGGKHTEPNETTPLTEPEKGPVEAKPECQETETKPAPAEVKTVPNDATQTKENESKA

SEQ ID NO: 1339 - protein, 56 aa, Homo sapiens
MADVSERTLQLSVLVAFASGVLLGWQANRLRRRYLDWRKRRLQDKLAATQKKLDLA

SEQ ID NO: 1340 - protein, 138 aa, Homo sapiens
MLANDVRHQQEMWGFRKVEGGVVQSLGKSSVEGETDGTISEFREIQRLAAFASFLSHAPPLNARRLLTPPPRRRPRCTPAAAMADVSERTLQLSVLVAFASGVLLGWQANRLRRRYLDWRKRRLQDKLAATQKKLDLA

SEQ ID NO: 1341 - protein, 121 aa, Homo sapiens
MGRKTSRVQQGPPRSPACSAHGERSWGLEFPPFRWLLGIAGRTHLAALPPFQWVLAFEIFIPLVLFFILLGLRQKKPTISVKEVSFYTAAPLTSAGILPVMQSLCPDGQRDEFGFLQYANS

SEQ ID NO: 1342 - protein, 129 aa, Homo sapiens
MVLEYCPGGELFDYIISQDRLSEEETRVVFRQIVSAVAYVHSQGYAHRDLKPENLLFDEYHKLKLIDFGLCAKPKGNKDYHLQTCCGSLAYAAPELIQGKSYLGSEMFGAWAYCYMFLCVDFYHLMMIM

SEQ ID NO: 1343 - protein, 143 aa, Homo sapiens
HHPISDHEATLRCWALGFYPAEITLTWQRDGEEQTQDTELVETRPAGDGTFQKWAAVVVPPGEEQRYTCHVQHEGLPQPLILRWEQSPQPTIPIVGIVAGLVVLGAVVTGAVVAAVMWRKKSSDRNRGSYSQAAGKLTHTGVQ

SEQ ID NO: 1344 - protein, 588 aa, Homo sapiens
MDLARKEFLRGNGLAAGKMNISIDLDTNYAELVLNVGRVTLGENNRKKMKDCQLRKQQNENVSRAVCALLNSGGGVIKAEVENKGYSYKKDGIGLDLENSFSNMLPFVPNFLDFMQNGNYFHIFVKSWSLETSGPQIATLSSSLYKRDVTSAKVMNASAALEFLKDMEKTGGRAYLRPEFPAKRACVDVQEESNMEALAADFFNRTELGYKEKLTFTESTHVEIKNFSTEKLLQRITEILPQYVSAFANTDGGYLFVGLNEDKEVIGFKAEKSYLTKLEEVTKNSIGKLPVHHFCVEKGTINYLCKFLGVYDKGRLCGYVYALRVERFCCAVFAKKPDSWHVKDNRVKQLTEKEWIQFMVDSEPVCEELPSPASTSSPVSQSYPLREYINFKIQPLRYHLPGLSEKITCAPKTFCRNLFSQHEGLKQLICEEMGSVNKGSLIFSRSWSLDLGLQENHKVLCDALLISQDKPPVLYTFHMVQDEEFKDYSTQTAQTLKQKLAKIGGYTKKVCVMTKIFYLSPEGKTSCQYDLNSQVIYPESYYWTTAQTMKDLEKALSNILPKENQIFLFVCLFRFCLFVCWFVCFFLR

SEQ ID NO: 1345 - protein, 215 aa, Homo sapiens
MKDYDELLKYYELHETIGTGGFAKVKLACHILTGEMVAIKIMDKNTLGSDLPRIKTEIEALKNLRHQHICQLYHVLETANKIFMVLEENLLFDEYHKLKLIDFGLCAKPKGNKDYHLQTCCGSLAYAAPELIQGKSYLGSEADVWSMGILLYVLMCGFLPFDDDNVMALYKKIMRGKYDVPKWLSPSSILLLQQMLQVDPKKRISMKNLLNHPWI

SEQ ID NO: 1346 - protein, 287 aa, Homo sapiens
MKDRLEQLKAKQLTQDDDTDAVEIAIDNTAFMDEFFSEIEETRLNIDKISEHVEEAKKLYSIILSAPIPEPKTKDDLEQLTTEIKKRANNVRNKLKSMEKHIEEDEVRSSADLRIRKSQHSVLSRKFVEVMTKYNEAQVDFRERSKGRIQRQLEITGKKTTDEELEEMLESGNPAIFTSGIIDSQISKQALSEIEGRHKDIVRLESSIKELHDMFMDIAMLVENQGSMIDRIENNMDQSVGFVERAVADTKKAVKYQSEARRKKIMIMICCIILAIILASTIGSIFA

SEQ ID NO: 1347 - protein, 289 aa, Homo sapiens
FSHGQVVSLDELRPFQDPDLSSLQAGSACLAKHQDGLWHAARITDVDNGYYTVKFDSLLLREAVVEGDGILPPLRTEATESDSDSDGTGDSSYARGMAAAAEPRSQEGPRLHRMGLPVSWAPPALWVLGCCALLLSLWALCTACRRPEDAVAPRKRARRQRARLQGSATAAEAQVGHQTARAAPGPAQQQGPAACQHGSPAPTLAGGVQGHHRTAGSPLCLPTPGAAPGSAGSCSHRRVRWPRGHLFQRGAGGPSRGQPGGQPCGGRVCPRPEAQRDPSQSPRATAGED

SEQ ID NO: 1348 - protein, 166 aa, Homo sapiens
SAQESVITRDIHRTFPAHDYFKDTGGDGQESLYKICKAYSVYDEDIGYCQGQSFLAAVLLLHMPEEQAFCVLVKIMYDYGLRDLYRNNFEDLHCKFYQLERLMQEQLPDLHSHFSDLNLEAHMYASQWFLTLFTAKFPLCMVFHIIDLLLCESGISALQFTGMVTF

SEQ ID NO: 1349 - protein, 111 aa, Homo sapiens
MESALPAAGFLYWVGAGTVAYLALRISYSLFTALRVWGVGNEAGVGPGLGEWAGESDAAPRPRSRGGPDQAWAVMTSSGVCSWPSPPQLSSFSGSCAPRAPPGSLGCLLLA

SEQ ID NO: 1350 - protein, 474 aa, Homo sapiens
GSASAPTLFPLVSCENSPSDTSSVAVGCLAQDFLPDSITFSWKYKNNSDISSTRGFPSVLRGGKYAATSQVLLPSKDVMQGTDEHVVCKVQHPNGNKEKNVPLPVIAELPPKVSVFVPPRDGFFGNPRKSKLICQATGFSPRQIQVSWLREGKQVGSGVTTDQVQAEAKESGPTTYKVTSTLTIKESDWLGQSMFTCRVDHRGLTFQQNASSMCVPDQDTAIRVFAIPPSFASIFLTKSTKLTCLVTDLTTYDSVTISWTRQNGEAVKTHTNISESHPNATFSAVGEASICEDDWNSGERFTCTVTHTDLPSPLKQTISRPKGVALHRPDVYLLPPAREQLNLRESATITCLVTGFSPADVFVQWMQRGQPLSPEKYVTSAPMPEPQAPGRYFAHSILTVSEEEWNTGETYTCVVAHEALPNRVTERTVDKSTEGEVSADEEGFENLWATASTFIVLFLLSLFYSTTVTLFKVK

SEQ ID NO: 1351 - protein, 426 aa, Homo sapiens
MEESKQLQIHLDDIVIPSAAVISRAETINATVPKTIIYWDSQTTIEKVSCEMRYKATTNQTWNVKEFDTNFTYVQQSEFYLEPNIKYVFQVRCQETGKRYWQPWSSLFFHKTPETVPQVTSKAFQHDTWNSGLTVASISTGHLTSDNRGDIGLLLGMIVFAVMLSILSLIGIFNRSFRTGIKRRILLLIPKWLYEDIPNMKNSNVVKMLQENSELMNNNSSEQVLYVDPMITEIKEIFIPEHKPTDYKKENTGPLETRDYPQNSLFDNTTVVYIPDLNTGYKPQISNFLPEGSHLSNNNEITSLTLKPPVDSLDSGNNPRLQKHPNFAFSVSSVNSLSNTIFLGELSLILNQGECSSPDIQNSVEEETTMLLENDSPSETIPEQTLLPDEFVSCLGIVNEELPSINTYFPQNILESHFNRISLLEK

SEQ ID NO: 1352 - protein, 175 aa, Homo sapiens
MVGALCGCWFRLGGARPLIPLGPTVVQTSMSRSQVALLGLSLLLMLLLYVGLPGPPEQTSCLWGDPNVTVLAGLTPGNSPIFYREVLPLNQAHRVEVVLLHGKAFNSHTWEQLGTLQLLSQRGYRAVALDLPGGTWLCGDRVDLARHQPYTLLHLAQLPHGCGACLQGTLESRPL

SEQ ID NO: 1353 - protein, 363 aa, Homo sapiens
MAPNGTASSFCLDSTACKITITVVLAVLILITVAGNVVVCLAVGLNRRLRNLTNCFIVSLAITDLLLGLLVLPFSAIYQLSCKWSFGKVFCNIYTSLDVMLCTASILNLFMISLDRYCAVMDPLRYPVLVTPVRVAISLVLIWVISITLSFLSIHLGWNSRNETSKGNHTTSKCKVQVNEVYGLVDGLVTFYLPLLIMCITYYRIFKVARDQAKRINHISSWKAATIREHKATVTLAAVMGAFIICWFPYFTAFVYRGLRGDDAINEVLEAIVLWLGYANSALNPILYAALNRDFRTGYQQLFCCRLANRNSHKTSLRSNASQLSRTQSREPRQQEEKPLKLQVWSGTEVTAPQGATDREFGE

SEQ ID NO: 1354 - protein, 505 aa, Homo sapiens [sequence omitted]

SEQ ID NO: 1355 - protein, 418 aa, Homo sapiens
MRTKAAGCAERRPLQPRTEAAAAPAGRAMPSEYTYVKLRSDCSRPSLQWYTRAQSKMRRPSLLLKDILKCTLLVFGVWILYILKLNYTTEECDMKKMHYVDPDHVKRAQKYAQQVLQKECRPKFAKTSMALLFEHRYSVDLLPFVQKAPKDSEAESKYDPPFGFRKFSSKVQTLLELLPEHDLPEHLKAKTCRRCVVIGSGGILHGLELGHTLNQFDVVIRLNSAPVEGYSEHVGNKTTIRMTYPEGAPLSDLEYYSNDLFVAVLFKSVDFNWLQAMVKKETLPFWVRLFFWKQVAEKIPLQPKHFRILNPVIIKETAFDILQYSEPQSRFWGRDKNVPTIGVIAVVLATHLCDEVSLAGFGYDLNQPRTPLHYFDSQCMAAMNFQTMHNVTTETKFLLKLVKEGVVKDLSGGIDREF

SEQ ID NO: 1356 - protein, 1027 aa, Homo sapiens
MRAALWTLGLGPLLLNLWAVPIGGPGALRLAYRHSTCDGVVLVRHHGAWGYVCNQEWTLAEASVVCRQLGCGPAVGAPKYVPLPGEMAQPWLHNVSCRGNESSLWECSLGSWCQSPCPHAWVVVALCSNGTFRELRLVKGRSPCAGLPEIRNVNGVDRLCVLHVEEAMVFCRELGCGPVLQAPRRDVGVVRKYLACRGTEPTIRSCRLDNNFRSGCDLRLDAEVVCSGHTEARLVGGEHPCAGRLEVTWGTVCDAALDLATAHVVCRELQCGAVVSTPEGARFGRGSGPVWTEAFRCAGNESLLFHCPRGRGSQCGHGHDAGLRCSEFRMVNGSSSCEGRVEFQVQGSWAPLCATHWDIADATVLCHQLNCGNAVAAPGGGHFGDGDAAIWPDAFHCEGTESYLWNCPVSTLGAPACAPGNTASAVCSGLAHALRLREGQSRCDGRVEVSLDGVWGRVLDDAWDLRGAGVVCRQLGCRGAQQAYDAPAPSRGSVQVALSRVRCLGTETRLTQCNVSATLQEPAGTSRDAGVVCSGEVGTASPMARRHGIPGALTLSLHREPQGAAGRGAGALHGGAWGTVCDDAWDLRDAHVVCRQLGCGRALSALGAAHFGAGAGRIWLDELGCQGHESALWQCPSAGWGRHDWRHKEDAGVFCSESVALRLRGGTCCCAGWLDVFYNGTWGAMCSNALKDLSLSIICKQLGCGVWGVGLAGEQALPLCGHRDRLGGQHRVPQAAQLHSVAMPFPPMAPALLRPSRAGLSEDRPQAAGEPLNCSSWLGCPEEGALRVRGGEDRCSGRVELWHAGSWGTVCDDGWDLADAEVVCRQLGCGRAVAALGAAAFGPGSGPVWLDEVGCRGSEASLWGCPAERWGRGDRAHEEDAGVRCWEPGPGPPLPAAPFRTFWVVSVVLGSLLGLLLLGLMAFLILPRVTQAMQRGLGRSEVSPGEAIYDVIGEMPPAGLYEEIMEAEAVLQDEEDGSVVKVDTEAAVSGEVSNLLEGQSIRAEGGHSRPVSQGYDEAAFPLEEMTL

SEQ ID NO: 1357 - protein, 476 aa, Homo sapiens
MAAAACGTKAMALFKRTLVLSPAAAPRGPGAGTAPRGCCLPPAAWPCKDWPRGEGGRLWSRLPQSHSHSHSHSHSHSCSSTSPTAVCVVCPQDSLSSSLKTCYKYLNQTSRSFAAVIQALDGEMRNAVCIFYLVLRALDTLEDDMTISVEKKVPLLHNFHSFLYQPDWRFMESKEKDRQVLEDFPTISLEFRNLAEKYQTVIADICRRMGIGMAEFLDKHVTSEQEWDKYCHYVAGLVGIGLSRLFSASEFEDPLVGEDTERANSMGLFLQKTNIIRDYLEDQQGGREFWPQEVWSRYVKKLGDFAKPENIDLAVQCLNELITNALHHIPDVITYLSRLRNQSVFNFCAIPQVMAIATLAACYNNQQVFKGAVKIRKGQAVTLMMDATNMPAVKAIIYQYMEEIYHRIPDSDPSSSKTRQIISTIRTQNLPNCQLISRSHYSPIYLSFVMLLAALSWQYLTTLSQVTEDYVQTGEH

SEQ ID NO: 1358 - protein, 168 aa, Homo sapiens
MLLLTRSPTAWHRLSQLKPRVLPGTLGGQALHLRSWLLSRQGPAETGGQGQPQGPGLRTRLLITGLFGAGLGGAWLALRAEKERLQQQKRTEALRQAAVGQGDFHLLDHRGRARCKADFRGQWVLMYFGFTHCPDICPDELEKLVQVVRQLEAEPGLPPVQPVFITVD

SEQ ID NO: 1359 - protein, 223 aa, Homo sapiens
AERRPLQPRTEAAAAPAGRAMPSEYTYVKLRSDCSRPSLQWYTRAQSKMRRPSLLLKDILKCTLLVFGVWILYILKLNYTTEECDMKKMHYVDPDHVKRAQKYAQQVLQKECRPKFAKTSMALLFEHRYSVDLLPFVQKAPKDSEAESKYDPPFGFRKFSSKVQTLLELLPEHDLPEHLKAKTCRRCVVIGSGGILHGLELGHTLNQFDVVIRVLISTGFKQW

SEQ ID NO: 1360 - protein, 437 aa, Homo sapiens
MCHHAQGSRQSLCSVGYSCAPAPEGLRKRQRLRGTRQKSNIKRQCFTMPSEYTYVKLRSDCSRPSLQWYTRAQSKMRRPSLLLKDILKCTLLVFGVWILYILKLNYTTEECDMKKMHYVDPDHVKRAQKYAQQVLQKECRPKFAKTSMALLFEHRYSVDLLPFVQKAPKDSEAESKYDPPFGFRKFSSKVQTLLELLPEHDLPEHLKAKTCRRCVVIGSGGILHGLELGHTLNQFDVVIRLNSAPVEGYSEHVGNKTTIRMTYPEGAPLSDLEYYSNDLFVAVLFKSVDFNWLQAMVKKETLPFWVRLFFWKQVAEKIPLQPKHFRILNPVIIKETAFDILQYSEPQSRFWGRDKNVPTIGVIAVVLATHLCDEVSLAGFGYDLNQPRTPLHYFDSQCMAAMNFQTMHNVTTETKFLLKLVKEGVVKDLSGGIDREF

SEQ ID NO: 1361 - protein, 406 aa, Homo sapiens
RTKAAGCAERRPLQPRTEAAAAPAGRAMPSEYTYVKLRSDCSRPSLQWYTRAQSKMRRPSLLLKDILKCTLLVFGVWILYILKLNYTTEECDMKKMHYVDPDHVKRAQKYAQQVLQKECRPKFAKTSMALLFEHRYSVDLLPFVQKAPKDSEAESKYDPPFGFRKFSSKVQTLLELLPEHDLPEHLKAKTCRRCVVIGSGGILHGLELGHTLNQFDVVIRLNSAPVEGYSEHVGNKTTIRMTYPEGAPLSDLEYYSNDLFVAVLFKSVDFNWLQAMVKKETLVAEKIPLQPKHFRILNPVIIKETAFDILQYSEPQSRFWGRDKNVPTIGVIAVVLATHLCDEVSLAGFGYDLNQPRTPLHYFDSQCMAAMNFQTMHNVTTETKFLLKLVKEGVVKDLSGGIDREF

SEQ ID NO: 1362 - protein, 2340 aa, Homo sapiens
MTEGARAADEVRVPLGAPPPGPAALVGASPESPGAPGREAERGSELGVSPSESPAAERGAELGADEEQRVPYPALAATVFFCLGQTTRPRSWCLRLVCNPWFEHVSMLVIMLNCVTLGMFRPCEDVECGSERCNILEMVIKMVALGLFGQKCYLGDTWNRLDFFIVVAGMMEYSLDGHNVSLSAIRTVRVLRPLRAINRVPSMRILVTLLLDTLPMLGNVLLLCFFVFFIFGIVGVQLWAGLLRNRCFLDSAFVRNNNLTFLRPYYQTEEGEENPFICSSRRDNGMQKCSHIPGRRELRMPCTLGWEAYTQPQAEGVGAARNACINWNQYYNVCRSGDSNPHNGAINFDNIGYAWIAIFQVITLEGWVDIMYYVMDAHSFYNFIYFILLIIVGSFFMINLCLVVIATQFSETKQRESQLMREQRARHLSNDSTLASFSEPGSCYEELLKYVGHIFRKVKRRSLRLYARWQSRWRKKVDPSAVQGQGPGHRQRRAGRHTASVHHLVYHHHHHHHHHYHFSHGSPRRPGPEPGACDTRLVRAGAPPSPPSPGRGPPDAESVHSIYHADCHIEGPQERARVAHAAATAAASLRLATGLGTMNYPTILPSGVGSGKGSTSPGPKGKWAGGPPGTGGHGPLSLNSPDPYEKIPHVVGEHGLGQAPGHLSGLSVPCPLPSPPAGTLTCELKSCPYCTRALEDPEGELSGSESGDSDGRGVYEFTQDVRHGDRWDPTRPPRATDTPGPGPGSPQRRAQQRAAPGEPGWMGRLWVTFSGKLRRIVDSKYFSRGIMMAILVNTLSMGVEYHEQPEELTNALEISNIVFTSMFALEMLLKLLACGPLGYIRNPYNIFDGIIVVISVWEIVGQADGGLSVLRTFRLLRVLKLVRFLPALRRQLVVLVKTMDNVATFCTLLMLFIFIFSILGMHLFGCKFSLKTDTGDTVPDRKNFDSLLWAIVTVFQILTQEDWNVVLYNGMASTSSWAALYFVALMTFGNYVLFNLLVAILVEGFQAEGDANRSDTDEDKTSVHFEEDFHKLRELQTTELKMCSLAVTPNGHLEGRGSLSPPLIMCTAATPMPTPKSSPFLDAAPSLPDSRRGSSSSGDPPLGDQKPPASLRSSPCAPWGPSGAWSSRRSSWSSLGRAPSLKRRGQCGERESLLSGEGKGSTDDEAEDGRAAPGPRATPLRRAESLDPRPLRPAALPPTKCRDRDGQVVALPSDFFLRIDSHREDAAELDDDSEDSCCLRLHKVLEPYKPQWCRSREAWALYLFSPQNRFRVSCQKVITHKMFDHVVLVFIFLNCVTIALERPDIDPGSTERVFLSVSNYIFTAIFVAEMMVKVVALGLLSGEHAYLQSSWNLLDGLLVLVSLVDIVVAMASAGGAKILGVLRVLRLLRTLRPLRVISRAPGLKLVVETLISSLRPIGNIVLICCAFFIIFGILGVQLFKGKFYYCEGPDTRNISTKAQCRAAHYRWVRRKYNFDNLGQALMSLFVLSSKDGWVNIMYDGLDAVGVDQQPVQNHNPWMLLYFISFLLIVSFFVLNMFVGVVVENFHKCRQHQEAEEARRREEKRLRRLERRRRSTFPSPEAQRRPYYADYSPTRRSIHSLCTSHYLDLFITFIICVNVITMSMEHYNQPKSLDEALKYCNYVFTIVFVFEAALKLVAFGFRRFFKDRWNQLDLAIVLLSLMGITLEEIEMSAALPINPTIIRIMRVLRIARVLKLLKMATGMRALLDTVVQALPQVGNLGLLFMLLFFIYAALGVELFGRLECSEDNPCEGLSRHATFSNFGMAFLTLFRVSTGDNWNGIMKDTLRECSREDKHCLSYLPALSPVYFVTFVLVAQFVLVNVVVAVLMKHLEESNKEAREDAELDAEIELEMAQGPGSARRVDADRPPLPQESPGARDAPNLVARKVSVSRMLSLPNDSYMFRPVVPASAPHPRPLQEVEMETYGAGTPLGSVASVHSPPAESCASLQIPLAVSSPARSGEPLHALSPRGTARSPSLSRLLCRQEAVHTDSLEGKIDSPRDTLDPAEPGEKTPVRPVTQGGSLQSPPRSPRPASVRTRKHTFGQRCVSSRPAAPGGEEAEASDPADEEVSHITSSACPWQPTAEPHGPEASPVAGGERDLRRLYSVDAQGFLDKPGRADEQWRPSAELGSGEPGEAKAWGPEAEPALGARRKKKMSPPCISVEPPAEDEGSARPSAAEGGSTTLRRRTPSCEATPHRDSLEPTEGSGAGGDPAAKGERWGQASCRAEHLTVPSFAFEPLDLGVPSGDPFLDGSHSVTPESRASSSGAIVPLEPPESEPPMPVGDPPEKRRGLYLTVPQCPLEKPGSPSATPAPGGGADDPV

SEQ ID NO: 1363 - protein, 263 aa, Homo sapiens
MAPRARRRRPLFALLLLCALLARLQVALQIAPPCTSEKHYEHLGRCCNKCEPGKYMSSKCTTTSDSVCLPCGPDEYLDSWNEEDKCLLHKVCDTGKALVAVVAGNSTTPRRCACTAGYHWSQDCECCRRNTECAPGLGAQHPLQLNKDTVCKPCLAGYFSDAFSSTDKCRPWTNCTFLGKRVEHHGTEKSDAVCSSSLPARKPPNEPHVYLPGLIILLLFASVALVAAIIFGVCYRKKGKALTANLWHWINEACGRLSGDKES

SEQ ID NO: 1364 - protein, 246 aa, Homo sapiens
GCAERRPLQPRTEAAAAPAGRAMPSEYTYVKLRSDCSRPSLQWYTRAQSKMRRPSLLLKDILKCTLLVFGVWILYILKLNYTTEECDMKKMHYVDPDHVKRAQKYAQQVLQKECRPKFAKTSMALLFEHRYSVDLLPFVQKAPKDSEAESKYDPPFGFRKFSSKVQTLLELLPEHDLPEHLKAKTCRRCVVIGSGGILHGLELGHTLNQFDVVIRTQCTALGQCGSRNSEGHRKLFTVPAHKGLNV

SEQ ID NO: 1365 - protein, 230 aa, Homo sapiens
RTKAAGCAERRPLQPRTEAAAAPAGRAMPSEYTYVKLRSDCSRPSLQWYTRAQSKMRRPSLLLKDILKCTLLVFGVWILYILKLNYTTEECDMKKMHYVDPDHVKRAQKYAQQVLQKECRPKFAKTSMALLFEHRYSVDLLPFVQKAPKDSEAESKYDPPFGFRKFSSKVQTLLELLPEHDLPEHLKAKTCRRCVVIGSGGILHGLELGHTLNQFDVVIRVLISTGFKQW

SEQ ID NO: 1366 - protein, 445 aa, Homo sapiens
STKGPSVFPLAPCSRSTSGGTAALGCLVKDYFPEPVTVSWNSGALTSGVHTFPAVLQSSGLYSLSSVVTVPSSSLGTQTYTCNVNHKPSNTKVDKRVELKTPLGDTTHTCPRCPEPKSCDTPPPCPRCPEPKSCDTPPPCPRCPEPKSCDTPPPCPRCPAPELLGGPSVFLFPPKPKDTLMISRTPEVTCVVVDVSHEDPEVQFKWYVDGVEVHNAKTKPREEQYNSTFRVVSVLTVLHQDWLNGKEYKCKVSNKALPAPIEKTISKTKGQPREPQVYTLPPSREEMTKNQVSLTCLVKGFYPSDIAVEWESSGQPENNYNTTPPMLDSDGSFFLYSKLTVDKSRWQQGNIFSCSVMHEALHNRFTQKSLSLSPELQLEESCAEAQDGELDGLWTTITIFITLFLLSVCYSATVTFFKVKWIFSSVVDLKQTIIPDYRNMIGQGA

SEQ ID NO: 1367 - protein, 391 aa, Homo sapiens
ASPTSPKVFPLSLDSTPQDGNVVVACLVQGFFPQEPLSVTWSESGQNVTARNFPPSQDASGDLYTTSSQLTLPATQCPDGKSVTCHVKHYTNSSQDVTVPCRVPPPPPCCHPRLSLHRPALEDLLLGSEANLTCTLTGLRDASGATFTWTPSSGKSAVQGPPERDLCGCYSVSSVLPGCAQPWNHGETFTCTAAHPELKTPLTANITKSGNTFRPEVHLLPPPSEELALNELVTLTCLARGFSPKDVLVRWLQGSQELPREKYLTWASRQEPSQGTTTYAVTSILRVAAEDWKKGETFSCMVGHEALPLAFTQKTIDRMAGSCCVADWQMPPPYVVLDLPQETLEEETPGANLWPTTITFLTLFLLSLFYSTALTVTSVRGPSGKREGPQY

SEQ ID NO: 1368 - protein, 398 aa, Homo sapiens
ASPTSPKVFPLSLCSTQPDGNVVIACLVQGFFPQEPLSVTWSESGQGVTARNFPPSQDASGDLYTTSSQLTLPATQCLAGKSVTCHVKHYTNPSQDVTVPCPVPSTPPTPSPSTPPTPSPSCCHPRLSLHRPALEDLLLGSEANLTCTLTGLRDASGVTFTWTPSSGKSAVQGPPERDLCGCYSVSSVLPGCAEPWNHGKTFTCTAAYPESKTPLTATLSKSGNTFRPEVHLLPPPSEELALNELVTLTCLARGFSPKDVLVRWLQGSQELPREKYLTWASRQEPSQGTTTFAVTSILRVAAEDWKKGDTFSCMVGHEALPLAFTQKTIDRLADWQMPPPYVVLDLPQETLEEETPGANLWPTTITFLTLFLLSLFYSTALTVTSVRGPSGNREGPQY

SEQ ID NO: 1369 - protein, 395 aa, Homo sapiens
ASTKGPSVFPLAPCSRSTSESTAALGCLVKDYFPEPVTVSWNSGALTSGVHTFPAVLQSSGLYSLSSVVTVPSSNFGTQTYTCNVDHKPSNTKVDKTVERKCCVECPPCPAPPVAGPSVFLFPPKPKDTLMISRTPEVTCVVVDVSHEDPEVQFNWYVDGVEVHNAKTKPREEQFNSTFRVVSVLTVVHQDWLNGKEYKCKVSNKGLPAPIEKTISKTKGQPREPQVYTLPPSREEMTKNQVSLTCLVKGFYPSDISVEWESNGQPENNYKTTPPMLDSDGSFFLYSKLTVDKSRWQQGNVFSCSVMHEALHNHYTQKSLSLSPELQLEESCAEAQDGELDGLWTTITIFITLFLLSVCYSATITFFKVKWIFSSVVDLKQTIVPDYRNMIRQGA

SEQ ID NO: 1370 - protein, 3016 aa, Homo sapiens
MASQQDSGFFEISIKYLLKSWSNTSPVGNGYIKPPVPPASGTHREKGPPTMLPINVDPDSKPGEYVLKSLFVNFTTQAERKIRIIMAEPLEKPLTKSLQRGEDPQFDQVISSMSSLSEYCLPSILRTLFDWYKRQNGIEDESHEYRPRTSNKSKSDEQQRDYLMERRDLAIDFIFSLVLIEVLKQIPLHPVIDSLIHDVINLAFKHFKYKEGYLGPNTGNMHIVADLYAEVIGVLAQAKFPAVKKKFMAELKELRHKEQNPYVVQSIISLIMGMKFFRIKMYPVEDFEASLQFMQECAHYFLEVKDKDIKHALAGLFVEILVPVAAAVKNEVNVPCLRNFVESLYDTTLELSSRKKHSLALYPLVTCLLCVSQKQLFLNRWHIFLNNCLSNLKNKDPKMARVALESLYRLLWVYMIRIKCESNTATQSRLITIITTLFPKGSRGVVPRDMPLNIFVKIIQFIAQERLDFAMKEIIFDFLCVGKPAKAFSLNPERMNIGLRAFLVIADSLQQKDGEPPMPVTGAVLPSGNTLRVKKTYLSKTLTEEEAKMIGMSLYYSQVRKAVDNILRHLDKEVGRCMMLTNVQMLNKEPEDMITGERKPKIDLFRTCVAAIPRLLPDGMSKLELIDLLARLSIHMDDELRHIAQNSLQGLLVDFSDWREDVLFGFTNFLLREVNDMHHTLLDSSLKLLLQLLTQWKLVIQTQGKVYEQANKIRNSELIANGSSHRIQSERGPHCSVLHAVEGFALVLLCSFQVATRKLSVLILKEIRALFIALGQPEDDDRPMIDVMDQLSSSILESFIHVAVSDSATLPLTHNVDLQWLVEWNAVLVNSHYDVKSPSHVWIFAQSVKDPWVLCLFSFLRQENLPKHCPTALSYAWPYAFTRLQSVMPLVDPNSPINAKKTSTAGSGDNYVTLWRNYLILCFGVAKPSIMSPGHLRASTPEIMATTPDGTVSYDNKAIGTPSVGVLLKQLVPLMRLESIEITESLVLGFGRTNSLVFRELVEELHPLMKEALERRPENKKRRERRDLLRLQLLRIFELLADAGVISDSTNGALERDTLALGALFLEYVDLTRMLLEAENDKEVEILKDIRAHFSAMVANLIQCVPVHHRRFLFPQQSLRHHLFILFSQWAGPFSIMFTPLDRYSDRNHQITRYQYCALKAMSAVLCCGPVFDNVGLSPDGYLYKWLDNILACQDLRVHQLGCEVVVLLLELNPDQINLFNWAIDRCYTGSYQLASGCFKAIATVCGSRNYPFDIVTLLNLVLFKASDTNREIYEISMQLMQILEAKLFVYSKKVAEQRPGSILYGTHGPLPPLYSVSLALLSCELARMYPELTLPLFSEVSQRFPTTHPNGRQIMLTYLLPWLHNIELVDSRLLLPGSSPSSPEDEVKDREGDVTASHGLRGNGWGSPEATSLVLNNLMYMTAKYGDEVPGPEMENAWNALANNEKWSNNLRITLQFLISLCGVSSDTVLLPYIKKVAIYLCRNNTIQTMEELLFELQQTEPVNPIVQHCDNPPFYRFTASSKASAAASGTTSSSNTVVAGQENFPDAEENKILKESDERFSNVIRAHTRLESRYSNSSGGSYDEDKNDPISPYTGWLLTITETKQPQPLPMPCTGGCWAPLVDYLPETITPRGPLHRCNIAVIFMTEMVVDHSVREDWALHLPLLLHAVFLGLDHYRPEVFEHSKKLLLHLLIALSCNSNFHSIASVLLQTREMGEAKTLTVQPAYQPEYLYTGGFDFLREDQSSPVPDSGLSSSSTSSSISLGGSSGNLPQMTQEVEDVDTAAETDEKANKLIEFLTTRAFGPLWCHEDITPKNQNSKSAEQLTNFLRHVVSVFKDSKSGFHLEHQLSEVALQTALASSSRHYAGRSFQIFRALKQPLSAHALSDLLSRLVEVIGEHGDEIQGYVMEALLTLEAAVDNLSDCLKNSDLLTVLSRSSSPDLSSSSKLTASRKSTGQLNMNPGTTSGNTATAERSRHQRSFSVPKKFGVIDRSSDPPRSATLDRIQACTQQGLSSKTRSSSSLKDSLTDPSHINHPTNLLATIFWVTVALMESDFEFEYLMALRLLSRLLAHMPLDKAENREKLEKLQAQLKWADFSGLQQLLLKGFTSLTTTDLTLQLFSLLTPVSKISMVDASHAIGFPLNVLCLLPQLIQHFENPNQFCKDIAERIAQVCLEEKNPKLSNLAHVMTLYKTHSYTRDCATWVNVVCRYLHEAYADITLNMVTYLAELLEKGLPSVQQPLLQVIYSLLSYMDLSVVPVKQFNVEVLKTIEKYVQSVHWREALNILKLVVSRSASLVLPSYQHSDLSKIEIHRVWTSASKELPGKTLDFHFDISETPIIGRRYDELQNSSGRDGKPRAMAVTRSTSSTSSGSNSNVLVPVSWKRPQYSQKRTKEKLVHVLSLCGQEVGLSKNPSVIFSSCGDLDLLEHQTSLVSSEDGAREQENMDDTNSEQQFRVFRDFDFLDVELEDGEELQGESMDNFNWGVRRRSLDSLDKCDMQILEERQLSGSTPSLNKMHHEDSDESSEEEDLTASQILEHSDLIMTLSPSEETNPMELLTTACDSTPAEPHSFNTRMSSFDASLPDMNNLQISEGSKAEAVREEEDTTVHEDDLSSSINELPAAFECSDSFSLDMTEGEEKGNRALDQFTLASFGEGDRGVSPPPSPFFSAILAAFQPAACDDAEEAWRSHINQLMCDSDGSCAVYTFHVFSSLFKNIQKRFCFLTCDAASYLGDNLRGIGSKFVSSSQMLTSCSECPTLFVDAETLLSCGLLDKLKFSVLELQEYLDTYNNRKEATLSWLANCKATFAGGSRDGVITCQPGDSEEKQLELCQRLYKLHFQLLLLFQSYCKLIGQVHEVSSMPELLNMSRELSDLKKHLKEASAVIAADPLYSDGAWSEPTFTSTEAAIQSMLECLKNNELGKALRQIRECRSLWPNDIFGSSSDDEVQTLLNIYFRHQTLGQTGTYALVGSNQSLTEICTKLMELNMEIRDMIRRAQSYRVLTTFLPDSSVSGTSL

SEQ ID NO: 1371 - protein, 396 aa, Homo sapiens
ASTKGPSVFPLAPCSRSTSESTAALGCLVKDYFPEPVTVSWNSGALTSGVHTFPAVLQSSGLYSLSSVVTVPSSSLGTKTYTCNVDHKPSNTKVDKRVESKYGPPCPSCPAPEFLGGPSVFLFPPKPKDTLMISRTPEVTCVVVDVSQEDPEVQFNWYVDGVEVHNAKTKPREEQFNSTYRVVSVLTVLHQDWLNGKEYKCKVSNKGLPSSIEKTISKAKGQPREPQVYTLPPSQEEMTKNQVSLTCLVKGFYPSDIAVEWESNGQPENNYKTTPPVLDSDGSFFLYSRLTVDKSRWQEGNVFSCSVMHEALHNHYTQKSLSLSLELQLEESCAEAQDGELDGLWTTITIFITLFLLSVCYSATVTFFKVKWIFSSVVDLKQTIVPDYRNMIRQGA

SEQ ID NO: 1372 - protein, 374 aa, Homo sapiens
MLSLRVPLAPITDPQQLQLSPLKGLSLVDKENTPPALSGTRVLASKTARRIFQEPTEPKTKAAAPGVEDEPLLRENPRRFVIFPIEYHDIWQMYKKAEASFWTAEEVDLSKDIQHWESLKPEERYFISHVLAFFAASDGIVNENLVERFSQEVQITEARCFYGFQIAMENIHSEMYSLLIDTYIKDPKEREFLFNAIETMPCVKKKADWALRWIGDKEATYGERVVAFAAVEGIFFSGSFASIFWLKKRGLMPGLTFSNELISRDEGLHCDFACLMFKHLVHKPSEERVREIIINAVRIEQEFLTEALPVKLIGMNCTLMKQYIEFVADRLMLELGFSKVLGDREVQSRWSPGPRGDSTPVREMETNHPPSVRG

SEQ ID NO: 1373 - protein, 875 aa, Homo sapiens
MAAATRRVFHLQPCENSPTMSQNGYFEDSSYYKCDTDDTFEAREEILGDEAFDTANSSIVSGESIRFFVNVNLEMQATNTENEATSGGCVLLHTSRKYLKLKNFKEEIRAHRDLDGFLAQASIVLNETATSLDNVLRTMLRRFARDPDNNEPNCNLDLLMAMLFTDAGAPMRGKVHLLSDTIQGVTATVTGVRYQQSWLCIICTMKALQKRHVCISRLVRPQNWGENSCEVRFVILVLAPPKMKSTKTAMEVARTFATMFSDIAFRQKLLETRTEEEFKEALVHQRQLLTMVSHGPVAPRTKERSTVSLPAHRHPEPPKCKDFVPFGKGIREDIARRFPLYPLDFTDGIIGKNKAVGKYITTTLFLYFACLLPTIAFGSLNDENTDGAIDVQKTIAGQSIGGLLYALFSGQPLVILLTTAPLALYIQVIRVICDDYDLDFNSFYAWTGLWNSFFLALYAFFNLSLVMSLFKRSTEEIIALFISITFVLDAVKGTVKIFWKYYYGHYLDDYHTKRTSSLVSLSGLGASLNASLHTALNASFLASPTELPSATHSGQATAVLSLLIMLGTLWLGYTLYQFKKSPYLHPCVREILSDCALPIAVLAFSLISSHGFREIEMSKFRYNPSESPFAMAQIQSLSLRAVSGAMGLGFLLSMLFFIEQNLVAALVNAPENRLVKGTAYHWDLLLLAIINTGLSLFGLPWIHAAYPHSPLHVRALALVEERVENGHIYDTIVNVKETRLTSLGASVLVGLSLLLLPVPLQWIPKPVLYGLFLYIALTSLDGNQLVQRVALLLKEQTAYPPTHYIRRVPQRKIHYFTGLQVLQLLLLCAFGMSSLPYMKMIFPLIMIAMIPIRYILLPRIIEAKYLDVMDAEHRP

SEQ ID NO: 1374 - protein, 78 aa, Homo sapiens
MDWGTLHTFIGGVNKHSTSIGKVWITVIFIFRVMILVVAAQEVWGDEQEDFVCNTLQPGCKNVCYDHFFPVSHIRLWA

SEQ ID NO: 1375 - protein, 237 aa, Homo sapiens
MGRQKELVSRCGEMLHIRYRLLRQALAECLGTLILVMFGCGSVAQVVLSRGTHGGFLTINLAFGFAVTLGILIAGQVSGAHLNPAVTFAMCFLAREPWIKLPIYTLAQTLGAFLGAGIVFGLYYDAIWHFADNQLFVSGPNGTAGIFATYPSGHLDMINGFFDQDRPALVVGAHRVPTPGLHCGCLRVPADDRLPPGAAPTLQRGRECEAGPCEAQGADLSGQGPSPHSAALALSIH

SEQ ID NO: 1376 - protein, 102 aa, Homo sapiens
MGRQKELVSRCGEMLHIRYRLLRQALAECLGTLILVMFGCGSVAQVVLSRGTHGGFLTINLAFGFAVTLGILIAGQVSGPLSPLPRGPPEPCRDLCHVLPGS

SEQ ID NO: 1377 - protein, 159 aa, Homo sapiens
MMLVGFLGCCGAVQESQCMLGLFFGFLLVIFAIEIAAAIWGYSHKDEVIKEVQEFYKDTYNKLKTKDEPQRETLKAIHYALNCCGLAGGVEQFISDICPKKDVLETFTVKSCPDAIKEVFDNKFHIIGAVGIGIAVVMGMERQRGRCSDQSLSPPEWSI

SEQ ID NO: 1378 - protein, 775 aa, Homo sapiens
MGDHLDLLLGVVLMAGPVFGIPSCSFDGRIAFYRFCNLTQVPQVLNTTERLLLSFNYIRTVTASSFPFLEQLQLLELGSQYTPLTIDKEAFRNLPNLRILDLGSSKIYFLHPDAFQGLFHLFELRLYFCGLSDAVLKDGYFRNLKALTRLDLSKNQIRSLYLHPSFGKLNSLKSIDFSSNQIFLVCEHELEPLQGKTLSFFSLAANSLYSRVSVDWGKCMNPFRNMVLEILDVSGNGWTVDITGNFSNAISKSQAFSLILAHHIMGAGFGFHNIKDPDQNTFAGLARSSVRHLDLSHGFVFSLNSRVFETLKDLKVLNLAYNKINKIADEAFYGLDNLQVLNLSYNLLGELYSSNFYGLPKVAYIDLQKNHIAIIQDQTFKFLEKLQTLDLRDNALTTIHFIPSIPDIFLSGNKLVTLPKINLTANLIHLSENRLENLDILYFLLRVPHLQILILNQNRFSSCSGDQTPSENPSLEQLFLGENMLQLAWETELCWDVFEGLSHLQVLYLNHNYLNSLPPGVFSHLTALRGLSLNSNRLTVLSHNDLPANLEILDISRNQLLAPNPDVFVSLSVLDITHNKFICECELSTFINWLNHTNVTIAGPPADIYCVYPDSFSGVSLFSLSTEGCDEEEVLKSLKFSLFIVCTVTLTLFLMTILTVTKFRGFCFICYKTAQRLVFKDHPQGTEPDMYKYDAYLCFSSKDFTWVQNALLKHLDTQYSDQNRFNLCFEERDFVPGENRIANIQDAIWNSRKIVCLVSRHFLRDGWCLEAFSYA

SEQ ID NO: 1379 - protein, 1229 aa, Homo sapiens
MDREERKTINQGQEDEMEIYGYNLSRWKLAIVSLGVICSGGFLLLLLYWMPEWRVKATCVRAAIKDCEVVLLRTTDEFKMWFCAKIRVLSLETYPVSSPKSMSNKLSNGHAVCLIENPTEENRHRISKYSQTESQQIRYFTHHSVKYFWNDTIHNFDFLKKLLYGVNEIAVKVPSVFKLLIKEVLNPFYIFQLFSVILWSTDEYYYYALAIVVMSIVSIVSSLYSIRKQYVMLHDMVATHSTVRVSVCRVNEEIEEIFSTDLVPGDVMVIPLNGTIMPCDAVLINGTCIVNESMLTGESVPVTKTNLPNPSVDVKGIGDELYNPETHKRHTLFCGTTVIQTRFYTGELVKAIVVRTGFSTSKGQLVRSILYPKPTDFKLYRDAYLFLLCLVAVAGIGFIYTIINSILNEVQVGVIIIESLDIITITVPPALPAAMTAGIVYAQRRLKKIGIFCISPQRINICGQLNLVCFDKTGTLTEDGLDLWGIQRVENARFLSPEENVCNEMLVKSQFVACMATCHSLTKIEGVLSGDPLDLKMFEAIGWILEEATEEETALHNRIMPTVVRPPKQLLPESTPAGNQEMELFELPATYEIGIVRQFPFSSALQRMSVVARVLGDRKMDAYMKGAPEAIAGLCKPETVPVDFQNVLEDFTKQGFRVIALAHRKLESKLTWHKVQNISRDAIENNMDFMGLIIMQNKLKQETPAVLEDLHKANIRTVMVTGDSMLTAVSVARDCGMILPQDKVIIAEALPPKDGKVAKINWHYADSLTQCSHPSAIDPEAIPVKLVHDSLEDLQMTRYHFAMNGKSFSVILEHFQDLVPKLMLHGTVFARMAPDQKTQLIEALQNVDYFVGMCGDGANDCGALKRAHGGISLSELEASVASPFTSKTPSISCVPNLIREGRAALITSFCVFKFMALYSIIQYFSVTLLYSILSNLGDFQFLFIDLAIILVVVFTMSLNPAWKELVAQRPPSGLISGALLFSVLSQIIICIGFQSLGFFWVKQQPWYEVWHPKSDACNTTGSGFWNSSHVDNETELDEHNIQNYENTTVFFISSFQYLIVAIAFSKGKPFRQPCYKNYFFVFSVIFLYIFILFIMLYPVASVDQVLQIVCVPYQWRVTMLIIVLVNAFVSITVENFFLDMVLWKVVFNRDKQGEYRFSTTQPPQESVDRWGKCCLPWALGCRKKTPKAKYMYLAQELLVDPEWPPKPQTTTEAKALVKENGSCQIITIT

SEQ ID NO: 1380 - protein, 2963 aa, Homo sapiens
MLPINVDPDSKPGEYVLKSLFVNFTTQAERKIRIIMAEPLEKPLTKSLQRGEDPQFDQVISSMSSLSEYCLPSILRTLFDWYKRQNGIEDESHEYRPRTSNKSKSDEQQRDYLMERRDLAIDFIFSLVLIEVLKQIPLHPVIDSLIHDVINLAFKHFKYKEGYLGPNTGNMHIVADLYAEVIGVLAQAKFPAVKKKFMAELKELRHKEQNPYVVQSIISLIMGMKFFRIKMYPVEDFEASLQFMQECAHYFLEVKDKDIKHALAGLFVEILVPVAAAVKNEVNVPCLRNFVESLYDTTLELSSRKKHSLALYPLVTCLLCVSQKQLFLNRWHIFLNNCLSNLKNKDPKMARVALESLYRLLWVYMIRIKCESNTATQSRLITIITTLFPKGSRGVVPRDMPLNIFVKIIQFIAQERLDFAMKEIIFDFLCVGKPAKAFSLNPERMNIGLRAFLVIADSLQQKDGEPPMPVTGAVLPSGNTLRVKKTYLSKTLTEEEAKMIGMSLYYSQVRKAVDNILRHLDKEVGRCMMLTNVQMLNKEPEDMITGERKPKIDLFRTCVAAIPRLLPDGMSKLELIDLLARLSIHMDDELRHIAQNSLQGLLVDFSDWREDVLFGFTNFLLREVNDMHHTLLDSSLKLLLQLLTQWKLVIQTQGKVYEQANKIRNSELIANGSSHRIQSERGPHCSVLHAVEGFALVLLCSFQVATRKLSVLILKEIRALFIALGQPEDDDRPMIDVMDQLSSSILESFIHVAVSDSATLPLTHNVDLQWLVEWNAVLVNSHYDVKSPSHVWIFAQSVKDPWVLCLFSFLRQENLPKHCPTALSYAWPYAFTRLQSVMPLVDPNSPINAKKTSTAGSGDNYVTLWRNYLILCFGVAKPSIMSPGHLRASTPEIMATTPDGTVSYDNKAIGTPSVGVLLKQLVPLMRLESIEITESLVLGFGRTNSLVFRELVEELHPLMKEALERRPENKKRRERRDLLRLQLLRIFELLADAGVISDSTNGALERDTLALGALFLEYVDLTRMLLEAENDKEVEILKDIRAHFSAMVANLIQCVPVHHRRFLFPQQSLRHHLFILFSQWAGPFSIMFTPLDRYSDRNHQITRYQYCALKAMSAVLCCGPVFDNVGLSPDGYLYKWLDNILACQDLRVHQLGCEVVVLLLELNPDQINLFNWAIDRCYTGSYQLASGCFKAIATVCGSRNYPFDIVTLLNLVLFKASDTNREIYEISMQLMQILEAKLFVYSKKVAEQRPGSILYGTHGPLPPLYSVSLALLSCELARMYPELTLPLFSEVSQRFPTTHPNGRQIMLTYLLPWLHNIELVDSRLLLPGSSPSSPEDEVKDREGDVTASHGLRGNGWGSPEATSLVLNNLMYMTAKYGDEVPGPEMENAWNALANNEKWSNNLRITLQFLISLCGVSSDTVLLPYIKKVAIYLCRNNTIQTMEELLFELQQTEPVNPIVQHCDNPPFYRFTASSKASAAASGTTSSSNTVVAGQENFPDAEENKILKESDERFSNVIRAHTRLESRYSNSSGGSYDEDKNDPISPYTGWLLTITETKQPQPLPMPCTGGCWAPLVDYLPETITPRGPLHRCNIAVIFMTEMVVDHSVREDWALHLPLLLHAVFLGLDHYRPEVFEHSKKLLLHLLIALSCNSNFHSIASVLLQTREMGEAKTLTVQPAYQPEYLYTGGFDFLREDQSSPVPDSGLSSSSTSSSISLGGSSGNLPQMTQEVEDVDTAAETDEKANKLIEFLTTRAFGPLWCHEDITPKNQNSKSAEQLTNFLRHVVSVFKDSKSGFHLEHQLSEVALQTALASSSRHYAGRSFQIFRALKQPLSAHALSDLLSRLVEVIGEHGDEIQGYVMEALLTLEAAVDNLSDCLKNSDLLTVLSRSSSPDLSSSSKLTASRKSTGQLNMNPGTTSGNTATAERSRHQRSFSVPKKFGVIDRSSDPPRSATLDRIQACTQQGLSSKTRSSSSLKDSLTDPSHINHPTNLLATIFWVTVALMESDFEFEYLMALRLLSRLLAHMPLDKAENREKLEKLQAQLKWADFSGLQQLLLKGFTSLTTTDLTLQLFSLLTPVSKISMVDASHAIGFPLNVLCLLPQLIQHFENPNQFCKDIAERIAQVCLEEKNPKLSNLAHVMTLYKTHSYTRDCATWVNVVCRYLHEAYADITLNMVTYLAELLEKGLPSVQQPLLQVIYSLLSYMDLSVVPVKQFNVEVLKTIEKYVQSVHWREALNILKLVVSRSASLVLPSYQHSDLSKIEIHRVWTSASKELPGKTLDFHFDISETPIIGRRYDELQNSSGRDGKPRAMAVTRSTSSTSSGSNSNVLVPVSWKRPQYSQKRTKEKLVHVLSLCGQEVGLSKNPSVIFSSCGDLDLLEHQTSLVSSEDGAREQENMDDTNSEQQFRVFRDFDFLDVELEDGEGESMDNFNWGVRRRSLDSLDKCDMQILEERQLSGSTPSLNKMHHEDSDESSEEEDLTASQILEHSDLIMTLSPSEETNPMELLTTACDSTPAEPHSFNTRMSSFDASLPDMNNLQISEGSKAEAVREEEDTTVHEDDLSSSINELPAAFECSDSFSLDMTEGEEKGNRALDQFTLASFGEGDRGVSPPPSPFFSAILAAFQPAACDDAEEAWRSHINQLMCDSDGSCAVYTFHVFSSLFKNIQKRFCFLTCDAASYLGDNLRGIGSKFVSSSQMLTSCSECPTLFVDAETLLSCGLLDKLKFSVLELQEYLDTYNNRKEATLSWLANCKATFAGGSRDGVITCQPGDSEEKQLELCQRLYKLHFQLLLLFQSYCKLIGQVHEVSSMPELLNMSRELSDLKKHLKEASAVIAADPLYSDGAWSEPTFTSTEAAIQSMLECLKNNELGKALRQIRECRSLWPNDIFGSSSDDEVQTLLNIYFRHQTLGQTGTYALVGSNQSLTEICTKLMELNMEIRDMIRRAQSYRVLTTFLPDSSVSGTSL

SEQ ID NO: 1381 - protein, 108 aa, Homo sapiens
MDWGTLHTFIGGVNKHSTSIGKVWITVIFIFRVMILVVAAQEVWGDEQEDFVCNTLQPGCKNVCYDHFFPVSHIRLWALQLIFVSTPALLVAMHVAYYRHETTRKFRR

SEQ ID NO: 1382 - protein, 78 aa, Homo sapiens
MTTSHQPQDRYKAVWLIFFMLGLGTLLPWNFFMTATQYFTNRLDMSQNVSLVTAELSKDAQASAAPAAPLPERNSLSA

SEQ ID NO: 1383 - protein, 83 aa, Homo sapiens
MTTSHQPQDRYKAVWLIFFMLGLGTLLPWNFFMTATQYFTNRLDMSQNVSLVTAELSKDAQASAAPAAPLPERNSLSAIFNNV

SEQ ID NO: 1384 - protein, 103 aa, Homo sapiens
MDWGTLHTFIGGVNKHSTSIGKVWITVIFIFRVMILVVAAQEVWGDEQEDFVCNTLQPGCKNVCYDHFFPVSHIRLWALQLIFVSTPALLVAMHVAYYRHETT

SEQ ID NO: 1385 - protein, 3058 aa, Homo sapiens
MAVDDSNLYSRTKNKLNSSQNDYKSSRRSSLPPELLIGNDIRGRLQRNIKNLDPIHLRHPKKRPSIFPASPVGNGYIKPPVPPASGTHREKGPPTMLPINVDPDSKPGEYVLKSLFVNFTTQAERKIRIIMAEPLEKPLTKSLQRGEDPQFDQVISSMSSLSEYCLPSILRTLFDWYKRQNGIEDESHEYRPRTSNKSKSDEQQRDYLMERRDLAIDFIFSLVLIEVLKQIPLHPVIDSLIHDVINLAFKHFKYKEGYLGPNTGNMHIVADLYAEVIGVLAQAKFPAVKKKFMAELKELRHKEQNPYVVQSIISLIMGMKFFRIKMYPVEDFEASLQFMQECAHYFLEVKDKDIKHALAGLFVEILVPVAAAVKNEVNVPCLRNFVESLYDTTLELSSRKKHSLALYPLVTCLLCVSQKQLFLNRWHIFLNNCLSNLKNKDPKMARVALESLYRLLWVYMIRIKCESNTATQSRLITIITTLFPKGSRGVVPRDMPLNIFVKIIQFIAQERLDFAMKEIIFDFLCVGKPAKAFSLNPERMNIGLRAFLVIADSLQQKDGEPPMPVTGAVLPSGNTLRVKKTYLSKTLTEEEAKMIGMSLYYSQVRKAVDNILRHLDKEVGRCMMLTNVQMLNKEPEDMITGERKPKIDLFRTCVAAIPRLLPDGMSKLELIDLLARLSIHMDDELRHIAQNSLQGLLVDFSDWREDVLFGFTNFLLREVNDMHHTLLDSSLKLLLQLLTQWKLVIQTQGKVYEQANKIRNSELIANGSSHRIQSERGPHCSVLHAVEGFALVLLCSFQVATRKLSVLILKEIRALFIALGQPEDDDRPMIDVMDQLSSSILESFIHVAVSDSATLPLTHNVDLQWLVEWNAVLVNSHYDVKSPSHVWIFAQSVKDPWVLCLFSFLRQENLPKHCPTALSYAWPYAFTRLQSVMPLVDPNSPINAKKTSTAGSGDNYVTLWRNYLILCFGVAKPSIMSPGHLRASTPEIMATTPDGTVSYDNKAIGTPSVGVLLKQLVPLMRLESIEITESLVLGFGRTNSLVFRELVEELHPLMKEALERRPENKKRRERRDLLRLQLLRIFELLADAGVISDSTNGALERDTLALGALFLEYVDLTRMLLEAENDKEVEILKDIRAHFSAMVANLIQCVPVHHRRFLFPQQSLRHHLFILFSQWAGPFSIMFTPLDRYSDRNHQITRYQYCALKAMSAVLCCGPVFDNVGLSPDGYLYKWLDNILACQDLRVHQLGCEVVVLLLELNPDQINLFNWAIDRCYTGSYQLASGCFKAIATVCGSRNYPFDIVTLLNLVLFKASDTNREIYEISMQLMQILEAKLFVYSKKVAEQRPGSILYGTHGPLPPLYSVSLALLSCELARMYPELTLPLFSEVSQRFPTTHPNGRQIMLTYLLPWLHNIELVDSRLLLPGSSPSSPEDEVKDREGDVTASHGLRGNGWGSPEATSLVLNNLMYMTAKYGDEVPGPEMENAWNALANNEKWSNNLRITLQFLISLCGVSSDTVLLPYIKKVAIYLCRNNTIQTMEELLFELQQTEPVNPIVQHCDNPPFYRFTASSKASAAASGTTSSSNTVVAGQENFPDAEENKILKESDERFSNVIRAHTRLESRYSNSSGGSYDEDKNDPISPYTGWLLTITETKQPQPLPMPCTGGCWAPLVDYLPETITPRGPLHRCNIAVIFMTEMVVDHSVREDWALHLPLLLHAVFLGLDHYRPEVFEHSKKLLLHLLIALSCNSNFHSIASVLLQTREMGEAKTLTVQPAYQPEYLYTGGFDFLREDQSSPVPDSGLSSSSTSSSISLGGSSGNLPQMTQEVEDVDTAAETDEKANKLIEFLTTRAFGPLWCHEDITPKNQNSKSAEQLTNFLRHVVSVFKDSKSGFHLEHQLSEVALQTALASSSRHYAGRSFQIFRALKQPLSAHALSDLLSRLVEVIGEHGDEIQGYVMEALLTLEAAVDNLSDCLKNSDLLTVLSRSSSPDLSSSSKLTASRKSTGQLNMNPGTTSGNTATAERSRHQRSFSVPKKFGVIDRSSDPPRSATLDRIQACTQQGLSSKTRSSSSLKDSLTDPSHINHPTNLLATIFWVTVALMESDFEFEYLMALRLLSRLLAHMPLDKAENREKLEKLQAQLKWADFSGLQQLLLKGFTSLTTTDLTLQLFSLLTPVSKISMVDASHAIGFPLNVLCLLPQLIQHFENPNQFCKDIAERIAQVCLEEKNPKLSNLAHVMTLYKTHSYTRDCATWVNVVCRYLHEAYADITLNMVTYLAELLEKGLPSVQQPLLQVIYSLLSYMDLSVVPVKQFNVEVLKTIEKYVQSVHWREALNILKLVVSRSASLVLPSYQHSDLSKIEIHRVWTSASKELPGKTLDFHFDISETPIIGRRYDELQNSSGRDGKPRAMAVTRSTSSTSSGSNSNVLVPVSWKRPQYSQKRTKEKLVHVLSLCGQEVGLSKNPSVIFSSCGDLDLLEHQTSLVSSEDGAREQENMDDTNSEQQFRVFRDFDFLDVELEDGEGESMDNFNWGVRRRSLDSLDKCDMQILEERQLSGSTPSLNKMHHEDSDESSEEEDLTASQILEHSDLIMTLSPSEETNPMELLTTACDSTPAEPHSFNTRMSSFDASLPDMNNLQISEGSKAEAVREEEDTTVHEDDLSSSINELPAAFECSDSFSLDMTEGEEKGNRALDQFTLASFGEGDRGVSPPPSPFFSAILAAFQPAACDDAEEAWRSHINQLMCDSDGSCAVYTFHVFSSLFKNIQKRFCFLTCDAASYLGDNLRGIGSKFVSSSQMLTSCSECPTLFVDAETLLSCGLLDKLKFSVLELQEYLDTYNNRKEATLSWLANCKATFAGGSRDGVITCQPGDSEEKQLELCQRLYKLHFQLLLLFQSYCKLIGQVHEVSSMPELLNMSRELSDLKKHLKEASAVIAADPLYSDGAWSEPTFTSTEAAIQSMLECLKNNELGKALRQIRECRSLWPNDIFGSSSDDEVQTLLNIYFRHQTLGQTGTYALVGSNQSLTEICTKLMELNMEIRDMIRRAQSYRVLTTFLPDSSVSGTSL

SEQ ID NO: 1386 - protein, 1163 aa, Homo sapiens
YPVSSPKSMSNKLSNGHAVCLIENPTEENRHRISKYSQTESQQIRYFTHHSVKYFWNDTIHNFDFLKGLDEGVSCTSIYEKHSAGLTKGMHAYRKLLYGVNEIAVKVPSVFKLLIKEVLNPFYIFQLFSVILWSTDEYYYYALAIVVMSIVSIVSSLYSIRKQYVMLHDMVATHSTVRVSVCRVNEEIEEIFSTDLVPGDVMVIPLNGTIMPCDAVLINGTCIVNESMLTGESVPVTKTNLPNPSVDVKGIGDELYNPETHKRHTLFCGTTVIQTRFYTGELVKAIVVRTGFSTSKGQLVRSILYPKPTDFKLYRDAYLFLLCLVAVAGIGFIYTIINSILNEVQVGVIIIESLDIITITVPPALPAAMTAGIVYAQRRLKKIGIFCISPQRINICGQLNLVCFDKTGTLTEDGLDLWGIQRVENARFLSPEENVCNEMLVKSQFVACMATCHSLTKIEGVLSGDPLDLKMFEAIGWILEEATEEETALHNRIMPTVVRPPKQLLPESTPAGNQEMELFELPATYEIGIVRQFPFSSALQRMSVVARVLGDRKMDAYMKGAPEAIAGLCKPETVPVDFQNVLEDFTKQGFRVIALAHRKLESKLTWHKVQNISRDAIENNMDFMGLIIMQNKLKQETPAVLEDLHKANIRTVMVTGDSMLTAVSVARDCGMILPQDKVIIAEALPPKDGKVAKINWHYADSLTQCSHPSAIDPEAIPVKLVHDSLEDLQMTRYHFAMNGKSFSVILEHFQDLVPKLMLHGTVFARMAPDQKTQLIEALQNVDYFVGMCGDGANDCGALKRAHGGISLSELEASVASPFTSKTPSISCVPNLIREGRAALITSFCVFKFMALYSIIQYFSVTLLYSILSNLGDFQFLFIDLAIILVVVFTMSLNPAWKELVAQRPPSGLISGALLFSVLSQIIICIGFQSLGFFWVKQQPWYEVWHPKSDACNTTGSGFWNSSHVDNETELDEHNIQNYENTTVFFISSFQYLIVAIAFSKGKPFRQPCYKNYFFVFSVIFLYIFILFIMLYPVASVDQVLQIVCVPYQWRVTMLIIVLVNAFVSITVENFFLDMVLWKVVFNRDKQGEYRFSTTQPPQESVDRWGKCCLPWALGCRKKTPKAKYMYLAQELLVDPEWPPKPQTTTEAKALVKENGSCQIITIT

SEQ ID NO: 1387 - protein, 155 aa, Homo sapiens
VSRCGEMLHIRYRLLRQALAECLGTLILVMFGCGSVAQVVLSRGTHGGFLTINLAFGFAVTLGILIAGQVSGAHLNPAVTFAMCFLAREPWIKLPIYTLAQTLGAFLGAGIVFGLYYGKHSPPCPPPLPPSLCSGPAGTRPFDDRRLGPAQAPGS

SEQ ID NO: 1388 - protein, 135 aa, Homo sapiens
NSFLHQRIPQSVRILGSLVAILLVFLITAILVKVQLDALPFFVITMIKIVLINWQPVWSGWPSACQLHGPHHEWPGPSRLLCLRGHDLRYCQWLGAIRKCLRLLYHSLCCYHFDHHLLPGPAPPGILPLLPAAQA

SEQ ID NO: 1389 - protein, 779 aa, Homo sapiens
MLKFKAFCLDYWQFLCLQPLHGAYKSVEGEAPSSETGTSLDSPSAYPQGPLVPGSSLSPDHYEHTSVGAYGLYSGPPGQQQRTRRPKLQHSTSILRKQAEEEAIKRSRSLSESYELSSDLQDKQVEMLERKYGGRLVTRHAARTIQTAFRQYQMNKNFERLRSSMSENRMSRRIVLSNMRMQFSFEGPEKVHSSYFEGKQVSVTNDGSQLGALVSPECGDLSEPTTLKSPAPSSDFADAITELEDAFSRQVKSLAESIDDALNCRSLHTEEAPALDAARARDTEPQTALHGMDHRKLDEMTASYSDVTLYIDEEELSPPLPLSQAGDRPSSTESDLRLRAGGAAPDYWALAHKEDKADTDTSCRSTPSLERQEQRLRVEHLPLLTIEPPSDSSVDLSDRSERGSLKRQSAYERSLGGQQGSPKHGPHSGAPKSLPREEPELRPRPPRPLDSHLAINGSANRQSKSESDYSDGDNDSINSTSNSNDTINCSSESSSRDSLREQTLSKQTYHKEARNSWDSPAFSNDVIRKRHYRIGLNLFNKKPEKGVQYLIERGFVPDTPVGVAHFLLQRKGLSRQMIGEFLGNRQKQFNRDVLDCVVDEMDFSTMELDEALRKFQAHIRVQGEAQKVERLIEAFSQRYCICNPGVVRQFRNPDTIFILAFAIILLNTDMYSPNVKPERKMKLEDFIKNLRGVDDGEDIPREMLMGIYERIRKRELKTNEDHVSQVQKVEKLIVGKKPIGSLHPGLGCVLSLPHRRLVCYCRLFEVPDPNKPQKLGLHQ

SEQ ID NO: 1390 - protein, 210 aa, Homo sapiens
MLGLGTLLPWNFFMTATQYFTNRLDMSQNVSLVTAELSKDAQASAAPAAPLPERNSLSAIFNNVMTLCAMLPLLLFTYLNSFLHQRIPQSVRILGSLVAILLVFLITAILVKVQLDALPFFVITMIKIVLINSFGAILQGSLFGLAGLLPASYTAPIMSGQGLAGFFASVAMICAIASGSELSESAFGYFITACAVIILTIICYLGLPRL

SEQ ID NO: 1391 - protein, 310 aa, Homo sapiens
GWKCFVYHFAVFLIVLVCLIFSVLSTIEQYAALATGTLFWMVTVTTIGYGDKVPQTWVGKTIASCFSVFAISFFALPATAWRCYAAENPDSSTWKIYIRKAPRSHTLLSPSPKPKKSVVVKKKKFKLDKDNGVTPGEKMLTVPHITCDPPEERRLDHFSVDGYDSSVRKSPTLLEVSMPHFMRTNSFAEDLDLEGETLLTPITHISQLREHHRATIKVIRRMQYFVAKKKFQQARKPYDVRDVIEQYSQGHLNLMVRIKELQRRLDQSIGKPSLFISVSEKSKDRGSNTIGARLNRVEDKSTKKRPSPGS

SEQ ID NO: 1392 - protein, 514 aa, Homo sapiens
MALSELALVRWLQESRRSRKLILFIVFLALLLDNMLLTVVVPIIPSYLYSIKHEKNATEIQTARPVHTASISDSFQSIFSYYDNSTMVTGNATRDLTLHQTATQHMVTNASAVPSDCPSEDKDLLNENVQVGLLFASKATVQLITNPFIGLLTNRIGYPIPIFAGFCIMFVSTIMFAFSSSYAFLLIARSLQGIGSSCSSVAGMGMLASVYTDDEERGNVMGIALGGLAMGVLVGPPFGSVLYEFVGKTAPFLVLAALVLLDGAIQLFVLQPSRVQPESQKGTPLTTLLKDPYILIAAGSICFANMGIAMLEPALPIWMMETMCSRKWQLGVAFLPASISYLIGTNIFGILAHKMGRWLCALLGMIIVGVSILCIPFAKNIYGLIAPNFGVGFAIGMVDSSMMPIMGYLVDLRHVSVYGSVYAIADVAFCMGYAIGPSAGGAIAKAIGFPWLMTIIGIIDILFAPLCFFLRSPPAKEEKMAILMDHNCPIKTKMYTQNNIQSYPIGEDEESESD

SEQ ID NO: 1393 - protein, 110 aa, Homo sapiens
MTTSHQPQDRYKAVWLIFFMLGLGTLLPWNFFMTATQYFTNRLDMSQNVSLVTAELSKDAQASAAPAAPLPERNSLSAIFNNVMTLCAMLPLLLFTYLNSFLHQRIPQSV

SEQ ID NO: 1394 - protein, 964 aa, Homo sapiens
MKGYGSAVWSLMWKYCISVRTLSVEGEAPSSETGTSLDSPSAYPQGPLVPGSSLSPDHYEHTSVGAYGLYSGPPGQQQRTRRPKLQHSTSILRKQAEEEAIKRSRSLSESYELSSDLQDKQVEMLERKYGGRLVTRHAARTIQTAFRQYQMNKNFERLRSSMSENRMSRRIVLSNMRMQFSFEGPEKVHSSYFEGKQVSVTNDGSQLGALVSPECGDLSEPTTLKSPAPSSDFADAITELEDAFSRQVKSLAESIDDALNCRSLHTEEAPALDAARARDTEPQTALHGMDHRKLDEMTASYSDVTLYIDEEELSPPLPLSQAGDRPSSTESDLRLRAGGAAPDYWALAHKEDKADTDTSCRSTPSLERQEQRLRVEHLPLLTIEPPSDSSVDLSDRSERGSLKRQSAYERSLGGQQGSPKHGPHSGAPKSLPREEPELRPRPPRPLDSHLAINGSANRQSKSESDYSDGDNDSINSTSNSNDTINCSSESSSRDSLREQTLSKQTYHKEARNSWDSPAFSNDVIRKRHYRIGLNLFNKKPEKGVQYLIERGFVPDTPVGVAHFLLQRKGLSRQMIGEFLGNRQKQFNRDVLDCVVDEMDFSTMELDEALRKFQAHIRVQGEAQKVERLIEAFSQRYCICNPGVVRQFRNPDTIFILAFAIILLNTDMYSPNVKPERKMKLEDFIKNLRGVDDGEDIPREMLMGIYERIRKRELKTNEDHVSQVQKVEKLIVGKKPIGSLHPGLGCVLSLPHRRLVCYCRLFEVPDPNKPQKLGLHQREIFLFNDLLVVTKIFQKKKNSVTYSFRQSFSLYGMQVLLFENQYYPNGIRLTSSVPGADIKVLINFNAPNPQDRKKFTDDLRESIAEVQEMEKHRIESELEKQKGVVRPSMSQCSSLKKESGNGTLSRACLDDSYASGEGLKRSALSSSLRDLSEAGKRGRRSSAGSLESNVEFQPFEPLQPSVLCS

SEQ ID NO: 1395 - protein, 169 aa, Homo sapiens
MTTSHQPQDRYKAVWLIFFMLGLGTLLPWNFFMTATQYFTNRLDMSQNVSLVTAELSKDAQASAAPAAPLPERNSLSAIFNNVMTLCAMLPLLLFTYLNSFLHQRIPQSVRILGSLVAILLVFLITAILVKVQLDALPFFVITMIKIVLINSFGAILQGSLFGLAGLLP

SEQ ID NO: 1396 - protein, 883 aa, Homo sapiens
MHKDEFHLKFFMCVIQSRQLVRTPQRTAGEASTSSMLIPKPPPKTDILKSLDTMDDPDTVGSIPVFKTECAEVEIQVSKRKRAVVKARGDPTVETMKQREEWIMTHEEHHAAKTLGIGKAIAVLTSGGDAQGMNAAVRAVVRVGIFTGARVFFVHEGYQGLVDGGDHIKEATWESVSMMLQLGGTVIGSARCKDFREREGRLRAAYNLVKRGITNLCVIGGDGSLTGADTFRSEWSDLLSDLQKAGKITDEEATKSSYLNIVGLVGSIDNDFCGTDMTIGTDSALHRIMEIVDAITTTAQSHQRTFVLEVMGRHCGYLALVTSLSCGADWVFIPECPPDDDWEEHLCRRLSETRTRGSRLNIIIVAEGAIDKNGKPITSEDIKNLVVKRLGYDTRVTVLGHVQRGGTPSAFDRILGSRMGVEAVMALLEGTPDTPACVVSLSGNQAVRLPLMECVQVTKDVTKAMDEKKFDEALKLRGRSFMNNWEVYKLLAHVRPPVSKSGSHTVAVMNVGAPAAGMNAAVRSTVRIGLIQGNRVLVVHDGFEGLAKGQIEEAGWSYVGGWTGQGGSKLGTKRTLPKKSFEQISANITKFNIQGLVIIGGFEAYTGGLELMEGRKQFDELCIPFVVIPATVSNNVPGSDFSVGADTALNTICTTCDRIKQSAAGTKRRVFIIETMGGYCGYLATMAGLAAGADAAYIFEEPFTIRDLQANVEHLVQKMKTTVKRGLVLRNEKCNENYTTDFIFNLYSEEGKGIFDSRKNVLGHMQQGGSPTPFDRNFATKMGAKAMNWMSGKIKESYRNGRIFANTPDSGCVLGMRKRALVFQPVAELKDQTDFEHRIPKEQWWLKLRPILKILAKYEIDLDTSDHAHLEHITRKRSGEAAV

SEQ ID NO: 1397 - protein, 164 aa, Homo sapiens
MTTSHQPQDRYKAVWLIFFMLGLGTLLPWNFFMTATQYFTNRLDMSQNVSLVTAELSKDAQASAAPAAPLPERNSLSAIFNNVMTLCAMLPLLLFTYLNSFLHQRIPQSVRILGSLVAILLVFLITAILVKVQLDALPFFVITMIKIVLINSFGAILQGSLFGL

SEQ ID NO: 1398 - protein, 364 aa, Homo sapiens
MHGGQGCAPMWGVVTQLPVRALGLEVRVWGLCLHLLSLGLRAFLLFFLVLLRELCVCVQEAGRAVLMAARSVALTAHVCSVYVFLQGVAWSAQLVGSWVMLHIWLYRALLETPRRVPLLPQCEQAARWLVWASMQAGKGLARVWGVATFVQLCAHTVFLSMYLCMHICFAAISSKVRVRVNAPFCVSVPLKVHAPLSLGIKVGLQGQKHGRATGEAGMPQGEMLGKQEPQTSRSPKPTRRREVSRSELSPVIPSAATLIIVVCVGFLVLMVVLGLVRIHSLHRRVSGAGGPPGASSDPKDPDLFWDDSALTIIVNPMESYQNRQSCVTGAVGGQQEDEDSSDSEVADSPSSDERRIIETPPHRY

SEQ ID NO: 1399 - protein, 1366 aa, Homo sapiens
MKSGSGGGSPTSLWGLLFLSAALSLWPTSGEICGPGIDIRNDYQQLKRLENCTVIEGYLHILLISKAEDYRSYRFPKLTVITEYLLLFRVAGLESLGDLFPNLTVIRGWKLFYNYALVIFEMTNLKDIGLYNLRNITRGAIRIEKNADLCYLSTVDWSLILDAVSNNYIVGNKPPKECGDLCPGTMEEKPMCEKTTINNEYNYRCWTTNRCQKMCPSTCGKRACTENNECCHPECLGSCSAPDNDTACVACRHYYYAGVCVPACPPNTYRFEGWRCVDRDFCANILSAESSDSEGFVIHDGECMQECPSGFIRNGSQSMYCIPCEGPCPKVCEEEKKTKTIDSVTSAQMLQGCTIFKGNLLINIRRGNNIASELENFMGLIEVVTGYVKIRHSHALVSLSFLKNLRLILGEEQLEGNYSFYVLDNQNLQQLWDWDHRNLTIKAGKMYFAFNPKLCVSEIYRMEEVTGTKGRQSKGDINTRNNGERASCESDVLHFTSTTTSKNRIIITWHRYRPPDYRDLISFTVYYKEAPFKNVTEYDGQDACGSNSWNMVDVDLPPNKDVEPGILLHGLKPWTQYAVYVKAVTLTMVENDHIRGAKSEILYIRTNASVPSIPLDVLSASNSSSQLIVKWNPPSLPNGNLSYYIVRWQRQPQDGYLYRHNYCSKDKIPIRKYADGTIDIEEVTENPKTEVCGGEKGPCCACPKTEAEKQAEKEEAEYRKVFENFLHNSIFVPRPERKRRDVMQVANTTMSSRSRNTTAADTYNITDPEELETEYPFFESRVDNKERTVISNLRPFTLYRIDIHSCNHEAEKLGCSASNFVFARTMPAEGADDIPGPVTWEPRPENSIFLKWPEPENPNGLILMYEIKYGSQVEDQRECVSRQEYRKYGGAKLNRLNPGNYTARIQATSLSGNGSWTDPVFFYVQAKRYENFIHLIIALPVAVLLIVGGLVIMLYVFHRKRNNSRLGNGVLYASVNPEYFSAADVYVPDEWEVAREKITMSRELGQGSFGMVYEGVAKGVVKDEPETRVAIKTVNEAASMRERIEFLNEASVMKEFNCHHVVRLLGVVSQGQPTLVIMELMTRGDLKSYLRSLRPEMENNPVLAPPSLSKMIQMAGEIADGMAYLNANKFVHRDLAARNCMVAEDFTVKIGDFGMTRDIYETDYYRKGGKGLLPVRWMSPESLKDGVFTTYSDVWSFGVVLWEIATLAEQPYQGLSNEQVLRFVMEGGLLDKPDNCPDMLFELMRMCWQYNPKMRPSFLEIISSIKEEMEPGFREVSFYYSEENKLPEPEELDLEPENMESVPLDPSASSSSLPLPDRHSGHKAENGPGPGVLVLRASFDERQPYAHMNGGRKNERALPLPQSSTC

SEQ ID NO: 1400 - protein, 322 aa, Homo sapiens
MSKTLGSGACGEVKLAFERKTCKKVAIKIISKRKFAIGSAREADPALNVETEIEILKKLNHPCIIKIKNFFDAEDYYIVLELMEGGELFDKVVGNKRLKEATCKLYFYQMLLAVQYLHENGIIHRDLKPENVLLSSQEEDCLIKITDFGHSKILGETSLMRTLCGTPTYLAPEVLVSVGTAGYNRAVDCWSLGVILFICLSGYPPFSEHRTQVSLKDQITSGKYNFIPEVWAEVSEKALDLVKKLLVVDPKARFTTEEALRHPWLQDEDMKRKFQDLLSEENESTALPQVLAQPSTSRKRPREGEAEGAETTKRPAVCAAVL

SEQ ID NO: 1401 - protein, 1153 aa, Homo sapiens
MALRVLLLTALTLCHGFNLDTENAMTFQENARGFGQSVVQLQGSRVVVGAPQEIVAANQRGSLYQCDYSTGSCEPIRLQVPVEAVNMSLGLSLAATTSPPQLLACGPTVHQTCSENTYVKGLCFLFGSNLRQQPQKFPEALRGCPQEDSDIAFLIDGSGSIIPHDFRRMKEFVSTVMEQLKKSKTLFSLMQYSEEFRIHFTFKEFQNNPNPRSLVKPITQLLGRTHTATGIRKVVRELFNITNGARKNAFKILVVITDGEKFGDPLGYEDVIPEADREGVIRYVIGVGDAFRSEKSRQELNTIASKPPRDHVFQVNNFEALKTIQNQLREKIFAIEGTQTGSSSSFEHEMSQEGFSAAITSNGPLLSTVGSYDWAGGVFLYTSKEKSTFINMTRVDSDMNDAYLGYAAAIILRNRVQSLVLGAPRYQHIGLVAMFRQNTGMWESNANVKGTQIGAYFGASLCSVDVDSNGSTDLVLIGAPHYYEQTRGGQVSVCPLPRGQRARWQCDAVLYGEQGQPWGRFGAALTVLGDVNGDKLTDVAIGAPGEEDNRGAVYLFHGTSGSGISPSHSQRIAGSKLSPRLQYFGQSLSGGQDLTMDGLVDLTVGAQGHVLLLRSQPVLRVKAIMEFNPREVARNVFECNDQVVKGKEAGEVRVCLHVQKSTRDRLREGQIQSVVTYDLALDSGRPHSRAVFNETKNSTRRQTQVLGLTQTCETLKLQLPNCIEDPVSPIVLRLNFSLVGTPLSAFGNLRPVLAEDAQRLFTALFPFEKNCGNDNICQDDLSITFSFMSLDCLVVGGPREFNVTVTVRNDGEDSYRTQVTFFFPLDLSYRKVSTLQNQRSQRSWRLACESASSTEVSGALKSTSCSINHPIFPENSEVTFNITFDVDSKASLGNKLLLKANVTSENNMPRTNKTEFQLELPVKYAVYMVVTSHGVSTKYLNFTASENTSRVMQHQYQVSNLGQRSLPISLVFLVPVRLNQTVIWDRPQVTFSENLSSTCHTKERLPSHSDFLAELRKAPVVNCSIAVCQRIQCDIPFFGIQEEFNATLKGNLSFDWYIKTSHNHLLIVSTAEILFNDSVFTLLPGQGAFVRSQTETKVEPFEVPNPLPLIVGSSVGGLLLLALITAALYKLGFFKRQYKDMMSEGGPPGAEPQ

SEQ ID NO: 1402 - protein, 1222 aa, Homo sapiens
MASAAEPPGQAAEYLQELTRIVAAQQELLARRRRRIEELERQVARLSRENAGLLERHRRHLAACARRPDPGPGPGPQPLGAIPELGGRRDKSEGESSRSVRSSLDTGSSLSTDRYSVEGEAPSSETGTSLDSPSAYPQGPLVPGSSLSPDHYEHTSVGAYGLYSGPPGQQQRTRRPKLQHSTSILRKQAEEEAIKRSRSLSESYELSSDLQDKQVEMLERKYGGRLVTRHAARTIQTAFRQYQMNKNFERLRSSMSENRMSRRIVLSNMRMQFSFEGPEKVHSSYFEGKQVSVTNDGSQLGALVSPECGDLSEPTTLKSPAPSSDFADAITELEDAFSRQVKSLAESIDDALNCRSLHTEEAPALDAARARDTEPQTALHGMDHRKLDEMTASYSDVTLYIDEEELSPPLPLSQAGDRPSSTESDLRLRAGGAAPDYWALAHKEDKADTDTSCRSTPSLERQEQRLRVEHLPLLTIEPPSDSSVDLSDRSERGSLKRQSAYERSLGGQQGSPKHGPHSGAPKSLPREEPELRPRPPRPLDSHLAINGSANRQSKSESDYSDGDNDSINSTSNSNDTINCSSESSSRDSLREQTLSKQTYHKEARNSWDSPAFSNDVIRKRHYRIGLNLFNKKPEKGVQYLIERGFVPDTPVGVAHFLLQRKGLSRQMIGEFLGNRQKQFNRDVLDCVVDEMDFSTMELDEALRKFQAHIRVQGEAQKVERLIEAFSQRYCICNPGVVRQFRNPDTIFILAFAIILLNTDMYSPNVKPERKMKLEDFIKNLRGVDDGEDIPREMLMGIYERIRKRELKTNEDHVSQVQKVEKLIVGKKPIGSLHPGLGCVLSLPHRRLVCYCRLFEVPDPNKPQKLGLHQREIFLFNDLLVVTKIFQKKKNSVTYSFRQSFSLYGMQVLLFENQYYPNGIRLTSSVPGADIKVLINFNAPNPQDRKKFTDDLRESIAEVQEMEKHRIESELEKQKGVVRPSMSQCSSLKKESGNGTLSRACLDDSYASGEGLKRSALSSSLRDLSEAGKRGRRSSAGSLESNVEGSIISSPHMRRRATSTRECPSRPHQTMPNSSSLLGSLFGSKRGKPPPQAHLPSAPALPPPHPPVVLPHLQHSVAGHHLGPPEGLPQAAMHGHHTQYCHMQNPPPYHHHHHHHPPQHIQHAHQYHHGPHGGHPAYGAHAHGHPPLPSAHVGHTVHHHGQPPAPPPPTSSKAKPSGISTIV

SEQ ID NO: 1403 - protein, 1367 aa, Homo sapiens
MKSGSGGGSPTSLWGLLFLSAALSLWPTSGEICGPGIDIRNDYQQLKRLENCTVIEGYLHILLISKAEDYRSYRFPKLTVITEYLLLFRVAGLESLGDLFPNLTVIRGWKLFYNYALVIFEMTNLKDIGLYNLRNITRGAIRIEKNADLCYLSTVDWSLILDAVSNNYIVGNKPPKECGDLCPGTMEEKPMCEKTTINNEYNYRCWTTNRCQKMCPSTCGKRACTENNECCHPECLGSCSAPDNDTACVACRHYYYAGVCVPACPPNTYRFEGWRCVDRDFCANILSAESSDSEGFVIHDGECMQECPSGFIRNGSQSMYCIPCEGPCPKVCEEEKKTKTIDSVTSAQMLQGCTIFKGNLLINIRRGNNIASELENFMGLIEVVTGYVKIRHSHALVSLSFLKNLRLILGEEQLEGNYSFYVLDNQNLQQLWDWDHRNLTIKAGKMYFAFNPKLCVSEIYRMEEVTGTKGRQSKGDINTRNNGERASCESDVLHFTSTTTSKNRIIITWHRYRPPDYRDLISFTVYYKEAPFKNVTEYDGQDACGSNSWNMVDVDLPPNKDVEPGILLHGLKPWTQYAVYVKAVTLTMVENDHIRGAKSEILYIRTNASVPSIPLDVLSASNSSSQLIVKWNPPSLPNGNLSYYIVRWQRQPQDGYLYRHNYCSKDKIPIRKYADGTIDIEEVTENPKTEVCGGEKGPCCACPKTEAEKQAEKEEAEYRKVFENFLHNSIFVPRPERKRRDVMQVANTTMSSRSRNTTAADTYNITDPEELETEYPFFESRVDNKERTVISNLRPFTLYRIDIHSCNHEAEKLGCSASNFVFARTMPAEGADDIPGPVTWEPRPENSIFLKWPEPENPNGLILMYEIKYGSQVEDQRECVSRQEYRKYGGAKLNRLNPGNYTARIQATSLSGNGSWTDPVFFYVQAKTGYENFIHLIIALPVAVLLIVGGLVIMLYVFHRKRNNSRLGNGVLYASVNPEYFSAADVYVPDEWEVAREKITMSRELGQGSFGMVYEGVAKGVVKDEPETRVAIKTVNEAASMRERIEFLNEASVMKEFNCHHVVRLLGVVSQGQPTLVIMELMTRGDLKSYLRSLRPEMENNPVLAPPSLSKMIQMAGEIADGMAYLNANKFVHRDLAARNCMVAEDFTVKIGDFGMTRDIYETDYYRKGGKGLLPVRWMSPESLKDGVFTTYSDVWSFGVVLWEIATLAEQPYQGLSNEQVLRFVMEGGLLDKPDNCPDMLFELMRMCWQYNPKMRPSFLEIISSIKEEMEPGFREVSFYYSEENKLPEPEELDLEPENMESVPLDPSASSSSLPLPDRHSGHKAENGPGPGVLVLRASFDERQPYAHMNGGRKNERALPLPQSSTC

SEQ ID NO: 1404 - protein, 133 aa, Homo sapiens
MEPAVSLAVCALLFLLWVRLKGLEFVLIHQRWVFVCLFLLPLSLIFDIYYYVRAWVVFKLSSAPRLHEQRVRDIQKQVREWKEQGSKTFMCTGRPGWLTVSLRVGKYKKTHKNIMINLMDILEVDTKKQFRIL

SEQ ID NO: 1405 - protein, 223 aa, Homo sapiens
MACLGFQRHKAQLNLATRTWPCTLLFFLLFIPVFCKAMHVAQPAVVLASSRGIASFVCEYASPGKATEVRVTVLRQADSQVTEVCAATYMMGNELTFLDDSICTGTSSGNQVNLTIQGLRAMDTGLYICKVELMYPPPYYLGIGNGTQIYVIDPEPCPDSDFLLWILAAVSSGLFFYSFLLTAVSLSKMLKKRSPLTTGVYVKMPPTEPECEKQFQPYFIPIN

SEQ ID NO: 1406 - protein, 818 aa, Homo sapiens
MWSWKCLLFWAVLVTATLCTARPSPTLPEQAQPWGAPVEVESFLVHPGDLLQLRCRLRDDVQSINWLRDGVQLAESNRTRITGEEVEVQDSVPADSGLYACVTSSPSGSDTTYFSVNVSDALPSSEDDDDDDDSSSEEKETDNTKPNPVAPYWTSPEKMEKKLHAVPAAKTVKFKCPSSGTPNPTLRWLKNGKEFKPDHRIGGYKVRYATWSIIMDSVVPSDKGNYTCIVENEYGSINHTYQLDVVERSPHRPILQAGLPANKTVALGSNVEFMCKVYSDPQPHIQWLKHIEVNGSKIGPDNLPYVQILKTAGVNTTDKEMEVLHLRNVSFEDAGEYTCLAGNSIGLSHHSAWLTVLEALEERPAVMTSPLYLEIIIYCTGAFLISCMVGSVIVYKMKSGTKKSDFHSQMAVHKLAKSIPLRRQVSADSSASMNSGVLLVRPSRLSSSGTPMLAGVSEYELPEDPRWELPRDRLVLGKPLGEGCFGQVVLAEAIGLDKDKPNRVTKVAVKMLKSDATEKDLSDLISEMEMMKMIGKHKNIINLLGACTQDGPLYVIVEYASKGNLREYLQARRPPGLEYCYNPSHNPEEQLSSKDLVSCAYQVARGMEYLASKKCIHRDLAARNVLVTEDNVMKIADFGLARDIHHIDYYKKTTNGRLPVKWMAPEALFDRIYTHQSDVWSFGVLLWEIFTLGGSPYPGVPVEELFKLLKEGHRMDKPSNCTNELYMMMRDCWHAVPSQRPTFKQLVEDLDRIVALTSNQEYLDLSMPLDQYSPSFPDTRSSTCSSGEDSVFSHEPLPEEPCLPRHPAQLANGGLKRR

SEQ ID NO: 1407 - protein, 58 aa, Homo sapiens
MACLGFQRHKAQLNLATRTWPCTLLFFLLFIPVFCKAKEKKPSYNRGLCENAPNRARM

SEQ ID NO: 1408 - protein, 355 aa, Homo sapiens
MHGGQGCAPMWGVVTQLPVRALGLEVRVWGLCLHLLSLGLRAFLLFFLVLLRELCVCVQEAGRAVLMAARSVALTAHVCSVYVFLQGVAWSAQLVGSWVMLHIWLYRALLETPRRVPLLPQCEQAARWLVWASMQAGKGLARVWGVATFVQLCAHTVFLSMYLCMHICFAAISSKVRVRVNAPFCVSVPLKVHAPLSLGIKVGLQGQKHGRATGEAGMPQGEMLGKQEPQTSRSPKPTRRREVSRSELSPVIPSAATLIIVVCVGFLVLMVVLGLVRIHSLHRRVSGAGGPPGASSDPKDPDLFWDDSALTIIVNPMEVRGLGKRGSVGSRLWSTHVLPESAVLCDGGCWGPAGG

SEQ ID NO: 1409 - protein, 153 aa, Homo sapiens
MEPAVSLAVCALLFLLWVRLKGLEFVLIHQRWVFVCLFLLPLSLIFDIYYYVRAWVVFKLSSAPRLHEQRVRDIQKQVREWKEQGSKTFMCTGRPGWLTVSLRVGKYKKTHKNIMINLMDILEVDTKKQSLALSSRLECSGTVLAHCNLHGFK

SEQ ID NO: 1410 - protein, 321 aa, Homo sapiens
MSEQSKDLSDPNFAAEAPNSEVHSSPGVSEGVPPSATLAEPQSPPLGPTAAPQAAPPPQAPNDEGDPKALQQAAEEGRAHQAPSAAQPGPAPPAPAQLVQKAHELMWYVLVKDQKKMIIWFPDMVKDVIGSYKKWCRSILRRTSLILARVFGLHLRLTSLHTMEFALVKALEPEELDRVALSNRMPMTGLLLMILSLIYVKGRGARESAVWNVLRILGLRPWKKHSTFGDVRKLITEEFVQMNYLKYQRVPYVEPPEYEFFWGSRASREITKMQIMEFLARVFKKDPQAWPSRYREALEEARALREANPTAHYPRSSVSED

SEQ ID NO: 1411 - protein, 810 aa, Homo sapiens
MLERKYGGRLVTRHAARTIQTAFRQYQMNKNFERLRSSMSENRMSRRIVLSNMRMQFSFEGPEKVHSSYFEGKQVSVTNDGSQLGALVSPECGDLSEPTTLKSPAPSSDFADAITELEDAFSRQVKSLAESIDDALNCRSLHTEEAPALDAARARDTEPQTALHGMDHRKLDEMTASYSDVTLYIDEEELSPPLPLSQAGDRPSSTESDLRLRAGGAAPDYWALAHKEDKADTDTSCRSTPSLERQEQRLRVEHLPLLTIEPPSDSSVDLSDRSERGSLKRQSAYERSLGGQQGSPKHGPHSGAPKSLPREEPELRPRPPRPLDSHLAINGSANRQSKSESDYSDGDNDSINSTSNSNDTINCSSESSSRDSLREQTLSKQTYHKEARNSWDSPAFSNDVIRKRHYRIGLNLFNKKPEKGVQYLIERGFVPDTPVGVAHFLLQRKGLSRQMIGEFLGNRQKQFNRDVLDCVVDEMDFSTMELDEALRKFQAHIRVQGEAQKVERLIEAFSQRYCICNPGVVRQFRNPDTIFILAFAIILLNTDMYSPNVKPERKMKLEDFIKNLRGVDDGEDIPREMLMGIYERIRKRELKTNEDHVSQVQKVEKLIVGKKPIGSLHPGLGCVLSLPHRRLVCYCRLFEVPDPNKPQKLGLHQREIFLFNDLLVVTKIFQKKKNSVTYSFRQSFSLYGMQVLLFENQYYPNGIRLTSSVPGADIKVLINFNAPNPQDRKKFTDDLRESIAEVQEMEKHRIESELEKQKGVVRPSMSQCSSLKKESGNGTLSRACLDDSYASGEGLKRSALSSSLRDLSEA

SEQ ID NO: 1412 - protein, 385 aa, Homo sapiens
MGCRRTREGPSKAMIFPWKCQSTQRDLWNIFKLWGWTMLCCDFLAHHGTDCWTYHYSEKPMNWQRARRFCRDNYTDLVAIQNKAEIEYLEKTLPFSRSYYWIGIRKIGGIWTWVGTNKSLTEEAENWGDGEPNNKKNKEDCVEIYIKRNKDAGKWNDDACHKLKAALCYTASCQPWSCSGHGECVEIINNYTCNCDVGYYGPQCQFVIQCEPLEAPELGTMDCTHPLGNFSFSSQCAFSCSEGTNLTGIEETTCGPFGNWSSPEPTCQVIQCEPLSAPDLGIMNCSHPLASFSFTSACTFICSEGTELIGKKKTICESSGIWSNPSPICQKLDKSFSMIKEGDYNPLFIPVAVMVTAFSGLAFIIWLARRLKKGKKSKRSMNDPY

SEQ ID NO: 1413 - protein, 722 aa, Homo sapiens
MLTFFLVSGGSLWLFVEFVLSLLEKMQTQEILRILRLPELGDLGQFFRSLSATTLVSMGALAAILAYWFTHRPKALQPPCNLLMQSEEVEDSGGARRSVIGSGPQLLTHYYDDARTMYQVFRRGLSISGNGPCLGFRKPKQPYQWLSYQEVADRAEFLGSGLLQHNCKACTDQFIGVFAQNRPEWIIVELACYTYSMVVVPLYDTLGPGAIRYIINTADISTVIVDKPQKAVLLLEHVERKETPGLKLIILMDPFEEALKERGQKCGVVIKSMQAVEDCGQENHQAPVPPQPDDLSIVCFTSGTTGNPKGAMLTHGNVVADFSGFLKVTESQWAPTCADVHISYLPLAHMFERMVQSVVYCHGGRVGFFQGDIRLLSDDMKALCPTIFPVVPRLLNRMYDKIFSQANTPLKRWLLEFAAKRKQAEVRSGIIRNDSIWDELFFNKIQASLGGCVRMIVTGAAPASPTVLGFLRAALGCQVYEGYGQTECTAGCTFTTPGDWTSGHVGAPLPCNHIKLVDVEELNYWACKGEGEICVRGPNVFKGYLKDPDRTKEALDSDGWLHTGDIGKWLPAGTLKIIDRKKHIFKLAQGEYVAPEKIENIYIRSQPVAQIYVHGDSLKAFLVGIVVPDPEVMPSWAQKRGIEGTYADLCTNKDLKKAILEDMVRLGKESGLHSFEQVKAIHIHSDMFSVQNGLLTPTLKAKRPELREYFKKQIEELYSISM

SEQ ID NO: 1414 - protein, 201 aa, Homo sapiens
MASALWTVLPSRMSLRSLKWSLLLLSLLSFFVMWYLSLPHYNVIERVNWMYFYEYEPIYRQDFHFTLREHSNCSHQNPFLVILVTSHPSDVKARQAIRVTWGEKKSWWGYEVLTFFLLGQEAEKEDKMLALSLEDEHLLYGDIIRQDFLDTYNNLTLKTIMAFRIHLDVCQLRRVIAAHGFSSKEIITFWQVMLRNTTCHY

SEQ ID NO: 1415 - protein, 720 aa, Homo sapiens
MQTQEILRILRLPELGDLGQFFRSLSATTLVSMGALAAILAYWFTHRPKALQPPCNLLMQSEEVETCCSKRWQALAQPRVAQIVLEEEDSGGARRSVIGSGPQLLTHYYDDARTMYQVFRRGLSISGNGPCLGFRKPKQPYQWLSYQEVADRAEFLGSGLLQHNCKACTDQFIGVFAQNRPEWIIVELACYTYSMVVVPLYDTLGPGAIRYIINTADISTVIVDKPQKAVLLLEHVERKETPGLKLIILMDPFEEALKERGQKCGVVIKSMQAVEDCGQENHQAPVPPQPDDLSIVCFTSGTTGNPKGAMLTHGNVVADFSGFLKVTESQWAPTCADVHISYLPLAHMFERMVQSVVYCHGGRVGFFQGDIRLLSDDMKALCPTIFPVVPRLLNRMYDKIFSQANTPLKRWLLEFAAKRKQAEVRSGIIRNDSIWDELFFNKIQASLGGCVRMIVTGAAPASPTVLGFLRAALGCQVYEGYGQTECTAGCTFTTPGDWTSGHVGAPLPCNHIKLVDVEELNYWACKGEGEICVRGPNVFKGYLKDPDRTKEALDSDGWLHTGDIGKWLPAGTLKIIDRKKHIFKLAQGEYVAPEKIENIYIRSQPVAQIYVHGDSLKAFLVGIVVPDPEVMPSWAQKRGIEGTYADLCTNKDLKKAILEDMVRLGKESGLHSFEQVKAIHIHSDMFSVQNGLLTPTLKAKRPELREYFKKQIEELYSISM

SEQ ID NO: 1416 - protein, 1274 aa, Homo sapiens
MARQPEEEETAVARARRPPLWLLCLVACWLLGAGAEADFSILDEAQVLASQMRRLAAEELGVVTMQRIFNSFVYTEKISNGESEVQQLAKKIREKFNRYLDVVNRNKQVVEASYTAHLTSPLTAIQDCCTIPPSMMEFDGNFNTNVSRTISCDRLSTTVNSRAFNPGRDLNSVLADNLKSNPGIKWQYFSSEEGIFTVFPAHKFRCKGSYEHRSRPIYVSTVRPQSKHIVVILDHGASVTDTQLQIAKDAAQVILSAIDEHDKISVLTVADTVRTCSLDQCYKTFLSPATSETKRKMSTFVSSVKSSDSPTQHAVGFQKAFQLIRSTNNNTKFQANTDMVIIYLSAGITSKDSSEEDKKATLQVINEENSFLNNSVMILTYALMNDGVTGLKELAFLRDLAEQNSGKYGVPDRMALPVIKGSMMVLNQLSNLETTVGRFYTNLPNRMIDEAVFSLPFSDEMGDGLIMTVSKPCYFGNLLLGIVGVDVNLAYILEDVTYYQDSLASYTFLIDDKGYTLMHPSLTRPYLLSEPPLHTDIIHYENIPKFELVRQNILSLPLGSQIIAVPVNSSLSWHINKLRETGKEAYNVSYAWKMVQDTSFILCIVVIQPEIPVKQLKNLNTVPSSKLLYHRLDLLGQPSACLHFKQLATLESPTIMLSAGSFSSPYEHLSQPETKRMVEHYTAYLSDNTRLIANPGLKFSVRNEVMATSHVTDEWMTQMEMSSLNTYIVRRYIATPNGVLRIYPGSLMDKAFDPTRRQWYLHAVANPGLISLTGPYLDVGGAGYVVTISHTIHSSSTQLSSGHTVAVMGIDFTLRYFYKVLMDLLPVCNQDGGNKIRCFIMEDRGYLVAHPTLIDPKGHAPVEQQHITHKEPLVANDILNHPNFVKKNLCNSFSDRTVQRFYKFNTSLAGDLTNLVHGSHCSKYRLARIPGTNAFVGIVNETCDSLAFCACSMVDRLCLNCHRMEQNECECPCECPLEVNECTGNLTNAENRNPSCEVHQEPVTYTAIDPGLQDALHQCVNSRCSQRLESGDCFGVLDCEWCMVDSDGKTHLDKPYCAPQKECFGGIVGAKSPYVDDMGAIGDEVITLNMIKSAPVGPVAGGIMGCIMVLVLAVYAYRHQIHRRSHQHMSPLAAQEMSVRMSNLENDRDERDDDSHEDRGIISNTRFIAAVIERHAHSPERRRRYWGRSGTESDHGYSTMSPQEDSENPPCNNDPLSAGVDVGNHDEDLDLDTPPQTAALLSHKFHHYRSHHPTLHHSHHLQAAVTVHTVDAEC

SEQ ID NO: 1417 - protein, 285 aa, Homo sapiens
MTTNAGPLHPYWPQHLRLDNFVPNDRPTWHILAGLFSVTGVLVVTTWLLSGRAAVVPLGTWRRLSLCWFAVCGFIHLVIEGWFVLYYEDLLGDQAFLSQLWKEYAKGDSRYILGDNFTVCMETITACLWGPLSLWVVIAFLRQHPLRFILQLVVSVERPHQQKALTRCDSLTMDFPASRTKCESFLPPEFRSFAVDPQITSLDVLQHILIRAFDLSGKKNFGISYLGRDRLGQEVYLSLLSDWDLSTAFATASKPYLQLRVDIRPSEDSEYSVPPGALLWNPFTP

SEQ ID NO: 1418 - protein, 251 aa, Homo sapiens
MASALWTVLPSRMSLRSLKWSLLLLSLLSFFVMWYLSLPHYNVIERVNWMYFYEYEPIYRQDFHFTLREHSNCSHQNPFLVILVTSHPSDVKARQAIRVTWGEKKSWWGYEVLTFFLLGQEAEKEDKMLALSLEDEHLLYGDIIRQDFLDTYNNLTLKTIMAFRWVTEFCPNAKYVMKTDTDVFINTGNLVKYLLNLNHSEKFFTGYPLIDNYSYRGFYQKTHISYQEYPFKVFPPYCSGLGYIMSRDLVP

SEQ ID NO: 1419 - protein, 692 aa, Homo sapiens
MLTFFLVSGGSLWLFVEFVLSLLEKMQTQEILRILRLPELGDLGQFFRSLSATTLVSMGALAAILAYWFTHRPKALQPPCNLLMQSEEVEDSGGARRSVIGSGPQLLTHYYDDARTMYQVFRRGLSISGNGPCLGFRKPKQPYQWLSYQEVADRAEFLGSGLLQHNCKACTDQFIGVFAQNRPEWIIVELACYTYSMVVVPLYDTLGPGAIRYIINTADISTVIVDKPQKAVLLLEHVERKETPGLKLIILMDPFEEALKERGQKCGVVIKSMQAVEDCGQENHQAPVPPQPDDLSIVCFTSGTTGNPKGAMLTHGNVVADFSGFLKVTESQWAPTCADVHISYLPLAHMFERMVQSVVYCHGGRVGFFQGDIRLLSDDMKALCPTIFPVVPRLLNRMYDKIFSQANTPLKRWLLEFAAKRKQAEVRSGIIRNDSIWDELFFNKIQASLGGCVRMIVTGAAPASPTVLGFLRAALGCQVYEGYGQTECTAGCTFTTPGDWTSGHVGAPLPCNHIKLVDVEELNYWACKGEGEICVRGPNVFKGYLKDPDRTKEALDSDGWLHTGDIGKWLPAGTLKIIDRKKHIFKLAQGEYVAPEKIENIYIRSQPVAQIYVHGDSLKAFLVGIVVPDPEVMPSWAQKRGIEGTYADLCTNKDLKKAILEDMVRLGKESGLHSFEQDLPQCLIQIKVFSKY

SEQ ID NO: 1420 - protein, 893 aa, Homo sapiens
MTPPSRAEAGVRRSRVPSEGRWRGAEPPGISASTQPASAGRAARHCGAMSGARGEGPEAGAGGAGGRAAPENPGGVLSVELPGLLAQLARSFALLLPVYALGYLGLSFSWVLLALALLAWCRRSRGLKALRLCRALALLEDEERVVRLGVRACDLPAWVHFPDTERAEWLNKTVKHMWPFICQFIEKLFRETIEPAVRGANTHLSTFSFTKVDVGQQPLRINGVKVYTENVDKRQIILDLQISFVGNCEIDLEIKRYFCRAGVKSIQIHGTMRVILEPLIGDMPLVGALSIFFLRKPLLEINWTGLTNLLDVPGLNGLSDTIILDIISNYLVLPNRITVPLVSEVQIAQLRFPVPKGVLRIHFIEAQDLQGKDTYLKGLVKGKSDPYGIIRVGNQIFQSRVIKENLSPKWNEVYEALVYEHPGQELEIELFDEDPDKDDFLGSLMIDLIEVEKERLLDEWFTLDEVPKGKLHLRLEWLTLMPNASNLDKVLTDIKADKDQANDGLSSALLILYLDSARNLPSGKKISSNPNPVVQMSVGHKAQESKIRYKTNEPVWEENFTFFIHNPKRQDLEVEVRDEQHQCSLGNLKVPLSQLLTSEDMTVSQRFQLSNSGPNSTIKMKIALRVLHLEKRERPPDHQHSAQVKRPSVSKEGRKTSIKSHMSGSPGPGGSNTAPSTPVIGGSDKPGMEEKAQPPEAGPQGLHDLGRSSSSLLASPGHISVKEPTPSIASDISLPIATQELRQRLRQLENGTTLGQSPLGQIQLTIRHSSQRNKLIVVVHACRNLIAFSEDGSDPYVRMYLLPDKRRSGRRKTHVSKKTLNPVFDQSFDFSVSLPEVQRRTLDVAVKNSGGFLSKDKGLLGKVLVALASEELAKGWTQWYDLTEDGTRPQAMT

SEQ ID NO: 1421 - protein, 722 aa, Homo sapiens
MLTFFLVSGGSLWLFVEFVLSLLEKMQTQEILRILRLPELGDLGQFFRSLSATTLVSMGALAAILAYWFTHRPKALQPPCNLLMQSEEVEDSGGARRSVIGSGPQLLTHYYDDARTMYQVFRRGLSISGNGPCLGFRKPKQPYQWLSYQEVADRAEFLGSGLLQHNCKACTDQFIGVFAQNRPEWIIVELACYTYSMVVVPLYDTLGPGAIRYIINTADISTVIVDKPQKAVLLLEHVERKETPGLKLIILMDPFEEALKERGQKCGVVIKSMQAVEDCGQENHQAPVPPQPDDLSIVCFTSGTTGNPKGAMLTHGNVVADFSGFLKVTEKVIFPRQDDVLISFLPLAHMFERVIQSVVYCHGGRVGFFQGDIRLLSDDMKALCPTIFPVVPRLLNRMYDKIFSQANTPLKRWLLEFAAKRKQAEVRSGIIRNDSIWDELFFNKIQASLGGCVRMIVTGAAPASPTVLGFLRAALGCQVYEGYGQTECTAGCTFTTPGDWTSGHVGAPLPCNHIKLVDVEELNYWACKGEGEICVRGPNVFKGYLKDPDRTKEALDSDGWLHTGDIGKWLPAGTLKIIDRKKHIFKLAQGEYVAPEKIENIYIRSQPVAQIYVHGDSLKAFLVGIVVPDPEVMPSWAQKRGIEGTYADLCTNKDLKKAILEDMVRLGKESGLHSFEQVKAIHIHSDMFSVQNGLLTPTLKAKRPELREYFKKQIEELYSISM

SEQ ID NO: 1422 - protein, 888 aa, Homo sapiens
MGLPEPGPLRLLALLLLLLLLLLLQLQHLAAAAADPLLGGQGPAKDCEKDQFQCRNERCIPSVWRCDEDDDCLDHSDEDDCPKKTCADSDFTCDNGHCIHERWKCDGEEECPDGSDESEATCTKQVCPAEKLSCGPTSHKCVPASWRCDGEKDCEGGADEAGCATLCAPHEFQCGNRSCLAAVFVCDGDDDCGDGSDERGCADPACGPREFRCGGDGGGACIPERWVCDRQFDCEDRSDEAAELCGRPGPGATSAPAACATASQFACRSGECVHLGWRCDGDRDCKDKSDEADCPLGTCRGDEFQCGDGTCVLAIKHCNQEQDCPDGSDEAGCLQGLNECLHNNGGCSHICTDLKIGFECTCPAGFQLLDQKTCGDIDECKDPDACSQICVNYKGYFKCECYPGYEMDLLTKNCKAAAGKSPSLIFTNRHEVRRIDLVKRNYSRLIPMLKNVVALDVEVATNRIYWCDLSYRKIYSAYMDKASDPKEQEVLIDEQLHSPEGLAVDWVHKHIYWTDSGNKTISVATVDGGRRRTLFSRNLSEPRAIAVDPLRGFMYWSDWGDQAKIEKSGLNGVDRQTLVSDNIEWPNGITLDLLSQRLYWVDSKLHQLSSIDFSGGNRKTLISSTDFLSHPFGIAVFEDKVFWTDLENEAIFSANRLNGLEISILAENLNNPHDIVIFHELKQPRAPDACELSVQPNGGCEYLCLPAPQISSHSPKYTCACPDTMWLGPDMKRCYRDANEDSKMGSTVTAAVIGIIVPIVVIALLCMSGYLIWRNWKRKNTKSMNFDNPVYRKTTEEEDEDELHIGRTAQIGHVYPAAISSFDRPLWAEPCLGETREPEDPAPALKELFVLPGEPRSQLHQLPKNPLSELPVVKSKRVALSLEDDGLP

SEQ ID NO: 1423 - protein, 834 aa, Homo sapiens
MGLPEPGPLRLLALLLLLLLLLLLQLQHLAAAAADPLLGGQGPAKDCEKDQFQCRNERCIPSVWRCDEDDDCLDHSDEDDCPKKTCADSDFTCDNGHCIHERWKCDGEEECPDGSDESEATCTKQVCPAEKLSCGPTSHKCVPASWRCDGEKDCEGGADEAGCATSLGTCRGDEFQCGDGTCVLAIKHCNQEQDCPDGSDEAGCLQGLNECLHNNGGCSHICTDLKIGFECTCPAGFQLLDQKTCGDIDECKDPDACSQICVNYKGYFKCECYPGYEMDLLTKNCKAAAGKSPSLIFTNRHEVRRIDLVKRNYSRLIPMLKNVVALDVEVATNRIYWCDLSYRKIYSAYMDKASDPKEQEVLIDEQLHSPEGLAVDWVHKHIYWTDSGNKTISVATVDGGRRRTLFSRNLSEPRAIAVDPLRGFMYWSDWGDQAKIEKSGLNGVDRQTLVSDNIEWPNGITLDLLSQRLYWVDSKLHQLSSIDFSGGNRKTLISSTDFLSHPFGIAVFEDKVFWTDLENEAIFSANRLNGLEISILAENLNNPHDIVIFHELKQPRAPDACELSVQPNGGCEYLCLPAPQISSHSPKYTCACPDTMWLGPDMKRCYRAPQSTSTTTLASTMTRTVPATTRAPGTTVHRSTYQNHSTETPSLTAAVPSSVSVPRAPSISPSTLSPATSNHSQHYANEDSKMGSTVTAAVIGIIVPIVVIALLCMSGYLIWRNWKRKNTKSMNFDNPVYRKTTEEEDEDELHIGRTAQIGHVYPAAISSFDRPLWAEPCLGETREPEDPAPALKELFVLPGEPRSQLHQLPKNPLSELPVVKSKRVALSLEDDGLP

SEQ ID NO: 1424 - protein, 926 aa, Homo sapiens
MGLPEPGPLRLLALLLLLLLLLLLQLQHLAAAAADPLLGGQGPAKDCEKDQFQCRNERCIPSVWRCDEDDDCLDHSDEDDCPKKTCADSDFTCDNGHCIHERWKCDGEEECPDGSDESEATCTKQVCPAEKLSCGPTSHKCVPASWRCDGEKDCEGGADEAGCATLCAPHEFQCGNRSCLAAVFVCDGDDDCGDGSDERGCADPACGPREFRCGGDGGGACIPERWVCDRQFDCEDRSDEAAELCGRPGPGATSAPAACATASQFACRSGECVHLGWRCDGDRDCKDKSDEADCPLGTCRGDEFQCGDGTCVLAIKHCNQEQDCPDGSDEAGCLQGLNECLHNNGGCSHICTDLKIGFECTCPAGFQLLDQKTCGDIDECKDPDACSQICVNYKGYFKCECYPGYEMDLLTKNCKAAAGKSPSLIFTNRHEVRRIDLVKRNYSRLIPMLKNVVALDVEVATNRIYWCDLSYRKIYSAYMDKASDPKEQEVLIDEQLHSPEGLAVDWVHKHIYWTDSGNKTISVATVDGGRRRTLFSRNLSEPRAIAVDPLRGFMYWSDWGDQAKIEKSGLNGVDRQTLVSDNIEWPNGITLDLLSQRLYWVDSKLHQLSSIDFSGGNRKTLISSTDFLSHPFGIAVFEDKVFWTDLENEAIFSANRLNGLEISILAENLNNPHDIVIFHELKQPRAPDACELSVQPNGGCEYLCLPAPQISSHSPKYTCACPDTMWLGPDMKRCYRAPQSTSTTTLASTMTRTVPATTRAPGTTVHRSTYQNHSTETPSLTAAVPSSVSVPRAPSISPSTLSPATSNHSQHYANEDSKMGSTVTAAVIGIIVPIVVIALLCMSGYLIWRNWKRKNTKSMNFDNPVYRKTTEEEDEDELHIGRTAQIGHVYPADTWVEFSKFPLKHPEGCHPYRAKWRRFQISPSLL

SEQ ID NO: 1425 - protein, 536 aa, Homo sapiens
LDQKTCGDIDECKDPDACSQICVNYKGYFKCECYPGYEMDLLTKNCKAAAGKSPSLIFTNRHEVRRIDLVKRNYSRLIPMLKNVVALDVEVATNRIYWCDLSYRKIYSAYMDKASDPKEQEVLIDEQLHSPEGLAVDWVHKHIYWTDSGNKTISVATVDGGRRRTLFSRNLSEPRAIAVDPLRGFMYWSDWGDQAKIEKSGLNGVDRQTLVSDNIEWPNGITLDLLSQRLYWVDSKLHQLSSIDFSGGNRKTLISSTDFLSHPFGIAVFEDKVFWTDLENEAIFSANRLNGLEISILAENLNNPHDIVIFHELKQPRAPDACELSVQPNGGCEYLCLPAPQISSHSPKYTCACPDTMWLGPDMKRCYRAPQSTSTTTLASTMTRTVPATTRAPGTTVHRSTYQNHSTETPSLTAAVPSSVSVPRAPSISPSTLSPATSNHSQHYANEDSKMGSTVTAAVIGIIVPIVVIALLCMSGYLIWRNWKRKNTKSMNFDNPVYRKTTEEEDEDELHIGRTAQIGHVYPARVALSLEDDGLP

SEQ ID NO: 1426 - protein, 124 aa, Homo sapiens
SISPSTLSPATSNHSQHYANEDSKMGSTVTAAVIGIIVPIVVIALLCMSGYLIWRNWKRKNTKSMNFDNPVYRKTTEEEDEDELHIGRTAQIGHVYPAVTAAPTPEEPSFRAACRQIQASGIKP

SEQ ID NO: 1427 - protein, 732 aa, Homo sapiens
MGLPEPGPLRLLALLLLLLLLLLLQLQHLAAAAADPLLGGQGPAKDCEKDQFQCRNERCIPSVWRCDEDDDCLDHSDEDDCPKKTCADSDFTCDNGHCIHERWKCDGEEECPDGSDESEATCTLGTCRGDEFQCGDGTCVLAIKHCNQEQDCPDGSDEAGCLQGLNECLHNNGGCSHICTDLKIGFECTCPAGFQLLDQKTCGDIDECKDPDACSQICVNYKGYFKCECYPGYEMDLLTKNCKAAAGKSPSLIFTNRHEVRRIDLVKRNYSRLIPMLKNVVALDVEVATNRIYWCDLSYRKIYSAYMDKASDPKEQEVLIDEQLHSPEGLAVDWVHKHIYWTDSGNKTISVATVDGGRRRTLFSRNLSEPRAIAVDPLRGFMYWSDWGDQAKIEKSGLNGVDRQTLVSDNIEWPNGITLDLLSQRLYWVDSKLHQLSSIDFSGGNRKTLISSTDFLSHPFGIAVFEDKVFWTDLENEAIFSANRLNGLEISILAENLNNPHDIVIFHELKQPRAPDACELSVQPNGGCEYLCLPAPQISSHSPKYTCACPDTMWLGPDMKRCYRAPQSTSTTTLASTMTRTVPATTRAPGTTVHRSTYQNHSTETPSLTAAVPSSVSVPRAPSISPSTLSPATSNHSQHYANEDSKMGSTVTAAVIGIIVPIVVIALLCMSGYLIWRNWKRKNTKSMNFDNPVYRKTTEEEDEDELHIGRTAQIGHVYPARVALSLEDDGLP

SEQ ID NO: 1428 - protein, 188 aa, Homo sapiens
MAGLSRQLCALSHPKKAAETQTAEPGGAHAVCSRHPVRVKGLEGSEMESARENIDLQPGSSDPRSQPINLNHYATKKSVAESMLDVALFMSNAMRLKAVLEQGPSSHYYTTLVTLISLSLLLQVVIGVLLVVIARLNLNEVEKQWRLNQLNNAATILVFFTVVINVFITAFGAHKTGFLAARASRNPL

SEQ ID NO: 1429 - protein, 708 aa, Homo sapiens
MGLPEPGPLRLLALLLLLLLLLLLQLQHLAAAAADPLLGGQGPAKDCEKDQFQCRNERCIPSVWRCDEDDDCLDHSDEDDCPKKTCADSDFTCDNGHCIHERWKCDGEEECPDGSDESEATCRLNECLHNNGGCSHICTDLKIGFECTCPAGFQLLDQKTCGAGKSPSLIFTNRHEVRRIDLVKRNYSRLIPMLKNVVALDVEVATNRIYWCDLSYRKIYSAYMDKASDPKEQEVLIDEQLHSPEGLAVDWVHKHIYWTDSGNKTISVATVDGGRRRTLFSRNLSEPRAIAVDPLRGFMYWSDWGDQAKIEKSGLNGVDRQTLVSDNIEWPNGITLDLLSQRLYWVDSKLHQLSSIDFSGGNRKTLISSTDFLSHPFGIAVFEDKVFWTDLENEAIFSANRLNGLEISILAENLNNPHDIVIFHELKQPRAPDACELSVQPNGGCEYLCLPAPQISSHSPKYTCACPDTMWLGPDMKRCYRAPQSTSTTTLASTMTRTVPATTRAPGTTVHRSTYQNHSTETPSLTAAVPSSVSVPRAPSISPSTLSPATSNHSQHYANEDSKMGSTVTAAVIGIIVPIVVIALLCMSGYLIWRNWKRKNTKSMNFDNPVYRKTTEEEDEDELHIGRTAQIGHVYPAAISSFDRPLWAEPCLGETREPEDPAPALKELFVLPGEPRSQLHQLPKNPLSELPVVKSKRVALSLEDDGLP

SEQ ID NO: 1430 - protein, 199 aa, Homo sapiens
TTVHRSTYQNHSTETPSLTAAVPSSVSVPRAPSISPSTLSPATSNHSQHYANEDSKMGSTVTAAVIGIIVPIVVIALLCMSGYLIWRNWKRKNTKSMNFDNPVYRKTTEEEDEDELHIGRTAQIGHVYPAAISSFDRPLWAEPCLGETREPEDPAPALKELFVLPGEPRSQLHQLPKNPLSELPVVKSKMRKLRLIEIE

SEQ ID NO: 1431 - protein, 673 aa, Homo sapiens
GATSAPAACATASQFACRSGECVHLGWRCDGDRDCKDKSDEADCPLGTCRGDEFQCGDGTCVLAIKHCNQEQDCPDGSDEAGCLQDIDECKDPDACSQICVNYKGYFKCECYPGYEMDLLTKNCKAAAGKSPSLIFTNRHEVRRIDLVKRNYSRLIPMLKNVVALDVEVATNRIYWCDLSYRKIYSAYMDKASDPKEQEVLIDEQLHSPEGLAVDWVHKHIYWTDSGNKTISVATVDGGRRRTLFSRNLSEPRAIAVDPLRGFMYWSDWGDQAKIEKSGLNGVDRQTLVSDNIEWPNGITLDLLSQRLYWVDSKLHQLSSIDFSGGNRKTLISSTDFLSHPFGIAVFEDKVFWTDLENEAIFSANRLNGLEISILAENLNNPHDIVIFHELKQPRAPDACELSVQPNGGCEYLCLPAPQISSHSPKYTCACPDTMWLGPDMKRCYRAPQSTSTTTLASTMTRTVPATTRAPGTTVHRSTYQNHSTETPSLTAAVPSSVSVPRAPSISPSTLSPATSNHSQHYANEDSKMGSTVTAAVIGIIVPIVVIALLCMSGYLIWRNWKRKNTKSMNFDNPVYRKTTEEEDEDELHIGRTAQIGHVYPAAISSFDRPLWAEPCLGETREPEDPAPALKELFVLPGEPRSQLHQLPKNPLSELPVVKSKRVALSLEDDGLP

SEQ ID NO: 1432 - protein, 765 aa, Homo sapiens
LLALLLLLLLLLLLQLQHLAAAAADPLLGGQGPAKDCEKDQFQCRNERCIPSVWRCDEDDDCLDHSDEDDCPKKTCADSDFTCDNGHCIHERWKCDGEEECPDGSDESEATCTKQVCPAEKLSCGPTSHKCVPASWRCDGEKDCEGGADEAGCATSLGTCRGDEFQCGDGTCVLAIKHCNQEQDCPDGSDEAGCLQGLNECLHNNGGCSHICTDLKIGFECTCPAGFQLLDQKTCGDIDECKDPDACSQICVNYKGYFKCECYPGYEMDLLTKNCKAAAGKSPSLIFTNRHEVRRIDLVKRNYSRLIPMLKNVVALDVEVATNRIYWCDLSYRKIYSAYMDKASDPKEQEVLIDEQLHSPEGLAVDWVHKHIYWTDSGNKTISVATVDGGRRRTLFSRNLSEPRAIAVDPLRGFMYWSDWGDQAKIEKSGLNGVDRQTLVSDNIEWPNGITLDLLSQRLYWVDSKLHQLSSIDFSGGNRKTLISSTDFLSHPFGIAVFEDKVFWTDLENEAIFSANRLNGLEISILAENLNNPHDIVIFHELKQPRAPDACELSVQPNGGCEYLCLPAPQISSHSPKYTCACPDTMWLGPDMKRCYRAPQSTSTTTLASTMTRTVPATTRAPGTTVHRSTYQNHSTETPSLTAAVPSSVSVPRAPSISPSTLSPATSNHSQHYANEDSKMGSTVTAAVIGIIVPIVVIALLCMSGYLIWRNWKRKNTKSMNFDNPVYRKTTEEEDEDELHIGRTAQIGHVYPARVALSLEDDGLP

SEQ ID NO: 1433 - protein, 790 aa, Homo sapiens
MGLPEPGPLRLLALLLLLLLLLLLQLQHLAAAAADPLLGGQGPAKDCEKDQFQCRNERCIPSVWRCDEDDDCLDHSDEDDCPKKTCADSDFTCDNGHCIHERWKCDGEEECPDGSDESEATCTKQVCPAEKLSCGPTSHKCVPASWRCDGEKDCEGGADEAGCATSLGTCRGDEFQCGDGTCVLAIKHCNQEQDCPDGSDEAGCLQGLNECLHNNGGCSHICTDLKIGFECTCPAGFQLLDQKTCGAGKSPSLIFTNRHEVRRIDLVKRNYSRLIPMLKNVVALDVEVATNRIYWCDLSYRKIYSAYMDKASDPKEQEVLIDEQLHSPEGLAVDWVHKHIYWTDSGNKTISVATVDGGRRRTLFSRNLSEPRAIAVDPLRGFMYWSDWGDQAKIEKSGLNGVDRQTLVSDNIEWPNGITLDLLSQRLYWVDSKLHQLSSIDFSGGNRKTLISSTDFLSHPFGIAVFEDKVFWTDLENEAIFSANRLNGLEISILAENLNNPHDIVIFHELKQPRDACELSVQPNGGCEYLCLPAPQISSHSPKYTCACPDTMWLGPDMKRCYRAPQSTSTTTLASTMTRTVPATTRAPGTTVHRSTYQNHSTETPSLTAAVPSSVSVPRAPSISPSTLSPATSNHSQHYANEDSKMGSTVTAAVIGIIVPIVVIALLCMSGYLIWRNWKRKNTKSMNFDNPVYRKTTEEEDEDELHIGRTAQIGHVYPAAISSFDRPLWAEPCLGETREPEDPAPALKELFVLPGEPRSQLHQLPKNPLSELPVVKSKRVALSLEDDGLP

SEQ ID NO: 1434 - protein, 808 aa, Homo sapiens
PHEFQCGNRSCLAAVFVCDGDDDCGDGSDERGCADPACGPREFRCGGDGGGACIPERWVCDRQFDCEDRSDEAAELCGRPGPGATSAPAACATASQFACRSGECVHLGWRCDGDRDCKDKSDEADCPLGTCRGDEFQCGDGTCVLAIKHCNQEQDCPDGSDEAGCLQVPPTFLGNRRRPRGLNECLHNNGGCSHICTDLKIGFECTCPAGFQLLDQKTCGDIDECKDPDACSQICVNYKGYFKCECYPGYEMDLLTKNCKAAAGKSPSLIFTNRHEVRRIDLVKRNYSRLIPMLKNVVALDVEVATNRIYWCDLSYRKIYSAYMDKASDPKEQEVLIDEQLHSPEGLAVDWVHKHIYWTDSGNKTISVATVDGGRRRTLFSRNLSEPRAIAVDPLRGFMYWSDWGDQAKIEKSGLNGVDRQTLVSDNIEWPNGITLDLLSQRLYWVDSKLHQLSSIDFSGGNRKTLISSTDFLSHPFGIAVFEDKVFWTDLENEAIFSANRLNGLEISILAENLNNPHDIVIFHELKQPRAPDACELSVQPNGGCEYLCLPAPQISSHSPKYTCACPDTMWLGPDMKRCYRAPQSTSTTTLASTMTRTVPATTRAPGTTVHRSTYQNHSTETPSLTAAVPSSVSVPRAPSISPSTLSPATSNHSQHYANEDSKMGSTVTAAVIGIIVPIVVIALLCMSGYLIWRNWKRKNTKSMNFDNPVYRKTTEEEDEDELHIGRTAQIGHVYPAAISSFDRPLWAEPCLGETREPEDPAPALKELFVLPGEPRSQLHQLPKNPLSELPVVKSKRVALSLEDDGLP

SEQ ID NO: 1435 - protein, 518 aa, Homo sapiens
MLCASFLGLGLSVAIVGPTFQDLATNVNRNISSLSFIFVGRALGYLSGSVIGGFLVDVMNYFLLLGISMSATTVGLYLVPFCKTAILLTVMMSIFGVSIGILDTGGNVLILAIWGDKGAPHMQALHFSFALGAFLAPLLAKLALGPTASAENHTESDFHPALNQSSDADSEALFGVPNDKNLLWAYAVIGTYMFLVSVIFFCLFLKNSSKQEKARASAETFRRAKYHNALLCLLFLFFFFYVGAEVTYGSYVFSFATTHAGMKESEAAGLNSIFWGTFAACRGLAIFFATCLQPGTMIVLSNIGSLTSSLFLVLFDKNPICLWIATSVYGASMATTFPSGVSWIEQYTTIHGKSAAFFVIGASLGEMAIPAVIGILQGKYPDLPVVLYTSLGASIATGILFPVLYKLATSPLDRQRKEDRKSEDQKALLSSSGLNEYEEENEEEDAEKWNEMDFEMIETNDTMRHSIIETSRSSLTEPTAEVYNQYPSNALVFESSPFNTGSAHVKHLPETRTKGTNV

SEQ ID NO: 1436 - protein, 536 aa, Homo sapiens
MLCASFLGLGLSVAIVGPTFQDLATNVNRNISSLSFIFVGRALGYLSGSVIGGFLVDVMNYFLLLGISMSATTVGLYLVPFCKTAILLTVMMSIFGVSIGILDTESWLFRFLDVCFASVTYISGNVLILAIWGDKGAPHMQALHFSFALGAFLAPLLAKLALGPTASAENHTESDFHPALNQSSDADSEALFGVPNDKNLLWAYAVIGTYMFLVSVIFFCLFLKNSSKQEKARASAETFRRAKYHNALLCLLFLFFFFYVGAEVTYGSYVFSFATTHAGMKESEAAGLNSIFWGTFAACRGLAIFFATCLQPGTMIVLSNIGSLTSSLFLVLFDKNPICLWIATSVYGASMATTFPSGVSWIEQYTTIHGKSAAFFVIGASLGEMAIPAVIGILQGKYPDLPVVLYTSLGASIATGILFPVLYKLATSPLDRQRKEDRKSEDQKALLSSSGLNEYEEENEEEDAEKWNEMDFEMIETNDTMRHSIIETSRSSLTEPTAEVYNQYPSNALVFESSPFNTGSAHVKHLPETRTKGTNV

SEQ ID NO: 1437 - protein, 479 aa, Homo sapiens
MLCASFLGLGLSVAIVGPTFQDLATNVNRNISSLSFIFVGRALGYLSGSVIGGFLVDVMNYFLLLGGNVLILAIWGDKGAPHMQALHFSFALGAFLAPLLAKLALGPTASAENHTESDFHPALNQSSDADSEALFGVPNDKNLLWAYAVIGTYMFLVSVIFFCLFLKNSSKQEKARASAETFRRAKYHNALLCLLFLFFFFYVGAEVTYGSYVFSFATTHAGMKESEAAGLNSIFWGTFAACRGLAIFFATCLQPGTMIVLSNIGSLTSSLFLVLFDKNPICLWIATSVYGASMATTFPSGVSWIEQYTTIHGKSAAFFVIGASLGEMAIPAVIGILQGKYPDLPVVLYTSLGASIATGILFPVLYKLATSPLDRQRKEDRKSEDQKALLSSSGLNEYEEENEEEDAEKWNEMDFEMIETNDTMRHSIIETSRSSLTEPTAEVYNQYPSNALVFESSPFNTGSAHVKHLPETRTKGTNV

SEQ ID NO: 1438 - protein, 1223 aa, Homo sapiens
MDTLRAVPLFSISGLFSFPYRVSHGIAGILLGEMAVCAKKRPPEEERRARANDREYNEKFQYASNCIKTSKYNILTFLPVNLFEQFQEVANTYFLFLLILQLIPQISSLSWFTTIVPLVLVLTITAVKDATDDYFRHKSDNQVNNRQSQVLINGILQQEQWMNVCVGDIIKLENNQFVAADLLLLSSSEPHGLCYIETAELDGETNMKVRQAIPVTSELGDISKLAKFDGEVICEPPNNKLDKFSGTLYWKENKFPLSNQNMLLRGCVLRNTEWCFGLVIFAGPDTKLMQNSGRTKFKRTSIDRLMNTLVLWIFGFLVCMGVILAIGNAIWEHEVGMRFQVYLPWDEAVDSAFFSGFLSFWSYIIILNTVVPISLYVSVEVIRLGHSYFINWDKKMFCMKKRTPAEARTTTLNEELGQVEYIFSDKTGTLTQNIMVFNKCSINGHSYGDVFDVLGHKAELGERPEPVDFSFNPLADKKFLFWDPSLLEAVKIGDPHTHEFFRLLSLCHTVMSEEKNEGELYYKAQSPDEGALVTAARNFGFVFRSRTPKTITVHEMGTAITYQLLAILDFNNIRKRMSVIVRNPEGKIRLYCKGADTILLDRLHHSTQELLNTTMDHLNEYAGEGLRTLVLAYKDLDEEYYEEWAERRLQASLAQDSREDRLASIYEEVENNMMLLGATAIEDKLQQGVPETIALLTLANIKIWVLTGDKQETAVNIGYSCKMLTDDMTEVFIVTGHTVLEVREELRKAREKMMDSSRSVGNGFTYQDKLSSSKLTSVLEAVAGEYALVINGHSLAHALEADMELEFLETACACKAVICCRVTPLQKAQVVELVKKYKKAVTLAIGDGANDVSMIKTAHIGVGISGQEGIQAVLASDYSFSQFKFLQRLLLVHGRWSYLRMCKFLCYFFYKNFAFTMVHFWFGFFCGFSAQTVYDQYFITLYNIVYTSLPVLAMGVFDQDVPEQRSMEYPKLYEPGQLNLLFNKREFFICIAQGIYTSVLMFFIPYGVFADATRDDGTQLADYQSFAVTVATSLVIVVSVQIGLDTGYWTAINHFFIWGSLAVYFAILFAMHSNGLFDMFPNQFRFVGNAQNTLAQPTVWLTIVLTTVVCIMPVVAFRFLRLNLKPDLSDTVRYTQLVRKKQKAQHRCMRRVGRTGSRRSGYAFSHQEGFGELIMSGKNMRLSSLALSSFTTRSSSSWIESLRRKKSDSASSPSGGADKPLKG

SEQ ID NO: 1439 - protein, 460 aa, Homo sapiens
MNYFLLLGISMSATTVGLYLVPFCKTAILLTVMMSIFGVSIGILDTGGNVLILAIWGDKGAPHMQALHFSFALGAFLAPLLAKLALGPTASAENHTESDFHPALNQSSDADSEALFGVPNDKNLLWAYAVIGTYMFLVSVIFFCLFLKNSSKQEKARASAETFRRAKYHNALLCLLFLFFFFYVGAEVTYGSYVFSFATTHAGMKESEAAGLNSIFWGTFAACRGLAIFFATCLQPGTMIVLSNIGSLTSSLFLVLFDKNPICLWIATSVYGASMATTFPSGVSWIEQYTTIHGKSAAFFVIGASLGEMAIPAVIGILQGKYPDLPVVLYTSLGASIATGILFPVLYKLATSPLDRQRKEDRKSEDQKALLSSSGLNEYEEENEEEDAEKWNEMDFEMIETNDTMRHSIIETSRSSLTEPTAEVYNQYPSNALVFESSPFNTGSAHVKHLPETRTKGTNV

SEQ ID NO: 1440 - protein, 752 aa, Homo sapiens
MIKTIYKTPGMIKDEQEIVQKRTFTKWINSHLAKRKPPMVVDDLFEDMKDGVKLLALLEVLSGQKLPCEQGRRMKRIHAVANIGTALKFLEGRKSMHRGSPIKLVNINSTDIADGRPSIVLGLMWTIILYFQIEELTSNLPQLQSLSSSASSVDSIVSSETPSPPSKRKVTTKIQGNAKKALLKWVQYTAGKQTGIEVKDFGKSWRSGVAFHSVIHAIRPELVDLETVKGRSNRENLEDAFTIAETELGIPRLLDPEDVDVDKPDEKSIMTYVAQFLKHYPDIHNASTDGQEDDEILPGFPSFANSVQNFKREDRVIFKEMKVWIEQFERDLTRAQMVESNLQDKYQSFKHFRVQYEMKRKQIEHLIQPLHRDGKLSLDQALVKQSWDRVTSRLFDWHIQLDKSLPAPLGTIGAWLYRAEVALREEITVQQVHEETANTIQRKLEQHKDLLQNTDAHKRAFHEIYRTRSVNGIPVPPDQLEDMAERFHFVSSTSELHLMKMEFLELKYRLLSLLVLAESKLKSWIIKYGRRESVEQLLQNYVSFIENSKFFEQYEVTYQILKQTAEMYVKADGSVEEAENVMKFMNETTAQWRNLSVEVRSVRSMLEEVISNWDRYGNTVASLQAWLEDAEKMLNQSENAKKDFFRNLPHWIQQHTAMNDAGNFLIETCDEMVSRDLKQQLLLLNGRWRELFMEVKQYAQADEMDRMKKEYTDCVVTLSAFATEAHKKLSEPLEVSFMNVKLLIQDLEVRGF

SEQ ID NO: 1441 - protein, 1887 aa, Homo sapiens
MGWGSRCCCPGRLDLLCVLALLGGCLLPVCRTRVYTNHWAVKIAGGFPEANRIASKYGFINIGQIGALKDYYHFYHSRTIKRSVISSRGTHSFISMEPKVEWIQQQVVKKRTKRDYDFSRAQSTYFNDPKWPSMWYMHCSDNTHPCQSDMNIEGAWKRGYTGKNIVVTILDDGIERTHPDLMQNYDALASCDVNGNDLDPMPRYDASNENKHGTRCAGEVAAAANNSHCTVGIAFNAKIGGVRMLDGDVTDMVEAKSVSFNPQHVHIYSASWGPDDDGKTVDGPAPLTRQAFENGVRMGRRGLGSVFVWASGNGGRSKDHCSCDGYTNSIYTISISSTAESGKKPWYLEECSSTLATTYSSGESYDKKIITTDLRQRCTDNHTGTSASAPMAAGIIALALEANPFLTWRDVQHVIVRTSRAGHLNANDWKTNAAGFKVSHLYGFGLMDAEAMVMEAEKWTTVPRQHVCVESTDRQIKTIRPNSAVRSIYKASGCSDNPNRHVNYLEHVVVRITITHPRRGDLAIYLTSPSGTRSQLLANRLFDHSMEGFKNWEFMTIHCWGERAAGDWVLEVYDTPSQLRNFKTPGKLKEWSLVLYGTSVQPYSPTNEFPKVERFRYSRVEDPTDDYGTEDYAGPCDPECSEVGCDGPGPDHCNDCLHYYYKLKNNTRICVSSCPPGHYHADKKRCRKCAPNCESCFGSHGDQCMSCKYGYFLNEETNSCVTHCPDGSYQDTKKNLCRKCSENCKTCTEFHNCTECRDGLSLQGSRCSVSCEDGRYFNGQDCQPCHRFCATCAGAGADGCINCTEGYFMEDGRCVQSCSISYYFDHSSENGYKSCKKCDISCLTCNGPGFKNCTSCPSGYLLDLGMCQMGAICKDGEYVDEHGHCQTCEASCAKCQGPTQEDCTTCPMTRIFDDGRCVSNCPSWKFEFENQCHPCHHTCQRCQGSGPTHCTSCGADNYGREHFLYQGECGDSCPEGHYATEGNTCLPCPDNCELCHSVHVCTRCMKGYFIAPTNHTCQKLECGQGEVQDPDYEECVPCEEGCLGCSLDDPGTCTSCAMGYYRFDHHCYKTCPEKTYSEEVECKACDSNCGSCDQNGCYWCEEGFFLLGGSCVRKCGPGFYGDQEMGECESCHRACETCTGPGHDECSSCQEGLQLLRGMCVHATKTQEEGKFWNEAVSTANLSVVKSLLQERRRWKVQIKRDILRKLQPCHSSCKTCNGSATLCTSCPKGAYLLAQACVSSCPQGTWPSVRSGSCENCTEACAICSGADLCKKCQMQPGHPLFLHEGRCYSKCPEGSYAEDGICERCSSPCRTCEGNATNCHSCEGGHVLHHGVCQENCPERHVAVKGVCKHCPEMCQDCIHEKTCKECTPEFFLHDDMCHQSCPRGFYADSRHCVPCHKDCLECSGPKADDCELCLESSWVLYDGLCLEECPAGTYYEKETKECRDCHKSCLTCSSSGTCTTCQKGLIMNPRGSCMANEKCSPSEYWDEDAPGCKPCHVKCFHCMGPAEDQCQTCPMNSLLLNTTCVKDCPEGYYADEDSNRCAHCHSSCRTCEGRHSRQCHSCRPGWFQLGKECLLQCREGYYADNSTGRCERCNRSCKGCQGPRPTDCLSCDRFFFLLRSKGECHRSCPDHYYVEQSTQTCERCHPTCDQCKGKGALNCLSCVWSYHLMGGICTSDCLVGEYRVGEGEKFNCEKCHESCMECKGPGAKNCTLCPANLVLHMDDSHCLHCCNTSDPPSAQECCDCQDTTDECILRTSKVRPATEHFKTALFITSSMMLVLLLGAAVVVWKKSRGRVQPAAKAGYEKLADPNKSYSSYKSSYRESTSFEEDQVIEYRDRDYDEDDDDDIVYMGQDGTVYRKFKYGLLDDDDIDELEYDDESYSYYQ

SEQ ID NO: 1442 - protein, 392 aa, Homo sapiens
MTPQPAGPPDGGWGWVVAAAAFAINGLSYGLLRSLGLAFPDLAEHFDRSAQDTAWISALALAVQQAASPVGSALSTRWGARPVVMVGGVLASLGFVFSAFASDLLHLYLGLGLLAGFGWALVFAPALGTLSRYFSRRRVLAVGLALTGNGASSLLLAPALQLLLDTFGWRGALLLLGAITLHLTPCGALLLPLVLPGDPPAPPRSPLAALGLSLFTRRAFSIFALGTALVGGGYFVPYVHLAPHALDRGLGGYGAALVVAVAAMGDAGARLVCGWLADQGWVPLPRLLAVFGALTGLGLWVVGLVPVVGGEESWGGPLLAAAVAYGLSAGSYAPLVFGVLPGLVGVGGVVQATGLVMMLMSLGGLLGPPLSGKDLSSQICLQLSSAPGVRGF

SEQ ID NO: 1443 - protein, 345 aa, Homo sapiens
MFCSEKKLREVERIVKANDREYNEKFQYADNRIHTSKYNILTFLPINLFEQFQRVANAYFLCLLILQLIPEISSLTWFTTIVPLVLVITMTAVKDATDDYFRHKSDNQVNNRQSEVLINSKLQNEKWMNVKVGDIIKLENNQFVAADLLLLSSSEPHGLCYVETAELDGETNLKVRHALSVTSELGADISRLAGFDGIVVCEVPNNKLDKFMGILSWKDSKHSLNNEKIILRGCILRNTSWCFGMVIFAGPDTKLMQNSGKTKFKRTSIDRLMNTLVLWIFGFLICLGIILAIGNSIWESQTGDQFRTFLFWNEGEKSSVFSGFLTFWSYIIILNTVVPISLYVR

SEQ ID NO: 1444 - protein, 100 aa, Homo sapiens
LGINFLGRRLSLSITMGCTALFFLLLNICTSSAGLIGFLFMLRALVAANFNTVYIYTAEVLMSASILGALCLFSSVCVVCAISAFTLPIETKGRALQQIK

SEQ ID NO: 1445 - protein, 393 aa, Homo sapiens
MVTEMNPNVVVISVLAILSTLLIGLLLVTLIILRKKHLQMARECGAGTFVNFASLERDGKLPYNWRRSIFAFLTLLPSCLWTDYLLAFYINPCPVQLDDFDAYIKDMAKDSDYKFSLQFEELKLIGLDIPHFAADLPLNRCKNRYTNILPYDFSRVRLVSMNEEEGADYINANYIPGYNSPQEYIATQGPLPETRNDFWKMVLQQKSQIIVMLTQCNEKRRVKCDHYWPFTEEPIAYGDITVEMISEEEQDDWACRHFRINYADEMQDVMHFNYTAWPDHGVPTANAAESILQFVHMVRQQATKSKGPMIIHCSAGVGRTGTFIALDRLLQHIRDHEFVDILGLVSEMRSYRMSMVQTEEQYIFIHQCVQLMWMKKKQQFCISDVIYENVSKS

SEQ ID NO: 1446 - protein, 237 aa, Homo sapiens
SLTWFTTIVPLVLVITMTAVKDATDDYFRHKSDNQVNNRQSEVLINSKLQNEKWMNVKVGDIIKLENNQFVAADLLLLSSSEPHGLCYVETAELDGETNLKVRHALSVTSELGADISRLAGFDGIVVCEVPNNKLDKFMGILSWKDSKHSLNNEKIILRGCILRNTSWCFGMVIFAGPDTKLMQNSGKTKFKRTSIDRLMNTLVLWEIQSGRVKLGTNSELSSFGMKERRALCSPDS

SEQ ID NO: 1447 - protein, 157 aa, Homo sapiens
MRPLPPVGDVRLELSPPPPLLPVPVVSGSPVGSSGRLMASSSSLVPDRLRLPLCFLGVFVCYFYYGILQEKITRGKYGEGAKQETFTFALTLVFIQCVINAVFAKIWWIVPGAGSMLPVLSPIWVPWSPAIQHYSLSTTQLRSLVNPASQSQSCSLG

SEQ ID NO: 1448 - protein, 245 aa, Homo sapiens
LSVAGGEGASEEQTQASRAEKAGRPHTEDFCLVSKVVGRCRASMPRWWYNVTDGSCQLFVYGGCDGNSNNYLTKEECLKKCATVTENATGDLATSRNAADSSVPSAPRRQDSEDHSSDMFNYEEYCTANAVTGPCRASFPRWYFDVERNSCNNFIYGGCRGNKNSYRSEEACMLRCFRQQENPPLPLGSKVVVLAGLFVMVLILFLGASMVYLIRVARRNQERALRTVWSSGDDKEQLVKNTYVL

SEQ ID NO: 1449 - protein, 260 aa, Homo sapiens
LRVSAELAMAQLCGLRRSRAFLALLGSLLLSGVLAADRERSIHDFCLVSKVVGRCRASMPRWWYNVTDGSCQLFVYGGCDGNSNNYLTKEECLKKCATVTENATGDLATSRNAADSSVPSAPRRQDSEDHSSDMFNYEEYCTANAVTGPCRASFPRWYFDVERNSCNNFIYGGCRGNKNSYRSEEACMLRCFRQQENPPLPLGSKVVVLAGLFVMVLILFLGASMVYLIRVARRNQERALRTVWSSGDDKEQLVKNTYVL

SEQ ID NO: 1450 - protein, 203 aa, Homo sapiens
LRVSAELAMAQLCGLRRSRAFLALLGSLLLSGVLAADRERSIHENATGDLATSRNAADSSVPSAPRRQDSEDHSSDMFNYEEYCTANAVTGPCRASFPRWYFDVERNSCNNFIYGGCRGNKNSYRSEEACMLRCFRQQENPPLPLGSKVVVLAGLFVMVLILFLGASMVYLIRVARRNQERALRTVWSSGDDKEQLVKNTYVL

SEQ ID NO: 1451 - protein, 115 aa, Homo sapiens
LVASLAGCVLSSCSSGPCLGWGGAFGPQAEPTWIPQALGERHSGCNSPCLARPEAPLSSSVVVLAGLFVMVLILFLGASMVYLIRVARRNQERALRTVWSSGDDKEQLVKNTYVL

SEQ ID NO: 1452 - protein, 262 aa, Homo sapiens
LTRDYFFGQIRQPLTPFIMASALSLGNKCDPFLRCVLCRGGGALQGPRGRGPDDFESQLSPPGSARRLVRSKRACGNPPDAFGLSRASVHPPLPRVSIGCSSGPGRAKRERVGGAAWRQRKMAASAAVFSRLRSGLRLGSRGLCTRLATPPRRAPDQAAEIGSRGSTKAQGPQQQPGSEGPSYAKKVALWLAGLLGAGGTVSVVYIFGNNPVDENGAKIPDEFDNDDHRAHQPLPSPRPSAGTVLPATLHARFGAHRRPLAS

SEQ ID NO: 1453 - protein, 113 aa, Homo sapiens
MAASAAVFSRLRSGLRLGSRGLCTRLATPPRRAPDQAAEIGSRGSTKAQGPQQQPGSEGPSYAKKVALWLAGLLGAGGTVSVVYIFGNNPVDENGAKVRGKETEALPGVLVCG

SEQ ID NO: 1454 - protein, 100 aa, Homo sapiens
VFSRLRSGLRLGSRGLCTRLATPPRRAPDQAAEIGSRGSTKAQGPQQQPGSEGPSYAKKVALWLAGLLGAGGTVSVVYIFGNNPVDENGAKIPDEFDNGE

SEQ ID NO: 1455 - protein, 1136 aa, Homo sapiens
MGALWSWWILWAGATLLWGLTQEASVDLKNTGREEFLTAFLQNYQLAYSKAYPRLLISSLSESPASVSILSQADNTSKKVTVRPGESVMVNISAKAEMIGSKIFQHAVVIHSDYAISVQALNAKPDTAELTLLRPIQALGTEYFVLTPPGTSARNVKEFAVVAGAAGASVSVTLKGSVTFNGKFYPAGDVLRVTLQPYNVAQLQSSVDLSGSKVTASSPVAVLSGHSCAQKHTTCNHVVEQLLPTSAWGTHYVVPTLASQSRYDLAFVVASQATKLTYNHGGITGSRGLQAGDVVEFEVRPSWPLYLSANVGIQVLLFGTGAIRNEVTYDPYLVLIPDVAAYCPAYVVKSVPGCEGVALVVAQTKAISGLTIDGHAVGAKLTWEAVPGSEFSYAEVELGTADMIHTAEATTNLGLLTFGLAKAIGYATAADCGRTVLSPVEPSCEGMQCAAGQRCQVVGGKAGCVAESTAVCRAQGDPHYTTFDGRRYDMMGTCSYTMVELCSEDDTLPAFSVEAKNEHRGSRRVSYVGLVTVRAYSHSVSLTRGEVGFVLVDNQRSRLPVSLSEGRLRVYQSGPRAVVELVFGLVVTYDWDCQLALSLPARFQDQVCGLCGNYNGDPADDFLTPDGALAPDAVEFASSWKLDDGDYLCEDGCQNNCPACTPGQAQHYEGDRLCGMLTKLDGPFAVCHDTLDPRPFLEQCVYDLCVVGGERLSLCRGLSAYAQACLELGISVGDWRSPANCPLSCPANSRYELCGPACPTSCNGAAAPSNCSGRPCVEGCVCLPGFVASGGACVPASSCGCTFQGLQLAPGQEVWADELCQRRCTCNGATHQVTCRDKQSCPAGERCSVQNGLLGCYPDRFGTCQGSGDPHYVSFDGRRFDFMGTCTYLLVGSCGQNAALPAFRVLVENEHRGSQTVSYTRAVRVEARGVKVAVRREYPGQVLVDDVLQYLPFQAADGQVQVFRQGRDAVVRTDFGLTVTYDWNARVTAKVPSSYAEALCGLCGNFNGDPADDLALRGGGQAANALAFGNSWQEETRPGCGATEPGDCPKLDSLVAQQLQSKNECGILADPKGPFRECHSKLDPQGAVRDCVYDRCLLPGQSGPLCDALATYAAACQAAGATVHPWRSEELCPRGL

SEQ ID NO: 1456 - protein, 415 aa, Homo sapiens
LAGARPRAPAAAPSLGRVMRCPKCLLCLSALLTLLGLKVYIEWTSESRLSKAYPSPRGTPPSPTPANPEPTLPANLSTRLGQTIPLPFAYWNQQQWRLGSLPSGDSTETGGCQAWGAAAATEIPDFASYPKDLRRFLLSAACRSFPQWLPGGGGSQVSSCSDTDVPYLLLAVKSEPGRFAERQAVRETWGSPAPGIRLLFLLGSPVGEAGPDLDSLVAWESRRYSDLLLWDFLDVPFNQTLKDLLLLAWLGRHCPTVSFVLRAQDDAFVHTPALLAHLRALPPASARSLYLGEVFTQAMPLRKPGGPFYVPESFFEGGYPAYASGGGYVIAGRLAPWLLRAAARVAPFPFEDVYTGLCIRALGLVPQAHPGFLTAWPADRTADHCAFRNLLLVRPLGPQASIRLWKQLQDPRLQC

SEQ ID NO: 1457 - protein, 142 aa, Homo sapiens
LSRPTLLCPRRAYLDVDLTLTREQTERLSHQITSRVVSAATQLRHFFLVEDLVDSLKLALLFYILTFVGAIFNGLTLLILGVIGLFTIPLLYRQHQAQIDQYVGLVTNQLSHIKAKIRAKIPGTGALASAAAAVSGSKAKAE

SEQ ID NO: 1458 - protein, 618 aa, Homo sapiens
VPSPPRPRPPPPSRAPGRRRRRRRRRRLEQPGRRRRREWQRRRGRGGDERPRPRAQGGTAGVGGGPDAGPRGAMGQVLPVFAHCKEAPSTASSTPDSTEGGNDDSDFRELHTAREFSEEDEEETTSQDWGTPRELTFSYIAFDGVVGSGGRRDSTARRPRPQGRSVSEPRDQHPQPSLGDSLESIPSLSQSPEPGRRGDPDTAPPSERPLEDLRLRLDHLGWVARGTGSGEDSSTSSSTPLEDEEPQEPNRLETGEAGEELDLRLRLAQPSSPEVLTPQLSPGSGTPQAGTPSPSRSRDSNSGPEEPLLEEEEKQWGPLEREPVRGQCLDSTDQLEFTVEPRLLGTAMEWLKTSLLLAVYKTVPILELSPPLWTAIGWVQRGPTPPTPVLRVLLKWAKSPRSSGVPSLSLGADMGSKVADLLYWKDTRTSGVVFTGLMVSLLCLLHFSIVSVAAHLALLLLCGTISLRVYRKVLQAVHRGDGANPFQAYLDVDLTLTREQTERLSHQITSRVVSAATQLRHFFLVEDLVDSLKLALLFYILTFVGAIFNGLTLLILGVIGLFTIPLLYRQHQAQIDQYVGLVTNQLSHIKAKIRAKIPGTGALASAAAAVSGSKAKAE

SEQ ID NO: 1459 - protein, 545 aa, Homo sapiens
VPSPPRPRPPPPSRAPGRRRRRRRRRRLEQPGRRRRREWQRRRGRGGDERPRPRAQGGTAGVGGGPDAGPRGAMGQVLPVFAHCKEAPSTASSTPDSTEGGNDDSDFRELHTAREFSEEDEEETTSQDWGTPRELTFSYIAFDGVVGSGGRRDSTARRPRPQGRSVSEPRDQHPQPSLGDSLESIPSLSQSPEPGRRGDPDTAPPSERPLEDLRLRLDHLGWVARGTGSGEDSSTSSSTPLEDEEPQEPNRLETGEAGEELDLRLRLAQPSSPEVLTPQLSPGSGTPQAGTPSPSRSRDSNSGPEEPLLEEEEKQWGPLEREPVRGQCLDSTDQLEFTVEPRLLVADLLYWKDTRTSGVVFTGLMVSLLCLLHFSIVSVAAHLALLLLCGTISLRVYRKVLQAVHRGDGANPFQAYLDVDLTLTREQTERLSHQITSRVVSAATQLRHFFLVEDLVDSLKLALLFYILTFVGAIFNGLTLLILGVIGLFTIPLLYRQHQAQIDQYVGLVTNQLSHIKAKIRAKIPGTGALASAAAAVSGSKAKAE

SEQ ID NO: 1460 - protein, 545 aa, Homo sapiens
VLPIMVADPPRDSKGLAAAEPTANGGLALASIEDQGAAAGGYCGSRDQVRRCLRANLLVLLTVVAVVAGVALGLGVSGAGGALALGPERLSAFVFPGELLLRLLRMIILPLVVCSLIGGAASLDPGALGRLGAWALLFFLVTTLLASALGVGLALALQPGAASAAINASVGAAGSAENAPSKEVLDSFLDLARNIFPSNLVSAAFRSYSTTYEERNITGTRVKVPVGQEVEGMNILGLVVFAIVFGVALRKLGPEGELLIRFFNSFNEATMVLVSWIMWYAPVGIMFLVAGKIVEMEDVGLLFARLGKYILCCLLGHAIHGLLVLPLIYFLFTRKNPYRFLWGIVTPLATAFGTSSSSATLPLMMKCVEENNGVAKHISRFILPIGATVNMDGAALFQCVAAVFIAQLSQQSLDFVKIITILVTATASSVGAAGIPAGGVLTLAIILEAVNLPVDHISLILAVDWLVDRSCTVLNVEGDALGAGLLQNYVDRTESRSTEPELIQVKSELPLDPLPVPTEEGNPLLKHYRGPAGDATVASEKESVM

SEQ ID NO: 1461 - protein, 166 aa, Homo sapiens
MDGATEPPSMRLKARPSSPGFSVLTCSAFSFYPPELQLRFLRNGLAAGTGQGDFGPNSDGSFHASSSLTVKSGDEHHYCCIVQHAGLAQPLRVELESPAKSSVLVVGIVIGVLLLTAAAVGGALLWRRMRKILMTSPSLSLLSPLDLPSWRRHRGPPAHPRGGPGC

SEQ ID NO: 1462 - protein, 593 aa, Homo sapiens
LIPHMPNDDFCPGLTIKAMGAERAPQRQPCTLHLLVLVPILLSLVASQDWKAERSQDPFEKCMQDPDYEQLLKVVTWGLNRTLKPQRVIVVGAGVAGLVAAKVLSDAGHKVTILEADNRIGGRIFTYRDQNTGWIGELGAMRMPSSHRILHKLCQGLGLNLTKFTQYDKNTWTEVHEVKLRNYVVEKVPEKLGYALRPQEKGHSPEDIYQMALNQALKDLKALGCRKAMKKFERHTLLEYLLGEGNLSRPAVQLLGDVMSEDGFFYLSFAEALRAHSCLSDRLQYSRIVGGWDLLPRALLSSLSGLVLLNAPVVAMTQGPHDVHVQIETSPPARNLKVLKADVVLLTASGPAVKRITFSPPLPRHMQEALRRLHYVPATKVFLSFRRPFWREEHIEGGHSNTDRPSRMIFYPPPREGALLLASYTWSDAAAAFAGLSREEALRLALDDVAALHGPVVRQLWDGTGVVKRWAEDQHSQGGFVVQPPALWQTEKDDWTVPYGRIYFAGEHTAYPHGWVETAVKSALRAAIKINSRKGPASDTASPEGHASDMEGQGHVHGVASSPSHDLAKEEGSHPPVQGQLSLQNTTHTRTSH

SEQ ID NO: 1463 - protein, 160 aa, Homo sapiens
LRSPGHGSVASTPLCPRPVSALTTPALSAPTFFLQPRPPPPLLAAAMDSPPVPRSERAADPEWPHMRIDPQEGGGVKAIGPLGRRSMRLGPRRRAACGRVAFGSSTFALVPVFAHLSILQSLVPAAGAASPVAISAQHLCYSHVTPGDPGAGAGQGPAPS

SEQ ID NO: 1464 - protein, 101 aa, Homo sapiens
MEARKAVGPKGNILEEGAWLEENVPGIEFFLEAKYSEVDGRGLRSSTFALVPVFAHLSILQSLVPAAGAASPVAISAQHLCYSHVTPGDPGAGAGQGPAPS

SEQ ID NO: 1465 - protein, 300 aa, Homo sapiens
VAVGRGVVGLGRADPRFPTGALAMDPNFWLQVQESVTVQEGLCVLVPCTFFHPIPYYDKNSPVHGYWFREGAIISRDSPVATNKLDQEVQEETQGRFRLLGDPSRNNCSLSIVDARRRDNGSYFFRMERGSTKYSYKSPQLSVHVTDLTHRPKILIPGTLEPGHSKNLTCSVSWACEQGTPPIFSWLSAAPTSLGPRTTHSSVLIITPRPQDHGTNLTCQVKFAGAGVTTERTIQLNVTYVPQNPTTGIFPGDGSGKQETRAGVVHGAIGGAGVTALLALCLCLIFFIPSFQAHNNGPTA

SEQ ID NO: 1466 - protein, 439 aa, Homo sapiens
LLMQGAQEASASEMLPLLLPLLWAGALAQERRFQLEGPESLTVQEGLCVLVPCRLPTTLPASYYGYGYWFLEGADVPVATNDPDEEVQEETRGRFHLLWDPRRKNCSLSIRDARRRDNAAYFFRLKSKWMKYGYTSSKLSVRVMALTHRPNISIPGTLESGHPSNLTCSVPWVCEQGTPPIFSWMSAAPTSLGPRTTQSSVLTITPRPQDHSTNLTCQVTFPGAGVTMERTIQLNVSSFKILQNTSSLPVLEGQALRLLCDADGNPPAHLSWFQGFPALNATPISNTGVLELPQVGSAEEGDFTCRAQHPLGSLQISLSLFVHWKPEGRAGGVLGAVWGASITTLVFLCVCFIFRVKTRRKKAAQPVQNTDDVNPVMVSGSRGHQHQFQTGIVSDHPAEAGPISEDEQELHYAVLHFHKVQPQEPKVTDTEYSEIKIHK

SEQ ID NO: 1467 - protein, 449 aa, Homo sapiens
LLCAEGVELRGLVASQFLFCEQPRSRAPPQPPVPPRSPSPPLPSPSLLMQGAQEASASEMLPLLLPLLWAASYYGYGYWFLEGADVPVATNDPDEEVQEETRGRFHLLWDPRRKNCSLSIRDARRRDNAAYFFRLKSKWMKYGYTSSKLSVRVMALTHRPNISIPGTLESGHPSNLTCSVPWVCEQGTPPIFSWMSAAPTSLGPRTTQSSVLTITPRPQDHSTNLTCQVTFPGAGVTMERTIQLNVSSFKILQNTSSLPVLEGQALRLLCDADGNPPAHLSWFQGFPALNATPISNTGVLELPQVGSAEEGDFTCRAQHPLGSLQISLSLFVHWKPEGRAGGVLGAVWGASITTLVFLCVCFIFRVKTRRKKAAQPVQNTDDVNPVMVSGSRGHQHQFQTGIVSDHPAEAGPISEDEQELHYAVLHFHKVQPQEPKVTDTEYSEIKIHK

SEQ ID NO: 1468 - protein, 501 aa, Homo sapiens
LLCAEGVELRGLVASQFLFCEQPRSRAPPQPPVPPRSPSPPLPSPSLLMQGAQEASASEMLPLLLPLLWAGALAQERRFQLEGPESLTVQEGLCVLVPCRLPTTLPASYYGYGYWFLEGADVPVATNDPDEEVQEETRGRFHLLWDPRRKNCSLSIRDARRRDNAAYFFRLKSKWMKYGYTSSKLSVRVMALTHRPNISIPGTLESGHPSNLTCSVPWVCEQGTPPIFSWMSAAPTSLGPRTTQSSVLTITPRPQDHSTNLTCQVTFPGAGVTMERTIQLNVSYAPQKVAISIFQGNSAAFKILQNTSSLPVLEGQALRLLCDADGNPPAHLSWFQGFPALNATPISNTGVLELPQVGSAEEGDFTCRAQHPLGSLQISLSLFVHWKPEGRAGGVLGAVWGASITTLVFLCVCFIFRVKTRRKKAAQPVQNTDDVNPVMVSGSRGHQHQFQTGIVSDHPAEAGPISEDEQELHYAVLHFHKVQPQEPKVTDTEYSEIKIHK

SEQ ID NO: 1469 - protein, 437 aa, Homo sapiens
LLCAEGVELRGLVASQFLFCEQPRSRAPPQPPVPPRSPSPPLPSPSLLMQGAQEASASEMLPLLLPLLWAGALAQERRFQLEGPESLTVQEGLCVLVPCRLPTTLPASYYGYGYWFLEGADVPVATNDPDEEVQEETRGRFHLLWDPRRKNCSLSIRDARRRDNAAYFFRLKSKWMKYGYTSSKLSVRVMALTHRPNISIPGTLESGHPSNLTCSVPWVCEQGTPPIFSWMSAAPTSLGPRTTQSSVLTITPRPQDHSTNLTCQVTFPGAGVTMERTIQLNVSWMLRRPPLSTPDAPQKVAISIFQGNSAAFKILQNTSSLPVLEGQALRLLCDADGNPPAHLSWFQGFPALNATPISNTGVLELPQVGSAEEGDFTCRAQHPLGSLQISLSLFVHWKPEGRAGGVLGAVWGASITTLVFLCVCFIFRVISTSSRQA

SEQ ID NO: 1470 - protein, 115 aa, Homo sapiens
LRSPAGAQKEQAARGRAGRGRRGRSCGGKRAGTARPPPARRAAQTMSPEEWTYLVVLLISIPIGFLFKKAGPGLKRWGAAAVGLGLTLFTCGPHTLHSLVTILGTWALIQAQPCW

SEQ ID NO: 1471 - protein, 148 aa, Homo sapiens
MHTAEILFLSFLDAPASQGLKAEHLYILIGVSVVFLFCLLLLVLFCLHRQNQIKQGPPRSKDEEQKPQQRPDLAVDVLERTADKATVNGLPEKDRETDTSALAAGSSQEVTYAQLDHWALTQRTARAVSPQSTKPMAESITYAAVARH

SEQ ID NO: 1472 - protein, 97 aa, Homo sapiens
VDVGGLRAFSVQLRTLTPPPSDSSLPGPTQRPSDNSHNEHAPASQGLKAEHLYILIGVSVVFLFCLLLLVLFCLHRQNQIKQGPPRSKDEEQKPQQR

SEQ ID NO: 1473 - protein, 94 aa, Homo sapiens
LELLVKESSGGPDSPDTEPGSSAGPTQRPSDNSHNEHAPASQGLKAEHLYILIGVSVVFLFCLLLLVLFCLHRQNQIKQGPPRSKDEEQKPQQR

SEQ ID NO: 1474 - protein, 157 aa, Homo sapiens
LPLEEAKRGLLLLKEAGMEKINFSGGEPFLQDRGEYLGKLVRFCKVELRLPSVSIVSNGSLIRERWFQNYGVLHGMAFFLLLLLFLLLVLIFPSLLGLQPGLLRNWKGGKTNLAYSNCFSSCARHYGSFSSLGLSVNKFGKLDNRPFTEMTILYIAI

SEQ ID NO: 1475 - protein, 322 aa, Homo sapiens
LSVYKHSRTPGPGLKTFPLLPSGFLRDCSAMTTTRYRPTWDLALDPLVSCKLCLGEYPVEQMTTIAQCQCIFCTLCLKQYVELLIKEGLETAISCPDAACPKQGHLQENEIECMVAAEIMQRYKKLQFEREVLFDPCRTWCPASTCQAVCQLQDVGLQTPQPVQCKACRMEFCSTCKASWHPGQGCPETMPITFLPGETSAAFKMEEDDAPIKRCPKCKVYIERDEGCAQMMCKNCKHAFCWYCLESLDDDFLLIHYDKGPCRNKLGHSRASVIWHRTQVVGIFAGFGLLLLVASPFLLLATPFVLCCKCKCSKGDDDPLPT

SEQ ID NO: 1476 - protein, 518 aa, Homo sapiens
LVPRDLWGPGRRRPRPSQRTGRGGNREVPGGVHGGVPGGLRKAPAEAPALRLKIARGPAASLGRGKAQPMGRVGGMAQPMGRAGAPKPMGRAGSARRGRFKGCWSEGSPVHPVPAVLSWLLALLRCASTMLSLRVPLAPITDPQQLQLSPLKGLSLVDKENTPPALSGTRVLASKTARRIFQEPTEPKTKAAAPGVEDEPLLRENPRRFVIFPIEYHDIWQMYKKAEASFWTAEEVDLSKDIQHWESLKPEERYFISHVLAFFAASDGIVNENLVERFSQEVQITEARCFYGFQIAMENIHSEMYSLLIDTYIKDPKEREFLFNAIETMPCVKKKADWALRWIGDKEATYGERVVAFAAVEGIFFSGSFASIFWLKKRGLMPGLTFSNELISRDEGLHCDFACLMFKHLVHKPSEERVREIIINAVRIEQEFLTEALPVKLIGMNCTLMKQYIEFVADRLMLELGFSKVFRVENPFDFMENISLEGKTNFFEKRVGEYQRMGVMSSPTENSFTLDADF

SEQ ID NO: 1477 - protein, 96 aa, Homo sapiens [sequence omitted]

SEQ ID NO: 1478 - protein, 59 aa, Homo sapiens
LVHPCPAEVDHRPGHARIITTLMTTNDFTILLRFVIMLALNIWVTVTVLRYRKTAIKAE

SEQ ID NO: 1479 - protein, 81 aa, Homo sapiens
LERTPASADMAWTKYQLFLAGLMLVTGSINTLSAKRFLPSTQSAETRLAKGDPKASEEHTPLDKEAALQPPGSRSISSSSL

SEQ ID NO: 1480 - protein, 55 aa, Homo sapiens
LGPMKLPCSLWLWTVVASCICCPHGSVPVWLLLLLCVGLIIVTILLLQSAFPGFL

SEQ ID NO: 1481 - protein, 686 aa, Homo sapiens
LNHGAHPGQYHSVEEDCETVAGSQIVATHPPLPYPRALEQQLAADHRHSEDMSVGVSTSAPLSPTSGTSVGMSTFSIMDYVVFVLLLVLSLAIGLYHACRGWGRHTVGELLMADRKMGCLPVALSLLATFQSAVAILGVPSEIYRFGTQYWFLGCCYFLGLLIPAHIFIPVFYRLHLTSAYEYLELRFNKTVRVCGTVTFIFQMVIYMGVVLYAPSLALNAVTGFDLWLSVLALGIVCTVYTALGGLKAVIWTDVFQTLVMFLGQLAVIIVGSAKVGGLGRVWAVASQHGRISGFELDPDPFVRHTFWTLAFGGVFMMLSLYGVNQAQVQRYLSSRTEKAAVLSCYAVFPFQQVSLCVGCLIGLVMFAYYQEYPMSIQQAQAAPDQFVLYFVMDLLKGLPGLPGLFIACLFSGSLSTISSAFNSLATVTMEDLIRPWFPEFSEARAIMLSRGLAFGYGLLCLGMAYISSQMGPVLQAAISIFGMVGGPLLGLFCLGMFFPCANPPGAVVGLLAGLVMAFWIGIGSIVTSMGSSMPPSPSNGSSFSLPTNLTVATVTTLMPLTTFSKPTGLQRFYSLSYLWYSAHNSTTVIVVGLIVSLLTGRMRGRSLNPATIYPVLPKLLSLLPLSCQKRLHCRSYGQDHLDTGLFPEKPRNGVLGDSRDKEAMALDGTAYQGSSSTCILQETSL

SEQ ID NO: 1482 - protein, 54 aa, Homo sapiens
LIRPWFPEFSEARAIMLSRGLGGVMLPHLFSLGLSKLHPDHCHQFAPLAMGCFV

SEQ ID NO: 1483 - protein, 528 aa, Homo sapiens
LNHGAHPGQYHSVEEDCETVAGSQIVATHPPLPYPRALEQQLAADHRHSEDMSVGVSTSAPLSPTSGTSVGMSTFSIMDYVVFVLLLVLSLAIGLYHACRGWGRHTVGELLMADRKMGCLPVALSLLATFQSAVAILGVPSEIYRFGTQYWFLGCCYFLGLLIPAHIFIPVFYRLHLTSAYEYLELRFNKTVRVCGTVTFIFQMVIYMGVVLYAPSLALNAVTGFDLWLSVLALGIVCTVYTALGGLKAVIWTDVFQTLVMFLGQLAVIIVGSAKVGGLGRVWAVASQHGRISGFELDPDPFVRHTFWTLAFGGVFMMLSLYGVNQAQVQRYLSSRTEKAAVLSCYAVFPFQQVSLCVGCLIGLVMFAYYQEYPMSIQQAQAAPDQFVLYFVMDLLKGLPGLPGLFIACLFSGSLSTISSAFNSLATVTMEDLIRPWFPEFSEARAIMLSRGLGGVMLPHLFSLGLSKLHPDHCHQFAVKHPLYPGLSTCLMKHTTFPACMVVSISGHVLGRSLSHIGVRTWWEEAGA

SEQ ID NO: 1484 - protein, 98 aa, Homo sapiens
LPYQGFSPGEPFSRDKNVASMLTVTGFDLWLSVLALGIVCTVYTALGGLKAVIWTDVFQTLVMFLGQLAVIIVGSAKVGGLGRVWAVASQHGRISGFE

SEQ ID NO: 1485 - protein, 204 aa, Homo sapiens
LNHGAHPGQYHSVEEDCETVAGSQIVATHPPLPYPRALEQQLAADHRHSEDMSVGVSTSAPLSPTSGTSVGMSTFSIMDYVVFVLLLVLSLAIGLYHACRGWGRHTVGELLMADRKMGCLPVALSLLATFQSAVAILGVPSEIYRFGTQYWFLGCCYFLGLLIPAHIFIPVFYRLHLTSAYEYLELRFNKTVRVCGTVTFIFQM

SEQ ID NO: 1486 - protein, 377 aa, Homo sapiens
VTASGPGNPLPDRLGEMAGGRHRRVVGTLHLLLLVAALPWASRGVSPSASAWPEEKNYHQPAILNSSALRQIAEGTSISEMWQNDLQPLLIERYPGSPGSYAARQHIMQRIQRLQADWVLEIDTFLSQTPYGYRSFSNIISTLNPTAKRHLVLACHYDSKYFSHWNNRVFVGATDSAVPCAMMLELARALDKKLLSLKTVSDSKPDLSLQLIFFDGEEAFLHWSPQDSLYGSRHLAAKMASTPHPPGARGTSQLHGMDLLVLLDLIGAPNPTFPNFFPNSARWFERLQAIEHELHELGLLKDHSLEGRYFQNYSYGGVIQDDHIPFLRRGVPVLHLIPSPFPEVWHTMDDNEENLDESTIDNLNKILQVFVLEYLHL

SEQ ID NO: 1487 - protein, 580 aa, Homo sapiens
VSRPGCGFLLTSCPRQRSQFLLGAGCPAPLETAPPRSMGTSLSPNDPWPLNPLSIQQTTLLLLLSVLATVHVGQRLLRQRRRQLRSAPPGPFAWPLIGNAAAVGQAAHLSFARLARRYGDVFQIRLGSCPIVVLNGERAIHQALVQQGSAFADRPAFASFRVVSGGRSMAFGHYSEHWKVQRRAAHSMMRNFFTRQPRSRQVLEGHVLSEARELVALLVRGSADGAFLDPRPLTVVAVANVMSAVCFGCRYSHDDPEFRELLSHNEEFGRTVGAGSLVDVMPWLQYFPNPVRTVFREFEQLNRNFSNFILDKFLRHCESLRPGAAPRDMMDAFILSAEKKAAGDSHGGGARLDLENVPATITDIFGASQDTLSTALQWLLLLFTRYPDVQTRVQAELDQVVGRDRLPCMGDQPNLPYVLAFLYEAMRFSSFVPVTIPHATTANTSVLGYHIPKDTVVFVNQWSVNHDPLKWPNPENFDPARFLDKDGLINKDLTSRVMIFSVGKRRCIGEELSKMQLFLFISILAHQCDFRANPNEPAKMNFSYGLTIKPKSFKVNVTLRESMELLDSAVQNLQAKETCQ

SEQ ID NO: 1488 - protein, 1077 aa, Homo sapiens
MAELSEPEGPVDWKERCVALESQLMKFRVQASKIRELLAEKMQQLERQVIDAERQAEKAFQQVQVMEDKLKAANIQTSESETRLYNKCQDLESLIQEKDDVIQNLELQLEEQKQIRIQEAKIIEEKAAKIKEWVTVKLNELELENQNLRLINQNQTEEIRTMQSKLQVQGKKSSTVSTLKLSEGQRLSSLTFGCFLSRARSPPQVVKSEEMSKISSKEPEFTEGKDMEEMEIPEKSVDNQVLENNRGQRTLHQTPCGSEQNRKTRTSFATDGGISQNSGAPVSDWSSDEEDGSKGRSKSRCTSTLSSHTSEEGVQCSRMGSEMYLTASDDSSSIFEEETFGIKRPEHKKLYSWQQEAQWKALNSPLGKGNSELSKKEQDSSSDELNKKFQSQRLDYSSSSSEANTPSPILTPALMPKHPNSLSGKGTQLVPSSHLPPPKLRIPNVFSISVALAKRHLSQPQLSSDRMFGTNRNAISMIRPLRPQETDLDLVDGDSTEVLENMDTSCDDGLFSYDSLDSPNSDDQEHCDSAKKVAYSKPPTPPLHRFPSWESRIYAVAKSGIRMSEAFNMESVNKNSAATLSYTTSGLYTSLIYKNMTTPVYTTLKGKATQISSSPFLDDSSGSEEEDSSRSSSRTSESDSRSRSGPGSPRAMKRGVSLSSVASESDYAIPPDAYSTDTEYSQPEQKLPKTCSSSSDNGKNEPLEKSGYLLKMSGKVKSWKRRWFVLKGGELLYYKSPSDVIRKPQGHIELSASCSILRGDNKQTVQLTTEKHTYYLTADSPNILEEWIKVLQNVLRVQAANPLSLQPEGKPTMKGLLTKVKHGYSKRVWCTLIGKTLYYFRSQEDKFPLGQIKLWEAKVEEVDRSCDSDEDYEASGRSLLSTHYTIVIHPKDQGPTYLLIGSKHEKDTWLYHLTVAAGSNNVNVGSEFEQLVCKLLNIDGEPSSQIWRHPTLCHSKEGIISPLTTLPSEALQTEAIKLFKTCQLFINAAVDSPAIDYHISLAQSALQICLTHPELQNEICCQLIKQTRRRQPQNQPGPLQGWQLLALCVGLFLPHHPFLWLLRLHLKRNADSRCAEY

SEQ ID NO: 1489 - protein, 45 aa, Homo sapiens
LEKKKCEGSTPTYVVICESCTAWLFLNWCFSPAFGGFFIIIQKHN

SEQ ID NO: 1490 - protein, 154 aa, Homo sapiens
LFPSNLVVAAFRTYATDYKVVTQNSSSGNVTHEKIPIGTEIEGMNILGLVLFALVLGVALKKLGSEGEDLIRFFNSLNEATMVLVSWIMWMEYSGAISAPCNLYLLGSSDSPASASREAGITGVRHHTQLIFFFFSRDGVSPCWPSWSQTPDLR

SEQ ID NO: 1491 - protein, 2126 aa, Homo sapiens
VGARARCSRSRPDCAPVCRRGCPAMLCCLLVRASNLPSAKKDRRSDPVASLTFRGVKKRTKVIKNSVNPVWNEGFEWDLKGIPLDQGSELHVVVKDHETMGRNRFLGEAKVPLREVLATPSLSASFNAPLLDTKKQPTGASLVLQVSYTPLPGAVPLFPPPTPLEPSPTLPDLDVVADTGGEEDTEDQGLTGDEAEPFLDQSGGPGAPTTPRKLPSRPPPHYPGIKRKRSAPTSRKLLSDKPQDFQIRVQVIEGRQLPGVNIKPVVKVTAAGQTKRTRIHKGNSPLFNETLFFNLFDSPGELFDEPIFITVVDSRSLRTDALLGEFRMDVGTIYREPRHAYLRKWLLLSDPDDFSAGARGYLKTSLCVLGPGDEAPLERKDPSEDKEDIESNLLRPTGVALRGAHFCLKVFRAEDLPQMDDAVMDNVKQIFGFESNKKNLVDPFVEVSFAGKMLCSKILEKTANPQWNQNITLPAMFPSMCEKMRIRIIDWDRLTHNDIVATTYLSMSKISAPGGEIEEEPAGAVKPSKASDLDDYLGFLPTFGPCYINLYGSPREFTGFPDPYTELNTGKGEGVAYRGRLLLSLETKLVEHSEQKVEDLPADDILRVEKYLRRRKYSLFAAFYSATMLQDVDDAIQFEVSIGNYGNKFDMTCLPLASTTQYSRAVFDGCHYYYLPWGNVKPVVVLSSYWEDISHRIETQNQLLGIADRLEAGLEQVHLALKAQCSTEDVDSLVAQLTDELIAGCSQPLGDIHETPSATHLDQYLYQLRTHHLSQITEAALALKLGHSELPAALEQAEDWLLRLRALAEEPQNSLPDIVIWMLQGDKRVAYQRVPAHQVLFSRRGANYCGKNCGKLQTIFLKYPMEKVPGARMPVQIRVKLWFGLSVDEKEFNQFAEGKLSVFAETYENETKLALVGNWGTTGLTYPKFSDVTGKIKLPKDSFRPSAGWTWAGDWFVCPEKTLLHDMDAGHLSFVEEVFENQTRLPGGQWIYMSDNYTDVNGEKVLPKDDIECPLGWKWEDEEWSTDLNRAVDEQGWEYSITIPPERKPKHWVPAEKMYYTHRRRRWVRLRRRDLSQMEALKRHRQAEAEGEGWEYASLFGWKFHLEYRKTDAFRRRRWRRRMEPLEKTGPAAVFALEGALGGVMDDKSEDSMSVSTLSFGVNRPTISCIFDYGNRYHLRCYMYQARDLAAMDKDSFSDPYAIVSFLHQSQKTVVVKNTLNPTWDQTLIFYEIEIFGEPATVAEQPPSIVVELYDHDTYGADEFMGRCICQPSLERMPRLAWFPLTRGSQPSGELLASFELIQREKPAIHHIPGFEVQETSRILDESEDTDLPYPPPQREANIYMVPQNIKPALQRTAIEILAWGLRNMKSYQLANISSPSLVVECGGQTVQSCVIRNLRKNPNFDICTLFMEVMLPREELYCPPITVKVIDNRQFGRRPVVGQCTIRSLESFLCDPYSAESPSPQGGPDDVSLLSPGEDVLIDIDDKEPLIPIQLADGLSSLAPTNTASPPSSPHEEEFIDWWSKFFASIGEREKCGSYLEKDFDTLKVYDTQLENVEAFEGLSDFCNTFKLYRGKTQEETEDPSVIGEFKGLFKIYPLPEDPAIPMPPRQFHQLAAQGPQECLVRIYIVRAFGLQPKDPNGKCDPYIKISIGKKSVSDQDNYIPCTLEPVFGKMFELTCTLPLEKDLKITLYDYDLLSKDEKIGETVVDLENRLLSKFGARCGLPQTYCVSGPNQWRDQLRPSQLLHLFCQQHRVKAPVYRTDRVMFQDKEYSIEEIEAGRIPNPHLGPVEERLALHVLQQQGLVPEHVESRPLYSPLQPDIEQGKLQMWVDLFPKALGRPGPPFNITPRRARRFFLRCIIWNTRDVILDDLSLTGEKMSDIYVKGWMIGFEEHKQKTDVHYRSLGGEGNFNWRFIFPFDYLPAEQVCTIAKKDAFWRLDKTESKIPARVVFQIWDNDKFSFDDFLGSLQLDLNRMPKPAKTAKKCSLDQLDDAFHPEWFVSLFEQKTVKGWWPCVAEEGEKKILAGKLEMTLEIVAESEHEERPAGQGRDEPNMNPKLEDPRRPDTSFLWFTSPYKTMKFILWRRFRWAIILFIILFILLLFLAIFIYAFPNYAAMKLVKPFS

SEQ ID NO: 1492 - protein, 2143 aa, Homo sapiens
VGARARCSRSRPDCAPVCRRGCPAMLCCLLVRASNLPSAKKDRRSDPVASLTFRGVKKRTKVIKNSVNPVWNEGFEWDLKGIPLDQGSELHVVVKDHETMGRNRFLGEAKVPLREVLATPSLSASFNAPLLDTKKQPTGASLVLQVSYTPLPGAVPLFPPPTPLEPSPTLPDLDVVAGGGQSRAETWSLLSDSTMDTRYSGKKWPAPTDTGGEEDTEDQGLTGDEAEPFLDQSGGPGAPTTPRKLPSRPPPHYPGIKRKRSAPTSRKLLSDKPQDFQIRVQVIEGRQLPGVNIKPVVKVTAAGQTKRTRIHKGNSPLFNETLFFNLFDSPGELFDEPIFITVVDSRSLRTDALLGEFRMDVGTIYREPRHAYLRKWLLLSDPDDFSAGARGYLKTSLCVLGPGDEAPLERKDPSEDKEDIESNLLRPTGVALRGAHFCLKVFRAEDLPQMDDAVMDNVKQIFGFESNKKNLVDPFVEVSFAGKMLCSKILEKTANPQWNQNITLPAMFPSMCEKMRIRIIDWDRLTHNDIVATTYLSMSKISAPGGEIEVDDYLGFLPTFGPCYINLYGSPREFTGFPDPYTELNTGKGEGVAYRGRLLLSLETKLVEHSEQKVEDLPADDILRVEKYLRRRKYSLFAAFYSATMLQDVDDAIQFEVSIGNYGNKFDMTCLPLASTTQYSRAVFDGCHYYYLPWGNVKPVVVLSSYWEDISHRIETQNQLLGIADRLEAGLEQVHLALKAQCSTEDVDSLVAQLTDELIAGCSQPLGDIHETPSATHLDQYLYQLRTHHLSQITEAALALKLGHSELPAALEQAEDWLLRLRALAEEPQNSLPDIVIWMLQGDKRVAYQRVPAHQVLFSRRGANYCGKNCGKLQTIFLKYPMEKVPGARMPVQIRVKLWFGLSVDEKEFNQFAEGKLSVFAETYENETKLALVGNWGTTGLTYPKFSDVTGKIKLPKDSFRPSAGWTWAGDWFVCPEKTLLHDMDAGHLSFVEEVFENQTRLPGGQWIYMSDNYTDVNGEKVLPKDDIECPLGWKWEDEEWSTDLNRAVDEQGWEYSITIPPERKPKHWVPAEKMYYTHRRRRWVRLRRRDLSQMEALKRHRQAEAEGEGWEYASLFGWKFHLEYRKTDAFRRRRWRRRMEPLEKTGPAAVFALEGALGGVMDDKSEDSMSVSTLSFGVNRPTISCIFDYGNRYHLRCYMYQARDLAAMDKDSFSDPYAIVSFLHQSQKTVVVKNTLNPTWDQTLIFYEIEIFGEPATVAEQPPSIVVELYDHDTYGADEFMGRCICQPSLERMPRLAWFPLTRGSQPSGELLASFELIQREKPAIHHIPGFEVQETSRILDESEDTDLPYPPPQREANIYMVPQNIKPALQRTAIEILAWGLRNMKSYQLANISSPSLVVECGGQTVQSCVIRNLRKNPNFDICTLFMEVMLPREELYCPPITVKVIDNRQFGRRPVVGQCTIRSLESFLCDPYSAESPSPQGGPDDVSLLSPGEDVLIDIDDKEPLIPIQLADGLSSLAPTNTASPPSSPHEEEFIDWWSKFFASIGEREKCGSYLEKDFDTLKVYDTQLENVEAFEGLSDFCNTFKLYRGKTQEETEDPSVIGEFKGLFKIYPLPEDPAIPMPPRQFHQLAAQGPQECLVRIYIVRAFGLQPKDPNGKCDPYIKISIGKKSVSDQDNYIPCTLEPVFGKMFELTCTLPLEKDLKITLYDYDLLSKDEKIGETVVDLENRLLSKFGARCGLPQTYCVSGPNQWRDQLRPSQLLHLFCQQHRVKAPVYRTDRVMFQDKEYSIEEIEAGRIPNPHLGPVEERLALHVLQQQGLVPEHVESRPLYSPLQPDIEQGKLQMWVDLFPKALGRPGPPFNITPRRARRFFLRCIIWNTRDVILDDLSLTGEKMSDIYVKGWMIGFEEHKQKTDVHYRSLGGEGNFNWRFIFPFDYLPAEQVCTIAKKDAFWRLDKTESKIPARVVFQIWDNDKFSFDDFLGSLQLDLNRMPKPAKTAKKCSLDQLDDAFHPEWFVSLFEQKTVKGWWPCVAEEGEKKILAGKLEMTLEIVAESEHEERPAGQGRDEPNMNPKLEDPRRPDTSFLWFTSPYKTMKFILWRRFRWAIILFIILFILLLFLAIFIYAFPNYAAMKLVKPFS

SEQ ID NO: 1493 - protein, 2122 aa, Homo sapiens
VGARARCSRSRPDCAPVCRRGCPAMLCCLLVRASNLPSAKKDRRSDPVASLTFRGVKKRTKVIKNSVNPVWNEGFEWDLKGIPLDQGSELHVVVKDHETMGRNRFLGEAKVPLREVLATPSLSASFNAPLLDTKKQPTGASLVLQVSYTPLPGAVPLFPPPTPLEPSPTLPDLDVVAGGGQSRAETWSLLSDSTMDTRYSGKKWPAPTDTGGEEDTEDQGLTGDEAEPFLDQSGGPGAPTTPRKLPSRPPPHYPGIKRKRSAPTSRKLLSDKPQDFQIRVQVIEGRQLPGVNIKPVVKVTAAGQTKRTRIHKGNSPLFNETLFFNLFDSPGELFDEPIFITVVDSRSLRTDALLGEFRMDVGTIYREPRHAYLRKWLLLSDPDDFSAGARGYLKTSLCVLGPGDEAPLERKDPSEDKEDIESNLLRPTGVALRGAHFCLKVFRAEDLPQMDDAVMDNVKQIFGFESNKKNLVDPFVEVSFAGKMLCSKILEKTANPQWNQNITLPAMFPSMCEKMRIRIIDWDRLTHNDIVATTYLSMSKISAPGGEIEVDDYLGFLPTFGPCYINLYGSPREFTGFPDPYTELNTGKGEGVAYRGRLLLSLETKLVEHSEQKVEDLPADDILRVEKYLRRRKYSLFAAFYSATMLQDVDDAIQFEVSIGNYGNKFDMTCLPLASTTQYSRAVFDGCHYYYLPWGNVKPVVVLSSYWEDISHRIETQNQLLGIADRLEAGLEQVHLALKAQCSTEDVDSLVAQLTDELIAGCSQPLGDIHETPSATHLDQYLYQLRTHHLSQITEAALALKLGHSELPAALEQAEDWLLRLRALAEEPQNSLPDIVIWMLQGDKRVAYQRVPAHQVLFSRRGANYCGKNCGKLQTIFLKYPMEKVPGARMPVQIRVKLWFGLSVDEKEFNQFAEGKLSVFAETYENETKLALVGNWGTTGLTYPKFSDVTGKIKLPKDSFRPSAGWTWAGDWFVCPEKTLLHDMDAGHLSFVEEVFENQTRLPGGQWIYMSDNYTDVNGEKVLPKDDIECPLGWKWEDEEWSTDLNRAVDEQGWEYSITIPPERKPKHWVPAEKMYYTHRRRRWVRLRRRDLSQMEALKRHRQAEAEGEGWEYASLFGWKFHLEYRKTDAFRRRRWRRRMEPLEKTGPAAVFALEGALGGVMDDKSEDSMSVSTLSFGVNRPTISCIFDYGNRYHLRCYMYQARDLAAMDKDSFSDPYAIVSFLHQSQKTVVVKNTLNPTWDQTLIFYEIEIFGEPATVAEQPPSIVVELYDHDTYGADEFMGRCICQPSLERMPRLAWFPLTRGSQPSGELLASFELIQREKPAIHHIPGFEVQETSRILDESEDTDLPYPPPQREANIYMVPQNIKPALQRTAIEILAWGLRNMKSYQLANISSPSLVVECGGQTVQSCVIRNLRKNPNFDICTLFMEVMLPREELYCPPITVKVIDNRQFGRRPVVGQCTIRSLESFLCDPYSAESPSPQGGPDDVSLLSPGEDVLIDIDDKEPLIPIQEEEFIDWWSKFFASIGEREKCGSYLEKDFDTLKVYDTQLENVEAFEGLSDFCNTFKLYRGKTQEETEDPSVIGEFKGLFKIYPLPEDPAIPMPPRQFHQLAAQGPQECLVRIYIVRAFGLQPKDPNGKCDPYIKISIGKKSVSDQDNYIPCTLEPVFGKMFELTCTLPLEKDLKITLYDYDLLSKDEKIGETVVDLENRLLSKFGARCGLPQTYCVSGPNQWRDQLRPSQLLHLFCQQHRVKAPVYRTDRVMFQDKEYSIEEIEAGRIPNPHLGPVEERLALHVLQQQGLVPEHVESRPLYSPLQPDIEQGKLQMWVDLFPKALGRPGPPFNITPRRARRFFLRCIIWNTRDVILDDLSLTGEKMSDIYVKGWMIGFEEHKQKTDVHYRSLGGEGNFNWRFIFPFDYLPAEQVCTIAKKDAFWRLDKTESKIPARVVFQIWDNDKFSFDDFLGSLQLDLNRMPKPAKTAKKCSLDQLDDAFHPEWFVSLFEQKTVKGWWPCVAEEGEKKILAGKLEMTLEIVAESEHEERPAGQGRDEPNMNPKLEDPRRPDTSFLWFTSPYKTMKFILWRRFRWAIILFIILFILLLFLAIFIYAFPNYAAMKLVKPFS

SEQ ID NO: 1494 - protein, 2112 aa, Homo sapiens
VGARARCSRSRPDCAPVCRRGCPAMLCCLLVRASNLPSAKKDRRSDPVASLTFRGVKKRTKVIKNSVNPVWNEGFEWDLKGIPLDQGSELHVVVKDHETMGRNRFLGEAKVPLREVLATPSLSASFNAPLLDTKKQPTGASLVLQVSYTPLPGAVPLFPPPTPLEPSPTLPDLDVVADTGGEEDTEDQGLTGDEAEPFLDQSGGPGAPTTPRKLPSRPPPHYPGIKRKRSAPTSRKLLSDKPQDFQIRVQVIEGRQLPGVNIKPVVKVTAAGQTKRTRIHKGNSPLFNETLFFNLFDSPGELFDEPIFITVVDSRSLRTDALLGEFRMDVGTIYREPRHAYLRKWLLLSDPDDFSAGARGYLKTSLCVLGPGDEAPLERKDPSEDKEDIESNLLRPTGVALRGAHFCLKVFRAEDLPQMDDAVMDNVKQIFGFESNKKNLVDPFVEVSFAGKMLCSKILEKTANPQWNQNITLPAMFPSMCEKMRIRIIDWDRLTHNDIVATTYLSMSKISAPGGEIEVDDYLGFLPTFGPCYINLYGSPREFTGFPDPYTELNTGKGEGVAYRGRLLLSLETKLVEHSEQKVEDLPADDILRVEKYLRRRKYSLFAAFYSATMLQDVDDAIQFEVSIGNYGNKFDMTCLPLASTTQYSRAVFDGCHYYYLPWGNVKPVVVLSSYWEDISHRIETQNQLLGIADRLEAGLEQVHLALKAQCSTEDVDSLVAQLTDELIAGCSQPLGDIHETPSATHLDQYLYQLRTHHLSQITEAALALKLGHSELPAALEQAEDWLLRLRALAEEPQNSLPDIVIWMLQGDKRVAYQRVPAHQVLFSRRGANYCGKNCGKLQTIFLKYPMEKVPGARMPVQIRVKLWFGLSVDEKEFNQFAEGKLSVFAETYENETKLALVGNWGTTGLTYPKFSDVTGKIKLPKDSFRPSAGWTWAGDWFVCPEKTLLHDMDAGHLSFVEEVFENQTRLPGGQWIYMSDNYTDVNGEKVLPKDDIECPLGWKWEDEEWSTDLNRAVDEQGWEYSITIPPERKPKHWVPAEKMYYTHRRRRWVRLRRRDLSQMEALKRHRQAEAEGEGWEYASLFGWKFHLEYRKTDAFRRRRWRRRMEPLEKTGPAAVFALEGALGGVMDDKSEDSMSVSTLSFGVNRPTISCIFDYGNRYHLRCYMYQARDLAAMDKDSFSDPYAIVSFLHQSQKTVVVKNTLNPTWDQTLIFYEIEIFGEPATVAEQPPSIVVELYDHDTYGADEFMGRCICQPSLERMPRLAWFPLTRGSQPSGELLASFELIQREKPAIHHIPGFEVQETSRILDESEDTDLPYPPPQREANIYMVPQNIKPALQRTAIEILAWGLRNMKSYQLANISSPSLVVECGGQTVQSCVIRNLRKNPNFDICTLFMEVMLPREELYCPPITVKVIDNRQFGRRPVVGQCTIRSLESFLCDPYSAESPSPQGGPDDVSLLSPGEDVLIDIDDKEPLIPIQLADGLSSLAPTNTASPPSSPHEEEFIDWWSKFFASIGEREKCGSYLEKDFDTLKVYDTQLENVEAFEGLSDFCNTFKLYRGKTQEETEDPSVIGEFKGLFKIYPLPEDPAIPMPPRQFHQLAAQGPQECLVRIYIVRAFGLQPKDPNGKCDPYIKISIGKKSVSDQDNYIPCTLEPVFGKMFELTCTLPLEKDLKITLYDYDLLSKDEKIGETVVDLENRLLSKFGARCGLPQTYCVSGPNQWRDQLRPSQLLHLFCQQHRVKAPVYRTDRVMFQDKEYSIEEIEAGRIPNPHLGPVEERLALHVLQQQGLVPEHVESRPLYSPLQPDIEQGKLQMWVDLFPKALGRPGPPFNITPRRARRFFLRCIIWNTRDVILDDLSLTGEKMSDIYVKGWMIGFEEHKQKTDVHYRSLGGEGNFNWRFIFPFDYLPAEQVCTIAKKDAFWRLDKTESKIPARVVFQIWDNDKFSFDDFLGSLQLDLNRMPKPAKTAKKCSLDQLDDAFHPEWFVSLFEQKTVKGWWPCVAEEGEKKILAGKLEMTLEIVAESEHEERPAGQGRDEPNMNPKLEDPRRPDTSFLWFTSPYKTMKFILWRRFRWAIILFIILFILLLFLAIFIYAFPNYAAMKLVKPFS

SEQ ID NO: 1495 - protein, 2105 aa, Homo sapiens
VGARARCSRSRPDCAPVCRRGCPAMLCCLLVRASNLPSAKKDRRSDPVASLTFRGVKKRTKVIKNSVNPVWNEGFEWDLKGIPLDQGSELHVVVKDHETMGRNRFLGEAKVPLREVLATPSLSASFNAPLLDTKKQPTGASLVLQVSYTPLPGAVPLFPPPTPLEPSPTLPDLDVVADTGGEEDTEDQGLTGDEAEPFLDQSGGPGAPTTPRKLPSRPPPHYPGIKRKRSAPTSRKLLSDKPQDFQIRVQVIEGRQLPGVNIKPVVKVTAAGQTKRTRIHKGNSPLFNETLFFNLFDSPGELFDEPIFITVVDSRSLRTDALLGEFRMDVGTIYREPRHAYLRKWLLLSDPDDFSAGARGYLKTSLCVLGPGDEAPLERKDPSEDKEDIESNLLRPTGVALRGAHFCLKVFRAEDLPQMDDAVMDNVKQIFGFESNKKNLVDPFVEVSFAGKMLCSKILEKTANPQWNQNITLPAMFPSMCEKMRIRIIDWDRLTHNDIVATTYLSMSKISAPGGEIEEEPAGAVKPSKASDLDDYLGFLPTFGPCYINLYGSPREFTGFPDPYTELNTGKGEGVAYRGRLLLSLETKLVEHSEQKVEDLPADDILRVEKYLRRRKYSLFAAFYSATMLQDVDDAIQFEVSIGNYGNKFDMTCLPLASTTQYSRAVFDGCHYYYLPWGNVKPVVVLSSYWEDISHRIETQNQLLGIADRLEAGLEQVHLALKAQCSTEDVDSLVAQLTDELIAGCSQPLGDIHETPSATHLDQYLYQLRTHHLSQITEAALALKLGHSELPAALEQAEDWLLRLRALAEEPQNSLPDIVIWMLQGDKRVAYQRVPAHQVLFSRRGANYCGKNCGKLQTIFLKYPMEKVPGARMPVQIRVKLWFGLSVDEKEFNQFAEGKLSVFAETYENETKLALVGNWGTTGLTYPKFSDVTGKIKLPKDSFRPSAGWTWAGDWFVCPEKTLLHDMDAGHLSFVEEVFENQTRLPGGQWIYMSDNYTDVNGEKVLPKDDIECPLGWKWEDEEWSTDLNRAVDEQGWEYSITIPPERKPKHWVPAEKMYYTHRRRRWVRLRRRDLSQMEALKRHRQAEAEGEGWEYASLFGWKFHLEYRKTDAFRRRRWRRRMEPLEKTGPAAVFALEGALGGVMDDKSEDSMSVSTLSFGVNRPTISCIFDYGNRYHLRCYMYQARDLAAMDKDSFSDPYAIVSFLHQSQKTVVVKNTLNPTWDQTLIFYEIEIFGEPATVAEQPPSIVVELYDHDTYGADEFMGRCICQPSLERMPRLAWFPLTRGSQPSGELLASFELIQREKPAIHHIPGFEVQETSRILDESEDTDLPYPPPQREANIYMVPQNIKPALQRTAIEILAWGLRNMKSYQLANISSPSLVVECGGQTVQSCVIRNLRKNPNFDICTLFMEVMLPREELYCPPITVKVIDNRQFGRRPVVGQCTIRSLESFLCDPYSAESPSPQGGPDDVSLLSPGEDVLIDIDDKEPLIPIQEEEFIDWWSKFFASIGEREKCGSYLEKDFDTLKVYDTQLENVEAFEGLSDFCNTFKLYRGKTQEETEDPSVIGEFKGLFKIYPLPEDPAIPMPPRQFHQLAAQGPQECLVRIYIVRAFGLQPKDPNGKCDPYIKISIGKKSVSDQDNYIPCTLEPVFGKMFELTCTLPLEKDLKITLYDYDLLSKDEKIGETVVDLENRLLSKFGARCGLPQTYCVSGPNQWRDQLRPSQLLHLFCQQHRVKAPVYRTDRVMFQDKEYSIEEIEAGRIPNPHLGPVEERLALHVLQQQGLVPEHVESRPLYSPLQPDIEQGKLQMWVDLFPKALGRPGPPFNITPRRARRFFLRCIIWNTRDVILDDLSLTGEKMSDIYVKGWMIGFEEHKQKTDVHYRSLGGEGNFNWRFIFPFDYLPAEQVCTIAKKDAFWRLDKTESKIPARVVFQIWDNDKFSFDDFLGSLQLDLNRMPKPAKTAKKCSLDQLDDAFHPEWFVSLFEQKTVKGWWPCVAEEGEKKILAGKLEMTLEIVAESEHEERPAGQGRDEPNMNPKLEDPRRPDTSFLWFTSPYKTMKFILWRRFRWAIILFIILFILLLFLAIFIYAFPNYAAMKLVKPFS

SEQ ID NO: 1496 - protein, 2136 aa, Homo sapiens
VGARARCSRSRPDCAPVCRRGCPAMLCCLLVRASNLPSAKKDRRSDPVASLTFRGVKKRTKVIKNSVNPVWNEGFEWDLKGIPLDQGSELHVVVKDHETMGRNRFLGEAKVPLREVLATPSLSASFNAPLLDTKKQPTGASLVLQVSYTPLPGAVPLFPPPTPLEPSPTLPDLDVVAGGGQSRAETWSLLSDSTMDTRYSGKKWPAPTDTGGEEDTEDQGLTGDEAEPFLDQSGGPGAPTTPRKLPSRPPPHYPGIKRKRSAPTSRKLLSDKPQDFQIRVQVIEGRQLPGVNIKPVVKVTAAGQTKRTRIHKGNSPLFNETLFFNLFDSPGELFDEPIFITVVDSRSLRTDALLGEFRMDVGTIYREPRHAYLRKWLLLSDPDDFSAGARGYLKTSLCVLGPGDEAPLERKDPSEDKEDIESNLLRPTGVALRGAHFCLKVFRAEDLPQMDDAVMDNVKQIFGFESNKKNLVDPFVEVSFAGKMLCSKILEKTANPQWNQNITLPAMFPSMCEKMRIRIIDWDRLTHNDIVATTYLSMSKISAPGGEIEEEPAGAVKPSKASDLDDYLGFLPTFGPCYINLYGSPREFTGFPDPYTELNTGKGEGVAYRGRLLLSLETKLVEHSEQKVEDLPADDILRVEKYLRRRKYSLFAAFYSATMLQDVDDAIQFEVSIGNYGNKFDMTCLPLASTTQYSRAVFDGCHYYYLPWGNVKPVVVLSSYWEDISHRIETQNQLLGIADRLEAGLEQVHLALKAQCSTEDVDSLVAQLTDELIAGCSQPLGDIHETPSATHLDQYLYQLRTHHLSQITEAALALKLGHSELPAALEQAEDWLLRLRALAEEPQNSLPDIVIWMLQGDKRVAYQRVPAHQVLFSRRGANYCGKNCGKLQTIFLKYPMEKVPGARMPVQIRVKLWFGLSVDEKEFNQFAEGKLSVFAETYENETKLALVGNWGTTGLTYPKFSDVTGKIKLPKDSFRPSAGWTWAGDWFVCPEKTLLHDMDAGHLSFVEEVFENQTRLPGGQWIYMSDNYTDVNGEKVLPKDDIECPLGWKWEDEEWSTDLNRAVDEQGWEYSITIPPERKPKHWVPAEKMYYTHRRRRWVRLRRRDLSQMEALKRHRQAEAEGEGWEYASLFGWKFHLEYRKTDAFRRRRWRRRMEPLEKTGPAAVFALEGALGGVMDDKSEDSMSVSTLSFGVNRPTISCIFDYGNRYHLRCYMYQARDLAAMDKDSFSDPYAIVSFLHQSQKTVVVKNTLNPTWDQTLIFYEIEIFGEPATVAEQPPSIVVELYDHDTYGADEFMGRCICQPSLERMPRLAWFPLTRGSQPSGELLASFELIQREKPAIHHIPGFEVQETSRILDESEDTDLPYPPPQREANIYMVPQNIKPALQRTAIEILAWGLRNMKSYQLANISSPSLVVECGGQTVQSCVIRNLRKNPNFDICTLFMEVMLPREELYCPPITVKVIDNRQFGRRPVVGQCTIRSLESFLCDPYSAESPSPQGGPDDVSLLSPGEDVLIDIDDKEPLIPIQEEEFIDWWSKFFASIGEREKCGSYLEKDFDTLKVYDTQLENVEAFEGLSDFCNTFKLYRGKTQEETEDPSVIGEFKGLFKIYPLPEDPAIPMPPRQFHQLAAQGPQECLVRIYIVRAFGLQPKDPNGKCDPYIKISIGKKSVSDQDNYIPCTLEPVFGKMFELTCTLPLEKDLKITLYDYDLLSKDEKIGETVVDLENRLLSKFGARCGLPQTYCVSGPNQWRDQLRPSQLLHLFCQQHRVKAPVYRTDRVMFQDKEYSIEEIEAGRIPNPHLGPVEERLALHVLQQQGLVPEHVESRPLYSPLQPDIEQGKLQMWVDLFPKALGRPGPPFNITPRRARRFFLRCIIWNTRDVILDDLSLTGEKMSDIYVKGWMIGFEEHKQKTDVHYRSLGGEGNFNWRFIFPFDYLPAEQVCTIAKKDAFWRLDKTESKIPARVVFQIWDNDKFSFDDFLGSLQLDLNRMPKPAKTAKKCSLDQLDDAFHPEWFVSLFEQKTVKGWWPCVAEEGEKKILAGKLEMTLEIVAESEHEERPAGQGRDEPNMNPKLEDPRRPDTSFLWFTSPYKTMKFILWRRFRWAIILFIILFILLLFLAIFIYAFPNYAAMKLVKPFS

SEQ ID NO: 1497 - protein, 892 aa, Homo sapiens
LGEEDEAPNPTLFTEMDTLQHDGDQMEWKESARWIKFEEKVEEGGERWSKPHVSTLSLHSLFELRTCLQTGTVLLDLDSGSLPQIIDDVIEKQIEDGLLRPELRERVSYVLLRRHRHQTKKPIHRSLADIGKSVSTTNRSPARSPGAGPSLHHSTEDLRMRQSANYGRLCHAQSRSMNDISLTPNTDQRKNKFMKKIPKDSEASNVLVGEVDFLDQPFIAFVRLIQSAMLGGVTEVPVPTRFLFILLGPSGRAKSYNEIGRAIATLMVDDLFSDVAYKARNREDLIAGIDEFLDEVIVLPPGEWDPNIRIEPPKKVPSADKRKSVFSLAELGQMNGSVGGGGGAPGGGNGGGGGGGSGGGAGSGGAGGTSSGDDGEMPAMHEIGEELIWTGRFFGGLCLDIKRKLPWFPSDFYDGFHIQSISAILFIYLGCITNAITFGGLLGDATDNYQGVMESFLGTAMAGSLFCLFSGQPLIILSSTGPILIFEKLLFDFSKGNGLDYMEFRLWIGLHSAVQCLILVATDASFIIKYITRFTEEGFSTLISFIFIYDAIKKMIGAFKYYPINMDFKPNFITTYKCECVAPDTVNTTVFNASAPLAPDTNASLYNLLNLTALDWSLLSKKECLSYGGRLLGNSCKFIPDLALMSFILFFGTYSMTLTLKKFKFSRYFPTKVRALVADFSIVFSILMFCGIDACFGLETPKLHVPSVIKPTRPDRGWFVAPFGKNPWWVYPASILPALLVTILIFMDQQITAVIVNRKENKLKGTESNRHHRLHPDGNLCLPGSHPKVYPPAGAVRSLPLHGRGLPEWHPVLGTLQALPDASQAPAGPCLPAARAAAPDPPLHPGADPLPGGALDPQIHGGCHHLPGHDPGPHHRSKASGFHLFPARPGLD

SEQ ID NO: 1498 - protein, 1074 aa, Homo sapiens
MKVKEEKAGVGKLDHTNHRRRFPDQKECPPIHIGLPVPTYPQRKTDQKGHLSGLQKVHWGLRPDQPQQELTGPGSGASSQDSSMDLISRTRSPAAEQLQDILGEEDEAPNPTLFTEMDTLQHDGDQMEWKESARWIKFEEKVEEGGERWSKPHVSTLSLHSLFELRTCLQTGTVLLDLDSGSLPQIIDDVIEKQIEDGLLRPELRERVSYVLLRRHRHQTKKPIHRSLADIGKSVSTTNRSPARSPGAGPSLHHSTEDLRMRQSANYGRLCHAQSRSMNDISLTPNTDQRKNKFMKKIPKDSEASNVLVGEVDFLDQPFIAFVRLIQSAMLGGVTEVPVPTRFLFILLGPSGRAKSYNEIGRAIATLMVDDLFSDVAYKARNREDLIAGIDEFLDEVIVLPPGEWDPNIRIEPPKKVPSADKRKSVFSLAELGQMNGSVGGGGGAPGGGNGGGGGGGSGGGAGSGGAGGTSSGDDGEMPAMHEIGEELIWTGRFFGGLCLDIKRKLPWFPSDFYDGFHIQSISAILFIYLGCITNAITFGGLLGDATDNYQGVMESFLGTAMAGSLFCLFSGQPLIILSSTGPILIFEKLLFDFSKGNGLDYMEFRLWIGLHSAVQCLILVATDASFIIKYITRFTEEGFSTLISFIFIYDAIKKMIGAFKYYPINMDFKPNFITTYKCECVAPDTVNTTVFNASAPLAPDTNASLYNLLNLTALDWSLLSKKECLSYGGRLLGNSCKFIPDLALMSFILFFGTYSMTLTLKKFKFSRYFPTKVRALVADFSIVFSILMFCGIDACFGLETPKLHVPSVIKPTRPDRGWFVAPFGKNPWWVYPASILPALLVTILIFMDQQITAVIVNRKENKLKKAAGYHLDLFWVGILMALCSFMGLPWYVAATVISIAHIDSLKMETETSAPGEQPQFLGVREQRVTGIIVFILTGISVFLAPILKCIPLPVLYGVFLYMGVASLNGIQMGTGGSEFKIQKKLTPFWERCKLFLMPAKHQPDHAFLRHVPLRRIHLFTLVQILCLAVLWILKSTVAAIIFPVMSLSTTDPGPHHRSKASGFHLFPARPGLD

SEQ ID NO: 1499 - protein, 118 aa, Homo sapiens
MARASSGNGSEEAWGALRAPQQQLRELCPGVNNQPYLCESGHCCGETGCCTYYYELWWFWLLWTVLILFSCCCAFRHRRAKLRLQQQQRQREINLLAYHGACHGAGPFPTGSLLDLRE

SEQ ID NO: 1500 - protein, 216 aa, Homo sapiens
LSCLPGPTTSPALLTLLSKGVPRPAAPWTMSPSSVALICLLRYGQLLEQSRHSWVNTTALITGCTNAAGLLVVGNFQVDHARSLHYVGAGVAFPAGLLFVCLHCALSYQGATAPLDLAVAYLRSVLAVIAFITLVLSGVFFVHESSQLQHGAALCEWVCVIDILIFYGTFSYEFGAVSSDTLVAALQPTPGRACKSSGSSSTSTHLNCAPESIAMI

SEQ ID NO: 1501 - protein, 403 aa, Homo sapiens
LTRVCIHCTPCVSMPSEYTYVKLRSDCSRPSLQWYTRAQSKMRRPSLLLKDILKCTLLVFGVWILYILKLNYTTEECDMKKMHYVDPDHVKRAQKYAQQVLQKECRPKFAKTSMALLFEHRYSVDLLPFVQKAPKDSEAESKYDPPFGFRKFSSKVQTLLELLPEHDLPEHLKAKTCRRCVVIGSGGILHGLELGHTLNQFDVVIRLNSAPVEGYSEHVGNKTTIRMTYPEGAPLSDLEYYSNDLFVAVLFKSVDFNWLQAMVKKETLPFWVRLFFWKQVAEKIPLQPKHFRILNPVIIKETAFDILQYSEPQSRFWGRDKNVPTIGVIAVVLATHLCDEVSLAGFGYDLNQPRTPLHYFDSQCMAAMNFQTMHNVTTETKFLLKLVKEGVVKDLSGGIDREF

SEQ ID NO: 1502 - protein, 435 aa, Homo sapiens
LGAAFPPRTPRAAPRARHPQASPAGARAEGRGPGPCGPGGGSHAAMPSEYTYVKLRSDCSRPSLQWYTRAQSKMRRPSLLLKDILKCTLLVFGVWILYILKLNYTTEECDMKKMHYVDPDHVKRAQKYAQQVLQKECRPKFAKTSMALLFEHRYSVDLLPFVQKAPKDSEAESKYDPPFGFRKFSSKVQTLLELLPEHDLPEHLKAKTCRRCVVIGSGGILHGLELGHTLNQFDVVIRLNSAPVEGYSEHVGNKTTIRMTYPEGAPLSDLEYYSNDLFVAVLFKSVDFNWLQAMVKKETLPFWVRLFFWKQVAEKIPLQPKHFRILNPVIIKETAFDILQYSEPQSRFWGRDKNVPTIGVIAVVLATHLCDEVSLAGFGYDLNQPRTPLHYFDSQCMAAMNFQTMHNVTTETKFLLKLVKEGVVKDLSGGIDREF

SEQ ID NO: 1503 - protein, 435 aa, Homo sapiens
VGARGTGLAAGRRPLISMRTKAAGCAERRPLQPRTEAAAAPAGRAMPSEYTYVKLRSDCSRPSLQWYTRAQSKMRRPSLLLKDILKCTLLVFGVWILYILKLNYTTEECDMKKMHYVDPDHVKRAQKYAQQVLQKECRPKFAKTSMALLFEHRYSVDLLPFVQKAPKDSEAESKYDPPFGFRKFSSKVQTLLELLPEHDLPEHLKAKTCRRCVVIGSGGILHGLELGHTLNQFDVVIRLNSAPVEGYSEHVGNKTTIRMTYPEGAPLSDLEYYSNDLFVAVLFKSVDFNWLQAMVKKETLPFWVRLFFWKQVAEKIPLQPKHFRILNPVIIKETAFDILQYSEPQSRFWGRDKNVPTIGVIAVVLATHLCDEVSLAGFGYDLNQPRTPLHYFDSQCMAAMNFQTMHNVTTETKFLLKLVKEGVVKDLSGGIDREF

SEQ ID NO: 1504 - protein, 395 aa, Homo sapiens
VGARGTGLAAGRRPLISMRTKAAGCAERRPLQPRTEAAAAPAGRAMPSEYTYVKLRSDCSRPSLQWYTRAQSKMRRPSLLLKDILKCTLLVFGVWILYILKLNYTTEECDMKKMHYVDPDHVKKAPKDSEAESKYDPPFGFRKFSSKVQTLLELLPEHDLPEHLKAKTCRRCVVIGSGGILHGLELGHTLNQFDVVIRLNSAPVEGYSEHVGNKTTIRMTYPEGAPLSDLEYYSNDLFVAVLFKSVDFNWLQAMVKKETLPFWVRLFFWKQVAEKIPLQPKHFRILNPVIIKETAFDILQYSEPQSRFWGRDKNVPTIGVIAVVLATHLCDEVSLAGFGYDLNQPRTPLHYFDSQCMAAMNFQTMHNVTTETKFLLKLVKEGVVKDLSGGIDREF

SEQ ID NO: 1505 - protein, 204 aa, Homo sapiens
MPSEYTYVKLRSDCSRPSLQWYTRAQSKMRRPSLLLKDILKCTLLVFGVWILYILKLNYTTEECDMKKMHYVDPDHVKRAQKYAQQVLQKECRPKFAKTSMALLFEHRYSVDLLPFVQKAPKDSEAESKYDPPFGFRKFSSKVQTLLELLPEHDLPEHLKAKTCRRCVVIGSGGILHGLELGHTLNQFDVVIRTSPQSVSLPLS

SEQ ID NO: 1506 - protein, 373 aa, Homo sapiens
LLDHGGTRLLGLNLTSISTPRPTPASVGSSAVMSTAIMATLLLFKHQKGVFLSQLLGEFSWLTEEILLRGFDVGFSGQLRSLLQHSLSLLRAHVALLRIRQGDLLVVPQPGPGLTHLAQLSAELLPVFLSEAVGACAVRGLLAGRVPPQGPWELQGILLLSQNELYRQILLLMHLLPQDLLLLKPCQSSYCYCQEVLDRLIQCGLLVAEETPGSRPACDTGRQRLSRKLLWKPSGDFTDSDSDDFGEADGRYFRLSQQSHCPDFFLFLCRLLSPLLKAFAQAAAFLRQGQLPDTELGYTEQLFQFLQATAQEEGIFECADPKLAISAVWTFRDLGVLQQTPSPAGPRLHLSPTFASLDNQEKLEQFIRQFICS

SEQ ID NO: 1507 - protein, 231 aa, Homo sapiens
LLDHGGTRLLGLNLTSISTPRPTPASVGSSAVMSTAIMATLLLFKHQKGVFLSQLLGEFSWLTEEILLRGFDVGFSGQLRSLLQHSLSLLRAHVALLRIRQGDLLVVPQPGPGLTHLAQLSAELLPVFLSEAVGACAVRGLLAGRVPPQGPWELQGILLLSQNELYRQILLLMHLLPQDLLLLKPCQSSYCYCQEVLDRLIQCGLLVAEEVGRAVGDKILAWSLASSSLPP

SEQ ID NO: 1508 - protein, 455 aa, Homo sapiens
LRFLEFPFQHYSSALFPCSSFWRPVLCPLQESKLSPCCVLVRPPLPWCGPGRPPSCAPLFSQKLLFAGSRSQLVQLPVADCMKYRSCADCVLARDPYCAWSVNTSRCVAVGGHSGSLLIQHVMTSDTSGICNLRGSKKGELFHSRRIGLSPGPELEFLFSSSPALLSCTNMHSVFSATTVRPTPKNITVVAGTDLVLPCHLSSNLAHARWTFGGRDLPAEQPGSFLYDARLQALVVMAAQPRHAGAYHCFSEEQGARLAAEGYLVAVVAGPSVTLEARAPLENLGLVWLAVVALGAVCLVLLLLVLSLRRRLREELEKGAKATERTLVYPLELPKEPTSPPFRPCPEPDEKLWDPVGYYYSDGSLKIVPGHARCQPGGGPPSPPPGIPGQPLPSPTRLHLGGGRNSNANGYVRLQLGGEDRGGLGHPLPELADELRRKLQQRQPLPDSNPEESSV

SEQ ID NO: 1509 - protein, 414 aa, Homo sapiens
LRFLEFPFQHYSSALFPCSSFWRPVLCPLQESKLSPCCVLVRPPLPWCGPGRPPSCAPLFSQKLLFAGSRSQLVQLPVADCMKYRSCADCVLARDPYCAWSVNTSRCVAVGGHSGSLLIQHVMTSDTSGICNLRGSKKVRPTPKNITVVAGTDLVLPCHLSSNLAHARWTFGGRDLPAEQPGSFLYDARLQALVVMAAQPRHAGAYHCFSEEQGARLAAEGYLVAVVAGPSVTLEARAPLENLGLVWLAVVALGAVCLVLLLLVLSLRRRLREELEKGAKATERTLVYPLELPKEPTSPPFRPCPEPDEKLWDPVGYYYSDGSLKIVPGHARCQPGGGPPSPPPGIPGQPLPSPTRLHLGGGRNSNANGYVRLQLGGEDRGGLGHPLPELADELRRKLQQRQPLPDSNPEESSV

SEQ ID NO: 1510 - protein, 1258 aa, Homo sapiens
LSVPARKPGSGARAARASAAAVAAAATLTPPTMDSFDLALLQEWDLESLCVYEPDRNALRRKERERRNQETQQDDGTFNSSYSLFSEPYKTNKGDELSNRIQNTLGNYDEMKDFLTDRSNQSHLVGVPKPGVPQTPVNKIDEHFVADSRAQNQPSSICSTTTSTPAAVPVQQSKRGTMGWQKAGHPPSDGQQRATQQGSLRTLLGDGVGRQQPRAKQVCNVEVGLQTQERPPAMAAKHSSSGHCVQNFPPSLASKPSLVQQKPTAYVRPMDGQDQAPDESPKLKSSSETSVHCTSYRGVPASKPEPARAKAKLSKFSIPKQGEESRSGETNSCVEEIIREMTWLPPLSAIQAPGKVEPTKFPFPNKDSQLVSSGHNNPKKGDAEPESPDNGTSNTSMLEDDLKLSSDEEENEQQAAQRTALRALSDSAVVQQPNCRTSVPSSKGSSSSSSSGSSSSSSDSESSSGSDSETESSSSESEGSKPPHFSSPEAEPASSNKWQLDKWLNKVNPHKPPILIQNESHGSESNQYYNPVKEDVQDCGKVPDVCQPSLREKEIKSTCKEEQRPRTANKAPGSKGVKQKSPPAAVAVAVSAAAPPPAVPCAPAENAPAPARRSAGKKPTRRTERTSAGDGANCHRPEEPAAADALGTSVVVPPEPTKTRPCGNNRASHRKELRSSVTCEKRRTRGLSRIVPKSKEFIETESSSSSSSSDSDLESEQEEYPLSKAQTVAASASSGNDQRLKEAAANGGSGPRAPVGSINARTTSDIAKELEEQFYTLVPFGRNELLSPLKDSDEIRSLWVKIDLTLLSRIPEHLPQEPGVLSAPATKDSESAPPSHTSDTPAEKALPKSKRKRKCDNEDDYREIKKSQGEKDSSSRLATSTSNTLSANHCNMNINSVAIPINKNEKMLRSPISPLSDASKHKYTSEDLTSSSRPNGNSLFTSASSSKKPKADSQLQPHGGDLTKAAHNNSENIPLHKSRPQTKPWSPGSNGHRDCKRQKLVFDDMPRSADYFMQEAKRMKHKADAMVEKFGKALNYAEAALSFIECGNAMEQGPMESKSPYTMYSETVELIRYAMRLKTHSGPNATPEDKQLAALCYRCLALLYWRMFRLKRDHAVKYSKALIDYFKNSSKAAQAPSPWGASGKSTGTPSPMSPNPSPASSVGSQGSLSNASALSPSTIVSIPQRIHQMAANHVSITNSILHSYDYWEMADNLAKENREFFNDLDLLMGPVTLHSSMEHLVQYSQQGLHWLRNSAHLS

SEQ ID NO: 1511 - protein, 1274 aa, Homo sapiens
LITCLSRPETGGKFEVDTQRPVCPPSRARAARASAAAVAAAATLTPPTMDSFDLALLQEWDLESLCVYEPDRNALRRKERERRNQETQQDDGTFNSSYSLFSEPYKTNKGDELSNRIQNTLGNYDEMKDFLTDRSNQSHLVGVPKPGVPQTPVNKIDEHFVADSRAQNQPSSICSTTTSTPAAVPVQQSKRGTMGWQKAGHPPSDGQQRATQQGSLRTLLGDGVGRQQPRAKQVCNVEVGLQTQERPPAMAAKHSSSGHCVQNFPPSLASKPSLVQQKPTAYVRPMDGQDQAPDESPKLKSSSETSVHCTSYRGVPASKPEPARAKAKLSKFSIPKQGEESRSGETNSCVEEIIREMTWLPPLSAIQAPGKVEPTKFPFPNKDSQLVSSGHNNPKKGDAEPESPDNGTSNTSMLEDDLKLSSDEEENEQQAAQRTALRALSDSAVVQQPNCRTSVPSSKGSSSSSSSGSSSSSSDSESSSGSDSETESSSSESEGSKPPHFSSPEAEPASSNKWQLDKWLNKVNPHKPPILIQNESHGSESNQYYNPVKEDVQDCGKVPDVCQPSLREKEIKSTCKEEQRPRTANKAPGSKGVKQKSPPAAVAVAVSAAAPPPAVPCAPAENAPAPARRSAGKKPTRRTERTSAGDGANCHRPEEPAAADALGTSVVVPPEPTKTRPCGNNRASHRKELRSSVTCEKRRTRGLSRIVPKSKEFIETESSSSSSSSDSDLESEQEEYPLSKAQTVAASASSGNDQRLKEAAANGGSGPRAPVGSINARTTSDIAKELEEQFYTLVPFGRNELLSPLKDSDEIRSLWVKIDLTLLSRIPEHLPQEPGVLSAPATKDSESAPPSHTSDTPAEKALPKSKRKRKCDNEDDYREIKKSQGEKDSSSRLATSTSNTLSANHCNMNINSVAIPINKNEKMLRSPISPLSDASKHKYTSEDLTSSSRPNGNSLFTSASSSKKPKADSQLQPHGGDLTKAAHNNSENIPLHKSRPQTKPWSPGSNGHRDCKRQKLVFDDMPRSADYFMQEAKRMKHKADAMVEKFGKALNYAEAALSFIECGNAMEQGPMESKSPYTMYSETVELIRYAMRLKTHSGPNATPEDKQLAALCYRCLALLYWRMFRLKRDHAVKYSKALIDYFKNSSKAAQAPSPWGASGKSTGTPSPMSPNPSPASSVGSQGSLSNASALSPSTIVSIPQRIHQMAANHVSITNSILHSYDYWEMADNLAKENREFFNDLDLLMGPVTLHSSMEHLVQYSQQGLHWLRNSAHLS

SEQ ID NO: 1512 - protein, 1299 aa, Homo sapiens
LITCLSRPETGGKFEVDTQRPVCPPSRARAARASAAAVAAAATLTPPTMDSFDLALLQEWDLESLWGEDILNQRNDSLVVEFQSSASRCRSVYEPDRNALRRKERERRNQETQQDDGTFNSSYSLFSEPYKTNKGDELSNRIQNTLGNYDEMKDFLTDRSNQSHLVGVPKPGVPQTPVNKIDEHFVADSRAQNQPSSICSTTTSTPAAVPVQQSKRGTMGWQKAGHPPSDGQQRATQQGSLRTLLGDGVGRQQPRAKQVCNVEVGLQTQERPPAMAAKHSSSGHCVQNFPPSLASKPSLVQQKPTAYVRPMDGQDQAPDESPKLKSSSETSVHCTSYRGVPASKPEPARAKAKLSKFSIPKQGEESRSGETNSCVEEIIREMTWLPPLSAIQAPGKVEPTKFPFPNKDSQLVSSGHNNPKKGDAEPESPDNGTSNTSMLEDDLKLSSDEEENEQQAAQRTALRALSDSAVVQQPNCRTSVPSSKGSSSSSSSGSSSSSSDSESSSGSDSETESSSSESEGSKPPHFSSPEAEPASSNKWQLDKWLNKVNPHKPPILIQNESHGSESNQYYNPVKEDVQDCGKVPDVCQPSLREKEIKSTCKEEQRPRTANKAPGSKGVKQKSPPAAVAVAVSAAAPPPAVPCAPAENAPAPARRSAGKKPTRRTERTSAGDGANCHRPEEPAAADALGTSVVVPPEPTKTRPCGNNRASHRKELRSSVTCEKRRTRGLSRIVPKSKEFIETESSSSSSSSDSDLESEQEEYPLSKAQTVAASASSGNDQRLKEAAANGGSGPRAPVGSINARTTSDIAKELEEQFYTLVPFGRNELLSPLKDSDEIRSLWVKIDLTLLSRIPEHLPQEPGVLSAPATKDSESAPPSHTSDTPAEKALPKSKRKRKCDNEDDYREIKKSQGEKDSSSRLATSTSNTLSANHCNMNINSVAIPINKNEKMLRSPISPLSDASKHKYTSEDLTSSSRPNGNSLFTSASSSKKPKADSQLQPHGGDLTKAAHNNSENIPLHKSRPQTKPWSPGSNGHRDCKRQKLVFDDMPRSADYFMQEAKRMKHKADAMVEKFGKALNYAEAALSFIECGNAMEQGPMESKSPYTMYSETVELIRYAMRLKTHSGPNATPEDKQLAALCYRCLALLYWRMFRLKRDHAVKYSKALIDYFKNSSKAAQAPSPWGASGKSTGTPSPMSPNPSPASSVGSQGSLSNASALSPSTIVSIPQRIHQMAANHVSITNSILHSYDYWEMADNLAKENREFFNDLDLLMGPVTLHSSMEHLVQYSQQGLHWLRNSAHLS

SEQ ID NO: 1513 - protein, 461 aa, Homo sapiens
LDPLVKDKAFSKKNMKVLLRLICFIALLISSLEADKCKEREEKIILVSSANEIDVRPCPLNPNEHKGTITWYKDDSKTPVSTEQASRIHQHKEKLWFVPAKVEDSGHYYCVVRNSSYCLRIKISAKFVENEPNLCYNAQAIFKQKLPVAGDGGLVCPYMEFFKNENNELPKLQWYKDCKPLLLDNIHFSGVKDRLIVMNVAEKHRGNYTCHASYTYLGKQYPITRVIEFITLEENKPTRPVIVSPANETMEVDLGSQIQLICNVTGQLSDIAYWKWNGSVIDEDDPVLGEDYYSVENPANKRRSTLITVLNISEIESRFYKHPFTCFAKNTHGIDAAYIQLIYPVTNFQKHMIGICVTLTVIIVCSVFIYKIFKIDIVLWYRDSCYDFLPIKASDGKTYDAYILYPKTVGEGSTSDCDIFVFKVLPEVLEKQCGYKLFIYGRDDYVGEGMCVMEQSKGLLL

SEQ ID NO: 1514 - protein, 552 aa, Homo sapiens
LDPLVKDKAFSKKNMKVLLRLICFIALLISSLEADKCKEREEKIILVSSANEIDVRPCPLNPNEHKGTITWYKDDSKTPVSTEQASRIHQHKEKLWFVPAKVEDSGHYYCVVRNSSYCLRIKISAKFVENEPNLCYNAQAIFKQKLPVAGDGGLVCPYMEFFKNENNELPKLQWYKDCKPLLLDNIHFSGVKDRLIVMNVAEKHRGNYTCHASYTYLGKQYPITRVIEFITLEENKPTRPVIVSPANETMEVDLGSQIQLICNVTGQLSDIAYWKWNGSVIDEDDPVLGEDYYSVENPANKRRSTLITVLNISEIESRFYKHPFTCFAKNTHGIDAAYIQLIYPVTNFQKHMIGICVTLTVIIVCSVFIYKIFKIDIVLWYRDSCYDFLPIKVLPEVLEKQCGYKLFIYGRDDYVGEDIVEVINENVKKSRRLIIILVRETSGFSWLGGSSEEQIAMYNALVQDGIKVVLLELEKIQDYEKMPESIKFIKQKHGAIRWSGDFTQGPQSAKTRFWKNVRYHMPVQRRSPSSKHQLLSPATKEKLQREAHVPLG

SEQ ID NO: 1515 - protein, 583 aa, Homo sapiens
LDPLVKDKAFSKKNMKVLLRLICFIALLISSLEADKCKEREEKIILVSSANEIDVRPCPLNPNEHKGTITWYKDDSKTPVSTEQASRIHQHKEKLWFVPAKVEDSGHYYCVVRNSSYCLRIKISAKFVENEPNLCYNAQAIFKQKLPVAGDGGLVCPYMEFFKNENNELPKLQWYKDCKPLLLDNIHFSGVKDRLIVMNVAEKHRGNYTCHASYTYLGKQYPITRVIEFITLEENKPTRPVIVSPANETMEVDLGSQIQLICNVTGQLSDIAYWKWNGSVIDEDDPVLGEDYYSVENPANKRRSTLITVLNISEIESRFYKHPFTCFAKNTHGIDAAYIQLIYPVTNFQKHMIGICVTLTVIIVCSVFIYKIFKIDIVLWYRDSCYDFLPIKASDGKTYDAYILYPKTVGEGSTSDCDIFVFKVLPEVLEKQCGYKLFIYGRDDYVGEDIVEVINENVKKSRRLIIILVRETSGFSWLGGSSEEQIAMYNALVQDGIKVVLLELEKIQDYEKMPESIKFIKQKHGAIRWSGDFTQGPQSAKTRFWKNVRYHMPVQRRSPSSKHQLLSPATKEKLQREAHVPLG

SEQ ID NO: 1516 - protein, 411 aa, Homo sapiens
LRGKDCKPLLLDNIHFSGVKDRLIVMNVAEKHRGNYTCHASYTYLGKQYPITRVIEFITLEENKPTRPVIVSPANETMEVDLGSQIQLICNVTGQLSDIAYWKWNGSVIDEDDPVLGEDYYSVENPANKRRSTLITVLNISEIESRFYKHPFTCFAKNTHGIDAAYIQLIYPVTNFQKHMIGICVTLTVIIVCSVFIYKIFKIDIVLWYRDSCYDFLPIKASDGKTYDAYILYPKTVGEGSTSDCDIFVFKVLPEVLEKQCGYKLFIYGRDDYVGEDIVEVINENVKKSRRLIIILVRETSGFSWLGGSSEEQIAMYNALVQDGIKVVLLELEKIQDYEKMPESIKFIKQKHGAIRWSGDFTQGPQSAKTRFWKNVRYHMPVQRRSPSSKHQLLSPATKEKLQREAHVPLG

SEQ ID NO: 1517 - protein, 466 aa, Homo sapiens
LLGLKLTSNRSQVSPWERMAHVGDCTQTPWLPVLVVSLMCSARAEYSNCGENEYYNQTTGLCQECPPCGPGEEPYLSCGYGTKDEDYGCVPCPAEKFSKGGYQICRRHKDCEGFFRATVLTPGDMENDAECGPCLPGYYMLENRPRNIYGMVCYSCLLAPPNTKECVGATSGASANFPGTSGSSTLSPFQHAHKELSGQGHLATALIIAMSTIFIMAIAIVLIIMFYILKTKPSAPACCTSHPGKSVEAQVSKDEEKKEAPDNVVMFSEKDEFEKLTATPAKPTKSENDASSENEQLLSRSVDSDEEPAPDKQGSPELCLLSLVHLAREKSATSNKSAGIQSRRKKILDVYANVCGVVEGLSPTELPFDCLEKTSRMLSSTYNSEKAVVKTWRHLAESFGLKRDEIGGMTDGMQLFDRISTAGYSIPELLTKLVQIERLDAVESLCADILEWAGVVPPASQPHAAS

SEQ ID NO: 1518 - protein, 498 aa, Homo sapiens
LLGLKLTSNRSQVSPWERMAHVGDCTQTPWLPVLVVSLMCSARAEYSNCGENEYYNQTTGLCQECPPCGPGEEPYLSCGYGTKDEDYGCVPCPAEKFSKGGYQICRRHKDCEGFFRATVLTPGDMENDAECGPCLPGYYMLENRPRNIYGMVCYSCLLAPPNTKECVGATSGASANFPGTSGSSTLSPFQHAHKELSGQGHLATALIIAMSTIFIMAIAIVLIIMFYILKTKPSAPGDGPHAPVPCFLDSPSTPPVGEPGCSLPPLSPACCTSHPGKSVEAQVSKDEEKKEAPDNVVMFSEKDEFEKLTATPAKPTKSENDASSENEQLLSRSVDSDEEPAPDKQGSPELCLLSLVHLAREKSATSNKSAGIQSRRKKILDVYANVCGVVEGLSPTELPFDCLEKTSRMLSSTYNSEKAVVKTWRHLAESFGLKRDEIGGMTDGMQLFDRISTAGYSIPELLTKLVQIERLDAVESLCADILEWAGVVPPASQPHAAS

SEQ ID NO: 1519 - protein, 151 aa, Homo sapiens
VKSLQSGEQDTPPMLANDVRHQQEMWGFRKVEGGVVQSLGKSSVEGETDGTISEFREIQRLAAFASFLSHAPPLNARRLLTPPPRRRPRCTPAAAMADVSERTLQLSVLVAFASGVLLGWQANRLRRRYLDWRKRRLQDKLAATQKKLDLA

SEQ ID NO: 1520 - protein, 30 aa, Homo sapiens
LSRLTAGAWNLHTLLGLCISAGAGFSSEPP

SEQ ID NO: 1521 - protein, 154 aa, Homo sapiens
LVRGSPEGFQTFSSCHSVPGTQSNAEYRVVSKTSLNVWSFLSEPDPGMASASTTMHTTTIAEPDPGMSGWPDGRMETSTPTIMDIVVIAGVIAAVAIVLVSLLFVMLRYMYRHKGTYHTNEAKGTEFAESADAALQGDPALQDAGDSSRKEYFI

SEQ ID NO: 1522 - protein, 373 aa, Homo sapiens
LPPPTPTGGDHLLPRRPLSLPPGPAARGSDSSQSMNGLEVAPPGLITNFSLATAEQCGQETPLENMLFASFYLLDFILALVGNTLALWLFIRDHKSGTPANVFLMHLAVADLSCVLVLPTRLVYHFSGNHWPFGEIACRLTGFLFYLNMYASIYFLTCISADRFLAIVHPVKSLKLRRPLYAHLACAFLWVVVAVAMAPLLVSPQTVQTNHTVVCLQLYREKASHHALVSLAVAFTFPFITTVTCYLLIIRSLRQGLRVEKRLKTKAVRMIAIVLAIFLVCFVPYHVNRSVYVLHYRSHGASCATQRILALANRITSCLTSLNGALDPIMYFFVAEKFRHALCNLLCGKRLKGPPPSFEGKTNESSLSAKSEL

SEQ ID NO: 1523 - protein, 379 aa, Homo sapiens
LKHSEAGGNLFRMSKRSWWAGSRKPPREMLKLSGSDSSQSMNGLEVAPPGLITNFSLATAEQCGQETPLENMLFASFYLLDFILALVGNTLALWLFIRDHKSGTPANVFLMHLAVADLSCVLVLPTRLVYHFSGNHWPFGEIACRLTGFLFYLNMYASIYFLTCISADRFLAIVHPVKSLKLRRPLYAHLACAFLWVVVAVAMAPLLVSPQTVQTNHTVVCLQLYREKASHHALVSLAVAFTFPFITTVTCYLLIIRSLRQGLRVEKRLKTKAVRMIAIVLAIFLVCFVPYHVNRSVYVLHYRSHGASCATQRILALANRITSCLTSLNGALDPIMYFFVAEKFRHALCNLLCGKRLKGPPPSFEGKTNESSLSAKSEL

SEQ ID NO: 1524 - protein, 367 aa, Homo sapiens
LSAPVATASGEPAVTMEGISIYTSDNYTEEMGSGDYDSMKEPCFREENANFNKIFLPTIYSIIFLTGIVGNGLVILVMGYQKKLRSMTDKYRLHLSVADLLFVITLPFWAVDAVANWYFGNFLCKAVHVIYTVNLYSSVLILAFISLDRYLAIVHATNSQRPRKLLAEKVVYVGVWIPALLLTIPDFIFANVSEADDRYICDRFYPNDLWVVVFQFQHIMVGLILPGIVILSCYCIIISKLSHSKGHQKRKALKTTVILILAFFACWLPYYIGISIDSFILLEIIKQGCEFENTVHKWISITEALAFFHCCLNPILYAFLGAKFKTSAQHALTSVSRGSSLKILSKGKRGGHSSVSTESESSSFHSS

SEQ ID NO: 1525 - protein, 1878 aa, Homo sapiens
LRQLRMRTGWATPRRPAGLLMLLFWFFDLAEPSGRAANDPFTIVHGNTGKCIKPVYGWIVADDCDETEDKLWKWVSQHRLFHLHSQKCLGLDITKSVNELRMFSCDSSAMLWWKCEHHSLYGAARYRLALKDGHGTAISNASDVWKKGGSEESLCDQPYHEIYTRDGNSYGRPCEFPFLIDGTWHHDCILDEDHSGPWCATTLNYEYDRKWGICLKPENGCEDNWEKNEQFGSCYQFNTQTALSWKEAYVSCQNQGADLLSINSAAELTYLKEKEGIAKIFWIGLNQLYSARGWEWSDHKPLNFLNWDPDRPSAPTIGGSSCARMDAESGLWQSFSCEAQLPYVCRKPLNNTVELTDVWTYSDTRCDAGWLPNNGFCYLLVNESNSWDKAHAKCKAFSSDLISIHSLADVEVVVTKLHNEDIKEEVWIGLKNINIPTLFQWSDGTEVTLTYWDENEPNVPYNKTPNCVSYLGELGQWKVQSCEEKLKYVCKRKGEKLNDASSDKMCPPDEGWKRHGETCYKIYEDEVPFGTNCNLTITSRFEQEYLNDLMKKYDKSLRKYFWTGLRDVDSCGEYNWATVGGRRRAVTFSNWNFLEPASPGGCVAMSTGKSVGKWEVKDCRSFKALSICKKMSGPLGPEEASPKPDDPCPEGWQSFPASLSCYKVFHAERIVRKRNWEEAERFCQALGAHLSSFSHVDEIKEFLHFLTDQFSGQHWLWIGLNKRSPDLQGSWQWSDRTPVSTIIMPNEFQQDYDIRDCAAVKVFHRPWRRGWHFYDDREFIYLRPFACDTKLEWVCQIPKGRTPKTPDWYNPDRAGIHGPPLIIEGSEYWFVADLHLNYEEAVLYCASNHSFLATITSFVGLKAIKNKIANISGDGQKWWIRISEWPIDDHFTYSRYPWHRFPVTFGEECLYMSAKTWLIDLGKPTDCSTKLPFICEKYNVSSLEKYSPDSAAKVQCSEQWIPFQNKCFLKIKPVSLTFSQASDTCHSYGGTLPSVLSQIEQDFITSLLPDMEATLWIGLRWTAYEKINKWTDNRELTYSNFHPLLVSGRLRIPENFFEEESRYHCALILNLQKSPFTGTWNFTSCSERHFVSLCQKYSEVKSRQTLQNASETVKYLNNLYKIIPKTLTWHSAKRECLKSNMQLVSITDPYQQAFLSVQALLHNSSLWIGLFSQDDELNFGWSDGKRLHFSRWAETNGQLEDCVVLDTDGFWKTVDCNDNQPGAICYYSGNETEKEVKPVDSVKCPSPVLNTPWIPFQNCCYNFIITKNRHMATTQDEVHTKCQKLNPKSHILSIRDEKENNFVLEQLLYFNYMASWVMLGITYRNKSLMWFDKTPLSYTHWRAGRPTIKNEKFLAGLSTDGFWDIQTFKVIEEAVYFHQHSILACKIEMVDYKEEYNTTLPQFMPYEDGIYSVIQKKVTWYEALNMCSQSGGHLASVHNQNGQLFLEDIVKRDGFPLWVGLSSHDGSESSFEWSDGSTFDYIPWKGQTSPGNCVLLDPKGTWKHEKCNSVKDGAICYKPTKSKKLSRLTYSSRCPAAKENGSRWIQYKGHCYKSDQALHSFSEAKKLCSKHDHSATIVSIKDEDENKFVSRLMRENNNITMRVWLGLSQHSVDQSWSWLDGSEVTFVKWENKSKSGVGRCSMLIASNETWKKVECEHGFGRVVCKVPLDCPSSTWIQFQDSCYIFLQEAIKVESIEDVRNQCTDHGADMISIHNEEENAFILDTLKKQWKGPDDILLGMFYDTDDASFKWFDNSNMTFDKWTDQDDDEDLVDTCAFLHIKTGEWKKGNCEVSSVEGTLCKTAIPYKRKYLSDNHILISALVIASTVILTVLGAIIWFLYKKHSDSRFTTVFSTAPQSPYNEDCVLVVGEENEYPVQFD

SEQ ID NO: 1526 - protein, 1822 aa, Homo sapiens
LRQLRMRTGWATPRRPAGLLMLLFWFFDLAEPSGRAANDPFTIVHGNTGKCIKPVYGWIVADDCDETEDKLWKWVSQHRLFHLHSQKCLGLDITKSVNELRMFSCDSSAMLWWKCEHHSLYGAARYRLALKDGHGTAISNASDVWKKGGSEESLCDQPYHEIYTRDGNSYGRPCEFPFLIDGTWHHDCILDEDHSGPWCATTLNYEYDRKWGICLKPENGCEDNWEKNEQFGSCYQFNTQTALSWKEAYVSCQNQGADLLSINSAAELTYLKEKEGIAKIFWIGLNQLYSARGWEWSDHKPLNFLNWDPDRPSAPTIGGSSCARMDAESGLWQSFSCEAQLPYVCRKPLNNTVELTDVWTYSDTRCDAGWLPNNGFCYLLVNESNSWDKAHAKCKAFSSDLISIHSLADVEVVVTKLHNEDIKEEVWIGLKNINIPTLFQWSDGTEVTLTYWDENEPNVPYNKTPNCVSYLGELGQWKVQSCEEKLKYVCKRKGEKLNDASSDKMCPPDEGWKRHGETCYKIYEDEVPFGTNCNLTITSRFEQEYLNDLMKKYDKSLRKYFWTGLRDVDSCGEYNWATVGGRRRAVTFSNWNFLEPASPGGCVAMSTGKSVGKWEVKDCRSFKALSICKKMSGPLGPEEASPKPDDPCPEGWQSFPASLSCYKVFHAERIVRKRNWEEAERFCQALGAHLSSFSHVDEIKEFLHFLTDQFSGQHWLWIGLNKRSPDLQGSWQWSDRTPVSTIIMPNEFQQDYDIRDCAAVKVFHRPWRRGWHFYDDREFIYLRPFACDTKLEWVCQIPKGRTPKTPDWYNPDRAGIHGPPLIIEGSEYWFVADLHLNYEEAVLYCASNHSFLATITSFVGLKAIKNKIANISGDGQKWWIRISEWPIDDHFTYSRYPWHRFPVTFGEECLYMSAKTWLIDLGKPTDCSTKLPFICEKYNVSSLEKYSPDSAAKVQCSEQWIPFQNKCFLKIKPVSLTFSQASDTCHSYGGTLPSVLSQIEQDFITSLLPDMEATLWIGLRWTAYEKINKWTDNRELTYSNFHPLLVSGRLRIPENFFEEESRYHCALILNLQKSPFTGTWNFTSCSERHFVSLCQKYSEVKSRQTLQNASETVKYLNNLYKIIPKTLTWHSAKRECLKSNMQLVSITDPYQQAFLSVQALLHNSSLWIGLFSQDDELNFGWSDGKRLHFSRWAETNGQLEDCVVLDTDGFWKTVDCNDNQPGAICYYSGNETEKEVKPVDSVKCPSPVLNTPWIPFQNCCYNFIITKNRHMATTQDEVHTKCQKLNPKSHILSIRDEKENNFVLEQLLYFNYMASWVMLGITYRNKSLMWFDKTPLSYTHWRAGRPTIKNEKFLAGLSTDGFWDIQTFKVIEEAVYFHQHSILACKIEMVDYKEEYNTTLPQFMPYEDGIYSVIQKKVTWYEALNMCSQSGGHLASVHNQNGQLFLEDIVKRDGFPLWVGLSSHDGSESSFEWSDGSTFDYIPWKGQTSPGNCVLLDPKGTWKHEKCNSVKDGAICYKPTKSKKLSRLTYSSRCPAAKENGSRWIQYKGHCYKSDQALHSFSEAKKLCSKHDHSATIVSIKDEDENKFVSRLMRENNNITMRVWLGLSQHSVDCPSSTWIQFQDSCYIFLQEAIKVESIEDVRNQCTDHGADMISIHNEEENAFILDTLKKQWKGPDDILLGMFYDTDDASFKWFDNSNMTFDKWTDQDDDEDLVDTCAFLHIKTGEWKKGNCEVSSVEGTLCKTAIPYKRKYLSDNHILISALVIASTVILTVLGAIIWFLYKKHSDSRFTTVFSTAPQSPYNEDCVLVVGEENEYPVQFD

SEQ ID NO: 1527 - protein, 1727 aa, Homo sapiens
LRQLRMRTGWATPRRPAGLLMLLFWFFDLAEPSGRAANDPFTIVHGNTGKCIKPVYGWIVADDCDETEDKLWKWVSQHRLFHLHSQKCLGLDITKSVNELRMFSCDSSAMLWWKCEHHSLYGAARYRLALKDGHGTAISNASDVWKKGGSEESLCDQPYHEIYTRDGNSYGRPCEFPFLIDGTWHHDCILDEDHSGPWCATTLNYEYDRKWGICLKPENGCEDNWEKNEQFGSCYQFNTQTALSWKEAYVSCQNQGADLLSINSAAELTYLKEKEGIAKIFWIGLNQLYSARGWEWSDHKPLNFLNWDPDRPSAPTIGGSSCARMDAESGLWQSFSCEAQLPYVCRKPLNNTVELTDVWTYSDTRCDAGWLPNNGFCYLLVNESNSWDKAHAKCKAFSSDLISIHSLADVEVVVTKLHNEDIKEEVWIGLKNINIPTLFQWSDGTEVTLTYWDENEPNVPYNKTPNCVSYLGELGQWKVQSCEEKLKYVCKRKGEKLNDASSDKMCPPDEGWKRHGETCYKIYEDEVPFGTNCNLTITSRFEQEYLNDLMKKYDKSLRKYFWTGLRDVDSCGEYNWATVGGRRRAVTFSNWNFLEPASPGGCVAMSTGKSVGKWEVKDCRSFKALSICKKMSGPLGPEEASPKPDDPCPEGWQSFPASLSCYKVFHAERIVRKRNWEEAERFCQALGAHLSSFSHVDEIKEFLHFLTDQFSGQHWLWIGLNKRSPDLQGSWQWSDRTPVSTIIMPNEFQQDYDIRDCAAVKVFHRPWRRGWHFYDDREFIYLRPFACDTKLEWVCQIPKGRTPKTPDWYNPDRAGIHGPPLIIEGSEYWFVADLHLNYEEAVLYCASNHSFLATITSFVGLKAIKNKIANISGDGQKWWIRISEWPIDDHFTYSRYPWHRFPVTFGEECLYMSAKTWLIDLGKPTDCSTKLPFICEKYNVSSLEKYSPDSAAKVQCSEQWIPFQNKCFLKIKPVSLTFSQASDTCHSYGGTLPSVLSQIEQDFITSLLPDMEATLWIGLRWTAYEKINKWTDNRELTYSNFHPLLVSGRLRIPENFFEEESRYHCALILNLQKSPFTGTWNFTSCSERHFVSLCQKYSEVKSRQTLQNASETVKYLNNLYKIIPKTLTWHSAKRECLKSNMQLVSITDPYQQAFLSVQALLHNSSLWIGLFSQDDELNFGWSDGKRLHFSRWAETNGQLEDCVVLDTDGFWKTVDCNDNQPGAICYYSGNETEKEVKPVDSVKCPSPVLNTPWIPFQNCCYNFIITKNRHMATTQDEVHTKCQKLNPKSHILSIRDEKENNFVLEQLLYFNYMASWVMLGITYRNKSLMWFDKTPLSYTHWRAGRPTIKNEKFLAGLSTDGFWDIQTFKVIEEAVYFHQHSILACKIEMVDYKEEYNTTLPQFMPYEDGIYSVIQKKVTWYEALNMCSQSGGHLASVHNQNGQLFLEDIVKRDGFPLWVGLSSHDGSESSFEWSDGSTFDYIPWKGQTSPGNCVLLDPKGTWKHEKCNSVKDGAICYKPTKSKKLSRLTYSSRCPAAKENGSRWIQYKGHCYKSDQALHSFSEAKKLCSKHDHSATIVSIKDEDENKFVSRLMRENNNITMRVWLGLSQHSVDQSWSWLDGSEVTFVKWENKSKSGVGRCSMLIASNETWKKVECEHGFGRVVCKVPLGPDYTAIAIIVATLSILVLMGGLIWFLFQRHRLHLAGFSSVRYAQGVNEDEIMLPSFHD

SEQ ID NO: 1528 - protein, 720 aa, Homo sapiens
VRPRTRPEGLRQLRMRTGWATPRRPAGLLMLLFWFFDLAEPSGRAANDPFTIVHGNTGKCIKPVYGWIVADDCDETEDKLWKWVSQHRLFHLHSQKCLGLDITKSVNELRMFSCDSSAMLWWKCEHHSLYGAARYRLALKDGHGTAISNASDVWKKGGSEESLCDQPYHEIYTRDGNSYGRPCEFPFLIDGTWHHDCILDEDHSGPWCATTLNYEYDRKWGICLKPENGCEDNWEKNEQFGSCYQFNTQTALSWKEAYVSCQNQGADLLSINSAAELTYLKEKEGIAKIFWIGLNQLYSARGWEWSDHKPLNFLNWDPDRPSAPTIGGSSCARMDAESGLWQSFSCEAQLPYVCRKPLNNTVELTDVWTYSDTRCDAGWLPNNGFCYLLVNESNSWDKAHAKCKAFSSDLISIHSLADVEVVVTKLHNEDIKEEVWIGLKNINIPTLFQWSDGTEVTLTYWDENEPNVPYNKTPNCVSYLGELGQWKVQSCEEKLKYVCKRKGEKLNDASSDKMCPPDEGWKRHGETCYKIYEDEVPFGTNCNLTITSRFEQEYLNDLMKKYDKSLRKYFWTGLRDVDSCGEYNWATVGGRRRAVTFSNWNFLEPASPGGCVAMSTGKSVGKWEVKDCRSFKALSICKKMSGPLGPEEASPKPDDPCPEGWQSFPASLSCYKVFHAERIVRKRNWEEAERFCQALGAHLSSFSHVDEIKEFLHFLTDQFR

SEQ ID NO: 1529 - protein, 1141 aa, Homo sapiens
VSRSHVTLVSWSVQLPPASELPDPNTKQSECRAECKTLKTLQSKVLIPEALQNMEIKDQGAQMEPLLPTRNDEEAVVDRGGTRSILKTHFEKEDLEGHRTLFIGVHVPLGGRKSHRRHRHRGHKHRKRDRERDSGLEDGRESPSFDTPSQRVQFILGTEDDDEEHIPHDLFTELDEICWREGEDAEWRETARWLKFEEDVEDGGERWSKPYVATLSLHSLFELRSCILNGTVLLDMHANTLEEIADMVLDQQVSSGQLNEDVRHRVHEALMKQHHHQNQKKLTNRIPIVRSFADIGKKQSEPNSMDKNAGQVVSPQSAPACVENKNDVSRENSTVDFSKVDLHFMKKIPPGAEASNILVGELEFLDRTVVAFVRLSPAVLLQGLAEVPIPTRFLFILLGPLGKGQQYHEIGRSIATLMTDEVFHDVAYKAKDRNDLVSGIDEFLDQVTVLPPGEWDPSIRIEPPKNVPSQEKRKIPAVPNGTAAHGEAEPHGGHSGPELQRTGRIFGGLILDIKRKAPYFWSDFRDAFSLQCLASFLFLYCACMSPVITFGGLLGEATEGRISAIESLFGASMTGIAYSLFGGQPLTILGSTGPVLVFEKILFKFCKEYGLSYLSLRASIGLWTATLCIILVATDASSLVCYITRFTEEAFASLICIIFIYEALEKLFELSEAYPINMHNDLELLTQYSCNCVEPHNPSNGTLKEWRESNISASDIIWENLTVSECKSLHGEYVGRACGHDHPYVPDVLFWSVILFFSTVTLSATLKQFKTSRYFPTKVRSIVSDFAVFLTILCMVLIDYAIGIPSPKLQVPSVFKPTRDDRGWFVTPLGPNPWWTVIAAIIPALLCTILIFMDQQITAVIINRKEHKLKKGCGYHLDLLMVAVMLGVCSIMGLPWFVAATVLSITHVNSLKLESECSAPGEQPKFLGIREQRVTGLMIFILMGSSVFMTSILKFIPMPVLYGVFLYMGASSLKGIQFFDRIKLFWMPAKHQPDFIYLRHVPLRKVHLFTIIQMSCLGLLWIIKVSRAAIVFPMMVLALVFVRKLMDLLFTKRELSWLDDLMPESKKKKLEDAEKEEEQSMLAMEDEGTVQLPLEGHYRDDPSVINISDEMSKTALWRNLLITADNSKDKESSFPSKSSPS

SEQ ID NO: 1530 - protein, 1134 aa, Homo sapiens
LKTLQSKVLIPEALQNMEIKDQGAQMEPLLPTRNDEEAVVDRGGTRSILKTHFEKEDLEGHRTLFIGVHVPLGGRKSHRRHRHRGHKHRKRDRERDSGLEDGRESPSFDTPSQRVQFILGTEDDDEEHIPHDLFTELDEICWREGEDAEWRETARWLKFEEDVEDGGERWSKPYVATLSLHSLFELRSCILNGTVLLDMHANTLEEIADMVLDQQVSSGQLNEDVRHRVHEALMKQHHHQNQKKLTNRIPIVRSFADIGKKQSEPNSMDKNAGQVVSPQSAPACVENKNDVSRENSTVDFSKGLGGQQKGHTSPCGMKQRHEKGPPHQQEREVDLHFMKKIPPGAEASNILVGELEFLDRTVVAFVRLSPAVLLQGLAEVPIPTRFLFILLGPLGKGQQYHEIGRSIATLMTDEVFHDVAYKAKDRNDLVSGIDEFLDQVTVLPPGEWDPSIRIEPPKNVPSQEKRKIPAVPNGTAAHGEAEPHGGHSGPELQRTGRIFGGLILDIKRKAPYFWSDFRDAFSLQCLASFLFLYCACMSPVITFGGLLGEATEGRISAIESLFGASMTGIAYSLFGGQPLTILGSTGPVLVFEKILFKFCKEYGLSYLSLRASIGLWTATLCIILVATDASSLVCYITRFTEEAFASLICIIFIYEALEKLFELSEAYPINMHNDLELLTQYSCNCVEPHNPSNGTLKEWRESNISASDIIWENLTVSECKSLHGEYVGRACGHDHPYVPDVLFWSVILFFSTVTLSATLKQFKTSRYFPTKVRSIVSDFAVFLTILCMVLIDYAIGIPSPKLQVPSVFKPTRDDRGWFVTPLGPNPWWTVIAAIIPALLCTILIFMDQQITAVIINRKEHKLKKGCGYHLDLLMVAVMLGVCSIMGLPWFVAATVLSITHVNSLKLESECSAPGEQPKFLGIREQRVTGLMIFILMGSSVFMTSILKFIPMPVLYGVFLYMGASSLKGIQFFDRIKLFWMPAKHQPDFIYLRHVPLRKVHLFTIIQMSCLGLLWIIKVSRAAIVFPMMVLALVFVRKLMDLLFTKRELSWLDDLMPESKKKKLEDAEKEEEQSMLAMEDEGTVQLPLEGHYRDDPSVINISDEMSKTALWRNLLITADNSKDKESSFPSKSSPS

SEQ ID NO: 1531 - protein, 1070 aa, Homo sapiens
LKTLQSKVLIPEALQNMEIKDQGAQMEPLLPTRNDEEAVVDRGGTRSILKTHFEKEDLEGHRTLFIGVHVPLGGRKSHRRHRHRGHKHRKRDRERDSGLEDGRESPSFDTPSQRVQFILGTEDDDEEHIPHDLFTELDEICWREGEDAEWRETARWLKFEEDVEDGGERWSKPYVATLSLHSLFELRSCILNGTVLLDMHANTLEEIADMVLDQQVSSGQLNEDVRHRVHEALMKQHHHQNQKKLTNRIPIVRSFADIGKKQSEPNSMDKNAGQVVSPQSAPACVENKNDVSRENSTVDFSKGLGGQQKGHTSPCGMKQRHEKGPPHQQEREVDLHFMKKIPPGAEASNILVGELEFLDRTVVAFVRLSPAVLLQGLAEVPIPTRFLFILLGPLGKGQQYHEIGRSIATLMTDEVFHDVAYKAKDRNDLVSGIDEFLDQVTVLPPGEWDPSIRIEPPKNVPSQEKRKIPAVPNGTAAHGEAEPHGGHSGPELQRTGRIFGGLILDIKRKAPYFWSDFRDAFSLQCLASFLFLYCACMSPVITFGGLLGEATEGRISAIESLFGASMTGIAYSLFGGQPLTILGSTGPVLVFEKILFKFCKEYGLSYLSLRASIGLWTATLCIILVATDASSLVCYITRFTEEAFASLICIIFIYEALEKLFELSEAYPINMHNDLELLTQYSCNCVEPHNPSNGTLKEWRESNISASDIIWENLTVSECKSLHGEYVGRACGHDHPYVPDVLFWSVILFFSTVTLSATLKQFKTSRYFPTKVRSIVSDFAVFLTILCMVLIDYAIGIPSPKLQVPSVFKPTRDDRGWFVTPLGPNPWWTVIAAIIPALLCTILIFMDQQITAVIINRKEHKLKKGCGYHLDLLMVAVMLGVCSIMGLPWFVAATVLSITHVNSLKLESECSAPGEQPKFLGIREQRVTGLMIFILMGSSVFMTSILKFIPMPVLYGVFLYMGASSLKGIQFFDRIKLFWMPAKHQPDFIYLRHVPLRKVHLFTIIQMSCLGLLWIIKVSRAAIVFPMMVLALVFVRKLMDLLFTKRELSWLDDLMPESKKKKLEDAEKEH

SEQ ID NO: 1532 - protein, 1122 aa, Homo sapiens
LKTLQSKVLIPEALQNMEIKDQGAQMEPLLPTRNDEEAVVDRGGTRSILKTHFEKEDLEGHRTLFIGVHVPLGGRKSHRRHRHRGHKHRKRDRERDSGLEDGRESPSFDTPSQRVQFILGTEDDDEEHIPHDLFTELDEICWREGEDAEWRETARWLKFEEDVEDGGERWSKPYVATLSLHSLFELRSCILNGTVLLDMHANTLEEIADMVLDQQVSSGQLNEDVRHRVHEALMKQHHHQNQKKLTNRIPIVRSFADIGKKQSEPNSMDKNAGQVVSPQSAPACVENKNDVSRENSTVDFSKVDLHFMKKIPPGAEASNILVGELEFLDRTVVAFVRLSPAVLLQGLAEVPIPTRFLFILLGPLGKGQQYHEIGRSIATLMTDEVFHDVAYKAKDRNDLVSGIDEFLDQVTVLPPGEWDPSIRIEPPKNVPSQEKRKIPAVPNGTAAHGEAEPHGGHSGPELQRTGRIFGGLILDIKRKAPYFWSDFRDAFSLQCLASFLFLYCACMSPVITFGGLLGEATEGRISAIESLFGASMTGIAYSLFGGQPLTILGSTGPVLVFEKILFKFCKEYGLSYLSLRASIGLWTATLCIILVATDASSLVCYITRFTEEAFASLICIIFIYEALEKLFELSEAYPINMHNDLELLTQYSCNCVEPHNPSNGTLKEWRESNISASDIIWENLTVSECKSLHGEYVGRACGHDHPYVPDVLFWSVILFFSTVTLSATLKQFKTSRYFPTKVRSIVSDFAVFLTILCMVLIDYAIGIPSPKLQVPSVFKPTRDDRGWFVTPLGPNPWWTVIAAIIPALLCTILIFMDQQITAVIINRKEHKLKKGCGYHLDLLMVAVMLGVCSIMGLPWFVAATVLSITHVNSLKLESECSAPGEQPKFLGIREQRVTGLMIFILMGSSVFMTSILKFIPMPVLYGVFLYMGASSLKGIQFFDRIKLFWMPAKHQPDFIYLRHVPLRKVHLFTIIQMSCLGLLWIIKVSRAAIVFPMMVLALVFVRKLMDLLFTKRELSWLDDLMPESKKKKLEDAEKEEEQSMLAMEDEGTVQLPLEGHYRDDPSVINISDEMSKTALWRNLLITADNSKDKESSFPSKSIESRKEKKADSGKGVDRETCL

SEQ ID NO: 1533 - protein, 655 aa, Homo sapiens
LLSWSCWCTSGLLLHCSLIFGGLILDIKRKAPYFWSDFRDAFSLQCLASFLFLYCACMSPVITFGGLLGEATEGRISAIESLFGASMTGIAYSLFGGQPLTILGSTGPVLVFEKILFKFCKEYGLSYLSLRASIGLWTATLCIILVATDASSLVCYITRFTEEAFASLICIIFIYEALEKLFELSEAYPINMHNDLELLTQYSCNCVEPHNPSNGTLKEWRESNISASDIIWENLTVSECKSLHGEYVGRACGHDHPYVPDVLFWSVILFFSTVTLSATLKQFKTSRYFPTKVRSIVSDFAVFLTILCMVLIDYAIGIPSPKLQVPSVFKPTRDDRGWFVTPLGPNPWWTVIAAIIPALLCTILIFMDQQITAVIINRKEHKLKKGCGYHLDLLMVAVMLGVCSIMGLPWFVAATVLSITHVNSLKLESECSAPGEQPKFLGIREQRVTGLMIFILMGSSVFMTSILKFIPMPVLYGVFLYMGASSLKGIQFFDRIKLFWMPAKHQPDFIYLRHVPLRKVHLFTIIQMSCLGLLWIIKVSRAAIVFPMMVLALVFVRKLMDLLFTKRELSWLDDLMPESKKKKLEDAEKEEEQSMLAMEDEGTVQLPLEGHYRDDPSVINISDEMSKTALWRNLLITADNSKDKESSFPSKSSPS

SEQ ID NO: 1534 - protein, 1151 aa, Homo sapiens
LIKRLRVSREQRAHSAVASCPRGGAAGRRARPVPGVGPGAAARGGEGGCGSSSAAASDPARSAGRPLQVPAPLPVRPPMAAAGQLCLLYLSAGLLSRLGAAFNLDTREDNVIRKYGDPGSLFGFSLAMHWQLQPEDKRLLLVGAPRAEALPLQRANRTGGLYSCDITARGPCTRIEFDNDADPTSESKEDQWMGVTVQSQGPGGKVVTCAHRYEKRQHVNTKQESRDIFGRCYVLSQNLRIEDDMDGGDWSFCDGRLRGHEKFGSCQQGVAATFTKDFHYIVFGAPGTYNWKGIVRVEQKNNTFFDMNIFEDGPYEVGGETEHDESLVPVPANSYLGFSLDSGKGIVSKDEITFVSGAPRANHSGAVVLLKRDMKSAHLLPEHIFDGEGLASSFGYDVAVVDLNKDGWQDIVIGAPQYFDRDGEVGGAVYVYMNQQGRWNNVKPIRLNGTKDSMFGIAVKNIGDINQDGYPDIAVGAPYDDLGKVFIYHGSANGINTKPTQVLKGISPYFGYSIAGNMDLDRNSYPDVAVGSLSDSVTIFRSRPVINIQKTITVTPNRIDLRQKTACGAPSGICLQVKSCFEYTANPAGYNPSISIVGTLEAEKERRKSGLSSRVQFRNQGSEPKYTQELTLKRQKQKVCMEETLWLQDNIRDKLRPIPITASVEIQEPSSRRRVNSLPEVLPILNSDEPKTAHIDVHFLKEGCGDDNVCNSNLKLEYKFCTREGNQDKFSYLPIQKGVPELVLKDQKDIALEITVTNSPSNPRNPTKDGDDAHEAKLIATFPDTLTYSAYRELRAFPEKQLSCVANQNGSQADCELGNPFKRNSNVTFYLVLSTTEVTFDTPDLDINLKLETTSNQDNLAPITAKAKVVIELLLSVSGVAKPSQVYFGGTVVGEQAMKSEDEVGSLIEYEFRVINLGKPLTNLGTATLNIQWPKEISNGKWLLYLVKVESKGLEKVTCEPQKEINSLNLTESHNSRKKREITEKQIDDNRKFSLFAERKYQTLNCSVNVNCVNIRCPLRGLDSKASLILRSRLWNSTFLEEYSKLNYLDILMRAFIDVTAAAENIRLPNAGTQVRVTVFPSKTVAQYSGVPWWIILVAILAGILMLALLVFILWKCGFFKRNKKDHYDATYHKAEIHAQPSDKERLTSDA

SEQ ID NO: 1535 - protein, 1007 aa, Homo sapiens
LLVGAPRAEALPLQRANRTGGLYSCDITARGPCTRIEFDNDADPTSESKEDQWMGVTVQSQGPGGKVVTCAHRYEKRQHVNTKQESRDIFGRCYVLSQNLRIEDDMDGGDWSFCDGRLRGHEKFGSCQQGVAATFTKDFHYIVFGAPGTYNWKGLLFLTSVSYTDPDQFVYKTRPPREQPDTFPDVMMNSYLGFSLDSGKGIVSKDEITFVSGAPRANHSGAVVLLKRDMKSAHLLPEHIFDGEGLASSFGYDVAVVDLNKDGWQDIVIGAPQYFDRDGEVGGAVYVYMNQQGRWNNVKPIRLNGTKDSMFGIAVKNIGDINQDGYPDIAVGAPYDDLGKVFIYHGSANGINTKPTQVLKGISPYFGYSIAGNMDLDRNSYPDVAVGSLSDSVTIFRSRPVINIQKTITVTPNRIDLRQKTACGAPSGICLQVKSCFEYTANPAGYNPSISIVGTLEAEKERRKSGLSSRVQFRNQGSEPKYTQELTLKRQKQKVCMEETLWLQDNIRDKLRPIPITASVEIQEPSSRRRVNSLPEVLPILNSDEPKTAHIDVHFLKEGCGDDNVCNSNLKLEYKFCTREGNQDKFSYLPIQKGVPELVLKDQKDIALEITVTNSPSNPRNPTKDGDDAHEAKLIATFPDTLTYSAYRELRAFPEKQLSCVANQNGSQADCELGNPFKRNSNVTFYLVLSTTEVTFDTPDLDINLKLETTSNQDNLAPITAKAKVVIELLLSVSGVAKPSQVYFGGTVVGEQAMKSEDEVGSLIEYEFRVINLGKPLTNLGTATLNIQWPKEISNGKWLLYLVKVESKGLEKVTCEPQKEINSLNLTESHNSRKKREITEKQIDDNRKFSLFAERKYQTLNCSVNVNCVNIRCPLRGLDSKASLILRSRLWNSTFLEEYSKLNYLDILMRAFIDVTAAAENIRLPNAGTQVRVTVFPSKTVAQYSGVPWWIILVAILAGILMLALLVFILWKCGFFKRNKKDHYDATYHKAEIHAQPSDKERLTSDA

SEQ ID NO: 1536 - protein, 596 aa, Homo sapiens
LLTSTSARAAAAIAAAEEPAGSPSVMTRAGDHNRQRGCCGSLADYLTSAKFLLYLGHSLSTWGDRMWHFAVSVFLVELYGNSLLLTAVYGLVVAGSVLVLGAIIGDWVDKNARLKVAQTSLVVQNVSVILCGIILMMVFLHKHELLTMYHGWVLTSCYILIITIANIANLASTATAITIQRDWIVVVAGEDRSKLANMNATIRRIDQLTNILAPMAVGQIMTFGSPVIGCGFISGWNLVSMCVEYVLLWKVYQKTPALAVKAGLKEEETELKQLNLHKDTEPKPLEGTHLMGVKDSNIHELEHEQEPTCASQMAEPFRTFRDGWVSYYNQPVFLAGMGLAFLYMTVLGFDCITTGYAYTQGLSGSILSILMGASAITGIMGTVAFTWLRRKCGLVRTGLISGLAQLSCLILCVISVFMPGSPLDLSVSPFEDIRSRFIQGESITPTKIPEITTEIYMSNGSNSANIVPETSPESVPIISVSLLFAGVIAARIGLWSFDLTVTQLLQENVIESERGIINGVQNSMNYLLDLLHFIMVILAPNPEAFGLLVLISVSFVAMGHIMYFRFAQNTLGNKLFACGPDAKEVRKENQANTSVV

SEQ ID NO: 1537 - protein, 158 aa, Homo sapiens
LLTSTSARAAAAIAAAEEPAGSPSVMTRAGDHNRQRGCCGSLADYLTSAKFLLYLGHSLSTWGDRMWHFAVSVFLVELYGNSLLLTAVYGLVVAGSVLVLGAIIGDWVDKNARLKVAQTSLVVQNVSVILCGIILMMVFLHKHELLTMYHGWVLVSSQ

SEQ ID NO: 1538 - protein, 68 aa, Homo sapiens
VSPHCVFFSFYPKNGAVSTLAFLSPGWERGWCAEWFAFFSLELVSLFFFFFFFSFFRLSAVRAGLPGP

SEQ ID NO: 1539 - protein, 418 aa, Homo sapiens
VGRQVLGGRRPPRPAKRRMGKNPVRPPRALPPVPSQDDIPLSRPKKKKPRTKNTPASASLEGLAQTAGRRPSEGNEPSTKELKEHPEAPVQRRQKKTRLPLELETSSTQKKSSSSSLLRNENGIDAEPAEEAVIQKPRRKTKKTQPAELQYANELGVEDEDIITDEQTTVEQQSVFTAPTGISQPVGKVFVEKSRRFQAADRSELIKTTENIDVSMDVKPSWTTRDVALTVHRAFRMIGLFSHGFLAGCAVWNIVVIYVLAGDQLSNLSNLLQQYKTLAYPFQSLLYLLLALSTISAFDRIDFAKISVAIRNFLALDPTALASFLYFTALILSLSQQMTSDRIHLYTPSSVNGSLWEAGIEEQILQPWIVVNLVVALLVGLSWLFLSYRPGMDLSEELMFSSEVEEYPDKEKEIKASS

SEQ ID NO: 1540 - protein, 418 aa, Homo sapiens
VGRQVLGGRRPPRPAKRRMGKNPVRPPRALPPVPSIDDIPLSRPKKKKPRTKNTPASASLEGLAQTAGRRPSEGNEPSTKELKEHPEAPVQRRQKKTRLPLELETSSTQKKSSSSSLLRNENGIDAEPAEEAVIQKPRRKTKKTQPAELQYANELGVEDEDIITDEQTTVEQQSVFTAPTGISQPVGKVFVEKSRRFQAADRSELIKTTENIDVSMDVKPSWTTRDVALTVHRAFRMIGLFSHGFLAGCAVWNIVVIYVLAGDQLSNLSNLLQQYKTLAYPFQSLLYLLLALSTISAFDRIDFAKISVAIRNFLALDPTALASFLYFTALILSLSQQMTSDRIHLYTPSSVNGSLWEAGIEEQILQPWIVVNLVVALLVGLSWLFLSYRPGMDLSEELMFSSEVEEYPDKEKEIKASS

SEQ ID NO: 1541 - protein, 535 aa, Homo sapiens
LAGPGMTSSLQRPWRVPWLPWTILLVSTAAASQNQERLCAFKDPYQQDLGIGESRISHENGTILCSKGSTCYGLWEKSKGDINLVKQGCWSHIGDPQECHYEECVVTTTPPSIQNGTYRFCCCSTDLCNVNFTENFPPPDTTPLSPPHSFNRDETIIIALASVSVLAVLIVALCFGYRMLTGDRKQGLHSMNMMEAAASEPSLDLDNLKLLELIGRGRYGAVYKGSLDERPVAVKVFSFANRQNFINEKNIYRVPLMEHDNIARFIVGDERVTADGRMEYLLVMEYYPNGSLCKYLSLHTSDWVSSCRLAHSVTRGLAYLHTELPRGDHYKPAISHRDLNSRNVLVKNDGTCVISDFGLSMRLTGNRLVRPGEEDNAAISEVGTIRYMAPEVLEGAVNLRDCESALKQVDMYALGLIYWEIFMRCTDLFPGESVPEYQMAFQTEVGNHPTFEDMQVLVSREKQRPKFPEAWKENSLAVRSLKETIEDCWDQDAEARLTAQCAEERMAELMMIWERNKSVSPTVNPMSTAMQNERR

SEQ ID NO: 1542 - protein, 1043 aa, Homo sapiens
LAGPGMTSSLQRPWRVPWLPWTILLVSTAAASQNQERLCAFKDPYQQDLGIGESRISHENGTILCSKGSTCYGLWEKSKGDINLVKQGCWSHIGDPQECHYEECVVTTTPPSIQNGTYRFCCCSTDLCNVNFTENFPPPDTTPLSPPHSFNRDETIIIALASVSVLAVLIVALCFGYRMLTGDRKQGLHSMNMMEAAASEPSLDLDNLKLLELIGRGRYGAVYKGSLDERPVAVKVFSFANRQNFINEKNIYRVPLMEHDNIARFIVGDERVTADGRMEYLLVMEYYPNGSLCKYLSLHTSDWVSSCRLAHSVTRGLAYLHTELPRGDHYKPAISHRDLNSRNVLVKNDGTCVISDFGLSMRLTGNRLVRPGEEDNAAISEVGTIRYMAPEVLEGAVNLRDCESALKQVDMYALGLIYWEIFMRCTDLFPGESVPEYQMAFQTEVGNHPTFEDMQVLVSREKQRPKFPEAWKENSLAVRSLKETIEDCWDQDAEARLTAQCAEERMAELMMIWERNKSVSPTVNPMSTAMQNERNLSHNRRVPKIGPYPDYSSSSYIEDSIHHTDSIVKNISSEHSMSSTPLTIGEKNRNSINYERQQAQARIPSPETSVTSLSTNTTTTNTTGLTPSTGMTTISEMPYPDETNLHTTNVAQSIGPTPVCLQLTEEDLETNKLDPKEVDKNLKESSDENLMEHSLKQFSGPDPLSSTSSSLLYPLIKLAVEATGQQDFTQTANGQACLIPDVLPTQIYPLPKQQNLPKRPTSLPLNTKNSTKEPRLKFGSKHKSNLKQVETGVAKMNTINAAEPHVVTVTMNGVAGRNHSVNSHAATTQYANGTVLSGQTTNIVTHRAQEMLQNQFIGEDTRLNINSSPDEHEPLLRREQQAGHDEGVLDRLVDRRERPLEGGRTNSNNNNSNPCSEQDVLAQGVPSTAADPGPSKPRRAQRPNSLDLSATNVLDGSSIQIGESTQDGKSGSGEKIKKRVKTPYSLKRWRPSTWVISTESLDCEVNNNGSNRAVHSKSSTAVYLAEGGTATTMVSKDIGMNCL

SEQ ID NO: 1543 - protein, 173 aa, Homo sapiens
LFLANMKSGLWYFFLFCLRIKVLTGEINGSANYEMFIFHNGGVQILCKYPDIVQQFKMQLLKGGQILCDLTKTKGSGNTVSIKSLKFCHSQLSNNSVSFFLYNLDHSHANYYFCNLSIFDPPPFKVTLTGGYLHIYESQLCCQLKFWLPIGCAAFVVVCILGCILICWLTKKM

SEQ ID NO: 1544 - protein, 204 aa, Homo sapiens
LFLANMKSGLWYFFLFCLRIKVLTGEINGSANYEMFIFHNGGVQILCKYPDIVQQFKMQLLKGGQILCDLTKTKGSGNTVSIKSLKFCHSQLSNNSVSFFLYNLDHSHANYYFCNLSIFDPPPFKVTLTGGYLHIYESQLCCQLKFWLPIGCAAFVVVCILGCILICWLTKKKYSSSVHDPNGEYMFMRAVNTAKKSRLTDVTL

SEQ ID NO: 1545 - protein, 39 aa, Homo sapiens
LTALGLNLVASGGTAKALRDAGLAVSTILFICFSEMSLS

SEQ ID NO: 1546 - protein, 397 aa, Homo sapiens
VKTSVATPITAGHSCSSGGVLQVKSPATQSGFKFTSKMEDFNMESDSFEDFWKGEDLSNYSYSSTLPPFLLDAAPCEPESLEINKYFVVIIYALVFLLSLLGNSLVMLVILYSRVGRSVTDVYLLNLALADLLFALTLPIWAASKVNGWIFGTFLCKVVSLLKEVNFYSGILLLACISVDRYLAIVHATRTLTQKRYLVKFICLSIWGLSLLLALPVLLFRRTVYSSNVSPACYEDMGNNTANWRMLLRILPQSFGFIVPLLIMLFCYGFTLRTLFKAHMGQKHRAMRVIFAVVLIFLLCWLPYNLVLLADTLMRTQVIQETCERRNHIDRALDATEILGILHSCLNPLIYAFIGQKFRHGLLKILAIHGLISKDSLPKDSRPSFVGSSSGHTSTTL

SEQ ID NO: 1547 - protein, 376 aa, Homo sapiens
LTAAPTVGHTWPVLQLDQTIAETEEDMSNITDPQMWDFDDLNFTGMPPADEDYSPCMLETETLNKYVVIIAYALVFLLSLLGNSLVMLVILYSRVGRSVTDVYLLNLALADLLFALTLPIWAASKVNGWIFGTFLCKVVSLLKEVNFYSGILLLACISVDRYLAIVHATRTLTQKRHLVKFVCLGCWGLSMNLSLPFFLFRQAYHPNNSSPVCYEVLGNDTAKWRMVLRILPHTFGFIVPLFVMLFCYGFTLRTLFKAHMGQKHRAMRVIFAVVLIFLLCWLPYNLVLLADTLMRTQVIQESCERRNNIGRALDATEILGFLHSCLNPIIYAFIGQNFRHGFLKILAMHGLVSKEFLARHRVTSYTSSSVNVSSNL

SEQ ID NO: 1548 - protein, 68 aa, Homo sapiens
LQSHSSPEGKEEPEPLSPELEYIPRKRGKNPMKAVGLACSNHLSSFMIVSSSSPSSLSSSSSSPPVIS

SEQ ID NO: 1549 - protein, 855 aa, Homo sapiens
LRLQCRAQEPCAAQSSCWRGIEARLRGFGSGRWLCSAGRERARPRGPSPPDPPPPRSRPLGDSSGCSGGSPGPGTRGPGAMRASLLLSVLRPAGPVAVGISLGFTLSLLSVTWVEEPCGPGPPQPGDSELPPRGNTNAARRPNSVQPGAEREKPGAGEGAGENWEPRVLPYHPAQPGQAAKKAVRTRYISTELGIRQRLLVAVLTSQTTLPTLGVAVNRTLGHRLERVVFLTGARGRRAPPGMAVVTLGEERPIGHLHLALRHLLEQHGDDFDWFFLVPDTTYTEAHGLARLTGHLSLASAAHLYLGRPQDFIGGEPTPGRYCHGGFGVLLSRMLLQQLRPHLEGCRNDIVSARPDEWLGRCILDATGVGCTGDHEGVHYSHLELSPGEPVQEGDPHFRSALTAHPVRDPVHMYQLHKAFARAELERTYQEIQELQWEIQNTSHLAVDGDQAAAWPVGIPAPSRPASRFEVLRWDYFTEQHAFSCADGSPRCPLRGADRADVADVLGTALEELNRRYHPALRLQKQQLVNGYRRFDPARGMEYTLDLQLEALTPQGGRRPLTRRVQLLRPLSRVEILPVPYVTEASRLTVLLPLAAAERDLAPGFLEAFATAALEPGDAAAALTLLLLYEPRQAQRVAHADVFAPVKAHVAELERRFPGARVPWLSVQTAAPSPLRLMDLLSKKHPLDTLFLLAGPDTVLTPDFLNRCRMHAISGWQAFFPMHFQAFHPAVAPPQGPGPPELGRDTGRFDRQAASEACFYNSDYVAARGRLAAASEQEEELLESLDVYELFLHFSSLHVLRAVEPALLQRYRAQTCSARLSEDLYHRCLQSVLEGLGSRTQLAMLLFEQEQGNST

SEQ ID NO: 1550 - protein, 1234 aa, Homo sapiens
LAMANGVIPPPGGASPLPQVRVPLEEPPLSPDVEEEDDDLGKTLAVSRFGDLISKPPAWDPEKPSRSYSERDFEFHRHTSHHTHHPLSARLPPPHKLRRLPPTSARHTRRKRKKEKTSAPPSEGTPPIQEEGGAGVDEEEEEEEEEEGESEAEPVEPPHSGTPQKAKFSIGSDEDDSPGLPGRAAVTKPLPSVGPHTDKSPQHSSSSPSPRARASRLAGEKSRPWSPSASYDLRERLCPGSALGNPGGPEQQVPTDEAEAQMLGSADLDDMKSHRLEDNPGVRRHLVKKPSRTQGGRGSPSGLAPILRRKKKKKKLDRRPHEVFVELNELMLDRSQEPHWRETARWIKFEEDVEEETERWGKPHVASLSFRSLLELRRTIAHGAALLDLEQTTLPGIAHLVVETMIVSDQIRPEDRASVLRTLLLKHSHPNDDKDSGFFPRNPSSSSMNSVLGNHHPTPSHGPDGAVPTMADDLGEPAPLWPHDPDAKEKPLHMPGGDGHRGKSLKLLEKIPEDAEATVVLVGCVPFLEQPAAAFVRLNEAVLLESVLEVPVPVRFLFVMLGPSHTSTDYHELGRSIATLMSDKLFHEAAYQADDRQDLLSAISEFLDGSIVIPPSEVEGRDLLRSVAAFQRELLRKRREREQTKVEMTTRGGYTAPGKELSLELGGSEATPEDDPLLRTGSVFGGLVRDVRRRYPHYPSDLRDALHSQCVAAVLFIYFAALSPAITFGGLLGEKTEGLMGVSELIVSTAVLGVLFSLLGAQPLLVVGFSGPLLVFEEAFFKFCRAQDLEYLTGRVWVGLWLVVFVLALVAAEGSFLVRYISPFTQEIFAFLISLIFIYETFYKLYKVFTEHPLLPFYPPEGALEGSLDAGLEPNGSALPPTEGPPSPRNQPNTALLSLILMLGTFFIAFFLRKFRNSRFLGGKARRIIGDFGIPISILVMVLVDYSITDTYTQKLTVPTGLSVTSPDKRSWFIPPLGSARPFPPWMMVAAAVPALLVLILIFMETQITALIVSQKARRLLKGSGFHLDLLLIGSLGGLCGLFGLPWLTAATVRSVTHVNALTVMRTAIAPGDKPQIQEVREQRVTGVLIASLVGLSIVMGAVLRRIPLAVLFGIFLYMGVTSLSGIQLSQRLLLILMPAKHHPEQPYVTKVKTWRMHLFTCIQLGCIALLWVVKSTAASLAFPFLLLLTVPLRHCLLPRLFQDRELQALDSEDAEPNFDEDGQDEYNELHMPV

SEQ ID NO: 1551 - protein, 1261 aa, Homo sapiens
LAMANGVIPPPGGASPLPQVRVPLEEPPLSPDVEEEDDDLGKTLAVSRFGDLISKPPAWDPEKPSRSYSERDFEFHRHTSHHTHHPLSARLPPPHKLRRLPPTSARHTRRKRKKEKTSAPPSEGTPPIQEEGGAGVDEEEEEEEEEEGESEAEPVEPPHSGTPQKAKFSIGSDEDDSPGLPGRAAVTKPLPSVGPHTDKSPQHSSRPCSELRDGDGTTDLALSSPRLLCCLPSSPSPRARASRLAGEKSRPWSPSASYDLRERLCPGSALGNPGGPEQQVPTDEAEAQMLGSADLDDMKSHRLEDNPGVRRHLVKKPSRTQGGRGSPSGLAPILRRKKKKKKLDRRPHEVFVELNELMLDRSQEPHWRETARWIKFEEDVEEETERWGKPHVASLSFRSLLELRRTIAHGAALLDLEQTTLPGIAHLVVETMIVSDQIRPEDRASVLRTLLLKHSHPNDDKDSGFFPRNPSSSSMNSVLGNHHPTPSHGPDGAVPTMADDLGEPAPLWPHDPDAKEKPLHMPGGDGHRGKSLKLLEKIPEDAEATVVLVGCVPFLEQPAAAFVRLNEAVLLESVLEVPVPVRFLFVMLGPSHTSTDYHELGRSIATLMSDKLFHEAAYQADDRQDLLSAISEFLDGSIVIPPSEVEGRDLLRSVAAFQRELLRKRREREQTKVEMTTRGGYTAPGKELSLELGGSEATPEDDPLLRTGSVFGGLVRDVRRRYPHYPSDLRDALHSQCVAAVLFIYFAALSPAITFGGLLGEKTEGLMGVSELIVSTAVLGVLFSLLGAQPLLVVGFSGPLLVFEEAFFKFCRAQDLEYLTGRVWVGLWLVVFVLALVAAEGSFLVRYISPFTQEIFAFLISLIFIYETFYKLYKVFTEHPLLPFYPPEGALEGSLDAGLEPNGSALPPTEGPPSPRNQPNTALLSLILMLGTFFIAFFLRKFRNSRFLGGKARRIIGDFGIPISILVMVLVDYSITDTYTQKLTVPTGLSVTSPDKRSWFIPPLGSARPFPPWMMVAAAVPALLVLILIFMETQITALIVSQKARRLLKGSGFHLDLLLIGSLGGLCGLFGLPWLTAATVRSVTHVNALTVMRTAIAPGDKPQIQEVREQRVTGVLIASLVGLSIVMGAVLRRIPLAVLFGIFLYMGVTSLSGIQLSQRLLLILMPAKHHPEQPYVTKVKTWRMHLFTCIQLGCIALLWVVKSTAASLAFPFLLLLTVPLRHCLLPRLFQDRELQALDSEDAEPNFDEDGQDEYNELHMPV

SEQ ID NO: 1552 - protein, 782 aa, Homo sapiens
MALMGRCLPWLMTWGSQPHSGHMTLTPRSPIPVLRPQKPLHMPGGDGHRGKSLKLLEKIPEDAEATVVLVGCVPFLEQPAAAFVRLNEAVLLESVLEVPVPVRFLFVMLGPSHTSTDYHELGRSIATLMSDKLFHEAAYQADDRQDLLSAISEFLDGSIVIPPSEVEGRDLLRSVAAFQRELLRKRREREQTKVEMTTRGGYTAPGKELSLELGGSEATPEDDPLLRTGSVFGGLVRDVRRRYPHYPSDLRDALHSQCVAAVLFIYFAALSPAITFGGLLGEKTEGLMGVSELIVSTAVLGVLFSLLGAQPLLVVGFSGPLLVFEEAFFKFCRAQDLEYLTGRVWVGLWLVVFVLALVAAEGSFLVRYISPFTQEIFAFLISLIFIYETFYKLYKVFTEHPLLPFYPPEGALEGSLDAGLEPNGSALPPTEGPPSPRNQPNTALLSLILMLGTFFIAFFLRKFRNSRFLGGKARRIIGDFGIPISILVMVLVDYSITDTYTQKLTVPTGLSVTSPDKRSWFIPPLGSARPFPPWMMVAAAVPALLVLILIFMETQITALIVSQKARRLLKGSGFHLDLLLIGSLGGLCGLFGLPWLTAATVRSVTHVNALTVMRTAIAPGDKPQIQEVREQRVTGVLIASLVGLSIVMGAVLRRIPLAVLFGIFLYMGVTSLSGIQLSQRLLLILMPAKHHPEQPYVTKVKTWRMHLFTCIQLGCIALLWVVKSTAASLAFPFLLLLTVPLRHCLLPRLFQDRELQALDSEDAEPNFDEDGQDEYNELHMPV

SEQ ID NO: 1553 - protein, 411 aa, Homo sapiens
VAAAAERGPGHTMAELLRSLQDSQLVARFQRRCGLFPAPDEGPRENGADPTERAARVPGVEHLPAANGKGGEAPANGLRRAAAPEAYVQKYVVKNYFYYYLFQFSAALGQEVFYITFLPFTHWNIDPYLSRRLIIIWVLVMYIGQVAKDVLKWPRPSSPPVVKLEKRLIAEYGMPSTHAMAATAIAFTLLISTMDRYQYPFVLGLVMAVVFSTLVCLSRLYTGMHTVLDVLGGVLITALLIVLTYPAWTFIDCLDSASPLFPVCVIVVPFFLCYNYPVSDYYSPTRADTTTILAAGAGVTIGFWINHFFQLVSKPAESLPVIQNIPPLTTYMLVLGLTKFAVGIVLILLVRQLVQNLSLQVLYSWFKVVTRNKEARRRLEIEVPYKFVTYTSVGICATTFVPMLHRFLGLP

SEQ ID NO: 1554 - protein, 551 aa, Homo sapiens
LQQISTPSSSGGSKQSSKFEDPGVEPSEAAAQRASGEKSWKMYTSHEDIGYDFEDGPKDKKTLKPHPNIDGGWAWMMVLSSFFVHILIMGSQMALGVLNVEWLEEFHQSRGLTAWVSSLSMGITLIVGPFIGLFINTCGCRQTAIIGGLVNSLGWVLSAYAANVHYLFITFGVAAGLGSGMAYLPAVVMVGRYFQKRRALAQGLSTTGTGFGTFLMTVLLKYLCAEYGWRNAMLIQGAVSLNLCVCGALMRPLSPGKNPNDPGEKDVRGLPAHSTESVKSTGQQGRTEEKDGGLGNEETLCDLQAQECPDQAGHRKNMCALRILKTVSWLTMRVRKGFEDWYSGYFGTASLFTNRMFVAFIFWALFAYSSFVIPFIHLPEIVNLYNLSEQNDVFPLTSIIAIVHIFGKVILGVIADLPCISVWNVFLLANFTLVLSIFILPLMHTYAGLAVICALIGFSSGYFSLMPVVTEDLVGIEHLANAYGIIICANGISALLGPPFAGWIYDITQKYDFSFYICGLLYMIGILFLLIQPCIRIIEQSRRKYMDGAHV

SEQ ID NO: 1555 - protein, 242 aa, Homo sapiens
VGGVWFWSSGGEVLEEEQPPQHRSKRGGSVGGVCYLSMGMVVLLMGLVFASVYIYRYFFLAQLARDNFFRCGVLYEDSLSSQVRTQMELEEDVKIYLDENYERINVPVPQFGGGDPADIIHDFQRGLTAYHDISLDKCYVIELNTTIVLPPRNFWELLMNVKRGTYLPQTYIIQEEMVVTEHVSDKEALGSFIYHLCNGKDTYRLRRRATRRRINKRGAKNCNAIRHFENTFVVETLICGVV

SEQ ID NO: 1556 - protein, 437 aa, Homo sapiens
VEAGVSRAAGRMTPLCLNCSVLPGDLYPGGARNPMACNGSAARGHFDPEDLNLTDEALRLKYLGPQQTELFMPICATYLLIFVVGAVGNGLTCLVILRHKAMRTPTNYYLFSLAVSDLLVLLVGLPLELYEMWHNYPFLLGVGGCYFRTLLFEMVCLASVLNVTALSVERYVAVVHPLQARSMVTRAHVRRVLGAVWGLAMLCSLPNTSLHGIRQLHVPCRGPVPDSAVCMLVRPRALYNMVVQTTALLFFCLPMAIMSVLYLLIGLRLRRERLLLMQEAKGRGSAAARSRYTCRLQQHDRGRRQVTKMLFVLVVVFGICWAPFHADRVMWSVVSQWTDGLHLAFQHVHVISGIFFYLGSAANPVLYSLMSSRFRETFQEALCLGACCHRLRPRHSSHSLSRMTTGSTLCDVGSLGSWVHPLAGNDGPEAQQETDPS

SEQ ID NO: 1557 - protein, 833 aa, Homo sapiens
LRCGSGPRSGPTRSVTAGSGAHLPAAAPGPCGGPRGGRRPRASRSPGGPGLHRGGLGAMEPPYSLTAHYDEFQEVKYVSRCGAGGARGASLPPGFPLGAARSATGARSGLPRWNRREVCLLSGLVFAAGLCAILAAMLALKYLGPVAAGGGACPEGCPERKAFARAARFLAANLDASIDPCQDFYSFACGGWLRRHAIPDDKLTYGTIAAIGEQNEERLRRLLARPGGGPGGAAQRKVRAFFRSCLDMREIERLGPRPMLEVIEDCGGWDLGGAEERPGVAARWDLNRLLYKAQGVYSAAALFSLTVSLDDRNSSRYVIRIDQDGLTLPERTLYLAQDEDSEKILAAYRVFMERVLSLLGADAVEQKAQEILQVEQQLANITVSEHDDLRRDVSSMYNKVTLGQLQKITPHLRWKWLLDQIFQEDFSEEEEVVLLATDYMQQVSQLIRSTPHRVLHNYLVWRVVVVLSEHLSPPFREALHELAQEMEGSDKPQELARVCLGQANRHFGMALGALFVHEHFSAASKAKVQQLVEDIKYILGQRLEELDWMDAETRAAARAKLQYMMVMVGYPDFLLKPDAVDKEYEFEVHEKTYFKNILNSIRFSIQLSVKKIRQEVDKSTWLLPPQALNAYYLPNKNQMVFPAGILQPTLYDPDFPQSLNYGGIGTIIGHELTHGYDDWGGQYDRSGNLLHWWTEASYSRFLRKAECIVRLYDNFTVYNQRVNGKHTLGENIADMGGLKLAYHAYQKWVREHGPEHPLPRLKYTHDQLFFIAFAQNWCIKRRSQSIYLQVLTDKHAPEHYRVLGSVSQFEEFGRAFHCPKDSPMNPAHKCSVW

SEQ ID NO: 1558 - protein, 343 aa, Homo sapiens
LGEMLSGSRAVPTPHRGSEELLKYMLHSPCVSLTMNGTYNTCGSSDLTWPPAIKLGFYAYLGVLLVLGLLLNSLALWVFCCRMQQWTETRIYMTNLAVADLCLLCTLPFVLHSLRDTSDTPLCQLSQGIYLTNRYMSISLVTAIAVDRYVAVRHPLRARGLRSPRQAAAVCAVLWVLVIGSLVARWLLGIQEGGFCFRSTRHNFNSMAFPLLGFYLPLAVVVFCSLKVVTALAQRPPTDVGQAEATRKAARMVWANLLVFVVCFLPLHVGLTVRLAVGWNACALLETIRRALYITSKLSDANCCLDAICYYYMAKEFQEASALAVAPSAKAHKSQDSLCVTLA

SEQ ID NO: 1559 - protein, 346 aa, Homo sapiens
VAHPSFTSPSPSQTATVQALAAGVTHSTREAKAACRTMNGTYNTCGSSDLTWPPAIKLGFYAYLGVLLVLGLLLNSLALWVFCCRMQQWTETRIYMTNLAVADLCLLCTLPFVLHSLRDTSDTPLCQLSQGIYLTNRYMSISLVTAIAVDRYVAVRHPLRARGLRSPRQAAAVCAVLWVLVIGSLVARWLLGIQEGGFCFRSTRHNFNSMAFPLLGFYLPLAVVVFCSLKVVTALAQRPPTDVGQAEATRKAARMVWANLLVFVVCFLPLHVGLTVRLAVGWNACALLETIRRALYITSKLSDANCCLDAICYYYMAKEFQEASALAVAPSAKAHKSQDSLCVTLA

SEQ ID NO: 1560 - protein, 435 aa, Homo sapiens
VLGKAGGPLGSLSRICALEGRACWAGDWRGTWSSFCLLSCPMTAGRSQERRAQEMGRGSVQGLDLKGDLEFFTAPMLSLRSFVFVGVGSGLTSSHIPAQRWAEWGQCLAPPAHSLLTSGSLCCPRTMNGTYNTCGSSDLTWPPAIKLGFYAYLGVLLVLGLLLNSLALWVFCCRMQQWTETRIYMTNLAVADLCLLCTLPFVLHSLRDTSDTPLCQLSQGIYLTNRYMSISLVTAIAVDRYVAVRHPLRARGLRSPRQAAAVCAVLWVLVIGSLVARWLLGIQEGGFCFRSTRHNFNSMAFPLLGFYLPLAVVVFCSLKVVTALAQRPPTDVGQAEATRKAARMVWANLLVFVVCFLPLHVGLTVRLAVGWNACALLETIRRALYITSKLSDANCCLDAICYYYMAKEFQEASALAVAPSAKAHKSQDSLCVTLA

SEQ ID NO: 1561 - protein, 48 aa, Homo sapiens
LKGFVSCLLPIISSALKNLSCPQFIMSRRFIFSLCFFLFQFILNAYFS

SEQ ID NO: 1562 - protein, 528 aa, Homo sapiens
VTSFPSAGRLQCGHCPGTWDSAHVHVLFHLWWDRASHRGLVKMRIWGQRCRLCPAPGDCQVRPPGEQPFLSRLVLHILQDCYGDGPGPARHPREAYEGCCEACELGVCFLQKAPDPAWSANATKGNFPATAWGGTGTVSRGKPLSTPGDDLGKGGVVIAIPFSLVGTSNDQVPIAEGPAPPAGASLPVTGSCEALVIGQGSIFLSGDSVAMPGGKGFPVAIGDPLFHGPGLLGSSIQTFELKGFLFKGRGSLCSPVGVAQGWGPISLNNGLVPVGKHTPTVFYCVGLSASGEGSLTFPSSLTSIFTNTLSEPTDGPVATKEASITFPFIFTDVKDAVAEVAEGNGKEGGGQGLVPVGHDALPETNAGGLPSQVKGSLALPFPADVQGKDAFTDITEGKEKEGGLVTAGHDAPLEANAEGPITVSEGCITIPFAVFDVIKRKGGGHVAYGPQGNGCFSQGYYQKRQLRSRFHKARCGCRREEDERPGRACRRPHAEPYEDFWIWVSMTVCVFWLMCMCRLNPGIYPQQV

SEQ ID NO: 1563 - protein, 404 aa, Homo sapiens
VSLSHRRGGQEEELWQGPALSQWCTWFGRVLTTCLWDVEVSEVAGEEELQMIQPEKLLLVTVGKTATLHCTVTSLLPVGPVLWFRGVGPGRELIYNQKEGHFPRVTTVSDLTKRNNMDFSIRISSITPADVGTYYCVKFRKGSPENVEFKSGPGTEMALGAKPSAPVVLGPAARTTPEHTVSFTCESHGFSPRDITLKWFKNGNELSDFQTNVDPTGQSVAYSIRSTARVVLDPWDVRSQVICEVAHVTLQGDPLRGTANLSEAIRVPPTLEVTQQPMRVGNQVNVTCQVRKFYPQSLQLTWSENGNVCQRETASTLTENKDGTYNWTSWFLVNISDQRDDVVLTCQVKHDGQLAVSKRLALEVTVHQKDQSSDATPGPASSLTALLLIAVLLGPIYVPWKQKT

SEQ ID NO: 1564 - protein, 901 aa, Homo sapiens
VGCIPRKSEGMSQVGGRGDRCTQEVQGLVHGAGDLSASLAENSPTMSQNGYFEDSSYYKCDTDDTFEAREEILGDEAFDTANSSIVSGESIRFFVNVNLEMQATNTENEATSGGCVLLHTSRKYLKLKNFKEEIRAHRDLDGFLAQASIVLNETATSLDNVLRTMLRRFARDPDNNEPNCNLDLLMAMLFTDAGAPMRGKVHLLSDTIQGVTATVTGVRYQQSWLCIICTMKALQKRHVCISRLVRPQNWGENSCEVRFVILVLAPPKMKSTKTAMEVARTFATMFSDIAFRQKLLETRTEEEFKEALVHQRQLLTMVSHGPVAPRTKERSTVSLPAHRHPEPPKCKDFVPFGKGIREDIARRFPLYPLDFTDGIIGKNKAVGKYITTTLFLYFACLLPTIAFGSLNDENTDGAIDVQKTIAGQSIGGLLYALFSGQPLVILLTTAPLALYIQVIRVICDDYDLDFNSFYAWTGLWNSFFLALYAFFNLSLVMSLFKRSTEEIIALFISITFVLDAVKGTVKIFWKYYYGHYLDDYHTKRTSSLVSLSGLGASLNASLHTALNASFLASPTELPSATHSGQATAVLSLLIMLGTLWLGYTLYQFKKSPYLHPCVREILSDCALPIAVLAFSLISSHGFREIEMSKFRYNPSESPFAMAQIQSLSLRAVSGAMGLGFLLSMLFFIEQNLVAALVNAPENRLVKGTAYHWDLLLLAIINTGLSLFGLPWIHAAYPHSPLHVRALALVEERVENGHIYDTIVNVKETRLTSLGASVLVGLSLLLLPVPLQWIPKPVLYGLFLYIALTSLDGNQLVQRVALLLKEQTAYPPTHYIRRVPQRKIHYFTGLQVLQLLLLCAFGMSSLPYMKMIFPLIMIAMIPIRYILLPRIIEAKYLDVMDAEHRP

SEQ ID NO: 1565 - protein, 942 aa, Homo sapiens
LETVACRPPCDPGRVTGVGGTAPAMGVYGPQDRSESEKRDVQRDPPPWHPRREGERPARARSLPLAAAGQGFLRKTWISEHENSPTMSQNGYFEDSSYYKCDTDDTFEAREEILGDEAFDTANSSIVSGESIRFFVNVNLEMQATNTENEATSGGCVLLHTSRKYLKLKNFKEEIRAHRDLDGFLAQASIVLNETATSLDNVLRTMLRRFARDPDNNEPNCNLDLLMAMLFTDAGAPMRGKVHLLSDTIQGVTATVTGVRYQQSWLCIICTMKALQKRHVCISRLVRPQNWGENSCEVRFVILVLAPPKMKSTKTAMEVARTFATMFSDIAFRQKLLETRTEEEFKEALVHQRQLLTMVSHGPVAPRTKERSTVSLPAHRHPEPPKCKDFVPFGKGIREDIARRFPLYPLDFTDGIIGKNKAVGKYITTTLFLYFACLLPTIAFGSLNDENTDGAIDVQKTIAGQSIGGLLYALFSGQPLVILLTTAPLALYIQVIRVICDDYDLDFNSFYAWTGLWNSFFLALYAFFNLSLVMSLFKRSTEEIIALFISITFVLDAVKGTVKIFWKYYYGHYLDDYHTKRTSSLVSLSGLGASLNASLHTALNASFLASPTELPSATHSGQATAVLSLLIMLGTLWLGYTLYQFKKSPYLHPCVREILSDCALPIAVLAFSLISSHGFREIEMSKFRYNPSESPFAMAQIQSLSLRAVSGAMGLGFLLSMLFFIEQNLVAALVNAPENRLVKGTAYHWDLLLLAIINTGLSLFGLPWIHAAYPHSPLHVRALALVEERVENGHIYDTIVNVKETRLTSLGASVLVGLSLLLLPVPLQWIPKPVLYGLFLYIALTSLDGNQLVQRVALLLKEQTAYPPTHYIRRVPQRKIHYFTGLQVLQLLLLCAFGMSSLPYMKMIFPLIMIAMIPIRYILLPRIIEAKYLDVMDAEHRP

SEQ ID NO: 1566 - protein, 880 aa, Homo sapiens
VRECAMAAATRRVFHLQPCENSPTMSQNGYFEDSSYYKCDTDDTFEAREEILGDEAFDTANSSIVSGESIRFFVNVNLEMQATNTENEATSGGCVLLHTSRKYLKLKNFKEEIRAHRDLDGFLAQASIVLNETATSLDNVLRTMLRRFARDPDNNEPNCNLDLLMAMLFTDAGAPMRGKVHLLSDTIQGVTATVTGVRYQQSWLCIICTMKALQKRHVCISRLVRPQNWGENSCEVRFVILVLAPPKMKSTKTAMEVARTFATMFSDIAFRQKLLETRTEEEFKEALVHQRQLLTMVSHGPVAPRTKERSTVSLPAHRHPEPPKCKDFVPFGKGIREDIARRFPLYPLDFTDGIIGKNKAVGKYITTTLFLYFACLLPTIAFGSLNDENTDGAIDVQKTIAGQSIGGLLYALFSGQPLVILLTTAPLALYIQVIRVICDDYDLDFNSFYAWTGLWNSFFLALYAFFNLSLVMSLFKRSTEEIIALFISITFVLDAVKGTVKIFWKYYYGHYLDDYHTKRTSSLVSLSGLGASLNASLHTALNASFLASPTELPSATHSGQATAVLSLLIMLGTLWLGYTLYQFKKSPYLHPCVREILSDCALPIAVLAFSLISSHGFREIEMSKFRYNPSESPFAMAQIQSLSLRAVSGAMGLGFLLSMLFFIEQNLVAALVNAPENRLVKGTAYHWDLLLLAIINTGLSLFGLPWIHAAYPHSPLHVRALALVEERVENGHIYDTIVNVKETRLTSLGASVLVGLSLLLLPVPLQWIPKPVLYGLFLYIALTSLDGNQLVQRVALLLKEQTAYPPTHYIRRVPQRKIHYFTGLQVLQLLLLCAFGMSSLPYMKMIFPLIMIAMIPIRYILLPRIIEAKYLDVMDAEHRP

SEQ ID NO: 1567 - protein, 365 aa, Homo sapiens
LPFPTLPAEKPRSAPNMAGGRCGPQLTALLAAWIAAVAATAGPEEAALPPEQSRVQPMTASNWTLVMEGEWMLKFYAPWCPSCQQTDSEWEAFAKNGEILQISVGKVDVIQEPGLSGRFFVTTLPAFFHAKDGIFRRYRGPGIFEDLQNYILEKKWQSVEPLTGWKSPASLTMSGMAGLFSISGKIWHLHNYFTVTLGIPAWCSYVFFVIATLVFGLFMGLVLVVISECFYVPLPRHLSERSEQNRRSEEAHRAEQLQDAEEEKDDSNEEENKDSLVDDEEEKEDLGDEDEAEEEEEEDNLAAGVDEERSEANDQGPPGEDGVTREEVEPEEAEEGISEQPCPADTEVVEDSLRQRKSQHADKGL

SEQ ID NO: 1568 - protein, 1226 aa, Homo sapiens
VPAARGAAMRSPRTRGRSGRPLSLLLALLCALRAKVCGASGQFELEILSMQNVNGELQNGNCCGGARNPGDRKCTRDECDTYFKVCLKEYQSRVTAGGPCSFGSGSTPVIGGNTFNLKASRGNDRNRIVLPFSFAWPRSYTLLVEAWDSSNDTVQPDSIIEKASHSGMINPSRQWQTLKQNTGVAHFEYQIRVTCDDYYYGFGCNKFCRPRDDFFGHYACDQNGNKTCMEGWMGPECNRAICRQGCSPKHGSCKLPGDCRCQYGWQGLYCDKCIPHPGCVHGICNEPWQCLCETNWGGQLCDKDLNYCGTHQPCLNGGTCSNTGPDKYQCSCPEGYSGPNCEIAEHACLSDPCHNRGSCKETSLGFECECSPGWTGPTCSTNIDDCSPNNCSHGGTCQDLVNGFKCVCPPQWTGKTCQLDANECEAKPCVNAKSCKNLIASYYCDCLPGWMGQNCDININDCLGQCQNDASCRDLVNGYRCICPPGYAGDHCERDIDECASNPCLNGGHCQNEINRFQCLCPTGFSGNLCQLDIDYCEPNPCQNGAQCYNRASDYFCKCPEDYEGKNCSHLKDHCRTTPCEVIDSCTVAMASNDTPEGVRYISSNVCGPHGKCKSQSGGKFTCDCNKGFTGTYCHENINDCESNPCRNGGTCIDGVNSYKCICSDGWEGAYCETNINDCSQNPCHNGGTCRDLVNDFYCDCKNGWKGKTCHSRDSQCDEATCNNGGTCYDEGDAFKCMCPGGWEGTTCNIARNSSCLPNPCHNGGTCVVNGESFTCVCKEGWEGPICAQNTNDCSPHPCYNSGTCVDGDNWYRCECAPGFAGPDCRININECQSSPCAFGATCVDEINGYRCVCPPGHSGAKCQEVSGRPCITMGSVIPDGAKWDDDCNTCQCLNGRIACSKVWCGPRPCLLHKGHSECPSGQSCIPILDDQCFVHPCTGVGECRSSSLQPVKTKCTSDSYYQDNCANITFTFNKEMMSPGLTTEHICSELRNLNILKNVSAEYSIYIACEPSPSANNEIHVAISAEDIRDDGNPIKEITDKIIDLVSKRDGNSSLIAAVAEVRVQRRPLKNRTDFLVPLLSSVLTVAWICCLVTAFYWCLRKRRKPGSHTHSASEDNTTNNVREQLNQIKNPIEKHGANTVPIKDYENKNSKMSKIRTHNSEVEEDDMDKHQQKARFAKQPAYTLVDREEKPPNGTPTKHPNWTNKQDNRDLESAQSLNRMEYIV

SEQ ID NO: 1569 - protein, 246 aa, Homo sapiens
LDNGLVEPIPIIKMSQSNRELVVDFLSYKLSQKGYSWSQFSDVEENRTEAPEGTESEMETPSAINGNPSWHLADSPAVNGATGHSSSLDAREVIPMAAVKQALREAGDEFELRYRRAFSDLTSQLHITPGTAYQSFEQVVNELFRDGVNWGRIVAFFSFGGALCVESVDKEMQVLVSRIAAWMATYLNDHLEPWIQENGGWDTFVELYGNNAAAESRKGQERFNRWFLTGMTVAGVVLLGSLFSRK

SEQ ID NO: 1570 - protein, 183 aa, Homo sapiens
LDNGLVEPIPIIKMSQSNRELVVDFLSYKLSQKGYSWSQFSDVEENRTEAPEGTESEMETPSAINGNPSWHLADSPAVNGATGHSSSLDAREVIPMAAVKQALREAGDEFELRYRRAFSDLTSQLHITPGTAYQSFEQDTFVELYGNNAAAESRKGQERFNRWFLTGMTVAGVVLLGSLFSRK

SEQ ID NO: 1571 - protein, 132 aa, Homo sapiens
MAAPLVLVLVVAVTVRAALFRSSLAEFISERVEVVSPLSSWKRVVEGLSLLDLGVSPYSGAVFHETPLIIYLFHFLIDYAELVFMITDALTAIALYFAIQDFNKVVVSSLWVEQSWWNLVTFWSLLLQRSYT

SEQ ID NO: 1572 - protein, 645 aa, Homo sapiens
VSAEFWGDIAKEFYWKTPCPGPFLRYNFDVTKGKIFIEWMKGATTNICYNVLDRNVHEKKLGDKVAFYWEGNEPGETTQITYHQLLVQVCQFSNVLRKQGIQKGDRVAIYMPMIPELVVAMLACARIGALHSIVFAGFSSESLCERILDSSCSLLITTDAFYRGEKLVNLKELADEALQKCQEKGFPVRCCIVVKHLGRAELGMGDSTSQSPPIKRSCPDVQISWNQGIDLWWHELMQEAGDECEPEWCDAEDPLFILYTSGSTGKPKGVVHTVGGYMLYVATTFKYVFDFHAEDVFWCTADIGWITGHSYVTYGPLANGATSVLFEGIPTYPDVNRLWSIVDKYKVTKFYTAPTAIRLLMKFGDEPVTKHSRASLQVLGTVGEPINPEAWLWYHRVVGAQRCPIVDTFWQTETGGHMLTPLPGATPMKPGSATFPFFGVAPAILNESGEELEGEAEGYLVFKQPWPGIMRTVYGNHERFETTYFKKFPGYYVTGDGCQRDQDGYYWITGRIDDMLNVSGHLLSTAEVESALVEHEAVAEAAVVGHPHPVKGECLYCFVTLCDGHTFSPKLTEELKKQIREKIGPIATPDYIQNAPGLPKTRSGKIMRRVLRKIAQNDHDLGDMSTVADPSVISHLFSHRCLTIQ

SEQ ID NO: 1573 - protein, 702 aa, Homo sapiens
VMGLPEERVRSGSGSRGQEEAGAGGRARSWSPPPEVSRSAHVPSLQRYRELHRRSVEEPREFWGDIAKEFYWKTPCPGPFLRYNFDVTKGKIFIEWMKGATTNICYNVLDRNVHEKKLGDKVAFYWEGNEPGETTQITYHQLLVQVCQFSNVLRKQGIQKGDRVAIYMPMIPELVVAMLACARIGALHSIVFAGFSSESLCERILDSSCSLLITTDAFYRGEKLVNLKELADEALQKCQEKGFPVRCCIVVKHLGRAELGMGDSTSQSPPIKRSCPDVQISWNQGIDLWWHELMQEAGDECEPEWCDAEDPLFILYTSGSTGKPKGVVHTVGGYMLYVATTFKYVFDFHAEDVFWCTADIGWITGHSYVTYGPLANGATSVLFEGIPTYPDVNRLWSIVDKYKVTKFYTAPTAIRLLMKFGDEPVTKHSRASLQVLGTVGEPINPEAWLWYHRVVGAQRCPIVDTFWQTETGGHMLTPLPGATPMKPGSATFPFFGVAPAILNESGEELEGEAEGYLVFKQPWPGIMRTVYGNHERFETTYFKKFPGYYVTGDGCQRDQDGYYWITGRIDDMLNVSGHLLSTAEVESALVEHEAVAEAAVVGHPHPVKGECLYCFVTLCDGHTFSPKLTEELKKQIREKIGPIATPDYIQNAPGLPKTRSGKIMRRVLRKIAQNDHDLGDMSTVADPSVISHLFSHRCLTIQ

SEQ ID NO: 1574 - protein, 715 aa, Homo sapiens
VMGLPEERVRSGSGSRGQEEAGAGGRARSWSPPPEVSRSAHVPSLQRYRELHRRSVEEPREFWGDIAKEFYWKTPCPGPFLRYNFDVTKGKIFIEWMKGATTNICYNVLDRNVHEKKLGDKVAFYWEGNEPGETTQITYHQLLVQVCQFSNVLRKQGIQKGDRVAIYMPMIPELVVAMLACARIGALHSIVFAGFSSESLCERILDSSCSLLITTDAFYRGEKLVNLKELADEALQKCQEKGFPVRCCIVVKHLGRAELGMGDSTSQSPPIKRSCPDVQGKLKEKSKRVQPQISWNQGIDLWWHELMQEAGDECEPEWCDAEDPLFILYTSGSTGKPKGVVHTVGGYMLYVATTFKYVFDFHAEDVFWCTADIGWITGHSYVTYGPLANGATSVLFEGIPTYPDVNRLWSIVDKYKVTKFYTAPTAIRLLMKFGDEPVTKHSRASLQVLGTVGEPINPEAWLWYHRVVGAQRCPIVDTFWQTETGGHMLTPLPGATPMKPGSATFPFFGVAPAILNESGEELEGEAEGYLVFKQPWPGIMRTVYGNHERFETTYFKKFPGYYVTGDGCQRDQDGYYWITGRIDDMLNVSGHLLSTAEVESALVEHEAVAEAAVVGHPHPVKGECLYCFVTLCDGHTFSPKLTEELKKQIREKIGPIATPDYIQNAPGLPKTRSGKIMRRVLRKIAQNDHDLGDMSTVADPSVISHLFSHRCLTIQ

SEQ ID NO: 1575 - protein, 39 aa, Homo sapiens
LGKLKQFDAYPKTLEDFRVKTCGGATVTIVSGLLMLLWC

SEQ ID NO: 1576 - protein, 518 aa, Homo sapiens
LDVQGMGLSGSDNSCDPTPPPGPLAMALFGALFLALLAGAHAEFPGCKIRVTSKALELVKQEGLRFLEQELETITIPDLRGKEGHFYYNISEVKVTELQLTSSELDFQPQQELMLQITNASLGLRFRRQLLYWFFYDGGYINASAEGVSIRTGLELSRDPAGRMKVSNVSCQASVSRMHAAFGGTFKKVYDFLSTFITSGMRFLLNQQICPVLYHAGTVLLNSLLDTVPVRSSVDELVGIDYSLMKDPVASTSNLDMDFRGAFFPLTERNWSLPNRAVEPQLQEEERMVYVAFSEFFFDSAMESYFRAGALQLLLVGDKVPHDLDMLLRATYFGSIVLLSPAVIDSPLKLELRVLAPPRCTIKPSGTTISVTASVTIALVPPDQPEVQLSSMTMDARLSAKMALRGKALRTQLDLRRFRIYSNHSALESLALIPLQAPLKTMLQIGVMPMLNERTWRGVQIPLPEGINFVHEVVTNHAGFLTIGADLHFAKGLREVIEKNRPADVRASTAPTPSTAAV

SEQ ID NO: 1577 - protein, 128 aa, Homo sapiens
LCPAPLMLARLWGQADCCETKDLVVQQAGTNKTDVVCGPQDRLRALVVIPIIFGILFAILLVLVFIKKVAKKPTNKAPHPKQEPQEINFPDDLPGSNTAAPVQETLHGCQPVTQEDGKESRISVQERQ

SEQ ID NO: 1578 - protein, 1116 aa, Homo sapiens
VSVGRAARALRAWPGARELAPSLRARPARCRRLLPRGGAAPAGGGAEAGPGGGPGGAGGAAAKAGGAADMTDNIPLQPVRQKKRMDSRPRAGCCEWLRCCGGGEARPRTVWLGHPEKRDQRYPRNVINNQKYNFFTFLPGVLFNQFKYFFNLYFLLLACSQFVPEMRLGALYTYWVPLGFVLAVTVIREAVEEIRCYVRDKEVNSQVYSRLTARGTVKVKSSNIQVGDLIIVEKNQRVPADMIFLRTSEKNGSCFLRTDQLDGETDWKLRLPVACTQRLPTAADLLQIRSYVYAEEPNIDIHNFVGTFTREDSDPPISESLSIENTLWAGTVVASGTVVGVVLYTGRELRSVMNTSNPRSKIGLFDLEVNCLTKILFGALVVVSLVMVALQHFAGRWYLQIIRFLLLFSNIIPISLRVNLDMGKIVYSWVIRRDSKIPGTVVRSSTIPEQLGRISYLLTDKTGTLTQNEMIFKRLHLGTVAYGLDSMDEVQSHIFSIYTQQSQDPPAQKGPTLTTKVRRTMSSRVHEAVKAIALCHNVTPVYESNGVTDQAEAEKQYEDSCRVYQASSPDEVALVQWTESVGLTLVGRDQSSMQLRTPGDQILNFTILQIFPFTYESKRMGIIVRDESTGEITFYMKGADVVMAGIVQYNDWLEEECGNMAREGLRVLVVAKKSLAEEQYQDFEARYVQAKLSVHDRSLKVATVIESLEMEMELLCLTGVEDQLQADVRPTLETLRNAGIKVWMLTGDKLETATCTAKNAHLVTRNQDIHVFRLVTNRGEAHLELNAFRRKHDCALVISGDSLEVCLKYYEYEFMELACQCPAVVCCRCAPTQKAQIVRLLQERTGKLTCAVGDGGNDVSMIQESDCGVGVEGKEGKQASLAADFSITQFKHLGRLLMVHGRNSYKRSAALSQFVIHRSLCISTMQAVFSSVFYFASVPLYQGFLIIGYSTIYTMFPVFSLVLDKDVKSEVAMLYPELYKDLLKGRPLSYKTFLIWVLISIYQGSTIMYGALLLFESEFVHIVAISFTSLILTELLMVALTIQTWHWLMTVAELLSLACYIASLVFLHEFIDVYFIATLSFLWKVSVITLVSCLPLYVLKYLRRRFSPPSYSKLTS

SEQ ID NO: 1579 - protein, 378 aa, Homo sapiens
LPAHFPDATRGHCRRPRGCRGEAGGAQRSAVPRTEPRGAPGTWRRPEPGEPGRASPAARLLHAGPQLRAPAGAPPGRPRAPRAPRRAAAPSMHRLMGVNSTAAAAAGQPNVSCTCNCKRSLFQSMEITELEFVQIIIIVVVMMVMVVVITCLLSHYKLSARSFISRHSQGRRREDALSSEGCLWPSESTVSGNGIPEPQVYAPPRPTDRLAVPPFAQRERFHRFQPTYPYLQHEIDLPPTISLSDGEEPPPYQGPCTLQLRDPEQQLELNRESVRAPPNRTIFDSDLMDSARLGGPCPPSSNSGISATCYGSGGRMEGPPPTYSEVIGHYPGSSFQHQQSSGPPSLLEGTRLHHTHIAPLESAAIWSKEKDKQKGHPL

SEQ ID NO: 1580 - protein, 280 aa, Homo sapiens
VKALGGSVGHDPRAAGELKADSLLRNQAMAELEFVQIIIIVVVMMVMVVVITCLLSHYKLSARSFISRHSQGRRREDALSSEGCLWPSESTVSGNGIPEPQVYAPPRPTDRLAVPPFAQRERFHRFQPTYPYLQHEIDLPPTISLSDGEEPPPYQGPCTLQLRDPEQQLELNRESVRAPPNRTIFDSDLMDSARLGGPCPPSSNSGISATCYGSGGRMEGPPPTYSEVIGHYPGSSFQHQQSSGPPSLLEGTRLHHTHIAPLESAAIWSKEKDKQKGHPL

SEQ ID NO: 1581 - protein, 480 aa, Homo sapiens
LRMAAAAAGGAPGPAPGPAGPPPPAAPTSAARAPPQALRRRGDSRRRQAALFFLNNISLDGRPPSLGPGGEKPPPPPAEAREPPAPPPPEPPTGLPARTPAPQGLLSPTQVPTGLGLDGQRQRKRVTSQRCSLEFLEDAVGCAPAQRTKHTSGSPRHKGLKKTHFIKNMRQYDTRNSRIVLICAKRSLCAAFSVLPYGEGLRISDLRVDSQKQRHPSGGVSVSSEMVFELEGVELGADGKVVSYAKFLYPTNALVTHKSDSHGLLPTPRPSVPRTLPGSRHKPAPTKSAPASTELGSDVGDTLEYNPNLLDDPQWPCGKHKRVLIFASYMTTVIEYVKPSDLKKDMNETFREKFPHVKLTLSKIRSLKREMRSLSEECSLEPVTVAMAYVYFEKLVLQGKLSKQNRKLCAGACVLLAAKISSDLRKSGVTQLIDKLEERFRFNRRDLIGFEFTVLVALELALYLPENQVLPHYRRLTQQF

SEQ ID NO: 1582 - protein, 633 aa, Homo sapiens
VAEASRSPGGGAEMPLHQLGDKPLTFPSPNSAMENGLDHTPPSRRASPGTPLSPGSLRSAAHSPLDTSKQPLCQLWAEKHGARGTHEVRYVSAGQSVACGWWAFAPPCLQVLNTPKGILFFLCAAAFLQGMTVNGFINTVITSLERRYDLHSYQSGLIASSYDIAACLCLTFVSYFGGSGHKPRWLGWGVLLMGTGSLVFALPHFTAGRYEVELDAGVRTCPANPGAVCADSTSGLSRYQLVFMLGQFLHGVGATPLYTLGVTYLDENVKSSCSPVYIAIFYTAAILGPAAGYLIGGALLNIYTEMGRRTELTTESPLWVGAWWVGFLGSGAAAFFTAVPILGYPRQLPGSQRYAVMRAAEMHQLKDSSRGEASNPDFGKTIRDLPLSIWLLLKNPTFILLCLAGATEATLITGMSTFSPKFLESQFSLSASEAATLFGYLVVPAGGGGTFLGGFFVNKLRLRGSAVIKFCLFCTVVSLLGILVFSLHCPSVPMAGVTASYGGSLLPEGHLNLTAPCNAACSCQPEHYSPVCGSDGLMYFSLCHAGCPAATETNVDGQKVSGAAAYRPCPPLDPGKGPPCLPLVIGAIVGLPRCTETVAVSLRIFPLVLAMPLQGNALQLVRESPSFWFSYSL

SEQ ID NO: 1583 - protein, 735 aa, Homo sapiens
VAEASRSPGGGAEMPLHQLGDKPLTFPSPNSAMENGLDHTPPSRRASPGTPLSPGSLRSAAHSPLDTSKQPLCQLWAEKHGARGTHEVRYVSAGQSVACGWWAFAPPCLQVLNTPKGILFFLCAAAFLQGMTVNGFINTVITSLERRYDLHSYQSGLIASSYDIAACLCLTFVSYFGGSGHKPRWLGWGVLLMGTGSLVFALPHFTAGRYEVELDAGVRTCPANPGAVCADSTSGLSRYQLVFMLGQFLHGVGATPLYTLGVTYLDENVKSSCSPVYIAIFYTAAILGPAAGYLIGGALLNIYTEMGRRTELTTESPLWVGAWWVGFLGSGAAAFFTAVPILGYPRQLPGSQRYAVMRAAEMHQLKDSSRGEASNPDFGKTIRDLPLSIWLLLKNPTFILLCLAGATEATLITGMSTFSPKFLESQFSLSASEAATLFGYLVVPAGGGGTFLGGFFVNKLRLRGSAVIKFCLFCTVVSLLGILVFSLHCPSVPMAGVTASYGGSLLPEGHLNLTAPCNAACSCQPEHYSPVCGSDGLMYFSLCHAGCPAATETNVDGQKVYRDCSCIPQNLSSGFGHATAGKCTSTCQRKPLLLVFIFVVIFFTFLSSIPALTATLRCVRDPQRSFALGIQWIVVRILGGIPGPIAFGWVIDKACLLWQDQCGQQGSCLVYQNSAMSRYILIMGLLYKVLGVLFFAIACFLYKPLSESSDGLETCLPSQSSAPDSATDSQLQSSV

SEQ ID NO: 1584 - protein, 250 aa, Homo sapiens
LPGRGHRGHSHHRHVHVQPQVLGVPVQPECLRSCHLVWVPGGASGWWRHLPGRLLCEQAQAPGLRGHQVLPVLHRCQPAGHPRLLTALPQCAHGGRHSQLRREPPARRPPEPNGSLQRCLQLPARTLQPCVRLGRPHVLLTVPRRVPCSHGDECGRPEGEWSRCLPPLSSPGPWEGAPVPSPCNRSYCWASQVYRDCSCIPQNLSSGFGHATAGKCTSTCQRKPLLLVFIFVVIFFTFLSSIPALTATLR

SEQ ID NO: 1585 - protein, 262 aa, Homo sapiens
LGGFFVNKLRLRGSAVIKFCLFCTVVSLLGILVFSLHCPSVPMAGVTASYGGSLLPEGHLNLTAPCNAACSCQPEHYSPVCGSDGLMYFSLCHAGCPAATETNVDGQKVYRDCSCIPQNLSSGFGHATAGKCTSTCQRKPLLLVFIFVVIFFTFLSSIPALTATLRCVRDPQRSFALGIQWIVVRILGGIPGPIAFGWVIDKACLLWQDQCGQQGSCLVYQNSAMSRYILIMGLLYKFQLPEVHHSLNVLNRKFQKQTVHNL

SEQ ID NO: 1586 - protein, 169 aa, Homo sapiens
LPAAASQNTTALCAARTASCTSHCATQGALQPRRRMWTARSSIPALTATLRCVRDPQRSFALGIQWIVVRILGGIPGPIAFGWVIDKACLLWQDQCGQQGSCLVYQNSAMSRYILIMGLLYKVLGVLFFAIACFLYKPLSESSDGLETCLPSQSSAPDSATDSQLQSSV

SEQ ID NO: 1587 - protein, 147 aa, Homo sapiens
LVQEATGLGGDLACNPTSVGADAVVFYCRCVRDPQRSFALGIQWIVVRILGGIPGPIAFGWVIDKACLLWQDQCGQQGSCLVYQNSAMSRYILIMGLLYKVLGVLFFAIACFLYKPLSESSDGLETCLPSQSSAPDSATDSQLQSSV

SEQ ID NO: 1588 - protein, 493 aa, Homo sapiens
LGLTRGLGRCCPGGSAWAGRQPRDTAVPTPSEHPKPDAATPRRGPQGHGRGHPVVQVEPPCVCMTLTSRRQDSQEARPECQAWTGTLLLGTCLLYCARSSMPICTVSMSQDFGWNKKEAGIVLSSFFWGYCLTQVVGGHLGDRIGGEKVILLSASAWGSITAVTPLLAHLSSAHLAFMTFSRILMGLLQGVYFPALTSLLSQKVRESERAFTYSIVGAGSQFGTLLTGAVGSLLLEWYGWQSIFYFSGGLTLLWVWYVYRYLLSEKDLILALGVLAQSRPVSRHNRVPWRRLFRKPAVWAAVVSQLSAACSFFILLSWLPTFFEETFPDAKGWIFNVVPWLVAIPASLFSGFLSDHLINQGYRAITVRKLMQGMGLGLSSVFALCLGHTSSFCESVVFASASIGLQTFNHSGISVNIQDLAPSCAGFLFGVANTAGALAGVVGVCLGGYLMETTGSWTCLFNLVAIISNLGLCTFLVFGQAQRVDLSSTHEDL

SEQ ID NO: 1589 - protein, 248 aa, Homo sapiens
VDLGGAARVGQPGLGGSPGTQLCPRRLSTPSPMQPPPDEARRDMAGDTQWSRPECQAWTGTLLLGTCLLYCARSSMPICTVSMSQDFGWNKKEAGIVLSSFFWGYCLTQVVGGHLGDRIGGEKVILLSASAWGSITAVTPLLAHLSSAHLAFMTFSRILMGLLQGVYFPALTSLLSQKVRESERAFTYSIVGAGSQFGTLLTGAVGSLLLEWYGWQSIFYFSGGLTLLWVWYVYRYLLSEKGNAGRAG

SEQ ID NO: 1590 - protein, 468 aa, Homo sapiens
VDLGGAARVGQPGLGGSPGTQLCPRRLSTPSPMQPPPDEARRDMAGDTQWSRPECQAWTGTLLLGTCLLYCARSSMPICTVSMSQDFGWNKKEAGIVLSSFFWGYCLTQVVGGHLGDRIGGEKVILLSASAWGSITAVTPLLAHLSSAHLAFMTFSRILMGLLQGVYFPALTSLLSQKVRESERAFTYSIVGAGSQFGTLLTGAVGSLLLEWYGWQSIFYFSGGLTLLWVWYVYRYLLSEKDLILALGVLAQSRPVSRHNRVPWRRLFRKPAVWAAVVSQLSAACSFFILLSWLPTFFEETFPDAKGWIFNVVPWLVAIPASLFSGFLSDHLINQGYRAITVRKLMQGMGLGLSSVFALCLGHTSSFCESVVFASASIGLQTFNHSGISVNIQDLAPSCAGFLFGVANTAGALAGVVGVCLGGYLMETTGSWTCLFNLVAIISNLGLCTFLVFGQAQRVDLSSTHEDL

SEQ ID NO: 1591 - protein, 139 aa, Homo sapiens
LHKDLPGLPQTELRTPGRGLGPRLHRMGLPVSWAPPALWVLGCCALLLSLWALCTACRRPEDAVAPRKRARRQRARLQGSATAAEAVSARLSRGPGWGPQGTDQPSSPPVPTEADPPLLPQQVGHQTARAAPGPAQQQG

SEQ ID NO: 1592 - protein, 202 aa, Homo sapiens
LHKDLPGLPQTELRTPGRGLGPRLHRMGLPVSWAPPALWVLGCCALLLSLWALCTACRRPEDAVAPRKRARRQRARLQGSATAAEAQVGHQTARAAPGPAQQQGPAACQHGSPAPTLAGGVQGHHRTAGSPLCLPTPGAAPGSAGSCSHRRVRWPRGHLFQRGAGGPSRGQPGGQPCGGRVCPRPEAQRDPSQSPRATAGED

SEQ ID NO: 1593 - protein, 321 aa, Homo sapiens
LHKDLPGLPQTELRTPGRGLGPRLHRMGLPVSWAPPALWVLGCCALLLSLWALCTACRRPEDAVAPRKRARRQRARLQGSATAAEASLLRRTHLCSLSKSDTRLHELHRGPRSSRALRPASMDLLRPHWLEVSRDITGPQAAPSAFPHQELPRALPAAAATAGCAGLEATYSNVGLAALPGVSLAASPVVAEYARVQKRKGTHRSPQEPQQGKTEVTPAAQVDVLYSRVCKPKRRDPGPTTDPLDPKGQGAILALAGDLAYQTLPLRALDVDSGPLENVYESIRELGDPAGRSSTCGAGTPPASSCPSLGRGWRPLPASLP

SEQ ID NO: 1594 - protein, 230 aa, Homo sapiens
LPQTELRTPGRGLGPRLHRMGLPVSWAPPALWVLGCCALLLSLWALCTACRRPEDAVAPRKRARRQRARLQGSATAAEAVSARLSRGPGWGPQGTDQPSSPPVPTEADPPLLPQQVGHQTARAAPGPAQQQGPAACQHGSPAPTLAGGVQGHHRTAGSPLCLPTPGAAPGSAGSCSHRRVRWPRGHLFQRGAGGPSRGQPGGQPCGGRVCPRPEAQRDPSQSPRATAGED

SEQ ID NO: 1595 - protein, 79 aa, Homo sapiens
LSPGPRLHRMGLPVSWAPPALWVLGCCALLLSLWALCTACRRKRARRQRARLQGSATAAEAQVGHQTARAAPGPAQQQG

SEQ ID NO: 1596 - protein, 37 aa, Homo sapiens
MGSVAVELVCFILMYLPLHLVIILYASDCYFVSVSNP

SEQ ID NO: 1597 - protein, 497 aa, Homo sapiens
LCDQAPERRVGGGQEGWGLQGKPGGLGRGLAGPFRKDRGPRRWASRGAPVSRTFREAPRSGRPAAWGPRAAAAEAPQGRGSRSGKVPRGGGGLGGGTGRGRGRGRPSRIPSTGTPRCCSGRGGPCAPCARHGGLGGDVSGSADPERGPGRDLSRRRAPGAMRPTLLWSLLLLLGVFAAAAAAPPDPLSQLPAPQHPKIRLYNAEQVLSWEPVALSNSTRPVVYQVQFKYTDSKWFTADIMSIGVNCTQITATECDFTAASPSAGFPMDFNVTLRLRAELGALHSAWVTMPWFQHYRNVTVGPPENIEVTPGEGSLIIRFSSPFDIADTSTAFFCYYVHYWEKGGIQQVKGPFRSNSISLDNLKPSRVYCLQVQAQLLWNKSNIFRVGHLSNISCYETMADASTELQQVILISVGTFSLLSVLAGACFFLVLKYRGLIKYWFHTPPSIPLQIEEYLKDPTQPILEALDKDSSPKDDVWDSVSIISFPEKEQEDVLQTL

SEQ ID NO: 1598 - protein, 383 aa, Homo sapiens
LGGDVSGSADPERGPGRDLSRRRAPGAMRPTLLWSLLLLLGVFAAAAAAPPAQLTLETYQEWCNDSAATHDPLSQLPAPQHPKIRLYNAEQVLSWEPVALSNSTRPVVYQVQFKYTDSKWFTADIMSIGVNCTQITATECDFTAASPSAGFPMDFNVTLRLRAELGALHSAWVTMPWFQHYRNVTVGPPENIEVTPGEGSLIIRFSSPFDIADTSTAFFCYYVHYWEKGGIQQVKGPFRSNSISLDNLKPSRVYCLQVQAQLLWNKSNIFRVGHLSNISCYETMADASTELQQVILISVGTFSLLSVLAGACFFLVLKYRGLIKYWFHTPPSIPLQIEEYLKDPTQPILEALDKDSSPKDDVWDSVSIISFPEKEQEDVLQTL

SEQ ID NO: 1599 - protein, 1314 aa, Homo sapiens
VLWGLPTRAPSPGAWIITGGSHTGVMKQVGEAVRDFSLSSSYKEGELITIGVATWGTVHRREGLIHPTGSFPAEYILDEDGQGNLTCLDSNHSHFILVDDGTHGQYGVEIPLRTRLEKFISEQTKERGGVAIKIPIVCVVLEGGPGTLHTIDNATTNGTPCVVVEGSGRVADVIAQVANLPVSDITISLIQQKLSVFFQEMFETFTESRIVEWTKKIQDIVRRRQLLTVFREGKDGQQDVDVAILQALLKASRSQDHFGHENWDHQLKLAVAWNRVDIARSEIFMDEWQWKPSDLHPTMTAALISNKPEFVKLFLENGVQLKEFVTWDTLLYLYENLDPSCLFHSKLQKVLVEDPERPACAPAAPRLQMHHVAQVLRELLGDFTQPLYPRPRHNDRLRLLLPVPHVKLNVQGVSLRSLYKRSSGHVTFTMDPIRDLLIWAIVQNRRELAGIIWAQSQDCIAAALACSKILKELSKEEEDTDSSEEMLALAEEYEHRAIGVFTECYRKDEERAQKLLTRVSEAWGKTTCLQLALEAKDMKFVSHGGIQAFLTKVWWGQLSVDNGLWRVTLCMLAFPLLLTGLISFREKRLQDVGTPAARARAFFTAPVVVFHLNILSYFAFLCLFAYVLMVDFQPVPSWCECAIYLWLFSLVCEEMRQLFYDPDECGLMKKAALYFSDFWNKLDVGAILLFVAGLTCRLIPATLYPGRVILSLDFILFCLRLMHIFTISKTLGPKIIIVKRMMKDVFFFLFLLAVWVVSFGVAKQAILIHNERRVDWLFRGAVYHSYLTIFGQIPGYIDGVNFNPEHCSPNGTDPYKPKCPESDATQQRPAFPEWLTVLLLCLYLLFTNILLLNLLIAMFNYTFQQVQEHTDQIWKFQRHDLIEEYHGRPAAPPPFILLSHLQLFIKRVVLKTPAKRHKQLKNKLEKNEEAALLSWEIYLKENYLQNRQFQQKQRPEQKIEDISNKVDAMVDLLDLDPLKRSGSMEQRLASLEEQVAQTAQALHWIVRTLRASGFSSEADVPTLASQKAAEEPDAEPGGRKKTEEPGDSYHVNARHLLYPNCPVTRFPVPNEKVPWETEFLIYDPPFYTAERKDAAAMDPMGDTLEPLSTIQYNVVDGLRDRRSFHGPYTVQAGLPLNPMGRTGLRGRGSLSCFGPNHTLYPMVTRWRRNEDGAICRKSIKKMLEVLVVKLPLSEHWALPGGSREPGEMLPRKLKRILRQEHWPSFENLLKCGMEVYKGYMDDPRNTDNAWIETVAVSVHFQDQNDVELNRLNSNLHACDSGASIRWQVVDRRIPLYANHKTLLQKAAAEFGAHY

SEQ ID NO: 1600 - protein, 266 aa, Homo sapiens [sequence omitted]

SEQ ID NO: 1601 - protein, 471 aa, Homo sapiens
VSGLYDPRLQLRFLDVTQGRLVAKPPRPARSTAEDSSTPRDMLGLRPPLLALVGLLSLGCVLSQECTKFKVSSCRECIESGPGCTWCQKLNFTGPGDPDSIRCDTRPQLLMRGCAADDIMDPTSLAETQEDHNGGQKQLSPQKVTLYLRPGQAAAFNVTFRRAKGYPIDLYYLMDLSYSMLDDLRNVKKLGGDLLRALNEITESGRIGFGSFVDKTVLPFVNTHPDKLRNPCPNKEKECQPPFAFRHVLKLTNNSNQFQTEVGKQLISGNLDAPEGGLDAMMQVAACPEEIGWRNVTRLLVFATDDGFHFAGDGKLGAILTPNDGRCHLEDNLYKRSNEFDYPSVGQLAHKLAENNIQPIFAVTSRMVKTYEKLTEIIPKSAVGELSEDSSNVVHLIKNAYNVSLPHHSAGTHGVASNLPTAGQLLLQVSRRVVWEESPCPVGQLQPPDLPSGLQDTLARHFHGELWVLSR

SEQ ID NO: 1602 - protein, 72 aa, Homo sapiens
VSGLYDPRLQLRFLDVTQGRLVAKPPRPARSTAEDSSTPRDMLGLRPPLLALVGLLSLGCGEFCVPRRGLHA

SEQ ID NO: 1603 - protein, 624 aa, Homo sapiens
LPSAVGGRSPTSPLRSSSCRKPGPCVAGELPGLLPRRGTRGQLGQAPRGRGRIRSATPDRRDRHSVTFVPSGAARGLSRMVPSSPAVEKQVPVEPGPDPELRSWRHLVCYLCFYGFMAQIRPGESFITPYLLGPDKNFTREQVTNEITPVLSYSYLAVLVPVFLLTDYLRYTPVLLLQGLSFVSVWLLLLLGHSVAHMQLMELFYSVTMAARIAYSSYIFSLVRPARYQRVAGYSRAAVLLGVFTSSVLGQLLVTVGRVSFSTLNYISLAFLTFSVVLALFLKRPKRSLFFNRDDRGRCETSASELERMNPGPGGKLGHALRVACGDSVLARMLRELGDSLRRPQLRLWSLWWVFNSAGYYLVVYYVHILWNEVDPTTNSARVYNGAADAASTLLGAITSFAAGFVKIRWARWSKLLIAGVTATQAGLVFLLAHTRHPSSIWLCYAAFVLFRGSYQFLVPIATFQIASSLSKELCALVFGVNTFFATIVKTIITFIVSDVRGLGLPVRKQALRMSRPRLGLCLPGPFPPQSAAPARAGMAASSAEDPGSERGPWRRAGTVAARGDPGGERGPWRREGTLAARGDPGGERGPWWREGTLAVRGDPGGERGPWRREGTLVVKGARG

SEQ ID NO: 1604 - protein, 523 aa, Homo sapiens
VRGAGSGSPRAAAPPSRRHSVTFVPSGAARGLSRMVPSSPAVEKQVPVEPGPDPELRSWRHLVCYLCFYGFMAQIRPGESFITPYLLGPDKNFTREQVTNEITPVLSYSYLAVLVPVFLLTDYLRYTPVLLLQGLSFVSVWLLLLLGHSVAHMQLMELFYSVTMAARIAYSSYIFSLVRPARYQRVAGYSRAAVLLGVFTSSVLGQLLVTVGRVSFSTLNYISLAFLTFSVVLALFLKRPKRSLFFNRDDRGRCETSASELERMNPGPGGKLGHALRVACGDSVLARMLRELGDSLRRPQLRLWSLWWVFNSAGYYLVVYYVHILWNEVDPTTNSARVYNGAADAASTLLGAITSFAAGFVKIRWARWSKLLIAGVTATQAGLVFLLAHTRHPSSIWLCYAAFVLFRGSYQFLVPIATFQIASSLSKELCALVFGVNTFFATIVKTIITFIVSDVRGLGLPVRKQNEELHVASLSLWKSHLRLAADTLSSEGSSGSGPRSWFLSPTLRAALHGPVCPSEVCPS

SEQ ID NO: 1605 - protein, 580 aa, Homo sapiens
VQGEEREGSGWLPRGSSALRPSTKTRRCLMRPQPAEPAPGGRGNEACSIHSEVTNEITPVLSYSYLAVLVPVFLLTDYLRYTPVLLLQGLSFVSVWLLLLLGHSVAHMQLMELFYSVTMAARIAYSSYIFSLVRPARYQRVAGYSRAAVLLGVFTSSVLGQLLVTVGRVSFSTLNYISLAFLTFSVVLALFLKRPKRSLFFNRDDRGRCETSASELERMNPGPGGKLGHALRVACGDSVLARMLRELGDSLRRPQLRLWSLWWVFNSAGYYLVVYYVHILWNEVDPTTNSARVYNGAADAASTLLGAITSFAAGFVKIRWARWSKLLIAGVTATQAGLVFLLAHTRHPSSIWLCYAAFVLFRGSYQFLVPIATFQIASSLSKELCALVFGVNTFFATIVKTIITFIVSDVRGLGLPVRKQFQLYSVYFLILSIIYFLGAMLDGLRHCQRGHHPRQPPAQGLRSAAEEKAAQALSVQDKGLGGLQPAQSPPLSPEDSLGAVGPASLEQRQSDPYLAQAPAPQAAEFLSPVTTPSPCTLCSAQASGPEAADETCPQLAVHPPGVSKLGLQCLPSDGVQNVNQ

SEQ ID NO: 1606 - protein, 625 aa, Homo sapiens
VRGAGSGSPRAAAPPSRRHSVTFVPSGAARGLSRMVPSSPAVEKQVPVEPGPDPELRSWRHLVCYLCFYGFMAQIRPGESFITPYLLGPDKNFTREQVTNEITPVLSYSYLAVLVPVFLLTDYLRYTPVLLLQGLSFVSVWLLLLLGHSVAHMQLMELFYSVTMAARIAYSSYIFSLVRPARYQRVAGYSRAAVLLGVFTSSVLGQLLVTVGRVSFSTLNYISLAFLTFSVVLALFLKRPKRSLFFNRDDRGRCETSASELERMNPGPGGKLGHALRVACGDSVLARMLRELGDSLRRPQLRLWSLWWVFNSAGYYLVVYYVHILWNEVDPTTNSARVYNGAADAASTLLGAITSFAAGFVKIRWARWSKLLIAGVTATQAGLVFLLAHTRHPSSIWLCYAAFVLFRGSYQFLVPIATFQIASSLSKELCALVFGVNTFFATIVKTIITFIVSDVRGLGLPVRKQFQLYSVYFLILSIIYFLGAMLDGLRHCQRGHHPRQPPAQGLRSAAEEKAAQALSVQDKGLGGLQPAQSPPLSPEDSLGAVGPASLEQRQSDPYLAQAPAPQAAEFLSPVTTPSPCTLCSAQASGPEAADETCPQLAVHPPGVSKLGLQCLPSDGVQNVNQ

SEQ ID NO: 1607 - protein, 1048 aa, Homo sapiens
LLLTRRPRLGPSGAEPPRDQDFRATGAAKMLQGTCSVLLLWGILGAIQAQQQEVISPDTTERNNNCPEKTDCPIHVYFVLDTSESVTMQSPTDILLFHMKQFVPQFISQLQNEFYLDQVALSWRYGGLHFSDQVEVFSPPGSDRASFIKNLQGISSFRRGTFTDCALANMTEQIRQDRSKGTVHFAVVITDGHVTGSPCGGIKLQAERAREEGIRLFAVAPNQNLKEQGLRDIASTPHELYRNDYATMLPDSTEIDQDTINRIIKVMKHEAYGECYKVSCLEIPGPSGPKGYRGQKGAKGNMGEPGEPGQKGRQGDPGIEGPIGFPGPKGVPGFKGEKGEFGADGRKGAPGLAGKNGTDGQKGKLGRIGPPGCKGDPGNRGPDGYPGEAGSPGERGDQGGKGDPGRPGRRGPPGEIGAKGSKGYQGNSGAPGSPGVKGAKGGPGPRGPKGEPGRRGDPGTKGSPGSDGPKGEKGDPGPEGPRGLAGEVGNKGAKGDRGLPGPRGPQGALGEPGKQGSRGDPGDAGPRGDSGQPGPKGDPGRPGFSYPGPRGAPGEKGEPGPRGPEGGRGDFGLKGEPGRKGEKGEPADPGPPGEPGPRGPRGVPGPEGEPGPPGDPGLTECDVMTYVRETCGCCDCEKRCGALDVVFVIDSSESIGYTNFTLEKNFVINVVNRLGAIAKDPKSETGTRVGVVQYSHEGTFEAIQLDDERIDSLSSFKEAVKNLEWIAGGTWTPSALKFAYDRLIKESRRQKTRVFAVVITDGRHDPRDDDLNLRALCDRDVTVTAIGIGDMFHEKHESENLYSIACDKPQQVRNMTLFSDLVAEKFIDDMEDVLCPDPQIVCPDLPCQTELSVAQCTQRPVDIVFLLDGSERLGEQNFHKARRFVEQVARRLTLARRDDDPLNARVALLQFGGPGEQQVAFPLSHNLTAIHEALETTQYLNSFSHVGAGVVHAINAIVRSPRGGARRHAELSFVFLTDGVTGNDSLHESAHSMRKQNVVPTVLALGSDVDMDVLTTLSLGDRAAVFHEKDYDSLAQPGFFDRFIRWIC

SEQ ID NO: 1608 - protein, 566 aa, Homo sapiens
LEEESFNILPSGNLRAGREKEDQSSTLKSVGFHSPTLLCSPVESPSEPFPSPGIPMLVDGPSERPALCFLLLAVAMSFFGSALSIDETRAHLLLKEKMMRLGGRLVLNTKEELANERLMTLKIAEMKEAMRTLIFPPSMHFFQAKHLIERSQVFNILRMMPKGAALHLHDIGIVTMDWLVRNVTYRPHCHICFTPRGIMQFRFAHPTPRPSEKCSKWILLEDYRKRVQNVTEFDDSLLRNFTLVTQHPEVIYTNQNVVWSKFETIFFTISGLIHYAPVFRDYVFRSMQEFYEDNVLYMEIRARLLPVYELSGEHHDEEWSVKTYQEVAQKFVETHPEFIGIKIIYSDHRSKDVAVIAESIRMAMGLRIKFPTVVAGFDLVGHEDTGHSLHDYKEALMIPAKDGVKLPYFFHAGETDWQGTSIDRNILDALMLNTTRIGHGFALSKHPAVRTYSWKKDIPIEVCPISNQVLKLVSDLRNHPVATLMATGHPMVISSDDPAMFGAKGLSYDFYEVFMGIGGMKADLRTLKQLAMNSIKYSTLLESEKNTFMEIWKKRWDKFIADVATK

SEQ ID NO: 1609 - protein, 547 aa, Homo sapiens
VLCTDAGALSKQPSVSGAVPSPVESPSEPFPSPGIPMLVDGPSERPALCFLLLAVAMSFFGSALSIDETRAHLLLKEKMMRLGGRLVLNTKEELANERLMTLKIAEMKEAMRTLIFPPSMHFFQAKHLIERSQVFNILRMMPKGAALHLHDIGIVTMDWLVRNVTYRPHCHICFTPRGIMQFRFAHPTPRPSEKCSKWILLEDYRKRVQNVTEFDDSLLRNFTLVTQHPEVIYTNQNVVWSKFETIFFTISGLIHYAPVFRDYVFRSMQEFYEDNVLYMEIRARLLPVYELSGEHHDEEWSVKTYQEVAQKFVETHPEFIGIKIIYSDHRSKDVAVIAESIRMAMGLRIKFPTVVAGFDLVGHEDTGHSLHDYKEALMIPAKDGVKLPYFFHAGETDWQGTSIDRNILDALMLNTTRIGHGFALSKHPAVRTYSWKKDIPIEVCPISNQVLKLVSDLRNHPVATLMATGHPMVISSDDPAMFGAKGLSYDFYEVFMGIGGMKADLRTLKQLAMNSIKYSTLLESEKNTFMEIWKKRWDKFIADVATK

SEQ ID NO: 1610 - protein, 344 aa, Homo sapiens
LSGSSEVFLPPDPIFASAMSENDNVFCAQLQCFHFPTLRHHDLHSWHAESCYEKSSFLCKRSQTCVDIKDNVVDEGFYFTPKGDDPCLSCTCHGGEPEMCVAALCERPQGCQQYRKDPKECCKFMCLDPDGNSLFDSMASGMRLVVSCISSFLILSLLLFMVHRLRQRRRERIESLIGANLHHFNLGRRIPGFDYGPDGFGTGLTPLHLSDDGEGGTFHFHDPPPPYTAYKYPDIGQPDDPPPPYEASIHPDSVFYDPADDDAFEPVEVSLPAPGDGGSEGALLRRLEQPLPTAGASLADLEDSADSSSALLVPPDPAQSGSTPAAEALPGGGRHSRSSLNTVV

SEQ ID NO: 1611 - protein, 145 aa, Homo sapiens
LCKRSQTCVDIKDNVVDEGFYFTPKGDDPCLSCTCHGGEPEMCVAALCERPQGCQQYRKDPKECCKFMCLDPDGNSLFDSMASGMRLVVSCISSFLILSLLLFMVHRLRQRRRERIESLIGANCKCPLRATTLVPIPTPGHPMSP

SEQ ID NO: 1612 - protein, 580 aa, Homo sapiens
LGPPSAAGRRAMKKKLVVLGLLAVVLVLVIVGLCLWLPSASKEPDNHVYTRAAVAADAKQCSKIGRDALRDGGSAVDAAIAALLCVGLMNAHSMGIGGGLFLTIYNSTTRKAEVINAREVAPRLAFATMFNSSEQSQKGGLSVAVPGEIRGYELAHQRHGRLPWARLFQPSIQLARQGFPVGKGLAAALENKRTVIEQQPVLCEVFCRDRKVLREGERLTLPQLADTYETLAIEGAQAFYNGSLTAQIVKDIQAAGGIVTAEDLNNYRAELIEHPLNISLGDVVLYMPSAPLSGPVLALILNILKGYNFSRESVESPEQKGLTYHRIVEAFRFAYAKRTLLGDPKFVDVTEVVRNMTSEFFAAQLRAQISDDTTHPISYYKPEFYTPDDGGTAHLSVVAEDGSAVSATSTINLYFGSKVRSPVSGILFNNEMDDFSSPSITNEFGVPPSPANFIQPGKQPLSSMCPTIMVGQDGQVRMVVGAAGGTQITTATALAIIYNLWFGYDVKRAVEEPRLHNQLLPNVTTVERNIDQAVTAALETRHHHTQIASTFIAVVQAIVRTAGGWAAASDSRKGGEPAGY

SEQ ID NO: 1613 - protein, 560 aa, Homo sapiens
LAEPLYLESCVNTISVVMSRESDVEAQQSHGSSACSQPHGSVTQSQGSSSQSQGISSSSTSTMPNSSQSSHSSSGTLSSLETVSTQELYSIPEDQEPEDQEPEEPTPAPWARLWALQDGFANLECVNDNYWFGRDKSCEYCFDEPLLKRTDKYRTYSKKHFRIFREVGPKNSYIAYIEDHSGNGTFVNTELVGKGKRRPLNNNSEIALSLSRNKVFVFFDLTVDDQSVYPKALRDEYIMSKTLGSGACGEVKLAFERKTCKKVAIKIISKRKFAIGSAREADPALNVETEIEILKKLNHPCIIKIKNFFDAEDYYIVLELMEGGELFDKVVGNKRLKEATCKLYFYQMLLAVQYLHENGIIHRDLKPENVLLSSQEEDCLIKITDFGHSKILGETSLMRTLCGTPTYLAPEVLVSVGTAGYNRAVDCWSLGVILFICLSGYPPFSEHRTQVSLKDQITSGKYNFIPEVWAEVSEKALDLVKKLLVVDPKARFTTEEALRHPWLQDEDMKRKFQDLLSEENESTALPQVLAQPSTSRKRPREGEAEGAETTKRPAVCAAVL

SEQ ID NO: 1614 - protein, 559 aa, Homo sapiens
LRLRRVCGSRWAHAVVMSRESDVEAQQSHGSSACSQPHGSVTQSQGSSSQSQGISSSSTSTMPNSSQSSHSSSGTLSSLETVSTQELYSIPEDQEPEDQEPEEPTPAPWARLWALQDGFANLECVNDNYWFGRDKSCEYCFDEPLLKRTDKYRTYSKKHFRIFREVGPKNSYIAYIEDHSGNGTFVNTELVGKGKRRPLNNNSEIALSLSRNKVFVFFDLTVDDQSVYPKALRDEYIMSKTLGSGACGEVKLAFERKTCKKVAIKIISKRKFAIGSAREADPALNVETEIEILKKLNHPCIIKIKNFFDAEDYYIVLELMEGGELFDKVVGNKRLKEATCKLYFYQMLLAVQYLHENGIIHRDLKPENVLLSSQEEDCLIKITDFGHSKILGETSLMRTLCGTPTYLAPEVLVSVGTAGYNRAVDCWSLGVILFICLSGYPPFSEHRTQVSLKDQITSGKYNFIPEVWAEVSEKALDLVKKLLVVDPKARFTTEEALRHPWLQDEDMKRKFQDLLSEENESTALPQVLAQPSTSRKRPREGEAEGAETTKRPAVCAAVL

SEQ ID NO: 1615 - protein, 602 aa, Homo sapiens
LRLRRVCGSRWAHAVVMSRESDVEAQQSHGSSACSQPHGSVTQSQGSSSQSQGISSSSTSTMPNSSQSSHSSSGTLSSLETVSTQELYSIPEDQEPEDQEPEEPTPAPWARLWALQDGFANLETESGHVTQSDLELLLSSDPPASASQSAGIRGVRHHPRPVCSLKCVNDNYWFGRDKSCEYCFDEPLLKRTDKYRTYSKKHFRIFREVGPKNSYIAYIEDHSGNGTFVNTELVGKGKRRPLNNNSEIALSLSRNKVFVFFDLTVDDQSVYPKALRDEYIMSKTLGSGACGEVKLAFERKTCKKVAIKIISKRKFAIGSAREADPALNVETEIEILKKLNHPCIIKIKNFFDAEDYYIVLELMEGGELFDKVVGNKRLKEATCKLYFYQMLLAVQYLHENGIIHRDLKPENVLLSSQEEDCLIKITDFGHSKILGETSLMRTLCGTPTYLAPEVLVSVGTAGYNRAVDCWSLGVILFICLSGYPPFSEHRTQVSLKDQITSGKYNFIPEVWAEVSEKALDLVKKLLVVDPKARFTTEEALRHPWLQDEDMKRKFQDLLSEENESTALPQVLAQPSTSRKRPREGEAEGAETTKRPAVCAAVL

SEQ ID NO: 1616 - protein, 168 aa, Homo sapiens
LFPTSSPETTSQALPAFTTEIQEASEGPGADEVQVFAPANALPARSEAAAVQPVIGISQRVRMNSKEKKDLGTLGYVLGITMMVIIIAIGAGIILGYSYKRGKDLKEQHDQKVCEREMQRITLPLSAFTNPTCEIVDEKTVVVHTSQTPVDPQEGTTPLMGQAGTPGA

SEQ ID NO: 1617 - protein, 163 aa, Homo sapiens
VGETTSQALPAFTTEIQEASEGPGADEVQVFAPANALPARSEAAAVQPVIGISQRVRMNSKEKKDLGTLGYVLGITMMVIIIAIGAGIILGYSYKRGKDLKEQHDQKVCEREMQRITLPLSAFTNPTCEIVDEKTVVVHTSQTPVDPQEGTTPLMGQAGTPGA

SEQ ID NO: 1618 - protein, 294 aa, Homo sapiens
LQGWDWEAEPPPRGPRLNTGRSITCKTKEARMLLAWVQAFLVSNMLLAEAYGSGGCFWDNGHLYREDQTSPAPGLRCLNWLDAQSGLASAPVSGAGNHSYCRNPDEDPRGPWCYVSGEAGVPEKRPCEDLRCPETTSQALPAFTTEIQEASEGPGADEVQVFAPANALPARSEAAAVQPVIGISQRVRMNSKEKKDLGTLGYVLGITMMVIIIAIGAGIILGYSYKRGKDLKEQHDQKVCEREMQRITLPLSAFTNPTCEIVDEKTVVVHTSQTPVDPQEGTTPLMGQAGTPGA

SEQ ID NO: 1619 - protein, 265 aa, Homo sapiens
LQGWDWEAEPPPRGPRLNTGRSITCKTKEARMLLAWVQAFLVSNMLLAEAYGSGGCFWDNGHLYREDQTSPAPGLRCLNWLDAQSGLASAPVSGAGNHSYCRNPDEDPRGPWCYVSGEAGVPEKRPCEDLRCPETTSQALPAFTTEIQEASEGPGADEVQVFAPANALPARSEAAAVQPVIGISQRVRMNSKEKKDLGTLGYVLGITMMVIIIAIGAGIILGYSYKRSVASLLGPLRRRGGRYTKSNFVAFLPKRKQDVENQLKM

SEQ ID NO: 1620 - protein, 81 aa, Homo sapiens
MAGDRFEFTFLRFQSAGFLLPKQQESFLGLNGIIKIKHLFFIFYFLRRSLVLSPRLECSGAISAHCNFRLPRYSDSPASAA

SEQ ID NO: 1621 - protein, 348 aa, Homo sapiens
VTGELHGKSLSDLAAGTMDSEKKRFTEEATKYFRERVSPVHLQILLTNNEAWKRFVTAAELPRDEADALYEALKKLRTYAAIEDEYVQQKDEQFREWFLKEFPQVKRKIQESIEKLRALANGIEEVHRGCTISNVVSSSTGAASGIMSLAGLVLAPFTAGTSLALTAAGVGLGAASAVTGITTSIVEHSYTSSAEAEASRLTATSIDRLKVFKEVMRDITPNLLSLLNNYYEATQTIGSEIRAIRQARARARLPVTTWRISAGSGGQAERTIAGTTRAVSRGARILSATTSGIFLALDVVNLVYESKHLHEGAKSASAEELRRQAQELEENLMELTQIYQRLNPCHTH

SEQ ID NO: 1622 - protein, 389 aa, Homo sapiens
VKVAGAPGRRTHIRKCPEATQGISQSLENVSGYYADARLEVGSTQLRTAGSCSHSFKRSFLEKKRFTEEATKYFRERVSPVHLQILLTNNEAWKRFVTAAELPRDEADALYEALKKLRTYAAIEDEYVQQKDEQFREWFLKEFPQVKRKIQESIEKLRALANGIEEVHRGCTISNVVSSSTGAASGIMSLAGLVLAPFTAGTSLALTAAGVGLGAASAVTGITTSIVEHSYTSSAEAEASRLTATSIDRLKVFKEVMRDITPNLLSLLNNYYEATQTIGSEIRAIRQARARARLPVTTWRISAGSGGQAERTIAGTTRAVSRGARILSATTSGIFLALDVVNLVYESKHLHEGAKSASAEELRRQAQELEENLMELTQIYQRLNPCHTH

SEQ ID NO: 1623 - protein, 719 aa, Homo sapiens
LGGSRVSQGSVGGGEAGAAGVGTWRLLKRTRAGGRMGLSAAAPLWGPPGLLLAIALHPALSVPPRRDYCVLGAGPAGLQMAYFLQRAGRDYAVFERAPRPGSFFTRYPRHRKLISINKRYTGKANAEFNLRHDWNSLLSHDPRLLFRHYSRAYFPDARDMVRYLGDFADTLGLRVQYNTTIAHVTLDKDRQAWNGHYFILTDQKGQVHQCSVLFVATGLSVPNQVDFPGSEYAEGYESVSVDPEDFVGQNVLILGRGNSAFETAENILGVTNFIHMLSRSRVRLSWATHYVGDLRAINNGLLDTYQLKSLDGLLESDLTDLAILKDSKGKFHVTPKFFLEEANTNQSADSITLPQDDNDNFAMRVPYDRVIRCLGWNFDFSIFNKSLRLNSGNAFGKKYPLIRASYESKGSRGLFILGTASHSVDYRKSAGGFIHGFRYTVRAVHRLLEHRHHSVTWPATELPITQLTSSIVRRVNEASGLYQMFGVLADVILLKENSTAFEYLEEFPIQMLAQLETLTGRKAKHGLFVINMEYGRNFSGPDKDVFFDDRSVGHTEDAWQSNFLHPVIYYYRYLPTEQEVRFRPAHWPLPRPTAIHHIVEDFLTDWTAPIGHILPLRRFLENCLDTDLRSFYAESCFLFALTRQKLPPFCQQGYLRMQGLVSTESLWQHRVESRLLRDYAPTGRRLEDSSQQLGDQEPLGSPLAPGPLAQSVDSNKEEL

SEQ ID NO: 1624 - protein, 715 aa, Homo sapiens
LVRARGAEPPRSKRAKRGLIRPRVAAGAAGRMGLSAAAPLWGPPGLLLAIALHPALSVPPRRDYCVLGAGPAGLQMAYFLQRAGRDYAVFERAPRPGSFFTRYPRHRKLISINKRYTGKANAEFNLRHDWNSLLSHDPRLLFRHYSRAYFPDARDMVRYLGDFADTLGLRVQYNTTIAHVTLDKDRQAWNGHYFILTDQKGQVHQCSVLFVATGLSVPNQVDFPGSEYAEGYESVSVDPEDFVGQNVLILGRGNSAFETAENILGVTNFIHMLSRSRVRLSWATHYVGDLRAINNGLLDTYQLKSLDGLLESDLTDLAILKDSKGKFHVTPKFFLEEANTNQSADSITLPQDDNDNFAMRVPYDRVIRCLGWNFDFSIFNKSLRLNSGNAFGKKYPLIRASYESKGSRGLFILGTASHSVDYRKSAGGFIHGFRYTVRAVHRLLEHRHHSVTWPATELPITQLTSSIVRRVNEASGLYQMFGVLADVILLKENSTAFEYLEEFPIQMLAQLETLTGRKAKHGLFVINMEYGRNFSGPDKDVFFDDRSVGHTEDAWQSNFLHPVIYYYRYLPTEQEVRFRPAHWPLPRPTAIHHIVEDFLTDWTAPIGHILPLRRFLENCLDTDLRSFYAESCFLFALTRQKLPPFCQQGYLRMQGLVSTESLWQHRVESRLLRDYAPTGRRLEDSSQQLGDQEPLGSPLAPGPLAQSVDSNKEEL

SEQ ID NO: 1625 - protein, 909 aa, Homo sapiens
VLVPACPELTREMVLAQGLLSMALLALCWERSLAGAEETIPLQTLRCYNDYTSHITCRWADTQDAQRLVNVTLIRRVNEDLLEPVSCDLSDDMPWSACPHPRCVPRRCVIPCQSFVVTDVDYFSFQPDRPLGTRLTVTLTQHVQPPEPRDLQISTDQDHFLLTWSVALGSPQSHWLSPGDLEFEVVYKRLQDSWEDAAILLSNTSQATLGPEHLMPSSTYVARVRTRLAPGSRLSGRPSKWSPEVCWDSQPGDEAQPQNLECFFDGAAVLSCSWEVRKEVASSVSFGLFYKPSPDAGEEECSPVLREGLGSLHTRHHCQIPVPDPATHGQYIVSVQPRRAEKHIKSSVNIQMAPPSLNVTKDGDSYSLRWETMKMRYEHIDHTFEIQYRKDTATWKDSKTETLQNAHSMALPALEPSTRYWARVRVRTSRTGYNGIWSEWSEARSWDTESVLPMWVLALIVIFLTIAVLLALRFCGIYGYRLRRKWEEKIPNPSKSHLFQNGSAELWPPGSMSAFTSGSPPHQGPWGSRFPELEGVFPVGFGDSEVSPLTIEDPKHVCDPPSGPDTTPAASDLPTEQPPSPQPGPPAASHTPEKQASSFDFNGPYLGPPHSRSLPDILGQPEPPQEGGSQKSPPPGSLEYLCLPAGGQVQLVPLAQAMGPGQAVEVERRPSQGAAGSPSLESGGGPAPPALGPRVGGQDQKDSPVAIPMSSGDTEDPGVASGYVSSADLVFTPNSGASSVSLVPSLGLPSDQTPSLCPGLASGPPGAPGPVKSGFEGYVELPPIEGRSPRSPRNNPVPPEAKSPVLNPGERPADVSPTSPQPEGLLVLQQVGDYCFLPGLGPGPLSLRSKPSSPGPGPEIKNLDQAFQVKKPPGQAVPQVPVIQLFKALKQQDYLSLPPWEVNKPGEVC

SEQ ID NO: 1626 - protein, 915 aa, Homo sapiens
VLVPACPELTREMVLAQGLLSMALLALCWERSLAGAEETIPLQTLRCYNDYTSHITCRWADTQDAQRLVNVTLIRRVNEDLLEPVSCDLSDDMPWSACPHPRCVPRRCVIPCQSFVVTDVDYFSFQPDRPLGTRLTVTLTQHVQPPEPRDLQISTDQDHFLLTWSVALGSPQSHWLSPGDLEFEVVYKRLQDSWEDAAILLSNTSQATLGPEHLMPSSTYVARVRTRLAPGSRLSGRPSKWSPEVCWDSQPGDEAQPQNLECFFDGAAVLSCSWEVRKEVASSVSFGLFYKPSPDAGSAVLLREEECSPVLREGLGSLHTRHHCQIPVPDPATHGQYIVSVQPRRAEKHIKSSVNIQMAPPSLNVTKDGDSYSLRWETMKMRYEHIDHTFEIQYRKDTATWKDSKTETLQNAHSMALPALEPSTRYWARVRVRTSRTGYNGIWSEWSEARSWDTESVLPMWVLALIVIFLTIAVLLALRFCGIYGYRLRRKWEEKIPNPSKSHLFQNGSAELWPPGSMSAFTSGSPPHQGPWGSRFPELEGVFPVGFGDSEVSPLTIEDPKHVCDPPSGPDTTPAASDLPTEQPPSPQPGPPAASHTPEKQASSFDFNGPYLGPPHSRSLPDILGQPEPPQEGGSQKSPPPGSLEYLCLPAGGQVQLVPLAQAMGPGQAVEVERRPSQGAAGSPSLESGGGPAPPALGPRVGGQDQKDSPVAIPMSSGDTEDPGVASGYVSSADLVFTPNSGASSVSLVPSLGLPSDQTPSLCPGLASGPPGAPGPVKSGFEGYVELPPIEGRSPRSPRNNPVPPEAKSPVLNPGERPADVSPTSPQPEGLLVLQQVGDYCFLPGLGPGPLSLRSKPSSPGPGPEIKNLDQAFQVKKPPGQAVPQVPVIQLFKALKQQDYLSLPPWEVNKPGEVC

SEQ ID NO: 1627 - protein, 901 aa, Homo sapiens
VLVPACPELTREMVLAQGLLSMALLALCWERSLAGAEETIPLQTLRCYNDYTSHITCRWADTQDAQRLVNVTLIRRVNEDLLEPVSCDLSDDMPWSACPHPRCVPRRCVIPCQSFVVTDVDYFSFQPDRPLGTRLTVTLTQHVQPPEPRDLQISTDQDHFLLTWSVALGSPQSHWLSPGDLEFEVVYKRLQDSWEDAAILLSNTSQATLGPEHLMPSSTYVARVRTRLAPGSRLSGRPSKWSPEVCWDSQPGDEAQPQNLECFFDGAAVLSCSWEVRKEVASSVSFGLFYKPSPDAGEEECSPVLREGLGSLHTRHHCQIPVPDPATHGQYIVSVQPRRAEKHIKSSVNIQMAPPSLNVTKDGDSYSLRWETMKMRYEHIDHTFEIQYRKDTATWKDSKTETLQNAHSMALPALEPSTRYWARVRVRTSRTGYNGIWSEWSEARSWDTESVLPMWVLALIVIFLTIAVLLALRFCGIYGYRLRRKWEEKIPNPSKSHLFQNGSAELWPPGSMSAFTSGSPPHQGPWGSRFPELEGVFPVGFGDSEVSPLTIEDPKHVCDPPSGPDTTPAASDLPTEQPPSPQPGPPAASHTPEKQASSFDFNGPYLGPPHSRSLPDILGQPEPPQEGGSQKSPPPGSLEYLCLPAGGQVQLVPLAQAMGPGQAVEVERRPSQGAAGSPSLESGGGPAPPALGPRVGGQDQKDSPVAIPMSSGDTEDPGVASGYVSSADLVFTPNSGASSVSLVPSLGLPSDQTPSLCPGLASGPPGAPGPVKSGFEGYVELPPIEGRSPRSPRNNPVPPEAKSPVLNPGERPADVSPTSPQPEGLLVLQQVGDYCFLPGLGPGPLSLRSKPSSPGPGPEIKNLDQAFQVKKPPGQAVPQVPVIQLFKALVVSVMSVGPPVP

SEQ ID NO: 1628 - protein, 151 aa, Homo sapiens
LRPPQPCGTGFLPRLHPVDVMAAPALSWRLPLLILLLPLATSWASAAVNGTSQFTCFYNSRANISCVWSQDGALQDTSCQVHAWPDRRRWNQTCELLPVSQASWACNLILGAPDSQKLTTVDIVTLRVLCREGVRWRVMAIQDFKPFENRE

SEQ ID NO: 1629 - protein, 147 aa, Homo sapiens
VSPTVMAAAVAAAGAGEPQSPDELLPKGDAEKPEEELEEDDDEELDETLSERLWGLTEMFPERVRSAAGATFDLSLFVAQKMYRFSRAALWIGTTSFMILVLPVVFETEKLQMEQQQQLQQRQILLGPNTGLSGGMPGALPSLPGKI

SEQ ID NO: 1630 - protein, 150 aa, Homo sapiens
LLWEAGLGALLGPGCPSSSGARRLPVPQRGQEWMSLFRLRPASTPPQLDETLSERLWGLTEMFPERVRSAAGATFDLSLFVAQKMYRFSRAALWIGTTSFMILVLPVVFETEKLQMEQQQQLQQRQILLGPNTGLSGGMPGALPSLPGKI

SEQ ID NO: 1631 - protein, 753 aa, Homo sapiens
LQVSPPSAGQRLRGVPVWAAGAFRFSSGEESTSHLIMSRRSQRLTRYSQGDDDGSSSSGGSSVAGSQSTLFKDSPLRTLKRKSSNMKRLSPAPQLGPSSDAHTSYYSESLVHESWFPPRSSLEELHGDANWGEDLRVRRRRGTGGSESSRASGLVGRKATEDFLGSSSGYSSEDDYVGYSDVDQQSSSSRLRSAVSRAGSLLWMVATSPGRLFRLLYWWAGTTWYRLTTAASLLDVFVLTRRFSSLKTFLWFLLPLLLLTCLTYGAWYFYPYGLQTFHPALVSWWAAKDSRRPDEGWEARDSSPHFQAEQRVMSRVHSLERRLEALAAEFSSNWQKEAMRLERLELRQGAPGQGGGGGLSHEDTLALLEGLVSRREAALKEDFRRETAARIQEELSALRAEHQQDSEDLFKKIVRASQESEARIQQLKSEWQSMTQESFQESSVKELRRLEDQLAGLQQELAALALKQSSVAEEVGLLPQQIQAVRDDVESQFPAWISQFLARGGGGRVGLLQREEMQAQLRELESKILTHVAEMQGKSAREAAASLSLTLQKEGVIGVTEEQVHHIVKQALQRYSEDRIGLADYALESGGASVISTRCSETYETKTALLSLFGIPLWYHSQSPRVILQPDVHPGNCWAFQGPQGFAVVRLSARIRPTAVTLEHVPKALSPNSTISSAPKDFAIFGFDEDLQQEGTLLGKFTYDQDGEPIQTFHFQAPTMATYQVVELRILTNWGHPEYTCIYRFRVHGEPAH

SEQ ID NO: 1632 - protein, 806 aa, Homo sapiens
LSRVAALRVPARPGPGRCVALSGAPPAGSPRGKGARPGGGLASDAPGRARSRRGSRFSSGEESTSHLIMSRRSQRLTRYSQGDDDGSSSSGGSSVAGSQSTLFKDSPLRTLKRKSSNMKRLSPAPQLGPSSDAHTSYYSESLVHESWFPPRSSLEELHGDANWGEDLRVRRRRGTGGSESSRASGLVGRKATEDFLGSSSGYSSEDDYVEDSEGRGSKVTETEPVSSFPAGYSDVDQQSSSSRLRSAVSRAGSLLWMVATSPGRLFRLLYWWAGTTWYRLTTAASLLDVFVLTRRFSSLKTFLWFLLPLLLLTCLTYGAWYFYPYGLQTFHPALVSWWAAKDSRRPDEGWEARDSSPHFQAEQRVMSRVHSLERRLEALAAEFSSNWQKEAMRLERLELRQGAPGQGGGGGLSHEDTLALLEGLVSRREAALKEDFRRETAARIQEELSALRAEHQQDSEDLFKKIVRASQESEARIQQLKSEWQSMTQESFQESSVKELRRLEDQLAGLQQELAALALKQSSVAEEVGLLPQQIQAVRDDVESQFPAWISQFLARGGGGRVGLLQREEMQAQLRELESKILTHVAEMQGKSAREAAASLSLTLQKEGVIGVTEEQVHHIVKQALQRYSEDRIGLADYALESGGASVISTRCSETYETKTALLSLFGIPLWYHSQSPRVILQPDVHPGNCWAFQGPQGFAVVRLSARIRPTAVTLEHVPKALSPNSTISSAPKDFAIFGFDEDLQQEGTLLGKFTYDQDGEPIQTFHFQAPTMATYQVVELRILTNWGHPEYTCIYRFRVHGEPAH

SEQ ID NO: 1633 - protein, 775 aa, Homo sapiens
LAAAPAPAPAGAAAPRGRQTRLLCLGRKDSRCSSSSWIQVAGAKPGFSSGEESTSHLIMSRRSQRLTRYSQGDDDGSSSSGGSSVAGSQSTLFKDSPLRTLKRKSSNMKRLSPAPQLGPSSDAHTSYYSESLVHESWFPPRSSLEELHGDANWGEDLRVRRRRGTGGSESSRASGLVGRKATEDFLGSSSGYSSEDDYVGYSDVDQQSSSSRLRSAVSRAGSLLWMVATSPGRLFRLLYWWAGTTWYRLTTAASLLDVFVLTRRFSSLKTFLWFLLPLLLLTCLTYGAWYFYPYGLQTFHPALVSWWAAKDSRRPDEGWEARDSSPHFQAEQRVMSRVHSLERRLEALAAEFSSNWQKEAMRLERLELRQGAPGQGGGGGLSHEDTLALLEGLVSRREAALKEDFRRETAARIQEELSALRAEHQQDSEDLFKKIVRASQESEARIQQLKSEWQSMTQESFQESSVKELRRLEDQLAGLQQELAALALKQSSVAEEVGLLPQQIQAVRDDVESQFPAWISQFLARGGGGRVGLLQREEMQAQLRELESKILTHVAEMQGKSAREAAASLSLTLQKEGVIGVTEEQVHHIVKQALQRYSEDRIGLADYALESGGASVISTRCSETYETKTALLSLFGIPLWYHSQSPRVILQPDVHPGNCWAFQGPQGFAVVRLSARIRPTAVTLEHVPKALSPNSTISSAPKDFAIFGFDEDLQQEGTLLGKFTYDQDGEPIQTFHFQAPTMATYQVVELRILTNWGHPEYTCIYRFRVHGEPAH

SEQ ID NO: 1634 - protein, 191 aa, Homo sapiens
LCGGVGTMRRGPRSLRGRDAPAPTPCVPAECFDLLVRHCVACGLLRTPRPKPAGASSPAPRTALQPQESVGAGAGEAALPLPGLLFGAPALLGLALVLALVLVGLVSWRRRQRRLRGASSAEAPDGDKDAPEPLDKVIILSPGISDATAPAWPPPGEDPGTTPPGHSVPVPATELGSTELVTTKTAGPEQQ

SEQ ID NO: 1635 - protein, 141 aa, Homo sapiens
LQCFPSAIASHVAAECPSKCLVEVLIAISSLTSPLLFTASGYLSFSIMRIVEMFKDYPPAIKPSYDVLLLLLLLVLLLQAGLNTGTAIQCVRFKVSARLQGASWDTQNGPQERLAGEVARSPLKEFDKEKAWRAVVVQMAQ

SEQ ID NO: 1636 - protein, 403 aa, Homo sapiens
LNPDYSDKELVTRGCTFSTAVVSPSAMTQEPFREELAYDRMPTLERGRQDPASYAPDAKPSDLQLSKRLPPCFSHKTWVFSVLMGSCLLVTSGFSLYLGNVFPAEMDYLRCAAGSCIPSAIVSFTVSRRNANVIPNFQILFVSTFAVTTTCLIWFGCKLVLNPSAININFNLILLLLLELLMAATVIIAARSSEEDCKKKKGSMSDSANILDEVPFPARVLKSYSVVEVIAGISAVLGGIIALNVDDSVSGPHLSVTFFWILVACFPSAIASHVAAECPSKCLVEVLIAISSLTSPLLFTASGYLSFSIMRIVEMFKDYPPAIKPSYDVLLLLLLLVLLLQAGLNTGTAIQCVRFKVSARLQGASWDTQNGPQERLAGEVARSPLKEFDKEKAWRAVVVQMAQ

SEQ ID NO: 1637 - protein, 311 aa, Homo sapiens
LRPACERVAPAFPEPAGQSAGSWRSALPLVLGPLTRGPAARSIRSMLLLTRSPTAWHRLSQLKPRVLPGTLGGQALHLRSWLLSRQGPAETGGQGQPQGPGLRTRLLITGLFGAGLGGAWLALRAEKERLQQQKRTEALRQAAVGQGDFHLLDHRGRARCKADFRGQWVLMYFGFTHCPDICPDELEKLVQVVRQLEAEPGLPPVQPVFITVDPERDDVEAMARYVQDFHPRLLGLTGSTKQVAQASHSYRVYYNAGPKDEDQDYIVDHSIAIYLLNPDGLFTDYYGRSRSAEQISDSVRRHMAAFRSVLS

SEQ ID NO: 1638 - protein, 321 aa, Homo sapiens
LRPACERVAPAFPEPAGQSAGSWRSALPLVLGPLTRGPAARCGRRGWEGRRSIRSMLLLTRSPTAWHRLSQLKPRVLPGTLGGQALHLRSWLLSRQGPAETGGQGQPQGPGLRTRLLITGLFGAGLGGAWLALRAEKERLQQQKRTEALRQAAVGQGDFHLLDHRGRARCKADFRGQWVLMYFGFTHCPDICPDELEKLVQVVRQLEAEPGLPPVQPVFITVDPERDDVEAMARYVQDFHPRLLGLTGSTKQVAQASHSYRVYYNAGPKDEDQDYIVDHSIAIYLLNPDGLFTDYYGRSRSAEQISDSVRRHMAAFRSVLS

SEQ ID NO: 1639 - protein, 727 aa, Homo sapiens
VSGVELAQQASMARMSFVIAACQLVLGLLMTSLTESSIQNSECPQLCVCEIRPWFTPQSTYREATTVDCNDLRLTRIPSNLSSDTQVLLLQSNNIAKTVDELQQLFNLTELDFSQNNFTNIKEVGLANLTQLTTLHLEENQITEMTDYCLQDLSNLQELYINHNQISTISAHAFAGLKNLLRLHLNSNKLKVIDSRWFDSTPNLEILMIGENPVIGILDMNFKPLANLRSLVLAGMYLTDIPGNALVGLDSLESLSFYDNKLVKVPQLALQKVPNLKFLDLNKNPIHKIQEGDFKNMLRLKELGINNMGELVSVDRYALDNLPELTKLEATNNPKLSYIHRLAFRSVPALESLMLNNNALNAIYQKTVESLPNLREISIHSNPLRCDCVIHWINSNKTNIRFMEPLSMFCAMPPEYKGHQVKEVLIQDSSEQCLPMISHDSFPNRLNVDIGTTVFLDCRAMAEPEPEIYWVTPIGNKITVETLSDKYKLSSEGTLEISNIQIEDSGRYTCVAQNVQGADTRVATIKVNGTLLDGTQVLKIYVKQTESHSILVSWKVNSNVMTSNLKWSSATMKIDNPHITYTARVPVDVHEYNLTHLQPSTDYEVCLTVSNIHQQTQKSCVNVTTKNAAFAVDISDQETSTALAAVMGSMFAVISLASIAVYFAKRFKRKNYHHSLKKYMQKTSSIPLNELYPPLINLWEGDSEKDKDGSADTKPTQVDTSRSYYMW

SEQ ID NO: 1640 - protein, 80 aa, Homo sapiens
LRCCLNSFSLQGKGRDLHWGLTGVSGFPKTSPSWLPPRHGPAMHPPSHHVPRMNVLYTFNPPLVWFLGVGEGFLFVCLFS

SEQ ID NO: 1641 - protein, 1254 aa, Homo sapiens
LGPARARTAANMGDMTNSDFYSKNQRNESSHGGEFGCTMEELRSLMELRGTEAVVKIKETYGDTEAICRRLKTSPVEGLPGTAPDLEKRKQIFGQNFIPPKKPKTFLQLVWEALQDVTLIILEIAAIISLGLSFYHPPGEGNEGCATAQGGAEDEGEAEAGWIEGAAILLSVICVVLVTAFNDWSKEKQFRGLQSRIEQEQKFTVVRAGQVVQIPVAEIVVGDIAQVKYGDLLPADGLFIQGNDLKIDESSLTGESDQVRKSVDKDPMLLSGTHVMEGSGRMLVTAVGVNSQTGIIFTLLGAGGEEEEKKDKKGVKKGDGLQLPAADGAAASNAADSANASLVNGKMQDGNVDASQSKAKQQDGAAAMEMQPLKSAEGGDADDRKKASMHKKEKSVLQGKLTKLAVQIGKAGLVMSAITVIILVLYFTVDTFVVNKKPWLPECTPVYVQYFVKFFIIGVTVLVVAVPEGLPLAVTISLAYSVKKMMKDNNLVRHLDACETMGNATAICSDKTGTLTTNRMTVVQAYVGDVHYKEIPDPSSINTKTMELLINAIAINSAYTTKILPPEKEGALPRQVGNKTECGLLGFVLDLKQDYEPVRSQMPEEKLYKVYTFNSVRKSMSTVIKLPDESFRMYSKGASEIVLKKCCKILNGAGEPRVFRPRDRDEMVKKVIEPMACDGLRTICVAYRDFPSSPEPDWDNENDILNELTCICVVGIEDPVRPEVPEAIRKCQRAGITVRMVTGDNINTARAIAIKCGIIHPGEDFLCLEGKEFNRRIRNEKGEIEQERIDKIWPKLRVLARSSPTDKHTLVKGIIDSTHTEQRQVVAVTGDGTNDGPALKKADVGFAMGIAGTDVAKEASDIILTDDNFSSIVKAVMWGRNVYDSISKFLQFQLTVNVVAVIVAFTGACITQDSPLKAVQMLWVNLIMDTFASLALATEPPTETLLLRKPYGRNKPLISRTMMKNILGHAVYQLALIFTLLFVGEKMFQIDSGRNAPLHSPPSEHYTIIFNTFVMMQLFNEINARKIHGERNVFDGIFRNPIFCTIVLGTFAIQIVIVQFGGKPFSCSPLQLDQWMWCIFIGLGELVWGQVIATIPTSRLKFLKEAGRLTQKEEIPEEELNEDVEEIDHAERELRRGQILWFRGLNRIQTQIRVVKAFRSSLYEGLEKPESRTSIHNFMAHPEFRIEDSQPHIPLIDDTDLEEDAALKQNSSPPSSLNKNNSAIDSGINLTTDTSKSATSSSPGSPIHSLETSL

SEQ ID NO: 1642 - protein, 1209 aa, Homo sapiens
LGPARARTAANMGDMTNSDFYSKNQRNESSHGGEFGCTMEELRSLMELRGTEAVVKIKETYGDTEAICRRLKTSPVEGLPGTAPDLEKRKQIFGQNFIPPKKPKTFLQLVWEALQDVTLIILEIAAIISLGLSFYHPPGEGNEGCATAQGGAEDEGEAEAGWIEGAAILLSVICVVLVTAFNDWSKEKQFRGLQSRIEQEQKFTVVRAGQVVQIPVAEIVVGDIAQVKYGDLLPADGLFIQGNDLKIDESSLTGESDQVRKSVDKDPMLLSGTHVMEGSGRMLVTAVGVNSQTGIIFTLLGAGGEEEEKKDKKAKQQDGAAAMEMQPLKSAEGGDADDRKKASMHKKEKSVLQGKLTKLAVQIGKAGLVMSAITVIILVLYFTVDTFVVNKKPWLPECTPVYVQYFVKFFIIGVTVLVVAVPEGLPLAVTISLAYSVKKMMKDNNLVRHLDACETMGNATAICSDKTGTLTTNRMTVVQAYVGDVHYKEIPDPSSINTKTMELLINAIAINSAYTTKILPPEKEGALPRQVGNKTECGLLGFVLDLKQDYEPVRSQMPEEKLYKVYTFNSVRKSMSTVIKLPDESFRMYSKGASEIVLKKCCKILNGAGEPRVFRPRDRDEMVKKVIEPMACDGLRTICVAYRDFPSSPEPDWDNENDILNELTCICVVGIEDPVRPEVPEAIRKCQRAGITVRMVTGDNINTARAIAIKCGIIHPGEDFLCLEGKEFNRRIRNEKGEIEQERIDKIWPKLRVLARSSPTDKHTLVKGIIDSTHTEQRQVVAVTGDGTNDGPALKKADVGFAMGIAGTDVAKEASDIILTDDNFSSIVKAVMWGRNVYDSISKFLQFQLTVNVVAVIVAFTGACITQDSPLKAVQMLWVNLIMDTFASLALATEPPTETLLLRKPYGRNKPLISRTMMKNILGHAVYQLALIFTLLFVGEKMFQIDSGRNAPLHSPPSEHYTIIFNTFVMMQLFNEINARKIHGERNVFDGIFRNPIFCTIVLGTFAIQIVIVQFGGKPFSCSPLQLDQWMWCIFIGLGELVWGQVIATIPTSRLKFLKEAGRLTQKEEIPEEELNEDVEEIDHAERELRRGQILWFRGLNRIQTQIRVVKAFRSSLYEGLEKPESRTSIHNFMAHPEFRIEDSQPHIPLIDDTDLEEDAALKQNSSPPSSLNKNNSAIDSGINLTTDTSKSATSSSPGSPIHSLETSL

SEQ ID NO: 1643 - protein, 1165 aa, Homo sapiens
LGPARARTAANMGDMTNSDFYSKNQRNESSHGGEFGCTMEELRSLMELRGTEAVVKIKETYGDTEAICRRLKTSPVEGLPGTAPDLEKRKQIFGQNFIPPKKPKTFLQLVWEALQDVTLIILEIAAIISLGLSFYHPPGEGNEGCATAQGGAEDEGEAEAGWIEGAAILLSVICVVLVTAFNDWSKEKQFRGLQSRIEQEQKFTVVRAGQVVQIPVAEIVVGDIAQVKYGDLLPADGLFIQGNDLKIDESSLTGESDQVRKSVDKDPMLLSGTHVMEGSGRMLVTAVGVNSQTGIIFTLLGAGGEEEEKKDKKAKQQDGAAAMEMQPLKSAEGGDADDRKKASMHKKEKSVLQGKLTKLAVQIGKAGLVMSAITVIILVLYFTVDTFVVNKKPWLPECTPVYVQYFVKFFIIGVTVLVVAVPEGLPLAVTISLAYSVKKMMKDNNLVRHLDACETMGNATAICSDKTGTLTTNRMTVVQAYVGDVHYKEIPDPSSINTKTMELLINAIAINSAYTTKILPPEKEGALPRQVGNKTECGLLGFVLDLKQDYEPVRSQMPEEKLYKVYTFNSVRKSMSTVIKLPDESFRMYSKGASEIVLKKCCKILNGAGEPRVFRPRDRDEMVKKVIEPMACDGLRTICVAYRDFPSSPEPDWDNENDILNELTCICVVGIEDPVRPEVPEAIRKCQRAGITVRMVTGDNINTARAIAIKCGIIHPGEDFLCLEGKEFNRRIRNEKGEIEQERIDKIWPKLRVLARSSPTDKHTLVKGIIDSTHTEQRQVVAVTGDGTNDGPALKKADVGFAMGIAGTDVAKEASDIILTDDNFSSIVKAVMWGRNVYDSISKFLQFQLTVNVVAVIVAFTGACITQDSPLKAVQMLWVNLIMDTFASLALATEPPTETLLLRKPYGRNKPLISRTMMKNILGHAVYQLALIFTLLFVGEKMFQIDSGRNAPLHSPPSEHYTIIFNTFVMMQLFNEINARKIHGERNVFDGIFRNPIFCTIVLGTFAIQIVIVQFGGKPFSCSPLQLDQWMWCIFIGLGELVWGQVIATIPTSRLKFLKEAGRLTQKEEIPEEELNEDVEEIDHAERELRRGQILWFRGLNRIQTQIEVVNTFKSGASFQGALRRQSSVTSQSQDVANLSSPSRVSLSNALSSPTSLPPAAAGQG

SEQ ID NO: 1644 - protein, 326 aa, Homo sapiens
LGPARARTAANMGDMTNSDFYSKNQRNESSHGGEFGCTMEELRSLMELRGTEAVVKIKETYGDTEAICRRLKTSPVEGLPGTAPDLEKRKQIFGQNFIPPKKPKTFLQLVWEALQDVTLIILEIAAIISLGLSFYHPPGEGNEGCATAQGGAEDEGEAEAGWIEGAAILLSVICVVLVTAFNDWSKEKQFRGLQSRIEQEQKFTVVRAGQVVQIPVAEIVVGDIAQVKYGDLLPADGLFIQGNDLKIDESSLTGESDQVRKSVDKDPMLLSGTHVMEGSGRMLVTAVGVNSQTGIIFTLLGAGGEEEEKKDKKGKPNPLADQERSS

SEQ ID NO: 1645 - protein, 999 aa, Homo sapiens
VAGCRPRDPAARWRESAASAGPGSRLPARPAPTAAAMWCLHCNSERTQSLLELELDSGVEGEAPSSETGTSLDSPSAYPQGPLVPGSSLSPDHYEHTSVGAYGLYSGPPGQQQRTRRPKLQHSTSILRKQAEEEAIKRSRSLSESYELSSDLQDKQVEMLERKYGGRLVTRHAARTIQTAFRQYQMNKNFERLRSSMSENRMSRRIVLSNMRMQFSFEGPEKVHSSYFEGKQVSVTNDGSQLGALVSPECGDLSEPTTLKSPAPSSDFADAITELEDAFSRQVKSLAESIDDALNCRSLHTEEAPALDAARARDTEPQTALHGMDHRKLDEMTASYSDVTLYIDEEELSPPLPLSQAGDRPSSTESDLRLRAGGAAPDYWALAHKEDKADTDTSCRSTPSLERQEQRLRVEHLPLLTIEPPSDSSVDLSDRSERGSLKRQSAYERSLGGQQGSPKHGPHSGAPKSLPREEPELRPRPPRPLDSHLAINGSANRQSKSESDYSDGDNDSINSTSNSNDTINCSSESSSRDSLREQTLSKQTYHKEARNSWDSPAFSNDVIRKRHYRIGLNLFNKKPEKGVQYLIERGFVPDTPVGVAHFLLQRKGLSRQMIGEFLGNRQKQFNRDVLDCVVDEMDFSTMELDEALRKFQAHIRVQGEAQKVERLIEAFSQRYCICNPGVVRQFRNPDTIFILAFAIILLNTDMYSPNVKPERKMKLEDFIKNLRGVDDGEDIPREMLMGIYERIRKRELKTNEDHVSQVQKVEKLIVGKKPIGSLHPGLGCVLSLPHRRLVCYCRLFEVPDPNKPQKLGLHQREIFLFNDLLVVTKIFQKKKNSVTYSFRQSFSLYGMQVLLFENQYYPNGIRLTSSVPGADIKVLINFNAPNPQDRKKFTDDLRESIAEVQEMEKHRIESELEKQKGVVRPSMSQCSSLKKESGNGTLSRACLDDSYASGEGLKRSALSSSLRDLSEAGKRGRRSSAGSLESNVEFQPFEPLQPSVLCS

SEQ ID NO: 1646 - protein, 936 aa, Homo sapiens
LRSQPGCGCLWQEAPTHSTGPSVEGEAPSSETGTSLDSPSAYPQGPLVPGSSLSPDHYEHTSVGAYGLYSGPPGQQQRTRRPKLQHSTSILRKQAEEEAIKRSRSLSESYELSSDLQDKQVEMLERKYGGRLVTRHAARTIQTAFRQYQMNKNFERLRSSMSENRMSRRIVLSNMRMQFSFEGPEKVHSSYFEGKQVSVTNDGSQLGALVSPECGDLSEPTTLKSPAPSSDFADAITELEDAFSRQVKSLAESIDDALNCRSLHTEEAPALDAARARDTEPQTALHGMDHRKLDEMTASYSDVTLYIDEEELSPPLPLSQAGDRPSSTESDLRLRAGGAAPDYWALAHKEDKADTDTSCRSTPSLERQEQRLRVEHLPLLTIEPPSDSSVDLSDRSERGSLKRQSAYERSLGGQQGSPKHGPHSGAPKSLPREEPELRPRPPRPLDSHLAINGSANRQSKSESDYSDGDNDSINSTSNSNDTINCSSESSSRDSLREQTLSKQTYHKEARNSWDSPAFSNDVIRKRHYRIGLNLFNKKPEKGVQYLIERGFVPDTPVGVAHFLLQRKGLSRQMIGEFLGNRQKQFNRDVLDCVVDEMDFSTMELDEALRKFQAHIRVQGEAQKVERLIEAFSQRYCICNPGVVRQFRNPDTIFILAFAIILLNTDMYSPNVKPERKMKLEDFIKNLRGVDDGEDIPREMLMGIYERIRKRELKTNEDHVSQVQKVEKLIVGKKPIGSLHPGLGCVLSLPHRRLVCYCRLFEVPDPNKPQKLGLHQREIFLFNDLLVVTKIFQKKKNSVTYSFRQSFSLYGMQVLLFENQYYPNGIRLTSSVPGADIKVLINFNAPNPQDRKKFTDDLRESIAEVQEMEKHRIESELEKQKGVVRPSMSQCSSLKKESGNGTLSRACLDDSYASGEGLKRSALSSSLRDLSEAGVHH

SEQ ID NO: 1647 - protein, 1248 aa, Homo sapiens
VPRGSYRRGDRPGLAWTMVLLWEPAGAWLALGLALALGPSVAAAAPRQDCTGVECPPLENCIEEALEPGACCATCVQQGCACEGYQYYDCLQGGFVRGRVPAGQSYFVDFGSTECSCPPGGGKISCQFMLCPELPPNCIEAVVVADSCPQCGQVGCVHAGHKYAAGHTVHLPPCRACHCPDAGGELICYQLPGCHGNFSDAEEGDPERHYEDPYSYDQEVAEVEAATALGGEVQAGAVQAGAGGPPAALGGGSQPLSTIQAPPWPAVLPRPTAAAALGPPAPVQAKARRVTEDSEEEEEEEEEREEMAVTEQLAAGGHRGLDGLPTTAPAGPSLPIQEERAEAGARAEAGARPEENLILDAQATSRSTGPEGVTHAPSLGKAALVPTQAVPGSPRDPVKPSPHNILSTSLPDAAWIPPTREVPRKPQVLPHSHVEEDTDPNSVHSIPRSSPEGSTKDLIETCCAAGQQWAIDNDECLEIPESGTEDNVCRTAQRHCCVSYLQEKSCMAGVLGAKEGETCGAEDNDSCGISLYKQCCDCCGLGLRVRAEGQSCESNPNLGYPCNHVMLSCCEGEEPLIVPEVRRPPEPAAAPRRVSEAEMAGREALSLGTEAELPNSLPGDDQDECLLLPGELCQHLCINTVGSYHCACFPGFSLQDDGRTCRPEGHPPQPEAPQEPALKSEFSQVASNTIPLPLPQPNTCKDNGPCKQVCSTVGGSAICSCFPGYAIMADGVSCEDQDECLMGAHDCSRRQFCVNTLGSFYCVNHTVLCADGYILNAHRKCVDINECVTDLHTCSRGEHCVNTLGSFHCYKALTCEPGYALKDGECEDVDECAMGTHTCQPGFLCQNTKGSFYCQARQRCMDGFLQDPEGNCVDINECTSLSEPCRPGFSCINTVGSYTCQRNPLICARGYHASDDGTKCVDVNECETGVHRCGEGQVCHNLPGSYRCDCKAGFQRDAFGRGCIDVNECWASPGRLCQHTCENTLGSYRCSCASGFLLAADGKRCEDVNECEAQRCSQECANIYGSYQCYCRQGYQLAEDGHTCTDIDECAQGAGILCTFRCLNVPGSYQCACPEQGYTMTANGRSCKDVDECALGTHNCSEAETCHNIQGSFRCLRFECPPNYVQVSKTKCERTTCHDFLECQNSPARITHYQLNFQTGLLVPAHIFRIGPAPAFTGDTIALNIIKGNEEGYFGTRRLNAYTGVVYLQRAVLEPRDFALDVEMKLWRQGSVTTFLAKMHIFFTTFAL

SEQ ID NO: 1648 - protein, 1201 aa, Homo sapiens
VPRGSYRRGDRPGLAWTMVLLWEPAGAWLALGLALALGPSVAAAAPRQDCTGVECPPLENCIEEALEPGACCATCVQQGCACEGYQYYDCLQGGFVRGRVPAGQSYFVDFGSTECSCPPGGGKISCQFMLCPELPPNCIEAVVVADSCPQCGQVGCVHAGHKYAAGHTVHLPPCRACHCPDAGGELICYQLPGCHGNFSDAEEGDPERHYEDPYSYDQEVAEVEAATALGGEVQAGAVQAGAGGPPAALGGGSQPLSTIQAPPWPAVLPRPTAAAALGPPAPVQAKARRVTEDSEEEEEEEEEREEMAVTEQLAAGGHRGLDGLPTTAPAGPSLPIQEERAEAGARAEAGARPEENLILDAQATSRSTGPEGVTHAPSLGKAALVPTQAVPGSPRDPVKPSPHNILSTSLPDAAWIPPTREVPRKPQVLPHSHVEEDTDPNSVHSIPRSSPEGSTKDLIETCCAAGQQWAIDNDECLEIPESGTEDNVCRTAQRHCCVSYLQEKSCMAGVLGAKEGETCGAEDNDSCGISLYKQCCDCCGLGLRVRAEGQSCESNPNLGYPCNHVMLSCCEGEEPLIVPEVRRPPEPAAAPRRVSEAEMAGREALSLGTEAELPNSLPGDDQDECLLLPGELCQHLCINTVGSYHCACFPGFSLQDDGRTCRPEGHPPQPEAPQEPALKSEFSQVASNTIPLPLPQPNTCKDNGPCKQVCSTVGGSAICSCFPGYAIMADGVSCEDINECVTDLHTCSRGEHCVNTLGSFHCYKALTCEPGYALKDGECEDVDECAMGTHTCQPGFLCQNTKGSFYCQARQRCMDGFLQDPEGNCVDINECTSLSEPCRPGFSCINTVGSYTCQRNPLICARGYHASDDGTKCVDVNECETGVHRCGEGQVCHNLPGSYRCDCKAGFQRDAFGRGCIDVNECWASPGRLCQHTCENTLGSYRCSCASGFLLAADGKRCEDVNECEAQRCSQECANIYGSYQCYCRQGYQLAEDGHTCTDIDECAQGAGILCTFRCLNVPGSYQCACPEQGYTMTANGRSCKDVDECALGTHNCSEAETCHNIQGSFRCLRFECPPNYVQVSKTKCERTTCHDFLECQNSPARITHYQLNFQTGLLVPAHIFRIGPAPAFTGDTIALNIIKGNEEGYFGTRRLNAYTGVVYLQRAVLEPRDFALDVEMKLWRQGSVTTFLAKMHIFFTTFAL

SEQ ID NO: 1649 - protein, 458 aa, Homo sapiens
LASMVVLNPMTLGIYLQLFFLSIVSQPTFINSVLPISAALPSLDQKKRGGHKACCLLTPPPPPLFPPPFFRGGRSPLLSPDMKNLMLELETSQSPCMQGSLGSPGPPGPQGPPGLPGKTGPKGEKGELGRPGRKGRPGPPGVPGMPGPIGWPGPEGPRGEKGDLGMMGLPGSRGPMGSKGYPGSRGEKGSRGEKGDLGPKGEKGFPGFPGMLGQKGEMGPKGEPGIAGHRGPTGRPGKRGKQGQKGDSGVMGPPGKPGPSGQPGRPGPPGPPPAGQLIMGPKGERGFPGPPGRCLCGPTMNVNNPSYGESVYGPSSPRVPVIFVVNNQEELERLNTQNAIAFRRDQRSLYFKDSLGWLPIQLTPFYPVDYTADQHGTCGDGLLQPGEECDDGNSDVGDDCIRCHRAYCGDGHRHEGVEDCDGSDFGYLTCETYLPGSYGDLQCTQYCYIDSTPCRYFT

SEQ ID NO: 1650 - protein, 459 aa, Homo sapiens
LASMVVLNPMTLGIYLQLFFLSIVSQPTFINSVLPISAALPSLDQKKRGGHKACCLLTPPPPPLFPPPFFRGGRSPLLSPDMKNLMLELETSQSPCMQGSLGSPGPPGPQGPPGLPGKTGPKGEKGELGRPGRKGRPGPPGVPGMPGPIGWPGPEGPRGEKGDLGMMGLPGSRGPMGSKGYPGSRGEKGSRGEKGDLGPKGEKGFPGFPGMLGQKGEMGPKGEPGIAGHRGPTGRPGKRGKQGQKGDSGVMGPPGKPGPSGQPGRPGPPGPPPAGQLIMGPKGERGFPGPPGRCLCGPTMNVNNPSYGESVYGPSSPRVPVIFVVNNQEELERLNTQNAIAFRRDQRSLYFKDSLGWLPIQLTPFYPVDYTADQHGTCGDGLLQPGEECDDGNSDVGDDCIRDCHRAYCGDGHRHEGVEDCDGSDFGYLTCETYLPGSYGDLQCTQYCYIDSTPCRYFT

SEQ ID NO: 1651 - protein, 424 aa, Homo sapiens
LASMVVLNPMTLGIYLQLFFLSIVSQPTFINSVLPISAALPSLDQKKRGGHKACCLLTPPPPPLFPPPFFRGGRSPGPPGLPGKTGPKGEKGELGRPGRKGRPGPPGVPGMPGPIGWPGPEGPRGEKGDLGMMGLPGSRGPMGSKGYPGSRGEKGSRGEKGDLGPKGEKGFPGFPGMLGQKGEMGPKGEPGIAGHRGPTGRPGKRGKQGQKGDSGVMGPPGKPGPSGQPGRPGPPGPPPAGQLIMGPKGERGFPGPPGRCLCGPTMNVNNPSYGESVYGPSSPRVPVIFVVNNQEELERLNTQNAIAFRRDQRSLYFKDSLGWLPIQLTPFYPVDYTADQHGTCGDGLLQPGEECDDGNSDVGDDCIRCHRAYCGDGHRHEGVEDCDGSDFGYLTCETYLPGSYGDLQCTQYCYIDSTPCRYFT

SEQ ID NO: 1652 - protein, 42 aa, Homo sapiens
VAFPHSAALRGTRTSSLTSSSWATLSSSPLTGTISLMLLKIW

SEQ ID NO: 1653 - protein, 378 aa, Homo sapiens
LSRTGWLTGRSRGSLGSPRQAFTMDQFPESVTENFEYDDLAEACYIGDIVVFGTVFLSIFYSVIFAIGLVGNLLVVFALTNSKKPKSVTDIYLLNLALSDLLFVATLPFWTHYLINEKGLHNAMCKFTTAFFFIGFFGSIFFITVISIDRYLAIVLAANSMNNRTVQHGVTISLGVWAAAILVAAPQFMFTKQKENECLGDYPEVLQEIWPVLRNVETNFLGFLLPLLIMSYCYFRIIQTLFSCKNHKKAKAIKLILLVVIVFFLFWTPYNVMIFLETLKLYDFFPSCDMRKDLRLALSVTETVAFSHCCLNPLIYAFAGEKFRRYLYHLYGKCLAVLCGRSVHVDFSSSESQRSRHGSVLSSNFTYHTSDGDALLLL

SEQ ID NO: 1654 - protein, 371 aa, Homo sapiens
LQGLLPAPHLQVGAFTMDQFPESVTENFEYDDLAEACYIGDIVVFGTVFLSIFYSVIFAIGLVGNLLVVFALTNSKKPKSVTDIYLLNLALSDLLFVATLPFWTHYLINEKGLHNAMCKFTTAFFFIGFFGSIFFITVISIDRYLAIVLAANSMNNRTVQHGVTISLGVWAAAILVAAPQFMFTKQKENECLGDYPEVLQEIWPVLRNVETNFLGFLLPLLIMSYCYFRIIQTLFSCKNHKKAKAIKLILLVVIVFFLFWTPYNVMIFLETLKLYDFFPSCDMRKDLRLALSVTETVAFSHCCLNPLIYAFAGEKFRRYLYHLYGKCLAVLCGRSVHVDFSSSESQRSRHGSVLSSNFTYHTSDGDALLLL

SEQ ID NO: 1655 - protein, 356 aa, Homo sapiens
LMDYTLDLSVTTVTDYYYPDIFSSPCDAELIQTNGKLLLAVFYCLLFVFSLLGNSLVILVLVVCKKLRSITDVYLLNLALSDLLFVFSFPFQTYYLLDQWVFGTVMCKVVSGFYYIGFYSSMFFITLMSVDRYLAVVHAVYALKVRTIRMGTTLCLAVWLTAIMATIPLLVFYQVASEDGVLQCYSFYNQQTLKWKIFTNFKMNILGLLIPFTIFMFCYIKILHQLKRCQNHNKTKAIRLVLIVVIASLLFWVPFNVVLFLTSLHSMHILDGCSISQQLTYATHVTEIISFTHCCVNPVIYAFVGEKFKKHLSEIFQKSCSQIFNYLGRQMPRESCEKSSSCQQHSSRSSSVDYIL

SEQ ID NO: 1656 - protein, 280 aa, Homo sapiens
LISSQAPVMRNLFRQMTYYLLDQWVFGTVMCKVVSGFYYIGFYSSMFFITLMSVDRYLAVVHAVYALKVRTIRMGTTLCLAVWLTAIMATIPLLVFYQVASEDGVLQCYSFYNQQTLKWKIFTNFKMNILGLLIPFTIFMFCYIKILHQLKRCQNHNKTKAIRLVLIVVIASLLFWVPFNVVLFLTSLHSMHILDGCSISQQLTYATHVTEIISFTHCCVNPVIYAFVGEKFKKHLSEIFQKSCSQIFNYLGRQMPRESCEKSSSCQQHSSRSSSVDYIL

SEQ ID NO: 1657 - protein, 197 aa, Homo sapiens
LGPQRQRHSARLPAIARLVRRPPALCPRGAARRGLRADHAPAKSAARPLAMRAGRRPRLGPWAGGCSKMWDNLTCWPATPRGQVVVLACPLIFKLFSSIQGRNVSRSCTDEGWTHLEPGPYPIACGLDDKAASLDEVGCKAAMVFFQYCVMANFFWLLVEGLYLYTLLAVSFFSERKYFWGGTQHIHHGVDHRQDPF

SEQ ID NO: 1658 - protein, 460 aa, Homo sapiens
LGPQRQRHSARLPAIARLVRRPPALCPRGAARRGLRADHAPAKSAARPLAMRAGRRPRLGPWAGGCSKMWDNLTCWPATPRGQVVVLACPLIFKLFSSIQGRNVSRSCTDEGWTHLEPGPYPIACGLDDKAASLDEQQTMFYGSVKTGYTIGYGLSLATLLVATAILSLFRKLHCTRNYIHMHLFISFILRAAAVFIKDLALFDSGESDQCSEGSVGCKAAMVFFQYCVMANFFWLLVEGLYLYTLLAVSFFSERKYFWGYILIGWGVPSTFTMVWTIARIHFEDYGCWDTINSSLWWIIKGPILTSILVNFILFICIIRILLQKLRPPDIRKSDSSPYSRLARSTLLLIPLFGVHYIMFAFFPDNFKPEVKMVFELVVGSFQGFVVAILYCFLNGEVQAELRRKWRRWHLQGVLGWNPKYRHPSGGSNGATCSTQVSMLTRVSPGARRSSSFQAEVSLV

SEQ ID NO: 1659 - protein, 459 aa, Homo sapiens
LGPQRQRHSARLPAIARLVRRPPALCPRGAARRGLRADHAPAKSAARPLAMRAGRRPRLGPWAGGCSKMWDNLTCWPATPRGQVVVLACPLIFKLFSSIQGRNVSRSCTDEGWTHLEPGPYPIACGLDDKAASLDEQTMFYGSVKTGYTIGYGLSLATLLVATAILSLFRKLHCTRNYIHMHLFISFILRAAAVFIKDLALFDSGESDQCSEGSVGCKAAMVFFQYCVMANFFWLLVEGLYLYTLLAVSFFSERKYFWGYILIGWGVPSTFTMVWTIARIHFEDYGCWDTINSSLWWIIKGPILTSILVNFILFICIIRILLQKLRPPDIRKSDSSPYSRLARSTLLLIPLFGVHYIMFAFFPDNFKPEVKMVFELVVGSFQGFVVAILYCFLNGEVQAELRRKWRRWHLQGVLGWNPKYRHPSGGSNGATCSTQVSMLTRVSPGARRSSSFQAEVSLV

SEQ ID NO: 1660 - protein, 487 aa, Homo sapiens
LPGSRPSPAWCAARQLFARAGPPAAGSGQTMRPPSPLPARWLCVLAGALAWALGPAGGQAARLQEECDYVQMIEVQHKQCLEEAQLENETIGCSKMWDNLTCWPATPRGQVVVLACPLIFKLFSSIQGRNVSRSCTDEGWTHLEPGPYPIACGLDDKAASLDEQQTMFYGSVKTGYTIGYGLSLATLLVATAILSLFRKLHCTRNYIHMHLFISFILRAAAVFIKDLALFDSGESDQCSEGSVGCKAAMVFFQYCVMANFFWLLVEGLYLYTLLAVSFFSERKYFWGYILIGWGVPSTFTMVWTIARIHFEDYGCWDTINSSLWWIIKGPILTSILVNFILFICIIRILLQKLRPPDIRKSDSSPYSRLARSTLLLIPLFGVHYIMFAFFPDNFKPEVKMVFELVVGSFQGFVVAILYCFLNGEVQAELRRKWRRWHLQGVLGWNPKYRHPSGGSNGATCSTQVSMLTRVSPGARRSSSFQAEVSLV

SEQ ID NO: 1661 - protein, 257 aa, Homo sapiens
LARTPLPVVWMTRQRVWMRWAVRQPWSFSNIVSWLTSSGCWWRASTCTPCLPSPSSLSGSTSGGVPSTFTMVWTIARIHFEDYGCWDTINSSLWWIIKGPILTSILVNFILFICIIRILLQKLRPPDIRKSDSSPYSRLARSTLLLIPLFGVHYIMFAFFPDNFKPEVKMVFELVVGSFQGFVVAILYCFLNGEVQAELRRKWRRWHLQGVLGWNPKYRHPSGGSNGATCSTQVSMLTRVSPGARRSSSFQAEVSLV

SEQ ID NO: 1662 - protein, 180 aa, Homo sapiens
LQLWNRSRQGHNIQRNLQSILILPGHCPHLLCLQLPPCHTLSYPHVWTHIPMACPSPVSRRLARSTLLLIPLFGVHYIMFAFFPDNFKPEVKMVFELVVGSFQGFVVAILYCFLNGEVQAELRRKWRRWHLQGVLGWNPKYRHPSGGSNGATCSTQVSMLTRVSPGARRSSSFQAEVSLV

SEQ ID NO: 1663 - protein, 870 aa, Homo sapiens
VSEPGRSAAAPGLGAWGRRSPPSFSPPRPRRPGVMAGLNCGVSIALLGVLLLGAARLPRGAEAFEIALPRESNITVLIKLGTPTLLAKPCYIVISKRHITMLSIKSGERIVFTFSCQSPENHFVIEIQKNIDCMSGPCPFGEVQLQPSTSLLPTLNRTFIWDVKAHKSIGLELQFSIPRLRQIGPGESCPDGVTHSISGRIDATVVRIGTFCSNGTVSRIKMQEGVKMALHLPWFHPRNVSGFSIANRSSIKRLCIIESVFEGEGSATLMSANYPEGFPEDELMTWQFVVPAHLRASVSFLNFNLSNCERKEERVEYYIPGSTTNPEVFKLEDKQPGNMAGNFNLSLQGCDQDAQSPGILRLQFQVLVQHPQNESNKIYVVDLSNERAMSLTIEPRPVKQSRKFVPGCFVCLESRTCSSNLTLTSGSKHKISFLCDDLTRLWMNVEKTISCTDHRYCQRKSYSLQVPSDILHLPVELHDFSWKLLVPKDRLSLVLVPAQKLQQHTHEKPCNTSFSYLVASAIPSQDLYFGSFCPGGSIKQIQVKQNISVTLRTFAPSFQQEASRQGLTVSFIPYFKEEGVFTVTPDTKSKVYLRTPNWDRGLPSLTSVSWNISVPRDQVACLTFFKERSGVVCQTGRAFMIIQEQRTRAEEIFSLDEDVLPKPSFHHHSFWVNISNCSPTSGKQLDLLFSVTLTPRTVDLTVILIAAVGGGVLLLSALGLIICCVKKKKKKTNKGPAVGIYNDNINTEMPRQPKKFQKGRKDNDSHVYAVIEDTMVYGHLLQDSSGSFLQPEVDTYRPFQGTMGVCPPSPPTICSRAPTAKLATEEPPPRSPPESESEPYTFSHPNNGDVSSKDTDIPLLNTQEPMEPAE

SEQ ID NO: 1664 - protein, 377 aa, Homo sapiens
VSEPGRSAAAPGLGAWGRRSPPSFSPPRPRRPGVMAGLNCGVSIALLGVLLLGAARLPRGAEAFEIALPRESNITVLIKLGTPTLLAKPCYIVISKRHITMLSIKSGERIVFTFSCQSPENHFVIEIQKNIDCMSGPCPFGEVQLQPSTSLLPTLNRTFIWDVKAHKSIGLELQFSIPRLRQIGPGESCPDGVTHSISGRIDATVVRIGTFCSNGTVSRIKMQEGVKMALHLPWFHPRNVSGFSIANRSSIKRLCIIESVFEGEGSATLMSANYPEGFPEDELMTWQFVVPAHLRASVSFLNFNLSNCERKEERVEYYIPGSTTNPEVFKLEDKQPGNMAGNFNLSLQGCDQDAQSPGILRLQFQVLVQHPQNESSE

SEQ ID NO: 1665 - protein, 377 aa, Homo sapiens
LVVPAVPGRVASPSTSPIPNMADDYGSESTSSMEDYVNFNFTDFYCEKNNVRQFASHFLPPLYWLVFIVGALGNSLVILVYWYCTRVKTMTDMFLLNLAIADLLFLVTLPFWAIAAADQWKFQTFMCKVVNSMYKMNFYSCVLLIMCISVDRYIAIAQAMRAHTWREKRLLYSKMVCFTIWVLAAALCIPEILYSQIKEESGIAICTMVYPSDESTKLKSAVLTLKVILGFFLPFVVMACCYTIIIHTLIQAKKSSKHKALKVTITVLTVFVLSQFPYNCILLVQTIDAYAMFISNCAVSTNIDICFQVTQTIAFFHSCLNPVLYVFVGERFRRDLVKTLKNLGCISQAQWVSFTRREGSLKLSSMLLETTSGALSL

SEQ ID NO: 1666 - protein, 360 aa, Homo sapiens
LELITALPGLQVFIRTDTMAEHDYHEDYGFSSFNDSSQEEHQDFLQFSKVFLPCMYLVVFVCGLVGNSLVLVISIFYHKLQSLTDVFLVNLPLADLVFVCTLPFWAYAGIHEWVFGQVMCKSLLGIYTINFYTSMLILTCITVDRFIVVVKATKAYNQQAKRMTWGKVTSLLIWVISLLVSLPQIIYGNVFNLDKLICGYHDEAISTVVLATQMTLGFFLPLLTMIVCYSVIIKTLLHAGGFQKHRSLKIIFLVMAVFLLTQMPFNLMKFIRSTHWEYYAMTSFHYTIMVTEAIAYLRACLNPVLYAFVSLKFRKNFWKLVKDIGCLPYLGVSHQWKSSEDNSKTFSASHNVEATSMFQL

SEQ ID NO: 1667 - protein, 359 aa, Homo sapiens
LEQTGKASLLVFIRTDTMAEHDYHEDYGFSSFNDSSQEEHQDFLQFSKVFLPCMYLVVFVCGLVGNSLVLVISIFYHKLQSLTDVFLVNLPLADLVFVCTLPFWAYAGIHEWVFGQVMCKSLLGIYTINFYTSMLILTCITVDRFIVVVKATKAYNQQAKRMTWGKVTSLLIWVISLLVSLPQIIYGNVFNLDKLICGYHDEAISTVVLATQMTLGFFLPLLTMIVCYSVIIKTLLHAGGFQKHRSLKIIFLVMAVFLLTQMPFNLMKFIRSTHWEYYAMTSFHYTIMVTEAIAYLRACLNPVLYAFVSLKFRKNFWKLVKDIGCLPYLGVSHQWKSSEDNSKTFSASHNVEATSMFQL

SEQ ID NO: 1668 - protein, 355 aa, Homo sapiens
LGSDSQVFIRTDTMAEHDYHEDYGFSSFNDSSQEEHQDFLQFSKVFLPCMYLVVFVCGLVGNSLVLVISIFYHKLQSLTDVFLVNLPLADLVFVCTLPFWAYAGIHEWVFGQVMCKSLLGIYTINFYTSMLILTCITVDRFIVVVKATKAYNQQAKRMTWGKVTSLLIWVISLLVSLPQIIYGNVFNLDKLICGYHDEAISTVVLATQMTLGFFLPLLTMIVCYSVIIKTLLHAGGFQKHRSLKIIFLVMAVFLLTQMPFNLMKFIRSTHWEYYAMTSFHYTIMVTEAIAYLRACLNPVLYAFVSLKFRKNFWKLVKDIGCLPYLGVSHQWKSSEDNSKTFSASHNVEATSMFQL

SEQ ID NO: 1669 - protein, 365 aa, Homo sapiens
VKYETEKHHFCLKTHVKRCRFRCSKRPCHLVQMESSGNPESTTFFYYDLQSQPCENQAWVFATLATTVLYCLVFLLSLVGNSLVLWVLVKYESLESLTNIFILNLCLSDLVFACLLPVWISPYHWGWVLGDFLCKLLNMIFSISLYSSIFFLTIMTIHRYLSVVSPLSTLRVPTLRCRVLVTMAVWVASILSSILDTIFHKVLSSGCDYSELTWYLTSVYQHNLFFLLSLGIILFCYVEILRTLFRSRSKRRHRTVKLIFAIVVAYFLSWGPYNFTLFLQTLFRTQIIRSCEAKQQLEYALLICRNLAFSHCCFNPVLYVFVGVKFRTHLKHVLRQFWFCRLQAPSPASIPHSPGAFAYEGASFY

SEQ ID NO: 1670 - protein, 424 aa, Homo sapiens
LPCISAFTFCRKLYFLLLHAKFLPLDLFGSVAEKPDIPGLPETSHKLNRESGLNKDAFPQYIHNMLSTSRSRFIRNTNESGEEVTTFFDYDYGAPCHKFDVKQIGAQLLPPLYSLVFIFGFVGNMLVVLILINCKKLKCLTDIYLLNLAISDLLFLITLPLWAHSAANEWVFGNAMCKLFTGLYHIGYFGGIFFIILLTIDRYLAIVHAVFALKARTVTFGVVTSVITWLVAVFASVPGIIFTKCQKEDSVYVCGPYFPRGWNNFHTIMRNILGLVLPLLIMVICYSGILKTLLRCRNEKKRHRAVRVIFTIMIVYFLFWTPYNIVILLNTFQEFFGLSNCESTSQLDQATQVTETLGMTHCCINPIIYAFVGEKFRRYLSVFFRKHITKRFCKQCPVFYRETVDGVTSTNTPSTGEQEVSAGL

SEQ ID NO: 1671 - protein, 438 aa, Homo sapiens
LPCISAFTFCRKLYFLLLHAKFLPLDLFGSVAEKPDIPGLPETSHKLNRESGLNKDAFPQYIHNMLSTSRSRFIRNTNESGEEVTTFFDYDYGAPCHKFDVKQIGAQLLPPLYSLVFIFGFVGNMLVVLILINCKKLKCLTDIYLLNLAISDLLFLITLPLWAHSAANEWVFGNAMCKLFTGLYHIGYFGGIFFIILLTIDRYLAIVHAVFALKARTVTFGVVTSVITWLVAVFASVPGIIFTKCQKEDSVYVCGPYFPRGWNNFHTIMRNILGLVLPLLIMVICYSGILKTLLRCRNEKKRHRAVRVIFTIMIVYFLFWTPYNIVILLNTFQEFFGLSNCESTSQLDQATQVTETLGMTHCCINPIIYAFVGEKFRSLFHIALGCRIAPLQKPVCGGPGVRPGKNVKVTTQGLLDGRGKGKSIGRAPEASLQDKEGA

SEQ ID NO: 1672 - protein, 762 aa, Homo sapiens
LRAMGLADASGPRDTQALLSATQAMDLRRRDYHMERPLLNQEHLEELGRWGSAPRTHQWRTWLQCSRARAYALLLQHLPVLVWLPRYPVRDWLLGDLLSGLSVAIMQLPQGLAYALLAGLPPVFGLYSSFYPVFIYFLFGTSRHISVGTFAVMSVMVGSVTESLAPQALNDSMINETARDAARVQVASTLSVLVGLFQVGLGLIHFGFVVTYLSEPLVRGYTTAAAVQVFVSQLKYVFGLHLSSHSGPLSLIYTVLEVCWKLPQSKVGTVVTAAVAGVVLVVVKLLNDKLQQQLPMPIPGELLTLIGATGISYGMGLKHRFEVDVVGNIPAGLVPPVAPNTQLFSKLVGSAFTIAVVGFAIAISLGKIFALRHGYRVDSNQELVALGLSNLIGGIFQCFPVSCSMSRSLVQESTGGNSQVAGAISSLFILLIIVKLGELFHDLPKAVLAAIIIVNLKGMLRQLSDMRSLWKANRADLLIWLVTFTATILLNLDLGLVVAVIFSLLLVVVRTQMPHYSVLGQVPDTDIYRDVAEYSEAKEVRGVKVFRSSATVYFANAEFYSDALKQRCGVDVDFLISQKKKLLKKQEQLKLKQLQKEEKLRKQAASPKGASVSINVNTSLEDMRSNNVEDCKMMQVSSGDKMEDATANGQEDSKAPDGSTLKALGLPQPDFHSLILDLGALSFVDTVCLKSLKNIFHDFREIEVEVYMAACHSPVVSQLEAGHFFDASITKKHLFASVHDAVTFALQHPRPVPDSPVSVTRL

SEQ ID NO: 1673 - protein, 743 aa, Homo sapiens
LRAMGLADASGPRDTQALLSATQAMDLRRRDYHMERPLLNQEHLEELGRWGSAPRTHQWRTWLQCSRARAYALLLQHLPVLVWLPRYPVRDWLLGDLLSGLSVAIMQLPQGLAYALLAGLPPVFGLYSSFYPVFIYFLFGTSRHISVGTFAVMSVMVGSVTESLAPQALNDSMINETARDAARVQVASTLSVLVGLFQVGLGLIHFGFVVTYLSEPLVRGYTTAAAVQVFVSQLKYVFGLHLSSHSGPLSLIYTVLEVCWKLPQSKVGTVVTAAVAGVVLVVVKLLNDKLQQQLPMPIPGELLTLIGATGISYGMGLKHRFEVDVVGNIPAGLVPPVAPNTQLFSKLVGSAFTIAVVGFAIAISLGKIFALRHGYRVDSNQELVALGLSNLIGGIFQCFPVSCSMSRSLVQESTGGNSQVAGAISSLFILLIIVKLGELFHDLPKAVLAAIIIVNLKGMLRQLSDMRSLWKANRADLLIWLVTFTATILLNLDLGLVVAVIFSLLLVVVRTQMPHYSVLGQVPDTDIYRDVAEYSEAKEVRGVKVFRSSATVYFANAEFYSDALKQRCGVDVDFLISQKKKLLKKQEQLKLKQLQKEEKLRKQAGPLLSACLAPQQVSSGDKMEDATANGQEDSKAPDGSTLKALGLPQPDFHSLILDLGALSFVDTVCLKSLKNIFHDFREIEVEVYMAACHSPVVSQLEAGHFFDASITKKHLFASVHDAVTFALQHPRPVPDSPVSVTRL

SEQ ID NO: 1674 - protein, 654 aa, Homo sapiens
LRAMGLADASGPRDTQALLSATQAMDLRRRDYHMERPLLNQEHLEELGRWGSAPRTHQWRTWLQCSRARAYALLLQHLPVLVWLPRYPVRDWLLGDLLSGLSVAIMQLPQGLAYALLAGLPPVFGLYSSFYPVFIYFLFGTSRHISVVLEVCWKLPQSKVGTVVTAAVAGVVLVVVKLLNDKLQQQLPMPIPGELLTLIGATGISYGMGLKHRFEVDVVGNIPAGLVPPVAPNTQLFSKLVGSAFTIAVVGFAIAISLGKIFALRHGYRVDSNQELVALGLSNLIGGIFQCFPVSCSMSRSLVQESTGGNSQVAGAISSLFILLIIVKLGELFHDLPKAVLAAIIIVNLKGMLRQLSDMRSLWKANRADLLIWLVTFTATILLNLDLGLVVAVIFSLLLVVVRTQMPHYSVLGQVPDTDIYRDVAEYSEAKEVRGVKVFRSSATVYFANAEFYSDALKQRCGVDVDFLISQKKKLLKKQEQLKLKQLQKEEKLRKQAASPKGASVSINVNTSLEDMRSNNVEDCKMMVSSGDKMEDATANGQEDSKAPDGSTLKALGLPQPDFHSLILDLGALSFVDTVCLKSLKNIFHDFREIEVEVYMAACHSPVVSQLEAGHFFDASITKKHLFASVHDAVTFALQHPRPVPDSPVSVTRL

SEQ ID NO: 1675 - protein, 726 aa, Homo sapiens
LRAMGLADASGPRDTQALLSATQAMDLRRRDYHMERPLLNQEHLEELGRWGSAPRTHQWRTWLQCSRARAYALLLQHLPVLVWLPRYPVRDWLLGDLLSGLSVAIMQLPQGLAYALLAGLPPVFGLYSSFYPVFIYFLFGTSRHISVATPGPLPLLTAPGRPTGGAGPDPLRLRGHLPVRTSCPRLYHSCSCAGLRLTAQVCVWPPSEQPLWATVPHLLLEVCWKLPQSKVGTVVTAAVAGVVLVVVKLLNDKLQQQLPMPIPGELLTLIGATGISYGMGLKHRFEVDVVGNIPAGLVPPVAPNTQLFSKLVGSAFTIAVVGFAIAISLGKIFALRHGYRVDSNQELVALGLSNLIGGIFQCFPVSCSMSRSLVQESTGGNSQVAGAISSLFILLIIVKLGELFHDLPKAVLAAIIIVNLKGMLRQLSDMRSLWKANRADLLIWLVTFTATILLNLDLGLVVAVIFSLLLVVVRTQMPHYSVLGQVPDTDIYRDVAEYSEAKEVRGVKVFRSSATVYFANAEFYSDALKQRCGVDVDFLISQKKKLLKKQEQLKLKQLQKEEKLRKQAASPKGASVSINVNTSLEDMRSNNVEDCKMMQVSSGDKMEDATANGQEDSKAPDGSTLKALGLPQPDFHSLILDLGALSFVDTVCLKSLKNIFHDFREIEVEVYMAACHSPVVSQLEAGHFFDASITKKHLFASVHDAVTFALQHPRPVPDSPVSVTRL

SEQ ID NO: 1676 - protein, 334 aa, Homo sapiens
VSSGLHQVREGWAARTGPCFGLTDTSHRLVPPVAPNTQLFSKLVGSAFTIAVVGFAIAISLGKIFALRHGYRVDSNQELVALGLSNLIGGIFQCFPVSCSMSRSLVQESTGGNSQVAGAISSLFILLIIVKLGELFHDLPKAVLAAIIIVNLKGMLRQLSDMRSLWKANRADLLIWLVTFTATILLNLDLGLVVAVIFSLLLVVVRTQMPHYSVLGQVPDTDIYRDVAEYSECGVDVDFLISQKKKLLKKQEQLKLKQLQKEEKLRKQAGPLLSGDPHLLPPVPCPSLSPGPRLLPRPHSSSLPLSPSCSQGPCFTPLAGPGSRQHFLSHHLNQ

SEQ ID NO: 1677 - protein, 183 aa, Homo sapiens
LRLVPPVAPNTQLFSKLVGSAFTIAVVGFAIAISLGKIFALRHGYRVDSNQELVALGLSNLIGGIFQCFPVSCSMSRSLVQESTGGNSQVAGAISSLFILLIIVKLGELFHDLPKAVLAAIIIVNLKGMLRQLSDMRSLWKANRADLLIWLVTFTATILLNLDLGLVVAVIFSLLLVVVRTQM

SEQ ID NO: 1678 - protein, 123 aa, Homo sapiens [sequence omitted]

SEQ ID NO: 1679 - protein, 61 aa, Homo sapiens
LLAAVACALRPLGLVVLASWMAGRLAKMVARVACGSRRLAKSQRSAPAGVSLAWSPHPPGP

SEQ ID NO: 1680 - protein, 223 aa, Homo sapiens
MASSSADHLHSAPRALQVPVPAASLRPHLPQLVPSRPRGGRGEPRDAREQLRHETDPVLLRLGKRLLQRHHRLRKLLQAVPRAETDQHQSSLCGGREAAVQPVRGWPAAAEGDALYPAPALPAARSPSAPRAPSVPPPPSASLTPHPCPADGPEQCELVQRPRYRRGPHICFDYNATEDTSDCGRGASFPPSLGVLVSLQLLLLLGLPPRPQPQVLVHASRRL

SEQ ID NO: 1681 - protein, 1197 aa, Homo sapiens
LRPVQPRRPLAEKAAAEERPSYRPPPAPPQPRRRRRRRHCPPSPRRRILNGNMAVPARTCGASRPGPARTARPWPGCGPHPGPGTRRPTSGPPRPLWLLLPLLPLLAAPGASAYSFPQQHTMQHWARRLEQEVDGVMRIFGGVQQLREIYKDNRNLFEVQENEPQKLVEKVAGDIESLLDRKVQALKRLADAAENFQKAHRWQDNIKEEDIVYYDAKADAELDDPESEDVERGSKASTLRLDFIEDPNFKNKVNYSYAAVQIPTDIYKGSTVILNELNWTEALENVFMENRRQDPTLLWQVFGSATGVTRYYPATPWRAPKKIDLYDVRRRPWYIQGASSPKDMVIIVDVSGSVSGLTLKLMKTSVCEMLDTLSDDDYVNVASFNEKAQPVSCFTHLVQANVRNKKVFKEAVQGMVAKGTTGYKAGFEYAFDQLQNSNITRANCNKMIMMFTDGGEDRVQDVFEKYNWPNRTVRVFTFSVGQHNYDVTPLQWMACANKGYYFEIPSIGAIRINTQEYLDVLGRPMVLAGKEAKQVQWTNVYEDALGLGLVVTGTLPVFNLTQDGPGEKKNQLILGVMGIDVALNDIKRLTPNYTLGANGYVFAIDLNGYVLLHPNLKPQTTNFREPVTLDFLDAELEDENKEEIRRSMIDGNKGHKQIRTLVKSLDERYIDEVTRNYTWVPIRSTNYSLGLVLPPYSTFYLQANLSDQILQVKYFEFLLPSSFESEGHVFIAPREYCKDLNASDNNTEFLKNFIELMEKVTPDSKQCNNFLLHNLILDTGITQQLVERVWRDQDLNTYSLLAVFAATDGGITRVFPNKAAEDWTENPEPFNASFYRRSLDNHGYVFKPPHQDALLRPLELENDTVGILVSTAVELSLGRRTLRPAVVGVKLDLEAWAEKFKVLASNRTHQDQPQKCGPNSHCEMDCEVNNEDLLCVLIDDGGFLVLSNQNHQWDQVGRFFSEVDANLMLALYNNSFYTRKESYDYQAACAPQPPGNLGAAPRGVFVPTVADFLNLAWWTSAAAWSLFQQLLYGLIYHSWFQADPAEAEGSPETRESSCVMKQTQYYFGSVNASYNAIIDCGNCSRLFHAQRLTNTNLLFVVAEKPLCSQCEAGRLLQKETHCPADGPEQCELVQRPRYRRGPHICFDYNATEDTSDCGRGASFPPSLGVLVSLQLLLLLGLPPRPQPQVLVHASRRL

SEQ ID NO: 1682 - protein, 1077 aa, Homo sapiens
LMQHWARRLEQEVDGVMRIFGGVQQLREIYKDNRNLFEVQENEPQKLVEKVAGDIESLLDRKVQALKRLADAAENFQKAHRWQDNIKEEDIVYYDAKADAELDDPESEDVERGSKASTLRLDFIEDPNFKNKVNYSYAAVQIPTDIYKGSTVILNELNWTEALENVFMENRRQDPTLLWQVFGSATGVTRYYPATPWRAPKKIDLYDVRRRPWYIQGASSPKDMVIIVDVSGSVSGLTLKLMKTSVCEMLDTLSDDDYVNVASFNEKAQPVSCFTHLVQANVRNKKVFKEAVQGMVAKGTTGYKAGFEYAFDQLQNSNITRANCNKMIMMFTDGGEDRVQDVFEKYNWPNRTVRVFTFSVGQHNYDVTPLQWMACANKGYYFEIPSIGAIRINTQEYLDVLGRPMVLAGKEAKQVQWTNVYEDALGLGLVVTGTLPVFNLTQDGPGEKKNQLILGVMGIDVALNDIKRLTPNYTLGANGYVFAIDLNGYVLLHPNLKPQTTNFREPVTLDFLDAELEDENKEEIRRSMIDGNKGHKQIRTLVKSLDERYIDEVTRNYTWVPIRSTNYSLGLVLPPYSTFYLQANLSDQILQVKYFEFLLPSSFESEGHVFIAPREYCKDLNASDNNTEFLKNFIELMEKVTPDSKQCNNFLLHNLILDTGITQQLVERVWRDQDLNTYSLLAVFAATDGGITRVFPNKAAEDWTENPEPFNASFYRRSLDNHGYVFKPPHQDALLRPLELENDTVGILVSTAVELSLGRRTLRPAVVGVKLDLEAWAEKFKVLASNRTHQDQPQKCGPNSHCEMDCEVNNEDLLCVLIDDGGFLVLSNQNHQWDQVGRFFSEVDANLMLALYNNSFYTRKESYDYQAACAPQPPGNLGAAPRGVFVPTVADFLNLAWWTSAAAWSLFQQLLYGLIYHSWFQADPAEAEGSPETRESSCVMKQTQYYFGSVNASYNAIIDCGNCSRLFHAQRLTNTNLLFVVAEKPLCSQCEAGRLLQKETHCPADGPEQCELVQRPRYRRGPHICFDYNATEDTSDCGRGASFPPSLGVLVSLQLLLLLGLPPRPQPQVLVHASRRL

SEQ ID NO: 1683 - protein, 140 aa, Homo sapiens
MVGALCGCWFRLGGARPLIPLGPTVVQTSMSRSQVALLGLSLLLMLLLYVGLPGPPEQTSCLWGDPNVTVLAGLTPGNSPIFYREVLPLNQAHRVEVVLLHGKAFNSHTWEQLGTLQLLSQRGYRAVALDLPGEHPHPFV

SEQ ID NO: 1684 - protein, 391 aa, Homo sapiens
LYKRSFLEVSKIYTKTSYVSKLTRFGICSLVMDPEETSVYLDYYYATSPNSDIRETHSHVPYTSVFLPVFYTAVFLTGVLGNLVLMGALHFKPGSRRLIDIFIINLAASDFIFLVTLPLWVDKEASLGLWRTGSFLCKGSSYMISVNMHCSVLLLTCMSVDRYLAIVWPVVSRKFRRTDCAYVVCASIWFISCLLGLPTLLSRELTLIDDKPYCAEKKATPIKLIWSLVALIFTFFVPLLSIVTCYCCIARKLCAHYQQSGKHNKKLKKSIKIIFIVVAAFLVSWLPFNTFKFLAIVSGLRQEHYLPSAILQLGMEVSGPLAFANSCVNPFIYYIFDSYIRRAIVHCLCPCLKNYDFGSSTETSDSHLTKALSTFIHAEDFARRRKRSVSL

SEQ ID NO: 1685 - protein, 50 aa, Homo sapiens
MVSCLLRTARQRCVCEDVLHLLLCASQLLLLKQLSLLFGFLRLLASERHL

SEQ ID NO: 1686 - protein, 172 aa, Homo sapiens
LPSRAPGAHPQSATSRAPPGARMERLVIRMPFSHLSTYSLVWVMAAVVLCTAQVQVVTQDEREQLYTPASLKCSLQNAQEALIVTWQKKKAVSPENMVTFSENHGVVIQPAYKDKINITQLGLQNSTITFWNITLEDEGCYMCLFNTFGFGKISGTACLTVYAHSIPSLQIL

SEQ ID NO: 1687 - protein, 153 aa, Homo sapiens
MKGVTCVSSIPLVLGRSQERPASPSMPIVSLHYKFSEDHLNITCSATARPAPMVFWKVPRSGIENSTVTLSHPNGTTSVTSILHIKDPKNQVGKEVICQVLHLGTVTDFKQTVNKGYWFSVPLLLSIVSLVILLVLISILLYWKRHRNQDREP

SEQ ID NO: 1688 - protein, 65 aa, Homo sapiens
MLIMISSLRCINIFVLFAKITNHLCFYSFSKWCQRHTCIFPNDSTSLLFTWLISLVYRGFEKKNM

SEQ ID NO: 1689 - protein, 67 aa, Homo sapiens
LTGQKCFWYFGVRTSGVQNLLWILKNSLLPQFFICNSMALSMASLYLSSSFLRLLEPLSELQKRSQG

SEQ ID NO: 1690 - protein, 305 aa, Homo sapiens
LSQREDFGEAEAQRHCWEIGLCSGRTLGCVSRVQATDLVEVGYFQWQKRPHLLPVGPLGRSMRWCLLLIWAQGLRQAPLASGMMTGTIETTGNISAEKGGSIILQCHLSSTTAQVTQVNWEQQDQLLAICNADLGWHISPSFKDRVAPGPGLGLTLQSLTVNDTGEYFCIYHTYPDGTYTGRIFLEVLESSVAEHGARFQIPLLGAMAATLVVICTAVIVVVALTRKKKALRIHSVEGDLRRKSAGQEEWSPSAPSPPGSCVQAEAAPAGLCGEQRGEDCAELHDYFNVLSYRSLGNCSFFTETG

SEQ ID NO: 1691 - protein, 327 aa, Homo sapiens
VGSFPDIRSQQKQPKWIPSGAAPLKIQAYFNETADLPCQFANSQNQSLSELVVFWQDQENLVLNEVYLGKEKFDSVHSKYMGRTSFDSDSWTLRLHNLQIKDKGLYQCIIHHKKPTGMIRIHQMNSELSVLANFSQPEIVPISNITENVYINLTCSSIHGYPEPKKMSVLLRTKNSTIEYDGVMQKSQDNVTELYDVSISLSVSFPDVTSNMTIFCILETDKTRLLSSPFSIELEDPQPPPDHIPWITAVLPTVIICVMVFCLILWKWKKKKRPRNSYKCGTNTMEREESEQTKKREKIHIPERSDEAQRVFKSSKTSSCDKSDTCF

SEQ ID NO: 1692 - protein, 335 aa, Homo sapiens
LELQWTGICDSTMGLSNILFVMAFLLSGAAPLKIQAYFNETADLPCQFANSQNQSLSELVVFWQDQENLVLNEVYLGKEKFDSVHSKYMGRTSFDSDSWTLRLHNLQIKDKGLYQCIIHHKKPTGMIRIHQMNSELSVLANFSQPEIVPISNITENVYINLTCSSIHGYPEPKKMSVLLRTKNSTIEYDGVMQKSQDNVTELYDVSISLSVSFPDVTSNMTIFCILETDKTRLLSSPFSIELEDPQPPPDHIPWITAVLPTVIICVMVFCLILWKWKKKKRPRNSYKCGTNTMEREESEQTKKREKIHIPERSDEAQRVFKSSKTSSCDKSDTCF

SEQ ID NO: 1693 - protein, 542 aa, Homo sapiens
LMQVPRATPCSSIHYCASWLMCNLGFSCDICGMVGMFCFLIFLQSLLGFGTKAVLASQRVGKCCSFLLARNTMAGTRRVEGQVGGRPGGPGCSLMPPPPQECAGEPLFMLYCAIKQQMEKGPIDAITGEARYSLSEDKLIRQQIDYKTLTLNCVNPENENAPEVPVKGLDCDTVTQAKEKLLDAAYKGVPYSQRPKAADMDLEWRQGRMARIILQDEDVTTKIDNDWKRLNTLAHYQVTDGSSVALVPKQTSAYNISNSSTFTKSLSRYESMLRTASSPDSLRSRTPMITPDLESGTKLWHLVKNHDHLDQREGDRGSKMVSEIYLTRLLATKGTLQKFVDDLFETIFSTAHRGSALPLAIKYMFDFLDEQADKHQIHDADVRHTWKSNCLPLRFWVNVIKNPQFVFDIHKNSITDACLSVVAQTFMDSCSTSEHKLGKDSPSNKLLYAKDIPNYKSWVERYYADIAKMPAISDQDMSAYLAEQSRLHLSQFNSMSALHEIYSYITKYKDEILAALEKDEQARRQRLRSKLEQVVDTMALSS

SEQ ID NO: 1694 - protein, 1983 aa, Homo sapiens
LRGEADPGPGAGVGGGWRGQEAHRGPGPPPASRRLRAPGSRPRLAPCTRRAAQPAHARMAPRAAGGAPLSARAAAASPPPFQTPPRCPVPLLLLLLLGAARAGALEIQRRFPSPTPTNNFALDGAAGTVYLAAVNRLYQLSGANLSLEAEAAVGPVPDSPLCHAPQLPQASCEHPRRLTDNYNKILQLDPGQGLVVVCGSIYQGFCQLRRRGNISAVAVRFPPAAPPAEPVTVFPSMLNVAANHPNASTVGLVLPPAAGAGGSRLLVGATYTGYGSSFFPRNRSLEDHRFENTPEIAIRSLDTRGDLAKLFTFDLNPSDDNILKIKQGAKEQHKLGFVSAFLHPSDPPPGAQSYAYLALNSEARAGDKESQARSLLARICLPHGAGGDAKKLTESYIQLGLQCAGGAGRGDLYSRLVSVFPARERLFAVFERPQGSPAARAAPAALCAFRFADVRAAIRAARTACFVEPAPDVVAVLDSVVQGTGPACERKLNIQLQPEQLDCGAAHLQHPLSILQPLKATPVFRAPGLTSVAVASVNNYTAVFLGTVNGRLLKINLNESMQVVSRRVVTVAYGEPVHHVMQFDPADSGYLYLMTSHQMARVKVAACNVHSTCGDCVGAADAYCGWCALETRCTLQQDCTNSSQQHFWTSASEGPSRCPAMTVLPSEIDVRQEYPGMILQISGSLPSLSGMEMACDYGNNIRTVARVPGPAFGHQIAYCNLLPRDQFPPFPPNQDHVTVEMSVRVNGRNIVKANFTIYDCSRTAQVYPHTACTSCLSAQWPCFWCSQQHSCVSNQSRCEASPNPTSPQDCPRTLLSPLAPVPTGGSQNILVPLANTAFFQGAALECSFGLEEIFEAVWVNESVVRCDQVVLHTTRKSQVFPLSLQLKGRPARFLDSPEPMTVMVYNCAMGSPDCSQCLGREDLGHLCMWSDGCRLRGPLQPMAGTCPAPEIHAIEPLSGPLDGGTLLTIRGRNLGRRLSDVAHGVWIGGVACEPLPDRYTVSEEIVCVTGPAPGPLSGVVTVNASKEGKSRDRFSYVLPLVHSLEPTMGPKAGGTRITIHGNDLHVGSELQVLVNDTDPCTELMRTDTSIACTMPEGALPAPVPVCVRFERRGCVHGNLTFWYMQNPVITAISPRRSPVSGGRTITVAGERFHMVQNVSMAVHHIGREPTLCKVLNSTLITCPSPGALSNASAPVDFFINGRAYADEVAVAEELLDPEEAQRGSRFRLDYLPNPQFSTAKREKWIKHHPGEPLTLVIHKEQDSLGLQSHEYRVKIGQVSCDIQIVSDRIIHCSVNESLGAAVGQLPITIQVGNFNQTIATLQLGGSETAIIVSIVICSVLLLLSVVALFVFCTKSRRAERYWQKTLLQMEEMESQIREEIRKGFAELQTDMTDLTKELNRSQGIPFLEYKHFVTRTFFPKCSSLYEERYVLPSQTLNSQGSSQAQETHPLLGEWKIPESCRPNMEEGISLFSSLLNNKHFLIVFVHALEQQKDFAVRDRCSLASLLTIALHGKLEYYTSIMKELLVDLIDASAAKNPKLMLRRTESVVEKMLTNWMSICMYSCLRETVGEPFFLLLCAIKQQINKGSIDAITGKARYTLSEEWLLRENIEAKPRNLNVSFQGCGMDSLSVRAMDTDTLTQVKEKILEAFCKNVPYSQWPRAEDVDLEWFASSTQSYILRDLDDTSVVEDGRKKLNTLAHYKIPEGASLAMSLIDKKDNTLGRVKDLDTEKYFHLVLPTDELAEPKKSHRQSHRKKVLPEIYLTRLLSTKGTLQKFLDDLFKAILSIREDKPPLAVKYFFDFLEEQAEKRGISDPDTLHIWKTNSLPLRFWVNILKNPQFVFDIDKTDHIDACLSVIAQAFIDACSISDLQLGKDSPTNKLLYAKEIPEYRKIVQRYYKQIQDMTPLSEQEMNAHLAEESRKYQNEFNTNVAMAEIYKYAKRYRPQIMAALEANPTARRTQLQHKFEQVVALMEDNIYECYSEA

SEQ ID NO: 1695 - protein, 160 aa, Homo sapiens
VAVAEELLDPEEAQRGSRFRLDYLPNPQFSTAKREKWIKHHPGEPLTLVIHKEQDSLGLQSHEYRVKIGQVSCDIQIVSDRIIHCSVNESLGAAVGQLPITIQVGNFNQTIATLQLGGSETAIIVSIVICSVLLLLSVVGKEPHPQDTLEGRLATLPQPL

SEQ ID NO: 1696 - protein, 103 aa, Homo sapiens
MERQSRVMSEKDEYQFQHQGAVELLVFNFLLILTILTIWLFKNHRFRFLHETGGAMVYDKPPKFAMSREQMSQSCSHTAHNASLLTDAGPLSCGESRASCLFL

SEQ ID NO: 1697 - protein, 151 aa, Homo sapiens
LLRNLKDSERMQLLLTLAFNPEPLVLQSFPSDEGWPFAKYLGACGRMVAVNYVGEELWSYFNAPWEKRVDLAWQLMEIAEQLTNNDFEFALYLLDVSFDNFAVGPRDGKVIIVDAENVLVADKRLIRQSKYIILDFFLLIFSYVKIMFILV

SEQ ID NO: 1698 - protein, 84 aa, Homo sapiens
LEKQLQKDKEKVEEFKSIPAKSNNIINETTTRNNALEKEKEKEEKKLKEVMDSLKQETQGLQKEKEVSFFFLSVFILVAFFFLT

SEQ ID NO: 1699 - protein, 406 aa, Homo sapiens
LTCWLFPLAALSRGALRLLTPSVKSCCSVAQAGVQWQDLSSLQSPSLRFKQFSCLSLPSRWDYRTFGSRASELLWMASALWTVLPSRMSLRSLKWSLLLLSLLSFFVMWYLSLPHYNVIERVNWMYFYEYEPIYRQDFHFTLREHSNCSHQNPFLVILVTSHPSDVKARQAIRVTWGEKKSWWGYEVLTFFLLGQEAEKEDKMLALSLEDEHLLYGDIIRQDFLDTYNNLTLKTIMAFRWVTEFCPNAKYVMKTDTDVFINTGNLVKYLLNLNHSEKFFTGYPLIDNYSYRGFYQKTHISYQEYPFKVFPPYCSGLGYIMSRDLVPRIYEMMGHVKPIKFEDVYVGICLNLLKVNIHIPEDTNLFFLYRIHLDVCQLRRVIAAHGFSSKEIITFWQVMLRNTTCHY

SEQ ID NO: 1700 - protein, 347 aa, Homo sapiens
LEFHRTFGSRASELLWMASALWTVLPSRMSLRSLKWSLLLLSLLSFFVMWYLSLPHYNVIERVNWMYFYEYEPIYRQDFHFTLREHSNCSHQNPFLVILVTSHPSDVKARQAIRVTWGEKKSWWGYEVLTFFLLGQEAEKEDKMLALSLEDEHLLYGDIIRQDFLDTYNNLTLKTIMAFRWVTEFCPNAKYVMKTDTDVFINTGNLVKYLLNLNHSEKFFTGYPLIDNYSYRGFYQKTHISYQEYPFKVFPPYCSGLGYIMSRDLVPRIYEMMGHVKPIKFEDVYVGICLNLLKVNIHIPEDTNLFFLYRIHLDVCQLRRVIAAHGFSSKEIITFWQVMLRNTTCHY

SEQ ID NO: 1701 - protein, 165 aa, Homo sapiens
MLLTVCLTFFLYSGYSQEVVCYTLGNIPQMPSAPRLVRAGITWVTLQWSKPEGCSPEEVITYTLEIQEDENDNLFHPKYTGEDLTCTVKNLKRSTQYKFRLTASNTEGKSCPSEVLVCTTSPDRPGPPTRPLVKGPVTSHGFSVKWGMFCCCCYCFFFFFLLIDF

SEQ ID NO: 1702 - protein, 297 aa, Homo sapiens [sequence omitted]

SEQ ID NO: 1703 - protein, 117 aa, Homo sapiens
VTGCLADLQQSDSDRIMAMMEVQGGPSLGQTCVLIVIFTVLLQSLCVAVTYVYFTNELKQMQDKYSKSGIACFLKEDDSYWDPNDEESMNSPCWQVKWQLRQLVRKTPRMKRLWAAK

SEQ ID NO: 1704 - protein, 161 aa, Homo sapiens
VTGCLADLQQSDSDRIMAMMEVQGGPSLGQTCVLIVIFTVLLQSLCVAVTYVYFTNELKQMQDKYSKSGIACFLKEDDSYWDPNDEESMNSPCWQVKWQLRQLVRKMILRTSEETISTVQEKQQNISPLVRERGPQRVAAHITGTRGRSNTLSSPSKRNNK

SEQ ID NO: 1705 - protein, 139 aa, Homo sapiens
VTGCLADLQQSDSDRIMAMMEVQGGPSLGQTCVLIVIFTVLLQSLCVAVTYVYFTNELKQMQDKYSKSGIACFLKEDDSYWDPNDEESMNSPCWQVKWQLRQLVRKMILRTSEETISTVQGSIFFVVILIFYCHLHDRL

SEQ ID NO: 1706 - protein, 124 aa, Homo sapiens
LPLCFGIVPPTHTPALGLDHRIQIVSTLFTSNFIGICFSRSLHYQFYVWYFHTLPYLLWAMPARWLTHLLRLLVLGLIELSWNTYPSTSCSSAALHICHAVILLQLWLGPQPFPKSTQHSKKAH

SEQ ID NO: 1707 - protein, 36 aa, Homo sapiens
LDSCTSRMVFVFFGGSLGFVCLLLFQSVESLQCRKA

SEQ ID NO: 1708 - protein, 573 aa, Homo sapiens
LCVDHTPTVAFSDMLRGTLLCAVLGLLRAQPFPCPPACKCVFRDAAQCSGGDVARISALGLPTNLTHILLFGMGRGVLQSQSFSGMTVLQRLMISDSHISAVAPGTFSDLIKLKTLRLSRNKITHLPGALLDKMVLLEQLFLDHNALRGIDQNMFQKLVNLQELALNQNQLDFLPASLFTNLENLKLLDLSGNNLTHLPKGLLGAQAKLERLLLHSNRLVSLDSGLLNSLGALTELQFHRNHIRSIAPGAFDRLPNLSSLTLSRNHLAFLPSALFLHSHNLTLLTLFENPLAELPGVLFGEMGGLQELWLNRTQLRTLPAAAFRNLSRLRYLGVTLSPRLSALPQGAFQGLGELQVLALHSNGLTALPDGLLRGLGKLRQVSLRRNRLRALPRALFRNLSSLESVQLDHNQLETLPGDVFGALPRLTEVLLGHNSWRCDCGLGPFLGWLRQHLGLVGGEEPPRCAGPGAHAGLPLWALPGGDAECPGPRGPPPRPAADSSSEAPVHPALAPNSSEPWVWAQPVTTGKGQDHSPFWGFYFLLLAVQAMITVIIVFAMIKIGQLFRKLIRERALG

SEQ ID NO: 1709 - protein, 135 aa, Homo sapiens [sequence omitted]

SEQ ID NO: 1710 - protein, 837 aa, Homo sapiens
VRASRTTPTLVSSLHPAGLAGAAAPVLSSSHREPHGERESGRGPRRGGRDGAGPRACGEGAVAAPRAAAGSSVWQFRMMDQARSAFSNLFGGEPLSYTRFSLARQVDGDNSHVEMKLAVDEEENADNNTKANVTKPKRCSGSICYGTIAVIVFFLIGFMIGYLGYCKGVEPKTECERLAGTESPVREEPGEDFPAARRLYWDDLKRKLSEKLDSTDFTGTIKLLNENSYVPREAGSQKDENLALYVENQFREFKLSKVWRDQHFVKIQVKDSAQNSVIIVDKNGRLVYLVENPGGYVAYSKAATVTGKLVHANFGTKKDFEDLYTPVNGSIVIVRAGKITFAEKVANAESLNAIGVLIYMDQTKFPIVNAELSFFGHAHLGTGDPYTPGFPSFNHTQFPPSRSSGLPNIPVQTISRAAAEKLFGNMEGDCPSDWKTDSTCRMVTSESKNVKLTVSNVLKEIKILNIFGVIKGFVEPDHYVVVGAQRDAWGPGAAKSGVGTALLLKLAQMFSDMVLKDGFQPSRSIIFASWSAGDFGSVGATEWLEGYLSSLHLKAFTYINLDKAVLGTSNFKVSASPLLYTLIEKTMQNVKHPVTGQFLYQDSNWASKVEKLTLDNAAFPFLAYSGIPAVSFCFCEDTDYPYLGTTMDTYKELIERIPELNKVARAAAEVAGQFVIKLTHDVELNLDYERYNSQLLSFVRDLNQYRADIKEMGLSLQWLYSARGDFFRATSRLTTDFGNAEKTDRFVMKKLNDRVMRVEYHFLSPYVSPKESPFRHVFWGSGSHTLPALLENLKLRKQNNGAFNETLFRNQLALATWTIQGAANALSGDVWDIDNEF

SEQ ID NO: 1711 - protein, 114 aa, Homo sapiens [sequence omitted]

SEQ ID NO: 1712 - protein, 702 aa, Homo sapiens
LRLREPAALEMELLPLWLCLGFHFLTVGWRNRSGTATAASQGVCKLVGGAADCRGQSLASVPSSLPPHARMLTLDANPLKTLWNHSLQPYPLLESLSLHSCHLERISRGAFQEQGHLRSLVLGDNCLSENYEETAAALHALPGLRRLDLSGNALTEDMAALMLQNLSSLRSVSLAGNTIMRLDDSVFEGLERLRELDLQRNYIFEIEGGAFDGLAELRHLNLAFNNLPCIVDFGLTRLRVLNVSYNVLEWFLATGGEAAFELETLDLSHNQLLFFPLLPQYSKLRTLLLRDNNMGFYRDLYNTSSPREMVAQFLLVDGNVTNITTVSLWEEFSSSDLADLRFLDMSQNQFQYLPDGFLRKMPSLSHLNLHQNCLMTLHIREHEPPGALTELDLSHNQLSELHLAPGLASCLGSLRLFNLSSNQLLGVPPGLFANARNITTLDMSHNQISLCPLPAASDRVGPPSCVDFRNMASLRSLSLEGCGLGALPDCPFQGTSLTYLDLSSNWGVLNGSLAPLQDVAPMLQVLSLRNMGLHSSFMALDFSGFGNLRDLDLSGNCLTTFPRFGGSLALETLDLRRNSLTALPQKAVSEQLSRGLRTIYLSQNPYDCCGVDGWGALQHGQTVADWAMVTCNLSSKIIRVTELPGGVPRDCKWERLDLGLLYLVLILPSCLTLLVACTVIVLTFKKPLLQVIKSRCHWSSVY

SEQ ID NO: 1713 - protein, 423 aa, Homo sapiens
LPGEEGDPTRGRSLGRASWESGSPRRPRSPFSSFLPRPICLSLEARPCSIEDRRNWSLIGRPGAPASGLNRSSGLWLGPDRCRPRSRCSCRVMENPSPAAALGKALCALLLATLGAAGQPLGGESICSARALAKYSITFTGKWSQTAFPKQYPLFRPPAQWSSLLGAAHSSDYSMWRKNQYVSNGLRDFAERGEAWALMKEIEAAGEALQSVHAVFSAPAVPSGTGQTSAELEVQRRHSLVSFVVRIVPSPDWFVGVDSLDLCDGDRWREQAALDLYPYDAGTDSGFTFSSPNFATIPQDTVTEITSSSPSHPANSFYYPRLKALPPIARVTLVRLRQSPRAFIPPAPVLPSRDNEIVDSASVPETPLDCEVSLWSSWGLCGGHCGRLGTKSRTRYVRVQPANNGSPCPELEEEAECVPDNCV

SEQ ID NO: 1714 - protein, 384 aa, Homo sapiens
LALISRRPCSIEDRRNWSLIGRPGAPASGLNRSSGLWLGPDRCRPRSRCSCRVMENPSPAAALGKALCALLLATLGAAGQPLGGESICSARALAKYSITFTGKWSQTAFPKQYPLFRPPAQWSSLLGAAHSSDYSMWRKNQYVSNGLRDFAERGEAWALMKEIEAAGEALQSVHAVFSAPAVPSGTGQTSAELEVQRRHSLVSFVVRIVPSPDWFVGVDSLDLCDGDRWREQAALDLYPYDAGTDSGFTFSSPNFATIPQDTVTEITSSSPSHPANSFYYPRLKALPPIARVTLVRLRQSPRAFIPPAPVLPSRDNEIVDSASVPETPLDCEVSLWSSWGLCGGHCGRLGTKSRTRYVRVQPANNGSPCPELEEEAECVPDNCV

SEQ ID NO: 1715 - protein, 233 aa, Homo sapiens
MIVHRPSLGQPRCLGRFLKWSKRNLLFFTCFREASKCQKGCSLGAPGTMVKLGNNFAEKGTKQPLLEDGFDTIPLMTPLDVNQLQFPPPDKVVVKTKTEYEPDRKKGKARPPQIAEFTVSITEGVTERFKVSVLVLFALAFLTCVVFLVVYKVYKYDRACPDGFVLKNTQCIPEGLESYYAEQDSSAREKFYTVINHYNLAKQSITRSVSPWMSVLSEEKLSEQETEAAEKSA

SEQ ID NO: 1716 - protein, 368 aa, Homo sapiens
LGAQVGLEPPPFSPRPGIVPAAPPLCPGCSGGGCSGTSTFSANQSGGTFPPPSKRRTERSLPRTTSLPLPGAASPWAPTPQPWESATPPPAPPKTSSSFTGRASFTGRAPFIRGRALFWSPPPQPSTKEHPALVSATTQRLLDPSPQTLERPQDPQEQETRSSERSADLPEPGVGCSLGAPGTMVKLGNNFAEKGTKQPLLEDGFDTIPLMTPLDVNQLQFPPPDKVVVKTKTEYEPDRKKGKARPPQIAEFTVSITEGVTERFKVSVLVLFALAFLTCVVFLVVYKVYKYDRACPDGFVLKNTQCIPEGLESYYAEQDSSAREKFYTVINHYNLAKQSITRSVSPWMSVLSEEKLSEQETEAAEKSA

SEQ ID NO: 1717 - protein, 327 aa, Homo sapiens
VAQPAALPLRAPSAAPRPPGGASSPAPLFPPPAQGGRVVPGEAPAQPRTPLCGRAGAASRWRRGHTRAPTRAHPAPGRGRKGGGGARRRERPWSPIVRSPSRVRARRRLRHCCEQEQETRSSERSADLPEPGVGCSLGAPGTMVKLGNNFAEKGTKQPLLEDGFDTIPLMTPLDVNQLQFPPPDKVVVKTKTEYEPDRKKGKARPPQIAEFTVSITEGVTERFKVSVLVLFALAFLTCVVFLVVYKVYKYDRACPDGFVLKNTQCIPEGLESYYAEQDSSAREKFYTVINHYNLAKQSITRSVSPWMSVLSEEKLSEQETEAAEKSA

SEQ ID NO: 1718 - protein, 161 aa, Homo sapiens
LPEPGVGCSLGAPGTMVKLGNNFAEKGTKQPLLEDGFDTIPLMTPLDVNQLQFPPPDKVSVLVLFALAFLTCVVFLVVYKVYKYDRACPDGFVLKNTQCIPEGLESYYAEQDSSAREKFYTVINHYNLAKQSITRSVSPWMSVLSEEKLSEQETEAAEKSA

SEQ ID NO: 1719 - protein, 186 aa, Homo sapiens
LLRRRPREPADPGLVAKSDVVTRIKTEEGEEAGGQKRQWQQRPEQPQPSGSSRRSFCRASVPAPILPAPSVVVWADLNSQVKSSWVIMAEGGFDPCECVCSHEHAMRRLINLLRQSQSYCTDTECLQELPGPSGDNGISVTMILVAWMVIALILFLLRPPNLRGSSLPGKPTSPHNGQDPPAPPVD

SEQ ID NO: 1720 - protein, 537 aa, Homo sapiens
LDMTEALQWARYHWRRLIRGATRDDDSGPYNYSSLLACGRKSSQTPKLSGRHRIVVPHIQPFKDEYEKFSGAYVNNRIRTTKYTLLNFVPRNLFEQFHRAANLYFLFLVVLNWVPLVEAFQKEITMLPLVVVLTIIAIKDGLEDYRKYKIDKQINNLITKVYSRKEKKYIDRCWKDVTVGDFIRLSCNEVIPADMVLLFSTDPDGICHIETSGLDGESNLKQRQVVRGYAEQDSEVDPEKFSSRIECESPNNDLSRFRGFLEHSNKERVGLSKENLLLRGCTIRNTEAVVGIVVYAGHETKAMLNNSGPRYKRSKLERRANTDVLWCVMLLVIMCLTGAVGHGIWLSRYEKMHFFNVPEPDGHIISPLLAGFYMFWTMIILLQLGQIYFIQSDVDFYNEKMDSIVQCRALNIAEDLGQIQYLFSDKTGTLTENKMVFRRCSVAGFDYCHEENARRLESYQEAVSEDEDFIDTVSGSLSNMAKPRAPSCRTVHNGPLGNKPSNHLAGSSFTLGSGEGASEVPHSRQAAFSSPIVSMNA

SEQ ID NO: 1721 - protein, 1428 aa, Homo sapiens
LDMTEALQWARYHWRRLIRGATRDDDSGPYNYSSLLACGRKSSQTPKLSGRHRIVVPHIQPFKDEYEKFSGAYVNNRIRTTKYTLLNFVPRNLFEQFHRAANLYFLFLVVLNWVPLVEAFQKEITMLPLVVVLTIIAIKDGLEDYRKYKIDKQINNLITKVYSRKEKKYIDRCWKDVTVGDFIRLSCNEVIPADMVLLFSTDPDGICHIETSGLDGESNLKQRQVVRGYAEQDSEVDPEKFSSRIECESPNNDLSRFRGFLEHSNKERVGLSKENLLLRGCTIRNTEAVVGIVVYAGHETKAMLNNSGPRYKRSKLERRANTDVLWCVMLLVIMCLTGAVGHGIWLSRYEKMHFFNVPEPDGHIISPLLAGFYMFWTMIILLQVLIPISLYVSIEIVKLGQIYFIQSDVDFYNEKMDSIVQCRALNIAEDLGQIQYLFSDKTGTLTENKMVFRRCSVAGFDYCHEENARRLESYQEAVSEDEDFIDTVSGSLSNMAKPRAPSCRTVHNGPLGNKPSNHLAGSSFTLGSGEGASEVPHSRQAAFSSPIETDVVPDTRLLDKFSQITPRLFMPLDETIQNPPMETLYIIDFFIALAICNTVVVSAPNQPRQKIRHPSLGGLPIKSLEEIKSLFQRWSVRRSSSPSLNSGKEPSSGVPNAFVSRLPLFSRMKPASPVEEEVSQVCESPQCSSSSACCTETEKQHGDAGLLNGKAESLPGQPLACNLCYEAESPDEAALVYAARAYQCTLRSRTPEQVMVDFAALGPLTFQLLHILPFDSVRKRMSVVVRHPLSNQVVVYTKGADSVIMELLSVASPDGASLEKQQMIVREKTQKHLDDYAKQGLRTLCIAKKVMSDTEYAEWLRNHFLAETSIDNREELLLESAMRLENKLTLLGATGIEDRLQEGVPESIEALHKAGIKIWMLTGDKQETAVNIAYACKLLEPDDKLFILNTQSKDACGMLMSTILKELQKKTQALPEQVSLSEDLLQPPVPRDSGLRAGLIITGKTLEFALQESLQKQFLELTSWCQAVVCCRATPLQKSEVVKLVRSHLQVMTLAIGDGANDVSMIQVADIGIGVSGQEGMQAVMASDFAVSQFKHLSKLLLVHGHWCYTRLSNMILYFFYKNVAYVNLLFWYQFFCGFSGTSMTDYWVLIFFNLLFTSAPPVIYGVLEKDVSAETLMQLPELYRSGQKSEAYLPHTFWITLLDAFYQSLVCFFVPYFTYQGSDTDIFAFGNPLNTAALFIVLLHLVIESKSLTWIHLLVIIGSILSYFLFAIVFGAMCVTCNPPSNPYWIMQEHMLDPVFYLVCILTTSIALLPRFVYRVLQGSLFPSPILRAKHFDRLTPEERTKALKKWRGAGKMNQVTSKYANQSAGKSGRRPMPGPSAVFAMKSASSCAIEQGNLSLCETALDQGYSETKAFEMAGPSKGKES

SEQ ID NO: 1722 - protein, 705 aa, Homo sapiens
VEKEPVKCLIPDRLLSVAPLKQTWYQTPEQVMVDFAALGPLTFQLLHILPFDSVRKRMSVVVRHPLSNQVVVYTKGADSVIMELLSVASPDGASLEKQQMIVREKTQKHLDDYAKQGLRTLCIAKKVMSDTEYAEWLRNHFLAETSIDNREELLLESAMRLENKLTLLGATGIEDRLQEGVPESIEALHKAGIKIWMLTGDKQETAVNIAYACKLLEPDDKLFILNTQSKDACGMLMSTILKELQKKTQALPEQVSLSEDLLQPPVPRDSGLRAGLIITGKTLEFALQESLQKQFLELTSWCQAVVCCRATPLQKSEVVKLVRSHLQVMTLAIGDGANDVSMIQVADIGIGVSGQEGMQAVMASDFAVSQFKHLSKLLLVHGHWCYTRLSNMILYFFYKNVAYVNLLFWYQFFCGFSGTSMTDYWVLIFFNLLFTSAPPVIYGVLEKDVSAETLMQLPELYRSGQKSEAYLPHTFWITLLDAFYQSLVCFFVPYFTYQGSDTDIFAFGNPLNTAALFIVLLHLVIESKSLTWIHLLVIIGSILSYFLFAIVFGAMCVTCNPPSNPYWIMQEHMLDPVFYLVCILTTSIALLPRFVYRVLQGSLFPSPILRAKHFDRLTPEERTKALKKWRGAGKMNQVTSKYANQSAGKSGRRPMPGPSAVFAMKSASSCAIEQGNLSLCETALDQGYSETKAFEMAGPSKGKES

SEQ ID NO: 1723 - protein, 1042 aa, Homo sapiens
LGGLAGKMSTENVEGKPSNLGERGRARSSTFLRVVQPMFNHSIFTSAVSPAAERIRFILGEEDDSPAPPQLFTELDELLAVDGQEMEWKETARWIKFEEKVEQGGERWSKPHVATLSLHSLFELRTCMEKGSIMLDREASSLPQLVEMIVDHQIETGLLKPELKDKVTYTLLRKHRHQTKKSNLRSLADIGKTVSSASRMFTNPDNGSPAMTHRNLTSSSLNDISDKPEKDQLKNKFMKKLPRDAEASNVLVGEVDFLDTPFIAFVRLQQAVMLGALTEVPVPTRFLFILLGPKGKAKSYHEIGRAIATLMSDEVFHDIAYKAKDRHDLIAGIDEFLDEVIVLPPGEWDPAIRIEPPKSLPSSDKRKNMYSGGENVQMNGDTPHDGGHGGGGHGDCEELQRTGRFCGGLIKDIKRKAPFFASDFYDALNIQALSAILFIYLATVTNAITFGGLLGDATDNMQGVLESFLGTAVSGAIFCLFAGQPLTILSSTGPVLVFERLLFNFSKDNNFDYLEFRLWIGLWSAFLCLILVATDASFLVQYFTRFTEEGFSSLISFIFIYDAFKKMIKLADYYPINSNFKVGYNTLFSCTCVPPDPANISISNDTTLAPEYLPTMSSTDMYHNTTFDWAFLSKKECSKYGGNLVGNNCNFVPDITLMSFILFLGTYTSSMALKKFKTSPYFPTTARKLISDFAIILSILIFCVIDALVGVDTPKLIVPSEFKPTSPNRGWFVPPFGENPWWVCLAAAIPALLVTILIFMDQQITAVIVNRKEHKLKKGAGYHLDLFWVAILMVICSLMALPWYVAATVISIAHIDSLKMETETSAPGEQPKFLGVREQRVTGTLVFILTGLSVFMAPILKFIPMPVLYGVFLYMGVASLNGVQFMDRLKLLLMPLKHQPDFIYLRHVPLRRVHLFTFLQVLCLALLWILKSTVAAIIFPVMILALVAVRKGMDYLFSQHDLSFLDDVIPEKDKKKKEDEKKKKKKKGSLDSDNDDSDCPYSEKVPSIKIPMDIMEQQPFLSDSKPSDRERSPTFLERHTSC

SEQ ID NO: 1724 - protein, 316 aa, Homo sapiens
VPAPQRSRDSPRRRARRPELPKPSRAAHTPGLHSLFQHPLVLAAARVPETELPQRPRRRRCEGPMRAPLLPPAPVVLSLLILGSGHYAAGLDLNDTYSGKREPFSGDHSADGFEVTSRSEMSSGSEISPVSEMPSSSEPSSGADYDYSEEYDNEPQIPGYIVDDSVRVEQVVKPPQNKTESENTSDKPKRKKKGGKNGKNRRNRKKKNPCNAEFQNFCIHGECKYIEHLEAVTCKCQQEYFGERCGEKSMKTHSMIDSSLSKIALAAIAAFMSAVILTAVAVITVQLRRQYVRKYEGEAEERKKLRQENGNVHAIA

SEQ ID NO: 1725 - protein, 287 aa, Homo sapiens
LPQRPRRRRCEGPMRAPLLPPAPVVLSLLILGSGHYAAGLDLNDTYSGKREPFSGDHSADGFEVTSRSEMSSGSEISPVSEMPSSSEPSSGADYDYSEEYDNEPQIPGYIVDDSVRVEQVVKPPQNKTESENTSDKPKRKKKGGKNGKNRRNRKKKNPCNAEFQNFCIHGECKYIEHLEAVTCKCQQEYFGERCGEKSMKTHSMIDSSLSKIALAAIAAFMSAVILTAVAVITVQISHWSHCQVIAINDESVLFPVDHKTMDPFCYDGFKLSIVTFYAISVYKGARR

SEQ ID NO: 1726 - protein, 81 aa, Homo sapiens
LSRFFLFFPPFPFLFFFFFSFLPSPPFTISPRRRFPRAGAEPVSPPASPRPPPPYGEREPPPNPGSSGGGLRPGVIMELIR

SEQ ID NO: 1727 - protein, 419 aa, Homo sapiens
LQRSRGAGGGAQAVRLGSAECEAWRAAARSDGPGAATPRGRPAARRAGDLPLHAPCALQLAGGTMKKFSRMPKSEGGSGGGAAGGGAGGAGAGAGCGSGGSSVGVRVFAVGRHQVTLEESLAEGGFSTVFLVRTHGGIRCALKRMYVNNMPDLNVCKREITIMKELSGHKNIVGYLDCAVNSISDNVWEVLILMEYCRAGQVVNQMNKKLQTGFTEPEVLQIFCDTCEAVARLHQCKTPIIHRDLKVENILLNDGGNYVLCDFGSATNKFLNPQKDGVNVVEEEIKKYTTLSYRAPEMINLYGGKPITTKADIWALGCLLYKLCFFTLPFGESQVAICDGNFTIPDNSRYSRNIHCLIRFMLEPDPEHRPDIFQVSYFAFKFAKKDCPVSNINKCCKQLLRHGALLTEILLFLQLFLNR

SEQ ID NO: 1728 - protein, 206 aa, Homo sapiens
LSSWGYRTLDVSVSFNGGKSVISGSLIVTATECSNGIAAIIVILVLLLLLGIGLMWWFWPLCCKVVIKDPPPPPAPAPKEEEEEPLPTKKWPTVDASYYGGRGVGGIKRMEVRWGDKGSTEEGARLEKAKNAVVKIPEETEEPIRPRPPRPKPTHQPPQTKWYTPIKGRLDALWALLRRQYDRVSLMRPQEGDEGRCINFSRVPSQ

SEQ ID NO: 1729 - protein, 491 aa, Homo sapiens
VCQSAVLPQGTWLGEGLQVSAGLGALLLELPRDCLGTGTAVALGPPLRTSPEWVRRVMEGAELAGKILSTWLTLVLGFILLPSVFGVSLGISEIYMKILVKTLEWATIRIEKGTPKESILKNSASVGIIQRDESPMEKGLSGLRGRDFELSDVFYFSKKGLEAIVEDEVTQRFSSEELVSWNLLTRTNVNFQYISLRLTMVWVLGVIVRYCVLLPLRVTLAFIGISLLVIGTTLVGQLPDSSLKNWLSELVHLTCCRICVRALSGTIHYHNKQYRPQKGGICVANHTSPIDVLILTTDGCYAMVGQVHGGLMGIIQRAMVKACPHVWFERSEMKDRHLVTKRLKEHIADKKKLPILIFPEGTCINNTSVMMFKKGSFEIGGTIHPVAIKYNPQFGDAFWNSSKYNMVSYLLRMMTSWAIVCDVWYMPPMTREEGEDAVQFANRVKSAIAIQGGLTELPWDGGLKRAKVKDIFKEEQQKNYSKMIVGNGSLS

SEQ ID NO: 1730 - protein, 503 aa, Homo sapiens
LAGARRSPGRKEGYCRNSESFFPSSLPFAEVSAGLGALLLELPRDCLGTGTAVALGPPLRTSPEWVRRVMEGAELAGKILSTWLTLVLGFILLPSVFGVSLGISEIYMKILVKTLEWATIRIEKGTPKESILKNSASVGIIQRDESPMEKGLSGLRGRDFELSDVFYFSKKGLEAIVEDEVTQRFSSEELVSWNLLTRTNVNFQYISLRLTMVWVLGVIVRYCVLLPLRVTLAFIGISLLVIGTTLVGQLPDSSLKNWLSELVHLTCCRICVRALSGTIHYHNKQYRPQKGGICVANHTSPIDVLILTTDGCYAMVGQVHGGLMGIIQRAMVKACPHVWFERSEMKDRHLVTKRLKEHIADKKKLPILIFPEGTCINNTSVMMFKKGSFEIGGTIHPVAIKYNPQFGDAFWNSSKYNMVSYLLRMMTSWAIVCDVWYMPPMTREEGEDAVQFANRVKSAIAIQGGLTELPWDGGLKRAKVKDIFKEEQQKNYSKMIVGNGSLS

SEQ ID NO: 1731 - protein, 80 aa, Homo sapiens
VAGNKWKRRMFLSLPTLTVLIPLVSLAGLFYSASVEENFPQGCTSTASLCFYSLLLPITIPVYVFFHLWTWMGIKLFRHN

SEQ ID NO: 1732 - protein, 102 aa, Homo sapiens
VCAPQAGGKAGKDSGKAKTKAVSRSQRAGLQVSSCSCSLGVMMFFFAFPFLLFIALDGRFVYAWVMRCRDLGCPYDKYGGEESRVSMSGRVAAPVPLALARI

SEQ ID NO: 1733 - protein, 98 aa, Homo sapiens [sequence omitted]

SEQ ID NO: 1734 - protein, 163 aa, Homo sapiens
MNYTPSMHQEAQEETVMKLKGIDANEPTEGSILLKSSEKKLQETPTEANHVQRLRQMLACPPHGLLDRVITNGMLLAGFLIRNIPVINDNVQIKHKWSSSLRSIALSIILVRAGLGLDSKALKKLKGVCVRLSMGPCIVEACTSALLAHYLLGLPWQWGFILG

SEQ ID NO: 1735 - protein, 840 aa, Homo sapiens
LQMCRFGQKGKAIRIERVIYTGKEGKSSQGCPIAKWVVRRSSSEEKLLCLVRERAGHTCEAAVIVILILVWEGIPLSLADKLYSELTETLRKYGTLTNRRCALNEERTCACQGLDPETCGASFSFGCSWSMYYNGCKFARSKIPRKFKLLGDDPKEEEKLESHLQNLSTLMAPTYKKLAPDAYNNQIEYEHRAPECRLGLKEGRPFSGVTACLDFCAHAHRDLHNMQNGSTLVCTLTREDNREFGGKPEDEQLHVLPLYKVSDVDEFGSVEAQEEKKRSGAIQVLSSFRRKVRMLAEPVKTCRQRKLEAKKAAAEKLSSLENSSNKNEKEKSAPSRTKQTENASQAKQLAELLRLSGPVMQQSQQPQPLQKQPPQPQQQQRPQQQQPHHPQTESVNSYSASGSTNPYMRRPNPVSPYPNSSHTSDIYGSTSPMNFYSTSSQAAGSYLNSSNPMNPYPGLLNQNTQYPSYQCNGNLSVDNCSPYLGSYSPQSQPMDLYRYPSQDPLSKLSLPPIHTLYQPRFGNSQSFTSKYLGYGNQNMQGDGFSSCTIRPNVHHVGKLPPYPTHEMDGHFMGATSRLPPNLSNPNMDYKNGEHHSPSHIIHNYSAAPGMFNSSLHALHLQNKENDMLSHTANGLSKMLPALNHDRTACVQGGLHKLSDANGQEKQPLALVQGVASGAEDNDEVWSDSEQSFLDPDIGGVAVAPTHGSILIECAKRELHATTPLKNPNRNHPTRISLVFYQHKSMNEPKHGLALWEAKMAEKAREKEEECEKYGPDYVPQKSHGKKVKREPAEPHETSEPTYLRFIKSLAERTMSVTTDSTVTTSPYAFTRVTGPYNRYI

SEQ ID NO: 1736 - protein, 170 aa, Homo sapiens
LSAAGAADPRAAFGRRRCLVRRGVVLRRLSGAVGVGCGMCSAGELLRGGDGGERDEDGDALAEREAAGTGWDPGASPRRRGQRPKESEQDVEDSQNHTGEPVGDDYKKMGTLFGELNKNLINMGFTRMYFGERIVEPVIVIFFWVMLWFLGLQALGLVAVLCLVIIYVQQ

SEQ ID NO: 1737 - protein, 393 aa, Homo sapiens
VPGDAVPPLAQRAESAKRVGLRGAQGTTPAFLSPRRIPKPHSLHSSPLKKKKKRKGISDACQVSTDCQNSRSLHMDPQNQHGSGSSLVVIQQPSLDSRQRLDYEREIQPTAILSLDQIKAIRGSNEYTEGPSVVKRPAPRTAPRQEKHERTHEIIPINVNNNYEHRHTSHLGHAVLPSNARGPILSRSTSTGSAASSGSNSSASSEQGLLGRSPPTRPVPGHRSERAIRTQPKQLIVDDLKGSLKEDLTQHKFICEQCGKCKCGECTAPRTLPSCLACNRQCLCSAESMVEYGTCMCLVKGIFYHCSNDDEGDSYSDNPCSCSQSHCCSRYLCMGAMSLFLPCLLCYPPAKGCLKLCRRCYDWIHRPGCRCKNSNTVYCKLESCPSRGQGKPS

SEQ ID NO: 1738 - protein, 353 aa, Homo sapiens
LGRVARLGPRPPLRPRISDACQVSTDCQNSRSLHMDPQNQHGSGSSLVVIQQPSLDSRQRLDYEREIQPTAILSLDQIKAIRGSNEYTEGPSVVKRPAPRTAPRQEKHERTHEIIPINVNNNYEHRHTSHLGHAVLPSNARGPILSRSTSTGSAASSGSNSSASSEQGLLGRSPPTRPVPGHRSERAIRTQPKQLIVDDLKGSLKEDLTQHKFICEQCGKCKCGECTAPRTLPSCLACNRQCLCSAESMVEYGTCMCLVKGIFYHCSNDDEGDSYSDNPCSCSQSHCCSRYLCMGAMSLFLPCLLCYPPAKGCLKLCRRCYDWIHRPGCRCKNSNTVYCKLESCPSRGQGKPS

SEQ ID NO: 1739 - protein, 143 aa, Homo sapiens
LLWLHERWCVCCLQHPLTMIMLFSGDLDSLLNFLSFARWLFIGLAVAGLIYLRYKCPDMHRPFKVPLFIPALFSFTCLFMVALSLYSDPFSTGIGFVITLTGVPAYYLFIIWDKKPRWFRIMSEKITRTLQIILEVVPEEDKL

SEQ ID NO: 1740 - protein, 98 aa, Homo sapiens
LSAKQNCVEFYPIFIITLWMAGWYFNQVFATCLGLVYIYGRHLYFWGYSEAAKKRITGFRLSLGILALLTLLGALGIANSFLDEYLDLNIAKKLRRQF

SEQ ID NO: 1741 - protein, 83 aa, Homo sapiens
LGHQSLREYFGHIFATCLGLVYIYGRHLYFWGYSEAAKKRITGFRLSLGILALLTLLGALGIANSFLDEYLDLNIAKKLRRQF

SEQ ID NO: 1742 - protein, 238 aa, Homo sapiens
LTGSCRITSLPKKQAHTSPSSQHRPKQAGNRKCSRFREAAARRSILSAPLPRRADMQAPRAALVFALVIALVPVGRGNYEELENSGDTTVESERPNKVTIPSTFAAVTIKETLNANINSTNFAPDENQLEFILMVLIPLILLVLLLLSVVFLATYYKRKRTKQEPSSQGSQSALQTYELGSENVKVPIFEEDTPSVMEIEMEELDKWMNSMNRNADFECLPTLKEEKESNHNPSDSES

SEQ ID NO: 1743 - protein, 135 aa, Homo sapiens
LSAPLPRRADMQAPRAALVFALVIALVPVGRGNYEELENSGDTTVESERPNKVTIPSTFAAVTIKETLNANINSTNFAPDENQLEFILMVLIPLILLVLLLLSVVFLATYYKRKRTKQEPSSQGSQSALQTYLLV

SEQ ID NO: 1744 - protein, 789 aa, Homo sapiens
LKHWTMPHTLWMVWVLGVIISLSKEESSNQASLSCDRNGICKGSSGSLNSIPSGLTEAVKSLDLSNNRITYISNSDLQRCVNLQALVLTSNGINTIEEDSFSSLGSLEHLDLSYNYLSNLSSSWFKPLSSLTFLNLLGNPYKTLGETSLFSHLTKLQILRVGNMDTFTKIQRKDFAGLTFLEELEIDASDLQSYEPKSLKSIQNVSHLILHMKQHILLLEIFVDVTSSVECLELRDTDLDTFHFSELSTGETNSLIKKFTFRNVKITDESLFQVMKLLNQISGLLELEFDDCTLNGVGNFRASDNDRVIDPGKVETLTIRRLHIPRFYLFYDLSTLYSLTERVKRITVENSKVFLVPCLLSQHLKSLEYLDLSENLMVEEYLKNSACEDAWPSLQTLILRQNHLASLEKTGETLLTLKNLTNIDISKNSFHSMPETCQWPEKMKYLNLSSTRIHSVTGCIPKTLEILDVSNNNLNLFSLNLPQLKELYISRNKLMTLPDASLLPMLLVLKISRNAITTFSKEQLDSFHTLKTLEAGGNNFICSCEFLSFTQEQQALAKVLIDWPANYLCDSPSHVRGQQVQDVRLSVSECHRTALVSGMCCALFLLILLTGVLCHRFHGLWYMKMMWAWLQAKRKPRKAPSRNICYDAFVSYSERDAYWVENLMVQELENFNPPFKLCLHKRDFIPGKWIIDNIIDSIEKSHKTVFVLSENFVKSEWCKYELDFSHFRLFDENNDAAILILLEPIEKKAIPQRFCKLRKIMNTKTYLEWPMDEAQREGFWVNLRAAIKS

SEQ ID NO: 1745 - protein, 220 aa, Homo sapiens
VSVAGSHLAAVQDKPETWENQWKCFKVLLFNHFCIQLPLICGTYYFTEYFNIPYDWERMPRWYFLLARCFGCAVIEDTWHYFLHRLLHHKRIYKYIHKVHHEFQAPFGMEAEYAHPLETLILGTGFFIGIVLLCDHVILLWAWVTIRLLETIDVHSGYDIPLNPLNLIPFYAGSRHHDFHHMNFIGNYASTFTWWDRIFGTDSQYNAYNEKRKKFEKKTE

SEQ ID NO: 1746 - protein, 555 aa, Homo sapiens
VGGVRPAPPRTTPPRARTFPECTPRPPAGAMAGLWLGLVWQKLLLWGAASALSLAGASLVLSLLQRVASYARKWQQMRPIPTVARAYPLVGHALLMKPDGREFFQQIIEYTEEYRHMPLLKLWVGPVPMVALYNAENVEVILTSSKQIDKSSMYKFLEPWLGLGLLTSTGNKWRSRRKMLTPTFHFTILEDFLDIMNEQANILVKKLEKHINQEAFNCFFYITLCALDIICETAMGKNIGAQSNDDSEYVRAVYRMSEMIFRRIKMPWLWLDLWYLMFKEGWEHKKSLQILHTFTNSVIAERANEMNANEDCRGDGRGSAPSKNKRRAFLDLLLSVTDDEGNRLSHEDIREEVDTFMFEGHDTTAAAINWSLYLLGSNPEVQKKVDHELDDVFGKSDRPATVEDLKKLRYLECVIKETLRLFPSVPLFARSVSEDCEVAGYRVLKGTEAVIIPYALHRDPRYFPNPEEFQPERFFPENAQGRHPYAYVPFSAGPRNCIGQKFAVMEEKTILSCILRHFWIESNQKREELGLEGQLILRPSNGIWIKLKRRNADER

SEQ ID NO: 1747 - protein, 807 aa, Homo sapiens
MPRAPRCRAVRSLLRSHYREVLPLATFVRRLGPQGWRLVQRGDPAAFRALVAQCLVCVPWDARPPPAAPSFRQVSCLKELVARVLQRLCERGAKNVLAFGFALLDGARGGPPEAFTTSVRSYLPNTVTDALRGSGAWGLLLRRVGDDVLVHLLARCALFVLVAPSCAYQVCGPPLYQLGAATQARPPPHASGPRRRLGCERAWNHSVREAGVPLGLPAPGARRRGGSASRSLPLPKRPRRGAAPEPERTPVGQGSWAHPGRTRGPSDRGFCVVSPARPAEEATSLEGALSGTRHSHPSVGRQHHAGPPSTSRPPRPWDTPCPPVYAETKHFLYSSGDKEQLRPSFLLSSLRPSLTGARRLVETIFLGSRPWMPGTPRRLPRLPQRYWQMRPLFLELLGNHAQCPYGVLLKTHCPLRAAVTPAAGVCAREKPQGSVAAPEEEDTDPRRLVQLLRQHSSPWQVYGFVRACLRRLVPPGLWGSRHNERRFLRNTKKFISLGKHAKLSLQELTWKMSVRDCAWLRRSPGVGCVPAAEHRLREEILAKFLHWLMSVYVVELLRSFFYVTETTFQKNRLFFYRKSVWSKLQSIGIRQHLKRVQLRELSEAEVRQHREARPALLTSRLRFIPKPDGLRPIVNMDYVVGARTFRREKRAERLTSRVKALFSVLNYERARRPGLLGASVLGLDDIHRAWRTFVLRVRAQDPPPELYFVKVDVTGAYDTIPQDRLTEVIASIIKPQNTYCVRRYAVVQKAAHGHVRKAFKSHVLRPVPGDPAGLHPLHAALQPVLRRHGEQAVCGDSAGRAAPAFGG

SEQ ID NO: 1748 - protein, 48 aa, Homo sapiens
LPRLSDFRRRRSFRRIAGAEIQMVILLIATSLVVLICSIPLVICFCLL

SEQ ID NO: 1749 - protein, 55 aa, Homo sapiens
MVSCDCGVCESRSILVLCASLFAVLGGLARFRIRGTGGLERGMRWPSRARRMTAN

SEQ ID NO: 1750 - protein, 205 aa, Homo sapiens
VCRFSYPSAKGILCKPLQTQRNYGPPVRPRMGPERTGAAPLPLLLVLALSQGILNCCLAYNVGLPEAKIFSGPSSEQFGYAVQQFINPKGNWLLVGSPWSGFPENRMGDVYKCPVDLSTATCEKLNLQTSTSIPNVTEMKTNMSLGLILTRNMGTGGFLTCGPLWAQQCGNQYYTTGVCSDISPDFQLSASFSPATQRGVNSVCQ

SEQ ID NO: 1751 - protein, 1211 aa, Homo sapiens
VCRFSYPSAKGILCKPLQTQRNYGPPVRPRMGPERTGAAPLPLLLVLALSQGILNCCLAYNVGLPEAKIFSGPSSEQFGYAVQQFINPKGNWLLVGSPWSGFPENRMGDVYKCPVDLSTATCEKLNLQTSTSIPNVTEMKTNMSLGLILTRNMGTGGFLTCGPLWAQQCGNQYYTTGVCSDISPDFQLSASFSPATQPCPSLIDVVVVCDESNSIYPWDAVKNFLEKFVQGLDIGPTKTQVGLIQYANNPRVVFNLNTYKTKEEMIVATSQTSQYGGDLTNTFGAIQYARKYAYSAASGGRRSATKVMVVVTDGESHDGSMLKAVIDQCNHDNILRFGIAVLGYLNRNALDTKNLIKEIKAIASIPTERYFFNVSDEAALLEKAGTLGEQIFSIEGTVQGGDNFQMEMSQVGFSADYSSQNDILMLGAVGAFGWSGTIVQKTSHGHLIFPKQAFDQILQDRNHSSYLGYSVAAISTGESTHFVAGAPRANYTGQIVLYSVNENGNITVIQAHRGDQIGSYFGSVLCSVDVDKDTITDVLLVGAPMYMSDLKKEEGRVYLFTIKEGILGQHQFLEGPEGIENTRFGSAIAALSDINMDGFNDVIVGSPLENQNSGAVYIYNGHQGTIRTKYSQKILGSDGAFRSHLQYFGRSLDGYGDLNGDSITDVSIGAFGQVVQLWSQSIADVAIEASFTPEKITLVNKNAQIILKLCFSAKFRPTKQNNQVAIVYNITLDADGFSSRVTSRGLFKENNERCLQKNMVVNQAQSCPEHIIYIQEPSDVVNSLDLRVDISLENPGTSPALEAYSETAKVFSIPFHKDCGEDGLCISDLVLDVRQIPAAQEQPFIVSNQNKRLTFSVTLKNKRESAYNTGIVVDFSENLFFASFSLPVDGTEVTCQVAASQKSVACDVGYPALKREQQVTFTINFDFNLQNLQNQASLSFQALSESQEENKADNLVNLKIPLLYDAEIHLTRSTNINFYEISSDGNVPSIVHSFEDVGPKFIFSLKVTTGSVPVSMATVIIHIPQYTKEKNPLMYLTGVQTDKAGDISCNADINPLKIGQTSSSVSFKSENFRHTKELNCRTASCSNVTCWLKDVHMKGEYFVNVTTRIWNGTFASSTFQTVQLTAAAEINTYNPEIYVIEDNTVTIPLMIMKPDEKAEVPTGVIIGSIIAGILLLLALVAILWKLGFFKRKYEKMTKNPDEIDETTELSS

SEQ ID NO: 1752 - protein, 1014 aa, Homo sapiens
LEVFSHVVLCGHSNVGISITQRVCVLTSVLIFSSQPASHLQLSVGLIQYANNPRVVFNLNTYKTKEEMIVATSQTSQYGGDLTNTFGAIQYARKYAYSAASGGRRSATKVMVVVTDGESHDGSMLKAVIDQCNHDNILRFGIAVLGYLNRNALDTKNLIKEIKAIASIPTERYFFNVSDEAALLEKAGTLGEQIFSIEGTVQGGDNFQMEMSQVGFSADYSSQNDILMLGAVGAFGWSGTIVQKTSHGHLIFPKQAFDQILQDRNHSSYLGYSVAAISTGESTHFVAGAPRANYTGQIVLYSVNENGNITVIQAHRGDQIGSYFGSVLCSVDVDKDTITDVLLVGAPMYMSDLKKEEGRVYLFTIKEGILGQHQFLEGPEGIENTRFGSAIAALSDINMDGFNDVIVGSPLENQNSGAVYIYNGHQGTIRTKYSQKILGSDGAFRSHLQYFGRSLDGYGDLNGDSITDVSIGAFGQVVQLWSQSIADVAIEASFTPEKITLVNKNAQIILKLCFSAKFRPTKQNNQVAIVYNITLDADGFSSRVTSRGLFKENNERCLQKNMVVNQAQSCPEHIIYIQEPSDVVNSLDLRVDISLENPGTSPALEAYSETAKVFSIPFHKDCGEDGLCISDLVLDVRQIPAAQEQPFIVSNQNKRLTFSVTLKNKRESAYNTGIVVDFSENLFFASFSLPVDGTEVTCQVAASQKSVACDVGYPALKREQQVTFTINFDFNLQNLQNQASLSFQALSESQEENKADNLVNLKIPLLYDAEIHLTRSTNINFYEISSDGNVPSIVHSFEDVGPKFIFSLKVTTGSVPVSMATVIIHIPQYTKEKNPLMYLTGVQTDKAGDISCNADINPLKIGQTSSSVSFKSENFRHTKELNCRTASCSNVTCWLKDVHMKGEYFVNVTTRIWNGTFASSTFQTVQLTAAAEINTYNPEIYVIEDNTVTIPLMIMKPDEKAEVPTGVIIGSIIAGILLLLALVAILWKLGFFKRKYEKMTKNPDEIDETTELSS

SEQ ID NO: 1753 - protein, 196 aa, Homo sapiens
LPRLAHERLGTNRVFAGAVRGGPRAPLLAVGAPPGLSPPSAALLLRLGGAVARGRRQPRPGLENQGPRPPSRSSVHRPCRAARAETMFDKTRLPYVALDVLCVLLASMPMAVLKLGQIYPFQRGFFCKDNSINYPYHDSTVTSTVLILVGVGLPISSLDCLLQFLLQGIPPSNEEYSVMMSPSSTLTKKTPYLMRY

SEQ ID NO: 1754 - protein, 395 aa, Homo sapiens
LPGPPSAPGRAVGRVQGGRRSRGRVRRRTPRPASAHSSAVSQAPDPASELLKSWREENTSHPASGKGPLLDMSPAAAAEPDGDQQDRHVSKLIFCFFVFGAVLLCVGVLLSIFGFQACQYKPLPDCPMVLKVAGPACAVVGLGAVILARSRAQLQLRAGLQRGQQMDPDRAFICGESRQFAQCLIFGFLFLTSGMLISVLGIWVPGCGSNWAQEPLNETDTGDSEPRMCGFLSLQIMGPLIVLVGLCFFVVAHVKKRNTLNAGQDASEREEGQIQIMEPVQVTVGDSVIIFPPPPPPYFPESSASAVAESPGTNSLLPNENPPSYYSIFNYGRTPTSEGAASERDCESIYTISGTNSSSEASHTPHLPSELPPRYEEKENAAATFLPLSSEPSPP

SEQ ID NO: 1755 - protein, 383 aa, Homo sapiens
VGRVQGGRRSRGRVRRRTPRPASAHSSAVSQAPDPASELLKSWREENTSHPASGKGPLLDMSPAAAAEPDGDQQDRHVSKLIFCFFVFGAVLLCVGVLLSIFGFQACQYKPLPDCPMVLKVAGPACAVVGLGAVILARSRAQLQLRAGLQRGQQMDPDRAFICGESRQFAQCLIFGFLFLTSGMLISVLGIWVPGCGSNWAQEPLNETDTGDSEPRMCGFLSLQIMGPLIVLVGLCFFVVAHVKKRNTLNAGQDASEREEGQIQIMEPVQVTVGDSVIIFPPPPPPYFPESSASAVAESPGTNSLLPNENPPSYYSIFNYGTPTSEGAASERDCESIYTISGTNSSSEASHTPHLPSELPPRYEEKENAAATFLPLSSEPSPP

SEQ ID NO: 1756 - protein, 908 aa, Homo sapiens
MQWMSHTRERDAGSKDSVATMLSRLFRMHGLFVASHPWEVIVGTVTLTICMMSMNMFTGNNKICGWNYECPKFEEDVLSSDIIILTITRCIAILYIYFQFQNLRQLGSKYILGIAGLFTIFSSFVFSTVVIHFLDKELTGLNEALPFFLLLIDLSRASTLAKFALSSNSQDEVRENIARGMAILGPTFTLDALVECLVIGVGTMSGVRQLEIMCCFGCMSVLANYFVFMTFFPACVSLVLELSRESREGRPIWQLSHFARVLEEEENKPNPVTQRVKMIMSLGLVLVHAHSRWIADPSPQNSTADTSKVSLGLDENVSKRIEPSVSLWQFYLSKMISMDIEQVITLSLALLLAVKYIFFEQTETESTLSLKNPITSPVVTQKKVPDNCCRREPMLVRNNQKCDSVEEETGINRERKVEVIKPLVAETDTPNRATFVVGNSSLLDTSSVLVTQEPEIELPREPRPNEECLQILGNAEKGAKFLSDAEIIQLVNAKHIPAYKLETLMETHERGVSIRRQLLSKKLSEPSSLQYLPYRDYNYSLVMGACCENVIGYMPIPVGVAGPLCLDEKEFQVPMATTEGCLVASTNRGCRAIGLGGGASSRVLADGMTRGPVVRLPRACDSAEVKAWLETSEGFAVIKEAFDSTSRFARLQKLHTSIAGRNLYIRFQSRSGDAMGMNMISKGTEKALSKLHEYFPEMQILAVSGNYCTDKKPAAINWIEGRGKSVVCEAVIPAKVVREVLKTTTEAMIEVNINKNLVGSAMAGSIGGYNAHAANIVTAIYIACGQDAAQNVGSSNCITLMEASGPTNEDLYISCTMPSIEIGTVGGGTNLLPQQACLQMLGVQGACKDNPGENARQLARIVCGTVMAGELSLMAALAAGHLVKSHMIHNRSKINLQDLQGACTKKTA

SEQ ID NO: 1757 - protein, 858 aa, Homo sapiens
LSVGAGVRWPLVRSGGSKDSVATMLSRLFRMHGLFVASHPWEVIVGTVTLTICMMSMNMFTGNNKICGWNYECPKFEEDVLSSDIIILTITRCIAILYIYFQFQNLRQLGSKYILGIAGLFTIFSSFVFSTVVIHFLDKELTGLNEALPFFLLLIDLSRASTLAKFALSSNSQDEVRENIARGMAILGPTFTLDALVECLVIGVGTMSGVRQLEIMCCFGCMSVLANYFVFMTFFPACVSLVLELSRESREGRPIWQLSHFARVLEEEENKPNPVTQRVKMIMSLGLVLVHAHSRWIADPSPQNSTADTSKVSLGLDENVSKRIEPSVSLWQFYLSKMISMDIEQVITLSLALLLAVKYIFFEQTETESTLSLKNPITSPVVTQKKVPDNCCRREPMLVRNNQKCDSVEEETGINRERKVEVIKPLVAETDTPNRATFVVGNSSLLDTSSVLVTQEPEIELPREPRPNEECLQILGNAEKGAKFLSDAEIIQLVNAKHIPAYKLETLMETHERGVSIRRQLLSKKLSEPSSLQYLPYRDYNYSLLGGGASSRVLADGMTRGPVVRLPRACDSAEVKAWLETSEGFAVIKEAFDSTSRFARLQKLHTSIAGRNLYIRFQSRSGDAMGMNMISKGTEKALSKLHEYFPEMQILAVSGNYCTDKKPAAINWIEGRGKSVVCEAVIPAKVVREVLKTTTEAMIEVNINKNLVGSAMAGSIGGYNAHAANIVTAIYIACGQDAAQNVGSSNCITLMEASGPTNEDLYISCTMPSIEIGTVGGGTNLLPQQACLQMLGVQGACKDNPGENARQLARIVCGTVMAGELSLMAALAAGHLVKSHMIHNRSKINLQDLQGACTKKTA

SEQ ID NO: 1758 - protein, 221 aa, Homo sapiens
MCCFGCMSVLANYFVFMTFFPACVSLVLELSRESREGRPIWQLSHFARVLEEEENKPNPVTQRVKMIMSLGLVLVHAHSRWIADPSPQNSTADTSKVSLGLDENVSKRIEPSVSLWQFYLSKMISMDIEQVITLSLALLLAVKYIFFEQTETESTLSLKNPITSPVVTQKKVPDNCCRREPMLVRNNQKCDSVEEETGINRERKGNLLFSSLSILHCFVKK

SEQ ID NO: 1759 - protein, 472 aa, Homo sapiens
LILPVGTLRSACREDRLPDPQKSGERVKRSSPRRGSLPEQRRAEPGTMGPRRLLLVAACFSLCGPLLSARTRARRPESKATNATLDPRSFLLRNPNDKYEPFWEDEEKNESGLTEYRLVSINKSSPLQKQLPAFISEDASGYLTSSWLTLFVPSVYTGVFVVSLPLNIMAIVVFILKMKVKKPAVVYMLHLATADVLFVSVLPFKISYYFSGSDWQFGSELCRFVTAAFYCNMYASILLMTVISIDRFLAVVYPMQSLSWRTLGRASFTCLAIWALAIAGVVPLLLKEQTIQVPGLNITTCHDVLNETLLEGYYAYYFSAFSAVFFFVPLIISTVCYVSIIRCLSSSAVANRSKKSRALFLSAAVFCIFIICFGPTNVLLIAHYSFLSHTSTTEAAYFAYLLCVCVSSISCCIDPLIYYYASSECQRYVYSILCCKESSDPSSYNSSGQLMASKMDTCSSNLNNSIYKKLLT

SEQ ID NO: 1760 - protein, 84 aa, Homo sapiens
LLSVSCHFSGQPHSGLLQSGVISCYVTYLTFSALSSKPAEVVLDEHGKNVTICVPDFGQDLYRDENLVTILGTSLLIGCILYSW

SEQ ID NO: 1761 - protein, 423 aa, Homo sapiens
LSLPCSARERTPEGGGWPGGRLSEPLPAMLLLWVSVVAALALAVLAPGAGEQRRRAAKAPNVVLVVSDSFDGRLTFHPGSQVVKLPFINFMKTRGTSFLNAYTNSPICCPSRAAMWSGLFTHLTESWNNFKGLDPNYTTWMDVMERHGYRTQKFGKLDYTSGHHSISNRVEAWTRDVAFLLRQEGRPMVNLIRNRTKVRVMERDWQNTDKAVNWLRKEAINYTEPFVIYLGLNLPHPYPSPSSGENFGSSTFHTSLYWLEKVSHDAIKIPKWSPLSEMHPVDYYSSYTKNCTGRFTKKEIKNIRAFYYAMCAETDAMLGEIILALHQLDLLQKTIVIYSSDHGELAMEHRQFYKMSMYEASAHVPLLMMGPGIKAGLQVSNVVSLVDIYPTMLDEKTEVEISKLLAEVHMASGILLEFLCLRT

SEQ ID NO: 1762 - protein, 564 aa, Homo sapiens
LSLPCSARERTPEGGGWPGGRLSEPLPAMLLLWVSVVAALALAVLAPGAGEQRRRAAKAPNVVLVVSDSFDGRLTFHPGSQVVKLPFINFMKTRGTSFLNAYTNSPICCPSRAAMWSGLFTHLTESWNNFKGLDPNYTTWMDVMERHGYRTQKFGKLDYTSGHHSISNRVEAWTRDVAFLLRQEGRPMVNLIRNRTKVRVMERDWQNTDKAVNWLRKEAINYTEPFVIYLGLNLPHPYPSPSSGENFGSSTFHTSLYWLEKVSHDAIKIPKWSPLSEMHPVDYYSSYTKNCTGRFTKKEIKNIRAFYYAMCAETDAMLGEIILALHQLDLLQKTIVIYSSDHGELAMEHRQFYKMSMYEASAHVPLLMMGPGIKAGLQVSNVVSLVDIYPTMLDIAGIPLPQNLSGYSLLPLSSETFKNEHKVKNLHPPWILSEFHGCNVNASTYMLRTNHWKYIAYSDGASILPQLFDLSSDPDELTNVAVKFPEITYSLDQKLHSIINYPKVSASVHQYNKEQFIKWKQSIGQNYSNVIANLRWHQDWQKEPRKYENAIDQWLKTHMNPRAV

SEQ ID NO: 1763 - protein, 680 aa, Homo sapiens
LFSTEFVLSLLEKMQTQEILRILRLPELGDLGQFFRSLSATTLVSMGALAAILAYWFTHRPKALQPPCNLLMQSEEVEDSGGARRSVIGSGPQLLTHYYDDARTMYQVFRRGLSISGNGPCLGFRKPKQPYQWLSYQEVADRAEFLGSGLLQHNCKACTDQFIGVFAQNRPEWIIVELACYTYSMVVVPLYDTLGPGAIRYIINTADISTVIVDKPQKAVLLLEHVERKETPGLKLIILMDPFEEALKERGQKCGVVIKSMQAVEDCGQENHQAPVPPQPDDLSIVCFTSGTTGNPKGAMLTHGNVVADFSGFLKVTESQWAPTCADVHISYLPLAHMFERMVQSVVYCHGGRVGFFQGDIRLLSDDMKALCPTIFPVVPRLLNRMYDKIFSQANTPLKRWLLEFAAKRKQAEVRSGIIRNDSIWDELFFNKIQASLGGCVRMIVTGAAPASPTVLGFLRAALGCQVYEGYGQTECTAGCTFTTPGDWTSGHVGAPLPCNHIKLVDVEELNYWACKGEGEICVRGPNVFKGYLKDPDRTKEALDSDGWLHTGDIGKWLPAGTLKIIDRKKHIFKLAQGEYVAPEKIENIYIRSQPVAQIYVHGDSLKAFLVGIVVPDPEVMPSWAQKRGIEGTYADLCTNKDLKKAILEDMVRLGKESGLHSFEQDLPQCLIQIKVFSKY

SEQ ID NO: 1764 - protein, 708 aa, Homo sapiens
LSEFVLSLLEKMQTQEILRILRLPELGDLGQFFRSLSATTLVSMGALAAILAYWFTHRPKALQPPCNLLMQSEEVEDSGGARRSVIGSGPQLLTHYYDDARTMYQVFRRGLSISGNGPCLGFRKPKQPYQWLSYQEVADRAEFLGSGLLQHNCKACTDQFIGVFAQNRPEWIIVELACYTYSMVVVPLYDTLGPGAIRYIINTADISTVIVDKPQKAVLLLEHVERKETPGLKLIILMDPFEEALKERGQKCGVVIKSMQAVEDCGQENHQAPVPPQPDDLSIVCFTSGTTGNPKGAMLTHGNVVADFSGFLKVTEKVIFPRQDDVLISFLPLAHMFERVIQSVVYCHGGRVGFFQGDIRLLSDDMKALCPTIFPVVPRLLNRMYDKIFSQANTPLKRWLLEFAAKRKQAEVRSGIIRNDSIWDELFFNKIQASLGGCVRMIVTGAAPASPTVLGFLRAALGCQVYEGYGQTECTAGCTFTTPGDWTSGHVGAPLPCNHIKLVDVEELNYWACKGEGEICVRGPNVFKGYLKDPDRTKEALDSDGWLHTGDIGKWLPAGTLKIIDRKKHIFKLAQGEYVAPEKIENIYIRSQPVAQIYVHGDSLKAFLVGIVVPDPEVMPSWAQKRGIEGTYADLCTNKDLKKAILEDMVRLGKESGLHSFEQVKAIHIHSDMFSVQNGLLTPTLKAKRPELREYFKKQIEELYSISM

SEQ ID NO: 1765 - protein, 713 aa, Homo sapiens
VPGACWKEFVLSLLEKMQTQEILRILRLPELGDLGQFFRSLSATTLVSMGALAAILAYWFTHRPKALQPPCNLLMQSEEVEDSGGARRSVIGSGPQLLTHYYDDARTMYQVFRRGLSISGNGPCLGFRKPKQPYQWLSYQEVADRAEFLGSGLLQHNCKACTDQFIGVFAQNRPEWIIVELACYTYSMVVVPLYDTLGPGAIRYIINTADISTVIVDKPQKAVLLLEHVERKETPGLKLIILMDPFEEALKERGQKCGVVIKSMQAVEDCGQENHQAPVPPQPDDLSIVCFTSGTTGNPKGAMLTHGNVVADFSGFLKVTESQWAPTCADVHISYLPLAHMFERMVQSVVYCHGGRVGFFQGDIRLLSDDMKALCPTIFPVVPRLLNRMYDKIFSQANTPLKRWLLEFAAKRKQAEVRSGIIRNDSIWDELFFNKIQASLGGCVRMIVTGAAPASPTVLGFLRAALGCQVYEGYGQTECTAGCTFTTPGDWTSGHVGAPLPCNHIKLVDVEELNYWACKGEGEICVRGPNVFKGYLKDPDRTKEALDSDGWLHTGDIGKWLPAGTLKIIDRKKHIFKLAQGEYVAPEKIENIYIRSQPVAQIYVHGDSLKAFLVGIVVPDPEVMPSWAQKRGIEGTYADLCTNKDLKKAILEDMVRLGKESGLHSFEQVKAIHIHSDMFSVQNGLLTPTLKAKRPELREYFKKQIEELYSISM

SEQ ID NO: 1766 - protein, 725 aa, Homo sapiens
LTAMLTFFLVSGGSLWLFVEFVLSLLEKMQTQEILRILRLPELGDLGQFFRSLSATTLVSMGALAAILAYWFTHRPKALQPPCNLLMQSEEVEDSGGARRSVIGSGPQLLTHYYDDARTMYQVFRRGLSISGNGPCLGFRKPKQPYQWLSYQEVADRAEFLGSGLLQHNCKACTDQFIGVFAQNRPEWIIVELACYTYSMVVVPLYDTLGPGAIRYIINTADISTVIVDKPQKAVLLLEHVERKETPGLKLIILMDPFEEALKERGQKCGVVIKSMQAVEDCGQENHQAPVPPQPDDLSIVCFTSGTTGNPKGAMLTHGNVVADFSGFLKVTESQWAPTCADVHISYLPLAHMFERMVQSVVYCHGGRVGFFQGDIRLLSDDMKALCPTIFPVVPRLLNRMYDKIFSQANTPLKRWLLEFAAKRKQAEVRSGIIRNDSIWDELFFNKIQASLGGCVRMIVTGAAPASPTVLGFLRAALGCQVYEGYGQTECTAGCTFTTPGDWTSGHVGAPLPCNHIKLVDVEELNYWACKGEGEICVRGPNVFKGYLKDPDRTKEALDSDGWLHTGDIGKWLPAGTLKIIDRKKHIFKLAQGEYVAPEKIENIYIRSQPVAQIYVHGDSLKAFLVGIVVPDPEVMPSWAQKRGIEGTYADLCTNKDLKKAILEDMVRLGKESGLHSFEQVKAIHIHSDMFSVQNGLLTPTLKAKRPELREYFKKQIEELYSISM

SEQ ID NO: 1767 - protein, 744 aa, Homo sapiens
LRGCGAAGRGGRAGPGRAPLTAMLTFFLVSGGSLWLFVEFVLSLLEKMQTQEILRILRLPELGDLGQFFRSLSATTLVSMGALAAILAYWFTHRPKALQPPCNLLMQSEEVEDSGGARRSVIGSGPQLLTHYYDDARTMYQVFRRGLSISGNGPCLGFRKPKQPYQWLSYQEVADRAEFLGSGLLQHNCKACTDQFIGVFAQNRPEWIIVELACYTYSMVVVPLYDTLGPGAIRYIINTADISTVIVDKPQKAVLLLEHVERKETPGLKLIILMDPFEEALKERGQKCGVVIKSMQAVEDCGQENHQAPVPPQPDDLSIVCFTSGTTGNPKGAMLTHGNVVADFSGFLKVTEKVIFPRQDDVLISFLPLAHMFERVIQSVVYCHGGRVGFFQGDIRLLSDDMKALCPTIFPVVPRLLNRMYDKIFSQANTPLKRWLLEFAAKRKQAEVRSGIIRNDSIWDELFFNKIQASLGGCVRMIVTGAAPASPTVLGFLRAALGCQVYEGYGQTECTAGCTFTTPGDWTSGHVGAPLPCNHIKLVDVEELNYWACKGEGEICVRGPNVFKGYLKDPDRTKEALDSDGWLHTGDIGKWLPAGTLKIIDRKKHIFKLAQGEYVAPEKIENIYIRSQPVAQIYVHGDSLKAFLVGIVVPDPEVMPSWAQKRGIEGTYADLCTNKDLKKAILEDMVRLGKESGLHSFEQVKAIHIHSDMFSVQNGLLTPTLKAKRPELREYFKKQIEELYSISM

SEQ ID NO: 1768 - protein, 718 aa, Homo sapiens
VLPLPAGFRRMPEFVLSLLEKMQTQEILRILRLPELGDLGQFFRSLSATTLVSMGALAAILAYWFTHRPKALQPPCNLLMQSEEVEDSGGARRSVIGSGPQLLTHYYDDARTMYQVFRRGLSISGNGPCLGFRKPKQPYQWLSYQEVADRAEFLGSGLLQHNCKACTDQFIGVFAQNRPEWIIVELACYTYSMVVVPLYDTLGPGAIRYIINTADISTVIVDKPQKAVLLLEHVERKETPGLKLIILMDPFEEALKERGQKCGVVIKSMQAVEDCGQENHQAPVPPQPDDLSIVCFTSGTTGNPKGAMLTHGNVVADFSGFLKVTEKVIFPRQDDVLISFLPLAHMFERVIQSVVYCHGGRVGFFQGDIRLLSDDMKALCPTIFPVVPRLLNRMYDKIFSQANTPLKRWLLEFAAKRKQAEVRSGIIRNDSIWDELFFNKIQASLGGCVRMIVTGAAPASPTVLGFLRAALGCQVYEGYGQTECTAGCTFTTPGDWTSGHVGAPLPCNHIKLVDVEELNYWACKGEGEICVRGPNVFKGYLKDPDRTKEALDSDGWLHTGDIGKWLPAGTLKIIDRKKHIFKLAQGEYVAPEKIENIYIRSQPVAQIYVHGDSLKAFLVGIVVPDPEVMPSWAQKRGIEGTYADLCTNKDLKKAILEDMVRLGKESGLHSFEQVKAIHIHSDMFSVQNGLLTPTLKAKRPELREYFKKQIEELYSISM

SEQ ID NO: 1769 - protein, 585 aa, Homo sapiens
LSTRPWSEITCLVLCPACVRCPVDLRSRSLDQGTSCLRYCWTAQTLPSVTMKLWVSALLMAWFGVLSCVQAEFFTSIGHMTDLIYAEKELVQSLKEYILVEEAKLSKIKSWANKMEALTSKSAADAEGYLAHPVNAYKLVKRLNTDWPALEDLVLQDSAAGFIANLSVQRQFFPTDEDEIGAAKALMRLQDTYRLDPGTISRGELPGTKYQAMLSVDDCFGMGRSAYNEGDYYHTVLWMEQVLKQLDAGEEATTTKSQVLDYLSYAVFQLGDLHRALELTRRLLSLDPSHERAGGNLRYFEQLLEEEREKTLTNQTEAELATPEGIYERPVDYLPERDVYESLCRGEGVKLTPRRQKRLFCRYHHGNRAPQLLIAPFKEEDEWDSPHIVRYYDVMSDEEIERIKEIAKPKLARATVRDPKTGVLTVASYRVSKSSWLEEDDDPVVARVNRRMQHITGLTVKTAELLQVANYGVGGQYEPHFDFSRNDERDTFKHLGTGNRVATFLNYMSDVEAGGATVFPDLGAAIWPKKGTAVFWYNLLRSGEGDYRTRHAACPVLVGCKWVSNKWFHERGQEFLRPCGSTEVD

SEQ ID NO: 1770 - protein, 583 aa, Homo sapiens
LSTRPWSEITCLVLCPACVRCPVDLRSRSLDQGTSCLRYCWTAQTLPSVTMKLWVSALLMAWFGVLSCVQAEFFTSIGHMTDLIYAEKELVQSLKEYILVEEAKLSKIKSWANKMEALTSKSAADAEGYLAHPVNAYKLVKRLNTDWPALEDLVLQDSAAGFIANLSVQRQFFPTDEDEIGAAKALMRLQDTYRLDPGTISRGELPGTKYQAMLSVDDCFGMGRSAYNEGDYYHTVLWMEQVLKQLDAGEEATTTKSQVLDYLSYAVFQLGDLHRALELTRRLLSLDPSHERAGGNLRYFEQLLEEEREKTLTNQTEAELATPEGIYERPVDYLPERDVYESLCRGEGVKLTPRRQKRLFCRYHHGNRAPQLLIAPFKEEDEWDSPHIVRYYDVMSDEEIERIKEIAKPKLARATVRDPKTGVLTVASYRVSKSSWLEEDDDPVVARVNRRMQHITGLTVKTAELLQVANYGVGGQYEPHFDFSRRPFDSGLKTEGNRLATFLNYMSDVEAGGATVFPDLGAAIWPKKGTAVFWYNLLRSGEGDYRTRHAACPVLVGCKWVSNKWFHERGQEFLRPCGSTEVD

SEQ ID NO: 1771 - protein, 556 aa, Homo sapiens
VGQADWKSGKVLAQSSVTLPSVTMKLWVSALLMAWFGVLSCVQAEFFTSIGHMTDLIYAEKELVQSLKEYILVEEAKLSKIKSWANKMEALTSKSAADAEGYLAHPVNAYKLVKRLNTDWPALEDLVLQDSAAGFIANLSVQRQFFPTDEDEIGAAKALMRLQDTYRLDPGTISRGELPGTKYQAMLSVDDCFGMGRSAYNEGDYYHTVLWMEQVLKQLDAGEEATTTKSQVLDYLSYAVFQLGDLHRALELTRRLLSLDPSHERAGGNLRYFEQLLEEEREKTLTNQTEAELATPEGIYERPVDYLPERDVYESLCRGEGVKLTPRRQKRLFCRYHHGNRAPQLLIAPFKEEDEWDSPHIVRYYDVMSDEEIERIKEIAKPKLARATVRDPKTGVLTVASYRVSKSSWLEEDDDPVVARVNRRMQHITGLTVKTAELLQVANYGVGGQYEPHFDFSRRPFDSGLKTEGNRLATFLNYMSDVEAGGATVFPDLGAAIWPKKGTAVFWYNLLRSGEGDYRTRHAACPVLVGCKWVSNKWFHERGQEFLRPCGSTEVD

SEQ ID NO: 1772 - protein, 558 aa, Homo sapiens
VGQADWKSGKVLAQSSVTLPSVTMKLWVSALLMAWFGVLSCVQAEFFTSIGHMTDLIYAEKELVQSLKEYILVEEAKLSKIKSWANKMEALTSKSAADAEGYLAHPVNAYKLVKRLNTDWPALEDLVLQDSAAGFIANLSVQRQFFPTDEDEIGAAKALMRLQDTYRLDPGTISRGELPGTKYQAMLSVDDCFGMGRSAYNEGDYYHTVLWMEQVLKQLDAGEEATTTKSQVLDYLSYAVFQLGDLHRALELTRRLLSLDPSHERAGGNLRYFEQLLEEEREKTLTNQTEAELATPEGIYERPVDYLPERDVYESLCRGEGVKLTPRRQKRLFCRYHHGNRAPQLLIAPFKEEDEWDSPHIVRYYDVMSDEEIERIKEIAKPKLARATVRDPKTGVLTVASYRVSKSSWLEEDDDPVVARVNRRMQHITGLTVKTAELLQVANYGVGGQYEPHFDFSRNDERDTFKHLGTGNRVATFLNYMSDVEAGGATVFPDLGAAIWPKKGTAVFWYNLLRSGEGDYRTRHAACPVLVGCKWVSNKWFHERGQEFLRPCGSTEVD

SEQ ID NO: 1773 - protein, 615 aa, Homo sapiens
LGVPRGRRGRRTPAEPPELGTRTQAGVWSVRWGRGGGSSGRSPGSGPRRSRQGRRRRADRATPREVLETPGAASVQTLPSVTMKLWVSALLMAWFGVLSCVQAEFFTSIGHMTDLIYAEKELVQSLKEYILVEEAKLSKIKSWANKMEALTSKSAADAEGYLAHPVNAYKLVKRLNTDWPALEDLVLQDSAAGFIANLSVQRQFFPTDEDEIGAAKALMRLQDTYRLDPGTISRGELPGTKYQAMLSVDDCFGMGRSAYNEGDYYHTVLWMEQVLKQLDAGEEATTTKSQVLDYLSYAVFQLGDLHRALELTRRLLSLDPSHERAGGNLRYFEQLLEEEREKTLTNQTEAELATPEGIYERPVDYLPERDVYESLCRGEGVKLTPRRQKRLFCRYHHGNRAPQLLIAPFKEEDEWDSPHIVRYYDVMSDEEIERIKEIAKPKLARATVRDPKTGVLTVASYRVSKSSWLEEDDDPVVARVNRRMQHITGLTVKTAELLQVANYGVGGQYEPHFDFSRRPFDSGLKTEGNRLATFLNYMSDVEAGGATVFPDLGAAIWPKKGTAVFWYNLLRSGEGDYRTRHAACPVLVGCKWVSNKWFHERGQEFLRPCGSTEVD

SEQ ID NO: 1774 - protein, 115 aa, Homo sapiens
VGQADWKSGKVLAQSSVTLPSVTMKLWVSALLMAWFGVLSCVQAEFFTSIGHMTDLIYAEKELVQSLKEYILVEEAKLSKIKRCPKSPTILSWPSFPSAPQGTRKPSRVPIRGNL

SEQ ID NO: 1775 - protein, 32 aa, Homo sapiens
LAKWGLGPSEPCPAPLYSVCAMDFVFLGVLLM

SEQ ID NO: 1776 - protein, 193 aa, Homo sapiens
MAGARVQLEDNAHVASSGPWRREWEEDGRGEVSVPHWSRPGVLWRSPHHTSTHTSAPQPQTTLAELAPGAMRLSLPLLLLLLGAWAIPGGLGDRAPLTATAPQLDDEEMYSAHMPAHLRCDACRAVAYQSLLVPDVAKSGKGRDQTSYLKLWGAAGAERVGLHGCPGPELLPELAGLRSSRSGPSETSHRPRT

SEQ ID NO: 1777 - protein, 157 aa, Homo sapiens
VSGRQKMPHSSLHPSIPCPRGHGAQKAALVLLSACLVTLWGLGEPPEHTLRYLVLHLASLQLGLLLNGVCSLAEELRHIHSRYRGSYWRTVRACLGCPLRRGALLLLSIYFYYSLPNAVGPPFTWMLALLGLSQCVKKGISTWPMGWHGHITSDICG

SEQ ID NO: 1778 - protein, 82 aa, Homo sapiens
VSGRQKMPHSSLHPSIPCPRGHGAQKAALVLLSACLVTLWGLGEPPEHTLRYLVLHLASLQLGLLLNGVCSLAEELRHIHSR

SEQ ID NO: 1779 - protein, 134 aa, Homo sapiens
LRQVRQVYCGLVRAPQVQTRPLSSRFVERRGALYRSPMNQENPPPYPGPGPTAPYPPYPPQPMGPGPMGGPYPPPQGYPYQGYPQYGWQGGPQEPPKTTVYVVEDQRRDELGPSTCLTACWTALCCCCLWDMLT

SEQ ID NO: 1780 - protein, 65 aa, Homo sapiens
LRQVRQVYCGLVRAPQVQTRPLSSRFVERRVYVVEDQRRDELGPSTCLTACWTALCCCCLWDMLT

SEQ ID NO: 1781 - protein, 1271 aa, Homo sapiens
LLRPEPAGAGAGARTAAPAPAVRSRSPGRGRRRLMDSGAGGRRCPEAALLILGPPRMEHLRHSPGPGGQRLLLPSMLLALLLLLAPSPGHATRVVYKVPEEQPPNTLIGSLAADYGFPDVGHLYKLEVGAPYLRVDGKTGDIFTTETSIDREGLRECQNQLPGDPCILEFEVSITDLVQNGSPRLLEGQIEVQDINDNTPNFASPVITLAIPENTNIGSLFPIPLASDRDAGPNGVASYELQAGPEAQELFGLQVAEDQEEKQPQLIVMGNLDRERWDSYDLTIKVQDGGSPPRASSALLRVTVLDTNDNAPKFERPSYEAELSENSPIGHSVIQVKANDSDQGANAEIEYTFHQAPEVVRRLLRLDRNTGLITVQGPVDREDLSTLRFSVLAKDRGTNPKSARAQVVVTVKDMNDNAPTIEIRGIGLVTHQDGMANISEDVAEETAVALVQVSDRDEGENAAVTCVVAGDVPFQLRQASETGSDSKKKYFLQTTTPLDYEKVKDYTIEIVAVDSGNPPLSSTNSLKVQVVDVNDNAPVFTQSVTEVAFPENNKPGEVIAEITASDADSGSNAELVYSLEPEPAAKGLFTISPETGEIQVKTSLDREQRESYELKVVAADRGSPSLQGTATVLVNVLDCNDNDPKFMLSGYNFSVMENMPALSPVGMVTVIDGDKGENAQVQLSVEQDNGDFVIQNGTGTILSSLSFDREQQSTYTFQLKAVDGGVPPRSAYVGVTINVLDENDNAPYITAPSNTSHKLLTPQTRLGETVSQVAAEDFDSGVNAELIYSIAGGNPYGLFQIGSHSGAITLEKEIERRHHGLHRLVVKVSDRGKPPRYGTALVHLYVNETLANRTLLETLLGHSLDTPLDIDIAGDPEYERSKQRGNILFGVVAGVVAVALLIALAVLVRYCRQREAKSGYQAGKKETKDLYAPKPSGKASKGNKSKGKKSKSPKPVKPVEDEDEAGLQKSLKFNLMSDAPGDSPRIHLPLNYPPGSPDLGRHYRSNSPLPSIQLQPQSPSASKKHQVVQDLPPANTFVGTGDTTSTGSEQYSDYSYRTNPPKYPSKQLPHRRVTFSATSQAQELQDPSQHSYYDSGLEESETPSSKSSSGPRLGPLALPEDHYERTTPDGSIGEMEHPENDLRPLPDVAMTGTCTRECSEFGHSDTCWMPGQSSPSRRTKSSALKLSTFVPYQDRGGQEPAGAGSPSPPEDRNTKTAPVRLLPSYSAFSHSSHDSCKDSATLEEIPLTQTSDFPPAATPASAQTAKREIYL

SEQ ID NO: 1782 - protein, 766 aa, Homo sapiens
LGPSDGHVKANDSDQGANAEIEYTFHQAPEVVRRLLRLDRNTGLITVQGPVDREDLSTLRFSVLAKDRGTNPKSARAQVVVTVKDMNDNAPTIEIRGIGLVTHQDGMANISEDVAEETAVALVQVSDRDEGENAAVTCVVAGDVPFQLRQASETGSDSKKKYFLQTTTPLDYEKVKDYTIEIVAVDSGNPPLSSTNSLKVQVVDVNDNAPVFTQSVTEVAFPENNKPGEVIAEITASDADSGSNAELVYSLEPEPAAKGLFTISPETGEIQVKTSLDREQRESYELKVVAADRGSPSLQGTATVLVNVLDCNDNDPKFMLSGYNFSVMENMPALSPVGMVTVIDGDKGENAQVQLSVEQDNGDFVIQNGTGTILSSLSFDREQQSTYTFQLKAVDGGVPPRSAYVGVTINVLDENDNAPYITAPSNTSHKLLTPQTRLGETVSQVAAEDFDSGVNAELIYSIAGGNPYGLFQIGSHSGAITLEKEIERRHHGLHRLVVKVSDRGKPPRYGTALVHLYVNETLANRTLLETLLGHSLDTPLDIDIAGDPEYERSKQRGNILFGVVAGVVAVALLIALAVLVRYCRQREAKSGYQAGKKETKDLYAPKPSGKASKGNKSKGKKSKSPKPVKPVEDEDEAGLQKSLKFNLMSDAPGDSPRIHLPLNYPPGSPDLGRHYRSNSPLPSIQLQPQSPSASKKHQVVQDLPPANTFVGTGDTTSTGSEQYSDYSYRTNPPKYPSKQVGQPFQLSTPQPLPHPYHGAIWTEVWE

SEQ ID NO: 1783 - protein, 1071 aa, Homo sapiens
LSFWNRGSVLGLTALVENRVSVGEALLILGPPRMEHLRHSPGPGGQRLLLPSMLLALLLLLAPSPGHATRVVYKVPEEQPPNTLIGSLAADYGFPDVGHLYKLEVGAPYLRVDGKTGDIFTTETSIDREGLRECQNQLPGDPCILEFEVSITDLVQNGSPRLLEGQIEVQDINDNTPNFASPVITLAIPENTNIGSLFPIPLASDRDAGPNGVASYELQAGPEAQELFGLQVAEDQEEKQPQLIVMGNLDRERWDSYDLTIKVQDGGSPPRASSALLRVTVLDTNDNAPKFERPSYEAELSENSPIGHSVIQVKANDSDQGANAEIEYTFHQAPEVVRRLLRLDRNTGLITVQGPVDREDLSTLRFSVLAKDRGTNPKSARAQVVVTVKDMNDNAPTIEIRGIGLVTHQDGMANISEDVAEETAVALVQVSDRDEGENAAVTCVVAGDVPFQLRQASETGSDSKKKYFLQTTTPLDYEKVKDYTIEIVAVDSGNPPLSSTNSLKVQVVDVNDNAPVFTQSVTEVAFPENNKPGEVIAEITASDADSGSNAELVYSLEPEPAAKGLFTISPETGEIQVKTSLDREQRESYELKVVAADRGSPSLQGTATVLVNVLDCNDNDPKFMLSGYNFSVMENMPALSPVGMVTVIDGDKGENAQVQLSVEQDNGDFVIQNGTGTILSSLSFDREQQSTYTFQLKAVDGGVPPRSAYVGVTINVLDENDNAPYITAPSNTSHKLLTPQTRLGETVSQVAAEDFDSGVNAELIYSIAGGNPYGLFQIGSHSGAITLEKEIERRHHGLHRLVVKVSDRGKPPRYGTALVHLYVNETLANRTLLETLLGHSLDTPLDIDIAGDPEYERSKQRGNILFGVVAGVVAVALLIALAVLVRYCRQREAKSGYQAGKKETKDLYAPKPSGKASKGNKSKGKKSKSPKPVKPVEDEDEAGLQKSLKFNLMSDAPGDSPRIHLPLNYPPGSPDLGRHYRSNSPLPSIQLQPQSPSASKKHQVVQDLPPANTFVGTGDTTSTGSEQYSDYSYRTNPPKYPSKQVGQPFQLSTPQPLPHPYHGAIWTEVWE

SEQ ID NO: 1784 - protein, 1094 aa, Homo sapiens
LLRPEPAGAGAGARTAAPAPAVRSRSPGRGRRRLMDSGAGGRRCPEAALLILGPPRMEHLRHSPGPGGQRLLLPSMLLALLLLLAPSPGHATRVVYKVPEEQPPNTLIGSLAADYGFPDVGHLYKLEVGAPYLRVDGKTGDIFTTETSIDREGLRECQNQLPGDPCILEFEVSITDLVQNGSPRLLEGQIEVQDINDNTPNFASPVITLAIPENTNIGSLFPIPLASDRDAGPNGVASYELQAGPEAQELFGLQVAEDQEEKQPQLIVMGNLDRERWDSYDLTIKVQDGGSPPRASSALLRVTVLDTNDNAPKFERPSYEAELSENSPIGHSVIQVKANDSDQGANAEIEYTFHQAPEVVRRLLRLDRNTGLITVQGPVDREDLSTLRFSVLAKDRGTNPKSARAQVVVTVKDMNDNAPTIEIRGIGLVTHQDGMANISEDVAEETAVALVQVSDRDEGENAAVTCVVAGDVPFQLRQASETGSDSKKKYFLQTTTPLDYEKVKDYTIEIVAVDSGNPPLSSTNSLKVQVVDVNDNAPVFTQSVTEVAFPENNKPGEVIAEITASDADSGSNAELVYSLEPEPAAKGLFTISPETGEIQVKTSLDREQRESYELKVVAADRGSPSLQGTATVLVNVLDCNDNDPKFMLSGYNFSVMENMPALSPVGMVTVIDGDKGENAQVQLSVEQDNGDFVIQNGTGTILSSLSFDREQQSTYTFQLKAVDGGVPPRSAYVGVTINVLDENDNAPYITAPSNTSHKLLTPQTRLGETVSQVAAEDFDSGVNAELIYSIAGGNPYGLFQIGSHSGAITLEKEIERRHHGLHRLVVKVSDRGKPPRYGTALVHLYVNETLANRTLLETLLGHSLDTPLDIDIAGDPEYERSKQRGNILFGVVAGVVAVALLIALAVLVRYCRQREAKSGYQAGKKETKDLYAPKPSGKASKGNKSKGKKSKSPKPVKPVEDEDEAGLQKSLKFNLMSDAPGDSPRIHLPLNYPPGSPDLGRHYRSNSPLPSIQLQPQSPSASKKHQVVQDLPPANTFVGTGDTTSTGSEQYSDYSYRTNPPKYPSKQVGQPFQLSTPQPLPHPYHGAIWTEVWE

SEQ ID NO: 1785 - protein, 1193 aa, Homo sapiens
LNLAHLAVSMMQLLQLLLGLLGPGGYLFLLGDCQEVTTLTVKYQVSEEVPSGTVIGKLSQELGREERRRQAGAAFQVLQLPQALPIQVDSEEGLLSTGRRLDREQLCRQWDPCLVSFDVLATGDLALIHVEIQVLDINDHQPRFPKGEQELEISESASLRTRIPLDRALDPDTGPNTLHTYTLSPSEHFALDVIVGPDETKHAELIVVKELDREIHSFFDLVLTAYDNGNPPKSGTSLVKVNVLDSNDNSPAFAESSLALEIQEDAAPGTLLIKLTATDPDQGPNGEVEFFLSKHMPPEVLDTFSIDAKTGQVILRRPLDYEKNPAYEVDVQARDLGPNPIPAHCKVLIKVLDVNDNIPSIHVTWASQPSLVSEALPKDSFIALVMADDLDSGHNGLVHCWLSQELGHFRLKRTNGNTYMLLTNATLDREQWPKYTLTLLAQDQGLQPLSAKKQLSIQISDINDNAPVFEKSRYEVSTRENNLPSLHLITIKAHDADLGINGKVSYRIQDSPVAHLVAIDSNTGEVTAQRSLNYEEMAGFEFQVIAEDSGQPMLASSVSVWVSLLDANDNAPEVVQPVLSDGKASLSVLVNASTGHLLVPIETPNGLGPAGTDTPPLATHSSRPFLLTTIVARDADSGANGEPLYSIRSGNEAHLFILNPHTGQLFVNVTNASSLIGSEWELEIVVEDQGSPPLQTRALLRVMFVTSVDHLRDSARKPGALSMSMLTVICLAVLLGIFGLILALFMSICRTEKKDNRAYNCREAESTYRQQPKRPQKHIQKADIHLVPVLRGQAGEPCEVGQSHKDVDKEAMMEAGWDPCLQAPFHLTPTLYRTLRNQGNQGAPAESREVLQDTVNLLFNHPRQRNASRENLNLPEPQPATGQPRSRPLKVAGSPTGRLAGDQGSEEAPQRPPASSATLRRQRHLNGKVSPEKESGPRQILRSLVRLSVAAFAERNPVEELTVDSPPVQQISQLLSLLHQGQFQPKPNHRGNKYLAKPGGSRSAIPDTDGPSARAGGQTDPEQEEGPLDPEEDLSVKQLLEEELSSLLDPSTGLALDRLSAPDPAWMARLSLPLTTNYRDNVISPDAAATEEPRTFQTFGKAEAPELSPTGTRLASTFVSEMSSLLEMLLEQRSSMPVEAASEALRRLSVCGRTLSLDLATSAASGMKVQGDPGGKTGTEGKSRGSSSSSRCL

SEQ ID NO: 1786 - protein, 323 aa, Homo sapiens
LMLSPLPTGPLEACFSVQSRTSSPMEPPIPQSAPLTPNSVMVQPLLDSRMSHSRLQHPLTILPIDQVKTSHVENDYIDNPSLALTTGPKRTRGGAPELAPTPARCDQDVTHHWISFSGRPSSVSSSSSTSSDQRLLDHMAPPPVADQASPRAVRIQPKVVHCQPLDLKGPAVPPELDKHFLLCEACGKCKCKECASPRTLPSCWVCNQECLCSAQTLVNYGTCMCLVQGIFYHCTNEDDEGSCADHPCSCSRSNCCARWSFMGALSVVLPCLLCYLPATGCVKLAQRGYDRLRRPGCRCKHTNSVICKAASGDAKTSRPDKPF

SEQ ID NO: 1787 - protein, 448 aa, Homo sapiens
LNEASRRPLAARRAPPWVRPLRRPQPVRSPARLRAMGQPGNGSAFLLAPNGSHAPDHDVTQERDEVWVVGMGIVMSLIVLAIVFGNVLVITAIAKFERLQTVTNYFITSLACADLVMGLAVVPFGAAHILMKMWTFGNFWCEFWTSIDVLCVTASIETLCVIAVDRYFAITSPFKYQSLLTKNKARVIILMVWIVSGLTSFLPIQMHWYRATHQEAINCYANETCCDFFTNQAYAIASSIVSFYVPLVIMVFVYSRVFQEAKRQLQKIDKSEGRFHVQNLSQVEQDGRTGHGLRRSSKFCLKEHKALKTLGIIMGTFTLCWLPFFIVNIVHVIQDNLIRKEVYILLNWIGYVNSGFNPLIYCRSPDFRIAFQELLCLRRSSLKAYGNGYSSNGNTGEQSGYHVEQEKENKLLCEDLPGTEDFVGHQGTVPSDNIDSQGRNCSTNDSLL

SEQ ID NO: 1788 - protein, 951 aa, Homo sapiens
LHCLSPMITNVAFLVSLRTEATSAKPPLGTGRWILMPTMSTDSRVSPLSGLMLSRVSSINVSVNAVQTVVRQGENITLMCIVIGNEVVNFEWTYPRKESGRLVEPVTDFLLDMPYHIRSILHIPSAELEDSGTYTCNVTESVNDHQDEKAINITVVESGYVRLLGEVGTLQFAELHRSRTLQVVFEAYPPPTVLWFKDNRTLGDSSAGEIALSTRNVSETRYVSELTLVRVKVAEAGHYTMRAFHEDAEVQLSFQLQINVPVRVLELSESHPDSGEQTVRCRGRGMPQPNIIWSACRDLKRCPRELPPTLLGNSSEEESQLETNVTYWEEEQEFEVVSTLRLQHVDRPLSVRCTLRNAVGQDTQEVIVVPHSLPFKVVVISAILALVVLTIISLIILIMLWQKKPRYEIRWKVIESVSSDGHEYIYVDPMQLPYDSTWELPRDQLVLGRTLGSGAFGQVVEATAHGLSHSQATMKVAVKMLKSTARSSEKQALMSELKIMSHLGPHLNVVNLLGACTKGGPIYIITEYCRYGDLVDYLHRNKHTFLQHHSDKRRPPSAELYSNALPVGLPLPSHVSLTGESDGGYMDMSKDESVDYVPMLDMKGDVKYADIESSNYMAPYDNYVPSAPERTCRATLINESPVLSYMDLVGFSYQVANGMEFLASKNCVHRDLAARNVLICEGKLVKICDFGLARDIMRDSNYISKGSTFLPLKWMAPESIFNSLYTTLSDVWSFGILLWEIFTLGGTPYPELPMNEQFYNAIKRGYRMAQPAHASDEIYEIMQKCWEEKFEIRPPFSQLVLLLERLLGEGYKKKYQQVDEEFLRSDHPAILRSQARLPGFHGLRSPLDTSSVLYTAVQPNEGDNDYIIPLPDPKPEVADEGPLEGSPSLASSTLNEVNTSSTISCDSPLEPQDEPEPEPQLELQVEPEPELEQLPDSGCPAPRAEAEDSFL

SEQ ID NO: 1789 - protein, 333 aa, Homo sapiens
LWSRQLEEVPSPFGELKLCLTEVSSDFSSASSMFSHLPFDCVLLLLLLLLTRSSEVEYRAEVGQNAYLPCFYTPAAPGNLVPVCWGKGACPVFECGNVVLRTDERDVNYWTSRYWLNGDFRKGDVSLTIENVTLADSGIYCCRIQIPGIMNDEKFNLKLVIKPAKVTPAPTRQRDFTAAFPRMLTTRGHGPAETQTLGSLPDINLTQISTLANELRDSRLANDLRDSGATIRIGIYIGAGICAGLALALIFGALIFKWYSHSKEKIQNLSLISLANLPPSGLANAVAEGIRSEENIYTIEENVYEVEEPNEYYCYVSSRQQPSQPLGCRFAMP

SEQ ID NO: 1790 - protein, 305 aa, Homo sapiens
LWSRQLEEVPSPFGELKLCLTEVSSDFSSASSMFSHLPFDCVLLLLLLLLTRSSEVEYRAEVGQNAYLPCFYTPAAPGNLVPVCWGKGACPVFECGNVVLRTDERDVNYWTSRYWLNGDFRKGDVSLTIENVTLADSGIYCCRIQIPGIMNDEKFNLKLVIKPAETQTLGSLPDINLTQISTLANELRDSRLANDLRDSGATIRIGIYIGAGICAGLALALIFGALIFKWYSHSKEKIQNLSLISLANLPPSGLANAVAEGIRSEENIYTIEENVYEVEEPNEYYCYVSSRQQPSQPLGCRFAMP

SEQ ID NO: 1791 - protein, 655 aa, Homo sapiens
LNIRIALVGLEVWTHGNMCEVSENPYSTLWSFLSWRRKLLAQKYHDNAQLITGMSFHGTTIGLAPLMAMCSVYQSGGVNMDHSENAIGVAATMAHEMGHNFGMTHDSADCCSASAADGGCIMAAATGHPFPKVFNGCNRRELDRYLQSGGGMCLSNMPDTRMLYGGRRCGNGYLEDGEECDCGEEEECNNPCCNASNCTLRPGAECAHGSCCHQCKLLAPGTLCREQARQCDLPEFCTGKSPHCPTNFYQMDGTPCEGGQAYCYNGMCLTYQEQCQQLWGPGARPAPDLCFEKVNVAGDTFGNCGKDMNGEHRKCNMRDAKCGKIQCQSSEARPLESNAVPIDTTIIMNGRQIQCRGTHVYRGPEEEGDMLDPGLVMTGTKCGYNHICFEGQCRNTSFFETEGCGKKCNGHGVCNNNQNCHCLPGWAPPFCNTPGHGGSIDSGPMPPESVGPVVAGVLVAILVLAVLMLMYYCCRQNNKLGQLKPSALPSKLRQQFSCPFRVSQNSGTGHANPTFKLQTPQGKRKVINTPEILRKPSQPPPRPPPDYLRGGSPPAPLPAHLSRAARNSPGPGSQIERTESSRRPPPSRPIPPAPNCIVSQKCLLPPAMILRAPQPSGTVVCLVISFNMAFYRSMRIRIEPGIKTKLLVLLVWKQF

SEQ ID NO: 1792 - protein, 932 aa, Homo sapiens
LRACERRALRAAATMPGGAGAARLCLLAFALQPLRPRAAREPGWTRGSEEGSPKLQHELIIPQWKTSESPVREKHPLKAELRVMAEGRELILDLEKNEQLFAPSYTETHYTSSGNPQTTTRKLEDHCFYHGTVRETELSSVTLSTCRGIRGLITVSSNLSYVIEPLPDSKGQHLIYRSEHLKPPPGNCGFEHSKPTTRDWALQFTQQTKKRPRRMKREDLNSMKYVELYLVADYLEFQKNRRDQDATKHKLIEIANYVDKFYRSLNIRIALVGLEVWTHGNMCEVSENPYSTLWSFLSWRRKLLAQKYHDNAQLITGMSFHGTTIGLAPLMAMCSVYQSGGVNMDHSENAIGVAATMAHEMGHNFGMTHDSADCCSASAADGGCIMAAATGHPFPKVFNGCNRRELDRYLQSGGGMCLSNMPDTRMLYGGRRCGNGYLEDGEECDCGEEEECNNPCCNASNCTLRPGAECAHGSCCHQCKLLAPGTLCREQARQCDLPEFCTGKSPHCPTNFYQMDGTPCEGGQAYCYNGMCLTYQEQCQQLWGPGARPAPDLCFEKVNVAGDTFGNCGKDMNGEHRKCNMRDAKCGKIQCQSSEARPLESNAVPIDTTIIMNGRQIQCRGTHVYRGPEEEGDMLDPGLVMTGTKCGYNHICFEGQCRNTSFFETEGCGKKCNGHGVCNNNQNCHCLPGWAPPFCNTPGHGGSIDSGPMPPESVGPVVAGVLVAILVLAVLMLMYYCCRQNNKLGQLKPSALPSKLRQQFSCPFRVSQNSGTGHANPTFKLQTPQGKRKVINTPEILRKPSQPPPRPPPDYLRGGSPPAPLPAHLSRAARNSPGPGSQIERTESSRRPPPSRPIPPAPNCIVSQDFSRPRPPQKALPANPVPGRRSLPRPGGASPLRPPGAGPQQSRPLAALAPKFPEYRSQRAGGMISSKI

SEQ ID NO: 1793 - protein, 969 aa, Homo sapiens
LRACERRALRAAATMPGGAGAARLCLLAFALQPLRPRAAREPGWTRGSEEGSPKLQHELIIPQWKTSESPVREKHPLKAELRVMAEGRELILDLEKNEQLFAPSYTETHYTSSGNPQTTTRKLEDHCFYHGTVRETELSSVTLSTCRGIRGLITVSSNLSYVIEPLPDSKGQHLIYRSEHLKPPPGNCGFEHSKPTTRDWALQFTQQTKKRPRRMKREDLNSMKYVELYLVADYLEFQKNRRDQDATKHKLIEIANYVDKFYRSLNIRIALVGLEVWTHGNMCEVSENPYSTLWSFLSWRRKLLAQKYHDNAQLITGMSFHGTTIGLAPLMAMCSVYQSGGVNMDHSENAIGVAATMAHEMGHNFGMTHDSADCCSASAADGGCIMAAATGHPFPKVFNGCNRRELDRYLQSGGGMCLSNMPDTRMLYGGRRCGNGYLEDGEECDCGEEEECNNPCCNASNCTLRPGAECAHGSCCHQCKLLAPGTLCREQARQCDLPEFCTGKSPHCPTNFYQMDGTPCEGGQAYCYNGMCLTYQEQCQQLWGPGARPAPDLCFEKVNVAGDTFGNCGKDMNGEHRKCNMRDAKCGKIQCQSSEARPLESNAVPIDTTIIMNGRQIQCRGTHVYRGPEEEGDMLDPGLVMTGTKCGYNHICFEGQCRNTSFFETEGCGKKCNGHGVCNNNQNCHCLPGWAPPFCNTPGHGGSIDSGPMPPESVGPVVAGVLVAILVLAVLMLMYYCCRQNNKLGQLKPSALPSKLRQQFSCPFRVSQNSGTGHANPTFKLQTPQGKRKVINTPEILRKPSQPPPRPPPDYLRGGSPPAPLPAHLSRAARNSPGPGSQIERTESSRRPPPSRPIPPAPNCIVSQDFSRPRPPQKALPANPVPGRRSLPRPGGASPLRPPGAGPQQSRPLAALAPKVSPREALKVKAGTRGLQGGRCRVEKTKQFMLLVVWTELPEQKPRAKHSCFLVPA

SEQ ID NO: 1794 - protein, 551 aa, Homo sapiens
MLESLSCECEAIKQQQKMHLEKLEEQLSRSHGQEVNELKTKIEKLKVELDEARLSEKQLKHQVDHQKELLSCKSEELRVMSERVQESMSSEMLALQIELTEMESMKTTLKEEVNELQYRQEQLELLITNLMRQVDRLKEEKEEREKEAVSYYNALEKARVANQDLQVQLDQALQQALDPNSKGNSLFAEVEDRRAAMERQLISMKVKYQSLKKQNVFNREQMQRMKLQIATLLQMKGSQTEFEQQERLLAMLEQKNGEIKHLLGEIRNLEKFKNLYDSMESKPSVDSGTLEDNTYYTDLLQMKLDNLNKEIESTKGELSIQRMKALFESQRALDIERKLFANERCLQLSESENMKLRAKLDELKLKYEPEETVEVPVLKKRREVLPVDITTAKDACVNNSALGGEVYRLPPQKEETQSCPNSLEDNNLQLEKSVSIYTPVVSLSPHKNLPVDMQLKKEKKCVKLIGVPADAEALSERSGNTPNSPRSVSSFPPGSQQTSPSLLSRCMNCAVCFFIYFLTIACSIIPQFHLPTFNFSRTLRKTKLIAKGKDS

SEQ ID NO: 1795 - protein, 242 aa, Homo sapiens
MITENELWRAKYIYDSAFHPDTGEKMILIGRMSAQVPMNMTITGCMMTFYRTTPAVLFWQWINQSFNAVVNYTNRSGDAPLTVNELGTAYVSATTGAVATALGLNALTKHVSPLIGRFVPFAAVAAANCINIPLMRQRELKVGIPVTDENGNRLGESANAAKQAITQVVVSRILMAAPGMAIPPFIMNTLEKKAFLKRFPWMSAPIQVGLVGFCLVFATPLCCALFPQKRYVFVIRQNHHEY

SEQ ID NO: 1796 - protein, 425 aa, Homo sapiens
VTGIPEGAAEATMAEGPEEARGHPPGQDDGGGDHEPVPSLRGPPTTAVPCPRDDPQAEPQAPGRPTAPGLAAAAAADKLEPPRELRKRGEAASGSGAELQEQAGCEAPEAAAPRERPARLSAREYSRQVHEWLWQSYCGYLTWHSGLAAFPAYCSPQPSPQSFPSGGAAVPQAAAPPPPQLGYYNPFYFLSPGAAGPDPRTAAGISTPAPVAGLGPRAPHVQASVRATPVTRVGSAAPSRSPSETGRQAGREYVIPSLAHRFMAEMVDFFILFFIKATIVLSIMHLSGIKDISKFAMHYIIEEIDEDTSMEDLQKMMVVALIYRLLVCFYEIICIWGAGGATPGKFLLGLRVVTCDTSVLIAPSRVLVIPSSNVSITTSTIRALIKNFSIASFFPAFITLLFFQHNRTAYDIVAGTIVVKRNGVR

SEQ ID NO: 1797 - protein, 548 aa, Homo sapiens
LRRFAFPGLPFAPPRTRRPCASRGNHPRAPGREDAEQGVLRAGTGAATSRRCRMAAEPQPSSLSYRTTGSTYLHPLSELLGIPLDQVNFVVCQLVALFAAFWFRIYLRPGTTSSDVRHAVATIFGIYFVIFCFGWYSVHLFVLVLMCYAIMVTASVSNIHRYSFFVAMGYLTICHISRIYIFHYGILTTDFSGPLMIVTQKITTLAFQVHDGLGRRAEDLSAEQHRLAIKVKPSFLEYLSYLLNFMSVIAGPCNNFKDYIAFIEGKHIHMKLLEVNWKRKGFHSLPEPSPTGAVIHKLGITLVSLLLFLTLTKTFPVTCLVDDWFVHKASFPARLCYLYVVMQASKPKYYFAWTLADAVNNAAGFGFSGVDKNGNFCWDLLSNLNIWKIETATSFKMYLENWNIQTATWLKCVCYQRVPWYPTVLTFILSALWHGVYPGYYFTFLTGILVTLAARAVRNNYRHYFLSSRALKAVYDAGTWAVTQLAVSYTVAPFVMLAVEPTISLYKSMYFYLHIISLLIILFLPMKPQAHTQRRPQTLNSINKRKTD

SEQ ID NO: 1798 - protein, 69 aa, Homo sapiens
LQSAPGTPATVGISVGELWPFARCCSHSYVRSLRGLSVSTHLLCFTIYIMNPSMKQKQEEIKENIKVCD

SEQ ID NO: 1799 - protein, 332 aa, Homo sapiens
MKMASFLAFLLLNFRVCLLLLQLLMPHSAQFSVLGPSGPILAMVGEDADLPCHLFPTMSAETMELKWVSSSLRQVVNVYADGKEVEDRQSAPYRGRTSILRDGITAGKAALRIHNVTASDSGKYLCYFQDGDFYEKALVELKVAALGSDLHVDVKGYKDGGIHLECRSTGWYPQPQIQWSNNKGENIPTVEAPVVADGVGLYAVAASVIMRGSSGEGVSCTIRSSLLGLEKTASISIADPFFRSAQRWIAALAGTLPVLLLLLGGAGYFLWQQQEEKKTQFRKKKREQELREMAWSTMKQEQSTRVKLLEELSKFPFPQRPRHVFLSLLYAP

SEQ ID NO: 1800 - protein, 235 aa, Homo sapiens
MNGCDMGPDGRLLRGYHQHAYDGKDYISLNEDLRSWTAADTVAQITQRFYEAEEYAEEFRTYLEGECLELLRRYLENGKETLQRADPPKAHVAHHPISDHEATLRCWALGFYPAEITLTWQRDGEEQTQDTELVETRPAGDGTFQKWAAVVVPPGEEQRYTCHVQHEGLPQPLILRWEQSPQPTIPIVGIVAGLVVLGAVVTGAVVAAVMWRKKSSDRNRGSYSQAAGKMKEADP

SEQ ID NO: 1801 - protein, 118 aa, Homo sapiens
LGSFRGHCMWPALPWPCRYEALALQVYYHVLGLGEPLALKSPRALRLFSHLRHPVCVELLTVLWVVPTLGTDRLLLAFLLTLYLGLAHGLDQQDLRYLRAQLQRKLHLLSRPQDGEAE

SEQ ID NO: 1802 - protein, 177 aa, Homo sapiens
LGSFRGHCMWPALPWPCRYEALALQLVMRYWEPIPKGPVLWEARAEPWATWVPLLCFVLHVISWLLIFSILLVFDYAELMGLKQVYYHVLGLGEPLALKSPRALRLFSHLRHPVCVELLTVLWVVPTLGTDRLLLAFLLTLYLGLAHGLDQQDLRYLRAQLQRKLHLLSRPQDGEAE

SEQ ID NO: 1803 - protein, 311 aa, Homo sapiens
LRQAGRKPGGGVQEPRPPGLDSAGGGAAGGACGSGNPDPAPFPTPPFLAMAPALLLIPAALASFILAFGTGVEFVRFTSLRPLLGGIPESGGPDARQGWLAALQDRSILAPLAWDLGLLLLFVGQHSLMAAERVKAWTSRYFGVLQRSLYVACTALALQLVMRYWEPIPKGPVLWEARAEPWATWVPLLCFVLHVISWLLIFSILLVFDYAELMGLKQVYYHVLGLGEPLALKSPRALRLFSHLRHPVCVELLTVLWVVPTLGTDRLLLAFLLTLYLGLAHGLDQQDLRYLRAQLQRKLHLLSRPQDGEAE

SEQ ID NO: 1804 - protein, 165 aa, Homo sapiens
LALHSARLTMCHSRSCHPTMTILQAPTPAPSTIPGPRRGSGPEIFTFDPLPEPAAAPAGRPSASRGHRKRSRRVLYPRVVRRQLPVEEPNPAKRLLFLLLTIVFCQILMAEEGVPAPLPPEDAPNAASLAPTPVSAVLEPFNLTSEPSDYALDLSTFLQQHPAAF

SEQ ID NO: 1805 - protein, 256 aa, Homo sapiens
VRLSCPISLGCPCFVLWTTAQQCPALCLGLGPSCTCCLDPRPAWAWALVLPMTPPERLFLPRVCGTTLHLLLLGLLLVLLPGAQGLPGVGLTPSAAQTARQHPKMHLAHSTLKPAAHLIGDPSKQNSLLWRANTDRAFLQDGFSLSNNSLLVPTSGIYFVYSQVVFSGKAYSPKATSSPLYLAHEVQLFSSQYPFHVPLLSSQKMVYPGLQEPWLHSMYHGAAFQLTQGDQLSTHTDGIPHLVLSPSTVFFGAFAL

SEQ ID NO: 1806 - protein, 224 aa, Homo sapiens
VSPSSSTQTSLLRSPSPTGTSSDMAWMLLLILIMVHPGSCALWVSQPPEIRTLEGSSAFLPCSFNASQGRLAIGSVTWFRDEVVPGKEVRNGTPEFRGRLAPLASSRFLHDHQAELHIRDVRGHDASIYVCRVEVLGLGVGTGNGTRLVVEKEHPQLGAGTVLLLRAGFYAVSFLSVAVGSTVYYQGKCLTWKGPRRQLPAVVPAPLPPPCGSSAHLLPPVPGG

SEQ ID NO: 1807 - protein, 200 aa, Homo sapiens
VSPSSSTQTSLLRSPSPTGTSSDMAWMLLLILIMVHPGSCALWVSQPPEIRTLEGSSAFLPCSFNASQGRLAIGSVTWFRDEVVPGKEVRNGTPEFRGRLAPLASSRFLHDHQAELHIRDVRGHDASIYVCRVEVLGLGVGTGNGTRLVVEKEHPQLGAGTVLLLRAGFYAVSFLSVAVGSTVYYQGKYAKSTLSGFPQL

SEQ ID NO: 1808 - protein, 213 aa, Homo sapiens
VSPSSSTQTSLLRSPSPTGTSSDMAWMLLLILIMVHPGSCALWVSQPPEIRTLEGSSAFLPCSFNASQGRLAIGSVTWFRDEVVPGKEVRNGTPEFRGRLAPLASSRFLHDHQAELHIRDVRGHDASIYVCRVEVLGLGVGTGNGTRLVVEKEHPQLGAGTVLLLRAGFYAVSFLSVAVGSTVYYQGKCHCHMGTHCHSSDGPRGVIPEPRCP

SEQ ID NO: 1809 - protein, 274 aa, Homo sapiens
LSVLPHSRALLTPNRAPKKKMAISGVPVLGFFIIAVLMSAQESWAIKEEHVIIQAEFYLNPDQSGEFMFDFDGDEIFHVDMAKKETVWRLEEFGRFASFEAQGALANIAVDKANLEIMTKRSNYTPITNVPPEVTVLTNSPVELREPNVLICFIDKFTPPVVNVTWLRNGKPVTTGVSETVFLPREDHLFRKFHYLPFLPSTEDVYDCRVEHWGLDEPLLKHWEFDAPSPLPETTENVVCALGLTVGLVGIIIGTIFIIKGLRKSNAAERRGPL

SEQ ID NO: 1810 - protein, 249 aa, Homo sapiens
LSVLPHSRALLTPNRAPKKKMAISGVPVLGFFIIAVLMSAQESWAIKEEHVIIQAEFYLNPDQSGEFMFDFDGDEIFHVDMAKKETVWRLEEFGRFASFEAQGALANIAVDKANLEIMTKRSNYTPITNDKFTPPVVNVTWLRNGKPVTTGVSETVFLPREDHLFRKFHYLPFLPSTEDVYDCRVEHWGLDEPLLKHWEFDAPSPLPETTENVVCALGLTVGLVGIIIGTIFIIKGLRKSNAAERRGPL

SEQ ID NO: 1811 - protein, 115 aa, Homo sapiens
LEQPEGSPGGDPGGVGHGVQTQLRGGVPRDLAEERNGDWTFQILVMLEMTPQRGDVYTCHVEHPSLQSPITVEWRAQSESAQSKMLSGVGGFVLGLIFLGLGLIIRQRSQKGLLH

SEQ ID NO: 1812 - protein, 235 aa, Homo sapiens
LTTTAFPFVSVMSWKKALRIPGDLRVATVTLMLAMLSSLLAEGRDSPEDFVFQFKGMCYFTNGTERVRLVTRYIYNREEYARFDSDVGVYRAVTPQGRPDAEYWNSQKEVLEGTRAELDTVCRHNYEVAFRGILQRRVEPTVTISPSRTEALNHHNLLVCSVTDFYPGQIKVRWFRNDQEETAGVVSTPLIRNGDWTFQILVMLEMTPQRGDVYTCHVEHPSLQSPITVEWRLLH

SEQ ID NO: 1813 - protein, 280 aa, Homo sapiens
LTTTAFPFVSVMSWKKALRIPGDLRVATVTLMLAMLSSLLAEGRDSPEDFVFQFKGMCYFTNGTERVRLVTRYIYNREEYARFDSDVGVYRAVTPQGRPDAEYWNSQKEVLEGTRAELDTVCRHNYEVAFRGILQRRVEPTVTISPSRTEALNHHNLLVCSVTDFYPGQIKVRWFRNDQEETAGVVSTPLIRNGDWTFQILVMLEMTPQRGDVYTCHVEHPSLQSPITVEWRAQSESAQSKMLSGVGGFVLGLIFLGLGLIIRQRSQKGPQGPPPAGLLH

SEQ ID NO: 1814 - protein, 294 aa, Homo sapiens
LPILPCPNSIPGVHQIHQVRAVLTTTAFPFVSVMSWKKALRIPGDLRVATVTLMLAMLSSLLAEGRDSPEDFVFQFKGMCYFTNGTERVRLVTRYIYNREEYARFDSDVGVYRAVTPQGRPDAEYWNSQKEVLEGTRAELDTVCRHNYEVAFRGILQRRVEPTVTISPSRTEALNHHNLLVCSVTDFYPGQIKVRWFRNDQEETAGVVSTPLIRNGDWTFQILVMLEMTPQRGDVYTCHVEHPSLQSPITVEWRAQSESAQSKMLSGVGGFVLGLIFLGLGLIIRQRSQKGLLH

SEQ ID NO: 1815 - protein, 279 aa, Homo sapiens
LTTTAFSLVSLTSWKMALQIPGGFWAAAVTVMLVMLSTPVAEARDFPKDFLVQFKGMCYFTNGTERVRGVARYIYNREEYGRFDSDVGEFQAVTELGRSIEDWNNYKDFLEQERAAVDKVCRHNYEAELRTTLQRQVEPTVTISPSRTEALNHHNLLVCSVTDFYPAQIKVRWFRNDQEETAGVVSTSLIRNGDWTFQILVMLEITPQRGDIYTCQVEHPSLQSPITVEWRAQSESAQSKMLSGIGGFVLGLIFLGLGLIIRHRGQKGPRGPPPAGLLH

SEQ ID NO: 1816 - protein, 290 aa, Homo sapiens
LTTTAFSLVSLTSWKMALQIPGGFWAAAVTVMLVMLSTPVAEARDFPKDFLVQFKGMCYFTNGTERVRGVARYIYNREEYGRFDSDVGEFQAVTELGRSIEDWNNYKDFLEQERAAVDKVCRHNYEAELRTTLQRQVEPTVTISPSRTEALNHHNLLVCSVTDFYPAQIKVRWFRNDQEETAGVVSTSLIRNGDWTFQILVMLEITPQRGDIYTCQVEHPSLQSPITVEWRAQSESAQSKMLSGIGGFVLGLIFLGLGLIIRHRGQKGPRGPPPAGNISAMIQSGERAQA

SEQ ID NO: 1817 - protein, 38 aa, Homo sapiens
LSPMQTLKVSVSAVTLGLGLIIFSLGVISWRRAGHSSE

SEQ ID NO: 1818 - protein, 197 aa, Homo sapiens
LQSLPGRRPPFRAQLLAHLCLPKPDPLCSSLPSPPYAMAPPNTEIPSKLVSFSPYTSIPPPGFPIAEVFTLKPLEFGKPNTLVCFVSNLFPPMLTVNWQHHSVPVEGFGPTFVSAVDGLSFQAFSYLNFTPEPSDIFSCIVTHEIDRYTAIAYWVPRNALPSDLLENVLCGVAFGLGVLGIIVGIVLIIYFRKPCSD

SEQ ID NO: 1819 - protein, 507 aa, Homo sapiens
LCESGWASNTAPTAPPQPGWCLCGKDFKSSCQTPGREKERRLATMHGSCSFLMLLLPLLLLLVATTGPVGALTDEEKRLMVELHNLYRAQVSPTASDMLHMRWDEELAAFAKAYARQCVWGHNKERGRRGENLFAITDEGMDVPLAMEEWHHEREHYNLSAATCSPGQMCGHYTQVVWAKTERIGCGSHFCEKLQGVEETNIELLVCNYEPPGNVKGKRPYQEGTPCSQCPSGYHCKNSLCEPIGSPEDAQDLPYLVTEAPSFRATEASDSRKMGTPSSLATGIPAFLVTEVSGSLATKALPAVETQAPTSLATKDPPSMATEAPPCVTTEVPSILAAHSLPSLDEEPVTFPKSTHVPIPKSADKVTDKTKVPSRSPENSLDPKMSLTGARELLPHAQEEAEAEAELPPSSEVLASVFPAQDKPGELQATLDHTGHTSSKSLPNFPNTSATANATGGRALALQSSLPGAEGPDKPSVVSGLNSGPGHVWGPLLGLLLLPPLVLAGIF

SEQ ID NO: 1820 - protein, 380 aa, Homo sapiens
MNPCGWLGAVGPTLPHFPKWAASLLEPRVLPWQAQVAHPVSGGPSPWISRPDTAQLDGTMAPAFLLLLLLWPQGCVSGPSADSVYTKVRLLEGETLSVQCSYKGYKNRVEGKVWCKIRKKKCEPGFARVWVKGPRYLLQDDAQAKVVNITMVALKLQDSGRYWCMRNTSGILYPLMGFQLDVSPAPQTERNIPFTHLDNILKSGTVTTGQAPTSGPDAPFTTGVMVFTPGLITLPRLLASTRPASKTGYSFTATSTTSQGPRRTMGSQTVTASPSNARDSSAGPESISTKSGDLSTRSPTTGLCLTSRSLLNRLPSMPSIRHQDVYSTVLGVVLTLLVLMLIMVYGFWKKRHMASYSMCSDPSTRDPPGRPEPYVEVYLI

SEQ ID NO: 1821 - protein, 304 aa, Homo sapiens
LWVPPPPAATQVCSWVLPPSEWAMAGTWLLLLLALGCPALPTGVGGTPFPSLAPPIMLLVDGKQQMVVVCLVLDVAPPGLDSPIWFSAGNGSALDAFTYGPSPATDGTWTNLAHLSLPSEELASWEPLVCHTGPGAEGHSRSTQPMHLSGEASTARTCPQEPLRGTPGGALWLGVLRLLLFKLLLFDLLLTCSCLCDPAGPLPSPATTTRLRALGSHRLHPATETGGREATSSPRPQPRDRRWGDTPPGRKPGSPVWGEGSYLSSYPTCPAQAWCSRSALRAPSSSLGAFFAGDLPPPLQAGAA

SEQ ID NO: 1822 - protein, 279 aa, Homo sapiens
LWVPPPPAATQVCSWVLPPSEWAMAGTWLLLLLALGCPALPTGPVSFPSSPEAATTGPIWFSAGNGSALDAFTYGPSPATDGTWTNLAHLSLPSEELASWEPLVCHTGPGAEGHSRSTQPMHLSGEASTARTCPQEPLRGTPGGALWLGVLRLLLFKLLLFDLLLTCSCLCDPAGPLPSPATTTRLRALGSHRLHPATETGGREATSSPRPQPRDRRWGDTPPGRKPGSPVWGEGSYLSSYPTCPAQAWCSRSALRAPSSSLGAFFAGDLPPPLQAGAA

SEQ ID NO: 1823 - protein, 197 aa, Homo sapiens
LWVPPPPAATQVCSWVLPPSEWAMAGTWLLLLLALGCPALPTGEASTARTCPQEPLRGTPGGALWLGVLRLLLFKLLLFDLLLTCSCLCDPAGPLPSPATTTRLRALGSHRLHPATETGGREATSSPRPQPRDRRWGDTPPGRKPGSPVWGEGSYLSSYPTCPAQAWCSRSALRAPSSSLGAFFAGDLPPPLQAGAA

SEQ ID NO: 1824 - protein, 319 aa, Homo sapiens
LWVPPPPAATQVCSWVLPPSEWAMAGTWLLLLLALGCPALPTGVGGTPFPSLAPPIMLLVDGKQQMVVVCLVLDVAPPGLDSPIWFSAGNGSALDAFTYGPSPATDGTWTNLAHLSLPSEELASWEPLVCHTGPGAEGHSRSTQPMHLSGEASTARTCPQEPLRGGCGLLRAPERFLLAGTPGGALWLGVLRLLLFKLLLFDLLLTCSCLCDPAGPLPSPATTTRLRALGSHRLHPATETGGREATSSPRPQPRDRRWGDTPPGRKPGSPVWGEGSYLSSYPTCPAQAWCSRSALRAPSSSLGAFFAGDLPPPLQAGAA

SEQ ID NO: 1825 - protein, 383 aa, Homo sapiens
LGPALTMPSGCRCLHLVCLLCILGAPGQPVRADDCSSHCDLAHGCCAPDGSCRCDPGWEGLHCERCVRMPGCQHGTCHQPWQCICHSGWADEHICTTQSPCQNGGQCMYDGGGEYHCVCLPGFHGRDCERKAGPCEQAGSPCRNGGQCQDDQGFALNFTCRCLVGFVGARCEVNVDDCLMRPCANGATCLDGINRFSCLCPEGFAGRFCTINLDDCASRPCQRGARCRDRVHDFDCLCPSGYGGKTCELVLPVPDPPTTVDTPLGPTSAVVVPATGPAPHSAGAGLLRISVKEVVRRQEAGLGEPSLVALVVFGALTAALVLATVLLTLRAWRRGVCPPGPCCYPAPHYAPACQDQECQVSMLPAGLPLPRDLPPEPGKTTAL

SEQ ID NO: 1826 - protein, 389 aa, Homo sapiens
LGPALTMPSGCRCLHLVCLLCILGAPGQPVRADDCSSHCDLAHGCCAPDGSCRCDPGWEGLHCERCVRMPGCQHGTCHQPWQCICHSGWAGKFCDKDEHICTTQSPCQNGGQCMYDGGGEYHCVCLPGFHGRDCERKAGPCEQAGSPCRNGGQCQDDQGFALNFTCRCLVGFVGARCEVNVDDCLMRPCANGATCLDGINRFSCLCPEGFAGRFCTINLDDCASRPCQRGARCRDRVHDFDCLCPSGYGGKTCELVLPVPDPPTTVDTPLGPTSAVVVPATGPAPHSAGAGLLRISVKEVVRRQEAGLGEPSLVALVVFGALTAALVLATVLLTLRAWRRGVCPPGPCCYPAPHYAPACQDQECQVSMLPAGLPLPRDLPPEPGKTTAL

SEQ ID NO: 1827 - protein, 492 aa, Homo sapiens
LGISVPHQVRMLTPKSQQQAPEGGSCQPGKTENTITMTTSHQPQDRYKAVWLIFFMLGLGTLLPWNFFMTATQYFTNRLDMSQNVSLVTAELSKDAQASAAPAAPLPERNSLSAIFNNVMTLCAMLPLLLFTYLNSFLHQRIPQSVRILGSLVAILLVFLITAILVKVQLDALPFFVITMIKIVLINSFGAILQGSLFGLAGLLPASYTAPIMSGQGLAGFFASVAMICAIASGSELSESAFGYFITACAVIILTIICYLGLPRLEFYRYYQQLKLEGPGEQETKLDLISKGEEPRAGKEESGVSVSNSQPTNESHSIKAILKNISVLAFSVCFIFTITIGMFPAVTVEVKSSIAGSSTWERYFIPVSCFLTFNIFDWLGRSLTAVFMWPGKDSRWLPSLVLARLVFVPLLLLCNIKPRRYLTVVFEHDAWFIFFMAAFAFSNGYLASLCMCFGPKKVKPAEAETAGAIMAFFLCLGLALGAVFSFLFRAIV

SEQ ID NO: 1828 - protein, 491 aa, Homo sapiens
LGISVPHQVRMLTPKSQQAPEGGSCQPGKTENTITMTTSHQPQDRYKAVWLIFFMLGLGTLLPWNFFMTATQYFTNRLDMSQNVSLVTAELSKDAQASAAPAAPLPERNSLSAIFNNVMTLCAMLPLLLFTYLNSFLHQRIPQSVRILGSLVAILLVFLITAILVKVQLDALPFFVITMIKIVLINSFGAILQGSLFGLAGLLPASYTAPIMSGQGLAGFFASVAMICAIASGSELSESAFGYFITACAVIILTIICYLGLPRLEFYRYYQQLKLEGPGEQETKLDLISKGEEPRAGKEESGVSVSNSQPTNESHSIKAILKNISVLAFSVCFIFTITIGMFPAVTVEVKSSIAGSSTWERYFIPVSCFLTFNIFDWLGRSLTAVFMWPGKDSRWLPSLVLARLVFVPLLLLCNIKPRRYLTVVFEHDAWFIFFMAAFAFSNGYLASLCMCFGPKKVKPAEAETAGAIMAFFLCLGLALGAVFSFLFRAIV

SEQ ID NO: 1829 - protein, 498 aa, Homo sapiens
MCPGGRGKLQRERADLSAGAVLLRQAPEGGSCQPGKTENTITMTTSHQPQDRYKAVWLIFFMLGLGTLLPWNFFMTATQYFTNRLDMSQNVSLVTAELSKDAQASAAPAAPLPERNSLSAIFNNVMTLCAMLPLLLFTYLNSFLHQRIPQSVRILGSLVAILLVFLITAILVKVQLDALPFFVITMIKIVLINSFGAILQGSLFGLAGLLPASYTAPIMSGQGLAGFFASVAMICAIASGSELSESAFGYFITACAVIILTIICYLGLPRLEFYRYYQQLKLEGPGEQETKLDLISKGEEPRAGKEESGVSVSNSQPTNESHSIKAILKNISVLAFSVCFIFTITIGMFPAVTVEVKSSIAGSSTWERYFIPVSCFLTFNIFDWLGRSLTAVFMWPGKDSRWLPSLVLARLVFVPLLLLCNIKPRRYLTVVFEHDAWFIFFMAAFAFSNGYLASLCMCFGPKKVKPAEAETAGAIMAFFLCLGLALGAVFSFLFRAIV

SEQ ID NO: 1830 - protein, 501 aa, Homo sapiens
LAPGPKTGCGHVDLRKGQASGRVIPIDLAPEGGSCQPGKTENTITMTTSHQPQDRYKAVWLIFFMLGLGTLLPWNFFMTATQYFTNRLDMSQNVSLVTAELSKDAQASAAPAAPLPERNSLSAIFNNVMTLCAMLPLLLFTYLNSFLHQRIPQSVRILGSLVAILLVFLITAILVKVQLDALPFFVITMIKIVLINSFGAILQGSLFGLAGLLPASYTAPIMSGQGLAGFFASVAMICAIASGSELSESAFGYFITACAVIILTIICYLGLPRLEFYRYYQQLKLEGPGEQETKLDLISKGEEPRAGKEESGVSVSNSQPTNESHSIKAILKNISVLAFSVCFIFTITIGMFPAVTVEVKSSIAGSSTWERYFIPVSCFLTFNIFDWLGRSLTAVFMWPGKDSRWLPSLVLARLVFVPLLLLCNIKPRRYLTVVFEHDAWFIFFMAAFAFSNGYLASLCMCFGPKKVKPAEAETAGAIMAFFLCLGLALGAVFSFLFRAIV

SEQ ID NO: 1831 - protein, 529 aa, Homo sapiens
LRDSLLITPCATFFILDPHPGARGQGPLPEPELGAPPRDCPGLLCSDPSAGQSGHLAPEGGSCQPGKTENTITMTTSHQPQDRYKAVWLIFFMLGLGTLLPWNFFMTATQYFTNRLDMSQNVSLVTAELSKDAQASAAPAAPLPERNSLSAIFNNVMTLCAMLPLLLFTYLNSFLHQRIPQSVRILGSLVAILLVFLITAILVKVQLDALPFFVITMIKIVLINSFGAILQGSLFGLAGLLPASYTAPIMSGQGLAGFFASVAMICAIASGSELSESAFGYFITACAVIILTIICYLGLPRLEFYRYYQQLKLEGPGEQETKLDLISKGEEPRAGKEESGVSVSNSQPTNESHSIKAILKNISVLAFSVCFIFTITIGMFPAVTVEVKSSIAGSSTWERYFIPVSCFLTFNIFDWLGRSLTAVFMWPGKDSRWLPSLVLARLVFVPLLLLCNIKPRRYLTVVFEHDAWFIFFMAAFAFSNGYLASLCMCFGPKKVKPAEAETAGAIMAFFLCLGLALGAVFSFLFRAIV

SEQ ID NO: 1832 - protein, 503 aa, Homo sapiens
LPEPELGAPPRDCPGLLCSDPSAGQSGHLQAPEGGSCQPGKTENTITMTTSHQPQDRYKAVWLIFFMLGLGTLLPWNFFMTATQYFTNRLDMSQNVSLVTAELSKDAQASAAPAAPLPERNSLSAIFNNVMTLCAMLPLLLFTYLNSFLHQRIPQSVRILGSLVAILLVFLITAILVKVQLDALPFFVITMIKIVLINSFGAILQGSLFGLAGLLPASYTAPIMSGQGLAGFFASVAMICAIASGSELSESAFGYFITACAVIILTIICYLGLPRLEFYRYYQQLKLEGPGEQETKLDLISKGEEPRAGKEESGVSVSNSQPTNESHSIKAILKNISVLAFSVCFIFTITIGMFPAVTVEVKSSIAGSSTWERYFIPVSCFLTFNIFDWLGRSLTAVFMWPGKDSRWLPSLVLARLVFVPLLLLCNIKPRRYLTVVFEHDAWFIFFMAAFAFSNGYLASLCMCFGPKKVKPAEAETAGAIMAFFLCLGLALGAVFSFLFRAIV

SEQ ID NO: 1833 - protein, 134 aa, Homo sapiens
LDMSQNVSLVTAELSKDAQASAAPAAPLPERNSLSAIFNNVMTLCAMLPLLLFTYLNSFLHQRIPQSVRILGSLVAILLVFLITAILVKVQLDALPFFVITMIKIVLINCKLGQEGAYGRRHAQLPPLFFQTQR

SEQ ID NO: 1834 - protein, 131 aa, Homo sapiens
LAAGSLAAPGGGGGSAGGARPGDSHSPVPPPPHAAWTMDARWWAVVVLAAFPSLGAGGETPEAPPESWTQLWFFRFVVNAAGYASFMVPGYLLVQYFRRKNYLETGVLSDLGCAAGKSDDPQLWGHSHITG

SEQ ID NO: 1835 - protein, 479 aa, Homo sapiens
LKMTSKFLLVSFILAALSLSTTFSLQPDQQKVLLVSFDGFRWDYLYKVPTPHFHYIMKYGVHVKQVTNVFITKTYPNHYTLVTGLFAENHGIVANDMFDPIRNKSFSLDHMNIYDSKFWEEATPIWITNQRAGHTSGAAMWPGTDVKIHKRFPTHYMPYNESVSFEDRVAKIIEWFTSKEPINLGLLYWEDPDDMGHHLGPDSPLMGPVISDIDKKLGYLIQMLKKAKLWNTLNLIITSDHGMTQCSEERLIELDQYLDKDHYTLIDQSPVAAILPKEGKFDEVYEALTHAHPNLTVYKKEDVPERWHYKYNSRIQPIIAVADEGWHILQNKSDDFLLGNHGYDNALADMHPIFLAHGPAFRKNFSKEAMNSTDLYPLLCHLLNITAMPHNGSFWNVQDLLNSAMPRVVPYTQSTILLPGSVKPAEYDQEGSYPYFIGVSLGSIIVIVFFVIFIKHLIHSQIPALQDMHAEIAQPLLQA

SEQ ID NO: 1836 - protein, 588 aa, Homo sapiens
LALPRPPGWFFPAAEVGRLGQGLGCEESRRPQRGAGKSSLLWWNSELVLEAADAEVPQRIQRGAPTRGEEVAPGRRQEEEREQERGAERPDPPCVLSGGKGRGNRPLREAPGGEGVSQVPAAAPLPRFHERKVFFFQTLPPARALRAQPPEPSERAPSQPSSGETRAAMPGGCSRGPAAGDGRLRLARLALVLLGWVSSSSPTSSASSFSSSAPFLASAVSAQPPLPDQCPALCECSEAARTVKCVNRNLTEVPTDLPAYVRNLFLTGNQLAVLPAGAFARRPPLAELAALNLSGSRLDEVRAGAFEHLPSLRQLDLSHNPLADLSPFAFSGSNASVSAPSPLVELILNHIVPPEDERQNRSFEGMVVAALLAGRALQGLRRLELASNHFLYLPRDVLAQLPSLRHLDLSNNSLVSLTYVSFRNLTHLESLHLEDNALKVLHNGTLAELQGLPHIRVFLDNNPWVCDCHMADMVTWLKETEVVQGKDRLTCAYPEKMRNRVLLELNSADLDCDPILPPSLQTSYVFLGIVLALIGAIFLLVLYLNRKGIKKWMHNIRDACRDHMEGYHYRYEINADPRLTNLSSNSDV

SEQ ID NO: 1837 - protein, 572 aa, Homo sapiens
LELEVELRGAGPPAAGQRLLQAEAPAENEPEPEVVVVSWQSGGTGSKLRWFTTLMLCASFLGLGLSVAIVGPTFQDLATNVNRNISSLSFIFVGRALGYLSGSVIGGFLVDVMNYFLLLGISMSATTVGLYLVPFCKTAILLTVMMSIFGVSIGILDTGGNVLILAIWGDKGAPHMQALHFSFALGAFLAPLLAKLALGPTASAENHTESDFHPALNQSSDADSEALFGVPNDKNLLWAYAVIGTYMFLVSVIFFCLFLKNSSKQEKARASAETFRRAKYHNALLCLLFLFFFFYVGAEVTYGSYVFSFATTHAGMKESEAAGLNSIFWGTFAACRGLAIFFATCLQPGTMIVLSNIGSLTSSLFLVLFDKNPICLWIATSVYGASMATTFPSGVSWIEQYTTIHGKSAAFFVIGASLGEMAIPAVIGILQGKYPDLPVVLYTSLGASIATGILFPVLYKLATSPLDRQRKEDRKSEDQKALLSSSGLNEYEEENEEEDAEKWNEMDFEMIETNDTMRHSIIETSRSSLTEPTAEVYNQYPSNALVFESSPFNTGSAHVKHLPETRTKGTNV

SEQ ID NO: 1838 - protein, 1012 aa, Homo sapiens
LLPACRSSCKITAVTVPALQCLKTNVFLVFTFLRQEGSFEDGLAALEIWRSDATMRTHTRGAPSVFFIYLLCFVSAYITDENPEVMIPFTNANYDSHPMLYFSRAEVAELQLRAASSHEHIAARLTEAVHTMLSSPLEYLPPWDPKDYSARWNEIFGNNLGALAMFCVLYPENIEARDMAKDYMERMAAQPSWLVKDAPWDEVPLAHSLVGFATAYDFLYNYLSKTQQEKFLEVIANASGYMYETSYRRGWGFQYLHNHQPTNCMALLTGSLVLMNQGYLQEAYLWTKQVLTIMEKSLVLLREVTDGSLYEGVAYGSYTTRSLFQYMFLVQRHFNINHFGHPWLKQHFAFMYRTILPGFQRTVAIADSNYNWFYGPESQLVFLDKFVMRNGSGNWLADQIRRNRVVEGPGTPSKGQRWCTLHTEFLWYDGSLKSVPPPDFGTPTLHYFEDWGVVTYGSALPAEINRSFLSFKSGKLGGRAIYDIVHRNKYKDWIKGWRNFNAGHEHPDQNSFTFAPNGVPFITEALYGPKYTFFNNVLMFSPAVSKSCFSPWVGQVTEDCSSKWSKYKHDLAASCQGRVVAAEEKNGVVFIRGEGVGAYNPQLNLKNVQRNLILLHPQLLLLVDQIHLGEESPLETAASFFHNVDVPFEETVVDGVHGAFIRQRDGLYKMYWMDDTGYSEKATFASVTYPRGYPYNGTNYVNVTMHLRSPITRAAYLFIGPSIDVQSFTVHGDSQQLDVFIATSKHAYATYLWTGEATGQSAFAQVIADRHKILFDRNSAIKSSIVPEVKDYAAIVEQNLQHFKPVFQLLEKQILSRVRNTASFRKTAERLLRFSDKRQTEEAIDRIFAISQQQQQQSKSKKNRRAGKRYKFVDAVPDIFAQIEVNEKKIRQKAQILAQKELPIDEDEEMKDLLDFADVTYEKHKNGGLIKGRFGQARMVTTTHSRAPSLSASYTRLFLILNIAIFFVMLAMQLTYFQRAQSLHGQRCLYAVLLIDSCILLWLYSSCSQSQC

SEQ ID NO: 1839 - protein, 711 aa, Homo sapiens
LTNWSGIKCEDCDFSFILSLPLHNSNLQLDLKSHCLDLYRSVKFSKYLNSFQLISLGFQRTVAIADSNYNWFYGPESQLVFLDKFVMRNGSGNWLADQIRRNRVVEGPGTPSKGQRWCTLHTEFLWYDGSLKSVPPPDFGTPTLHYFEDWGVVTYGSALPAEINRSFLSFKSGKLGGRAIYDIVHRNKYKDWIKGWRNFNAGHEHPDQNSFTFAPNGVPFITEALYGPKYTFFNNVLMFSPAVSKSCFSPWVGQVTEDCSSKWSKYKHDLAASCQGRVVAAEEKNGVVFIRGEGVGAYNPQLNLKNVQRNLILLHPQLLLLVDQIHLGEESPLETAASFFHNVDVPFEETVVDGVHGAFIRQRDGLYKMYWMDDTGYSEKATFASVTYPRGYPYNGTNYVNVTMHLRSPITRAAYLFIGPSIDVQSFTVHGDSQQLDVFIATSKHAYATYLWTGEATGQSAFAQVIADRHKILFDRNSAIKSSIVPEVKDYAAIVEQNLQHFKPVFQLLEKQILSRVRNTASFRKTAERLLRFSDKRQTEEAIDRIFAISQQQQQQSKSKKNRRAGKRYKFVDAVPDIFAQIEVNEKKIRQKAQILAQKELPIDEDEEMKDLLDFADVTYEKHKNGGLIKGRFGQARMVTTTHSRAPSLSASYTRLFLILNIAIFFVMLAMQLTYFQRAQSLHGQRCLYAVLLIDSCILLWLYSSCSQSQC

SEQ ID NO: 1840 - protein, 327 aa, Homo sapiens
LGLCATPRGTRLMEKFRAVLDLHVKHHSALGYGLVTLLTAGGERIFSAVAFQCPCSAAWNLPYGLVFLLVPALALFLLGYVLSARTWRLLTGCCSSARASCGSALRGSLVCTQISAAAALAPLTWVAVALLGGAFYECAATGSAAFAQRLCLGRNRSCAAELPLVPCNQAKASDVQDLLKDLKAQSQVLGWILIAVVIIILLIFTSVTRCLSPVSFLQLKFWKIYLEQEQQILKSKATEHATELAKENIKCFFEGSHPKEYNTPSMKEWQQISSLYTFNPKGQYYSMLHKYVNRKEKTHSIRSTEGDTVIPVLGFVDSSGINSTPEL

SEQ ID NO: 1841 - protein, 754 aa, Homo sapiens
LRPVPAPRSSAEEAARPGQLRLGIRRGEAELAKLAPSGVMVPGARGGGALARAAGRGLLALLLAVSAPLRLQAEELGDGCGHLVTYQDSGTMTSKNYPGTYPNHTVCEKTITVPKGKRLILRLGDLDIESQTCASDYLLFTSSSDQYGPYCGSMTVPKELLLNTSEVTVRFESGSHISGRGFLLTYASSDHPDLITCLERASHYLKTEYSKFCPAGCRDVAGDISGNMVDGYRDTSLLCKAAIHAGIIADELGGQISVLQRKGISRYEGILANGVLSRDGSLSDKRFLFTSNGCSRSLSFEPDGQIRASSSWQSVNESGDQVHWSPGQARLQDQGPSWASGDSSNNHKPREWLEIDLGEKKKITGIRTTGSTQSNFNFYVKSFVMNFKNNNSKWKTYKGIVNNEEKVFQGNSNFRDPVQNNFIPPIVARYVRVVPQTWHQRIALKVELIGCQITQGNDSLVWRKTSQSTSVSTKKEDETITRPIPSEETSTGINITTVAIPLVLLVVLVFAGMGIFAAFRKKKKKGSPYGSAEAQKTDCWKQIKYPFARHQSAEFTISYDNEKEMTQKLDLITSDMADYQQPLMIGTGTVTRKGSTFRPMDTDAEEAGVSTDAGGHYDCPQRAGRHEYALPLAPPEPEYATPIVERHVLRAHTFSAQSGYRVPGPQPGHKHSLSSGGFSPVAGVGAQDGDYQRPHSAQPADRGYDRPKAVSALATESGHPDSQKPPTHPGTSDSYSAPRDCLTPLNQTAMTALL

SEQ ID NO: 1842 - protein, 262 aa, Homo sapiens
MVQQLVKKIGHQAVLMDLIKKYKQNTQGLKSPENPKKAALVMQTEAARDYRDEESSSPARHGEQMPSFYPAENLDNGLIDQRVLKQRRNVKQILARSKALQWTKSYVLPEFPYDVKCMLAEQKCPDHSMRIRIIEFLQADMTKYLEGSLYPSTQQYNDVVNALLQAHPFLDEDGCGFTQWSCCLALRSGPPALPGPVRSLLSVLIKTDPQDALGQQFFFFFFLFFFLRRSLALSLRLEYSGAISAHCNLRLLGSSNSLGQQF

SEQ ID NO: 1843 - protein, 233 aa, Homo sapiens
MERDGCAGGGSRGGEGGRAPREGPAGNGRDRGRSHAAEAPGDPQAAASLLAPMDVGEEPLEKAARARTAKDPNTYKVLSLVLSVCVLTTILGCIFGLKPSCAKEVKSCKGRCFERTFGNCRCDAACVELGNCCLDYQETCIEPEHIWTCNKFRCGEKRLTRSLCACSDDCKDKGDCCINYSSVCQGQVLVGLCSSLVSSSVLAGLYIGVIFYIRSHGYWPTILAEKNNFKTFY

SEQ ID NO: 1844 - protein, 247 aa, Homo sapiens
LEGSGIYAPNGPKVYHYDMKTELGKLLLSEVDSHPLSSLAYPTAVNWNAYATTIKPFPVQKNTFRGFISRDGFNFTELFENAGNLTVCQKELCCHLSYRMLQKEENEVYVLGAFTGLHGRRRREYWQVCTLLKCKTTNLTTCGRPVETASTRFEMFSLSGTFGTEYVFPEVLLTEIHLSPGKFEVLKDGRLVNKNGSSGPILTVSLFGRWYTKDSLYSSCGTSNSAITYLLIFILLMIIALQNIVML

SEQ ID NO: 1845 - protein, 286 aa, Homo sapiens
LEAWMNVLPLLTAIEFHSAWAMGMGVNLLVANTHHVSLNMTGSGIYAPNGPKVYHYDMKTELGKLLLSEVDSHPLSSLAYPTAVNWNAYATTIKPFPVQKNTFRGFISRDGFNFTELFENAGNLTVCQKELCCHLSYRMLQKEENEVYVLGAFTGLHGRRRREYWQVCTLLKCKTTNLTTCGRPVETASTRFEMFSLSGTFGTEYVFPEVLLTEIHLSPGKFEVLKDGRLVNKNGSSGPILTVSLFGRWYTKDSLYSSCGTSNSAITYLLIFILLMIIALQNIVML

SEQ ID NO: 1846 - protein, 522 aa, Homo sapiens
LAMVTSSFPISVAVFALITLQVGTQDSFIAAVYEHAVILPNKTETPVSQEDALNLMNENIDILETAIKQAAEQGARIIVTPEDALYGWKFTRETVFPYLEDIPDPQVNWIPCQDPHRFGHTPVQARLSCLAKDNSIYVLANLGDKKPCNSRDSTCPPNGYFQYNTNVVYNTEGKLVARYHKYHLYSEPQFNVPEKPELVTFNTAFGRFGIFTCFDIFFYDPGVTLVKDFHVDTILFPTAWMNVLPLLTAIEFHSAWAMGMGVNLLVANTHHVSLNMTGSGIYAPNGPKVYHYDMKTELGKLLLSEVDSHPLSSLAYPTAVNWNAYATTIKPFPVQKNTFRGFISRDGFNFTELFENAGNLTVCQKELCCHLSYRMLQKEENEVYVLGAFTGLHGRRRREYWQVCTLLKCKTTNLTTCGRPVETASTRFEMFSLSGTFGTEYVFPEVLLTEIHLSPGKFEVLKDGRLVNKNGSSGPILTVSLFGRWYTKDSLYSSCGTSNSAITYLLIFILLMIIALQNIVML

SEQ ID NO: 1847 - protein, 292 aa, Homo sapiens
LAMVTSSFPISVAVFALITLQVGTQDSFIAAVYEHAVILPNKTETPVSQEDALNLMNENIDILETAIKQAAEQGARIIVTPEDALYGWKFTRETVFPYLEDIPDPQVNWIPCQDPHRFGHTPVQARLSCLAKDNSIYVLANLGDKKPCNSRDSTCPPNGYFQYNTNVVYNTEGKLVARYHKYHLYSEPQFNVPEKPELVTFNTAFGRFGIFTCFDIFFYDPGVTLVKDFHVDTILFPTAWMNVLPLLTAIEFHSAWAMGMGVNLLVANTHHVSLNMTVVFMHQMVPKCIIMT

SEQ ID NO: 1848 - protein, 98 aa, Homo sapiens
LHFEDTGRKSAYPQTLSLLPCISLGPEWFFSLHFSSLSLSAAVLQGGGYWAALAIQWAWGLGLVPIYIYLKSLYILKGEIIHEESFFFFFFFCLTTFL

SEQ ID NO: 1849 - protein, 8409 aa, Homo sapiens
MATSRGASRCPRDIANVMQRLQDEQEIVQKRTFTKWINSHLAKRKPPMVVDDLFEDMKDGVKLLALLEVLSGQKLPCEQGRRMKRIHAVANIGTALKFLEGRKIKLVNINSTDIADGRPSIVLGLMWTIILYFQIEELTSNLPQLQSLSSSASSVDSIVSSETPSPPSKRKVTTKIQGNAKKALLKWVQYTAGKQTGIEVKDFGKSWRSGVAFHSVIHAIRPELVDLETVKGRSNRENLEDAFTIAETELGIPRLLDPEDVDVDKPDEKSIMTYVAQFLKHYPDIHNASTDGQEDDEILPGFPSFANSVQNFKREDRVIFKEMKVWIEQFERDLTRAQMVESNLQDKYQSFKHFRVQYEMKRKQIEHLIQPLHRDGKLSLDQALVKQSWDRVTSRLFDWHIQLDKSLPAPLGTIGAWLYRAEVALREEITVQQVHEETANTIQRKLEQHKRKCQTIMDLLQNTDAHKRAFHEIYRTRSVNGIPVPPDQLEDMAERFHFVSSTSELHLMKMEFLELKYRLLSLLVLAESKLKSWIIKYGRRESVEQLLQNYVSFIENSKFFEQYEVTYQILKQTAEMYVKADGSVEEAENVMKFMNETTAQWRNLSVEVRSVRSMLEEVISNWDRYGNTVASLQAWLEDAEKMLNQSENAKKDFFRNLPHWIQQHTAMNDAGNFLIETCDEMVSRDLKQQLLLLNGRWRELFMEVKQYAQADEMDRMKKEYTDCVVTLSAFATEAHKKLSEPLEVSFMNVKLLIQDLEDIEQRVPVMDAQYKIITKTAHLITKESPQEEGKEMFATMSKLKEQLTKVKECYSPLLYESQQLLIPLEELEKQMTSFYDSLGKINEIITVLEREAQSSALFKQKHQLRILKCKWCNSSQKMTLCLVLGSMISMLSTAKITIAGYKSEVEVSELLACQENCKKTLTLIEKGSQSVQKFVTLSNVLKHFDQTRLQTDCRYSCCFSVMRKQHHIMIVFHIKSMVKKTGDWKKHVETNSRLMKKFEESRAELEKVLRIAQEGLEEKGDPEELLRRHTEFFSQLDQRVLNAFLKACDELTDILPEQEQQGLQEAVRKLHKQWKDLQGEAPYHLLHLKIDVEKNRFLASVEECRTELDRETKLMPQEGSEKIIKEHRVFFSDKGPHHLCEKRLQLIEELCVKLPVRDPVRDTPGTCHVTLKELRAAIDSTYRKLMEDPDKWKDYTSRFSEFSSWISTNETQLKGIKGEAIDTANHGEVKRAVEEIRNGVTKRGETLSWLKSRLKVLTEVSSENEAQKQGDELAKLSSSFKALVTLLSEVEKMLSNFGDCVQYKEIVKNSLEELISGSKEVQEQAEKILDTENLFEAQQLLLHHQQKTKRISAKKRDVQQQIAQAQQGEGGLPDRGHEELRKLESTLDGLERSRERQERRIQVTLRKWERFETNKETVVRYLFQTGSSHERFLSFSSLESLSSELEQTKEFSKRTESIAVQAENLVKEASEIPLGPQNKQLLQQQAKSIKEQVKKLEDTLEEEYVIDNKTMEMVKTKWDHFGSNFETLSVWITEKEKELNALETSSSAMDMQISQIKVTIQEIESKLSSIVGLEEEAQSFAQFVTTGESARIKAKLTQIRRYGEELREHAQCLEGTILGHLSQQQKFEENLRKIQQSVSEFEDKLAVPIKICSSATETYKVLQEHMDLCQALESLSSAITAFSASARKVVNRDSCVQEAAALQQQYEDILRRAKERQTALENLLAHWQRLEKELSSFLTWLERGEAKASSPEMDISADRVKVEASKDDVKMMKLHLEQLDERWRDLPQIINKRINFLQSVVAEHQQFDELLLSFSVWIKLFLSELQTTSEISIMDHQVALTRHKDHAAEVESKKGELQSLQGHLAKLGSLGRAEDLHLLQGKAEDCFQLFEEASQVVERRQLALSHLAEFLQSHASLSGILRQLRQTVEATNSMNKNESDLIEKDLNDALQNAKALESAAVSLDGILSKAQYHLKIGSSEQRTSCRATADQLCGEVERIQNLLGTKQSEADALAVLKKAFQDQKEELLKSIEDIEERTDKERLKEPTRQALQQRLRVFNQLEDELNSHEHELCWLKDKAKQIAQKDVAFAPEVDREINRLEVTWDDTKRLIHENQGQCCGLIDLMREYQNLKSAVSKVLENASSVIVTRTTIKDQEDLKWAFSKHETAKNKMNYKQKDLDNFTSKGKHLLSELKKIHSSDFSLVKTDMESTVDKWLDVSEKLEENMDRLRVSLSIWDDVLSTRDEIEGWSNNCVPQMAENISNLDNHLRAEELLKEFESEVKNKALRLEELHSKVNDLKELTKNLETPPDLQFIEADLMQKLEHAKEITEVAKGTLKDFTAQSTQVEKFINDITTWFTKVEESLMNCAQNETCEALKKVKDIQKELQSQQSNISSTQENLNSLCRKYHSAELESLGRAMTGLIKKHEAVSQLCSKTQASLQESLEKHFSEESMQEFQEWFLGAKAAAKESSDRTGDSKVLEAKLHDLQQNILDSVSDGQSKLDAVTQEGQTLYAHLSKQIVSSIQEQITKANEEFQAFLKQCLKDKQALQDCASELGSFEDQHRKLNLWIHEMEERFNTENLGESKQHIPEKKNEVHKVEMFLGELLAARESLDKLSQRGQLLSEEGHGAGQEGRLCSQLLTSHQNLLRMTKEKLRSCQVALQEHEALEEALQSMWFWVKAIQDRLACAESTLGSKDTLEKRLSQIQDILLMKGEGEVKLNMAIGKGEQALRSSNKEGQRVIQTQLETLKEVWADIMSSSVHAQSTLESVISQWNDYVERKNQLEQWMESVDQKIEHPLQPQPGLKEKFVLLDHLQSILSEAEDHTRALHRLIAKSRELYEKTEDESFKDTAQEELKTQFNDIMTVAKEKMRKVEEIVKDHLMYLDAVHEFTDWLHSAKEELHRWSDMSGDSSATQKKLSKIKELIDSREIGASRLSRVESLAPEVKQNTTASGCELMHTEMQALRADWKQWEDSVFQTQSCLENLVSQMALSEQEFSGQVAQLEQALEQFSALLKTWAQQLTLLEGKNTDEEIVECWHKGQEILDALQKAEPRTEDLKSQLNELCRFSRDLSTYSGKVSGLIKEYNCLCLQASKGCQNKEQILQQRFRKAFRDFQQWLVNAKITTAKCFDIPQNISEVSTSLQKIQEFLSESENGQHKLNMMLSKGELLSTLLTKEKAKGIQAKVTAAKEDWKNFHSNLHQKESALENLKIQMKDFEVSAEPIQDWLSKTEKMVHESSNRLYDLPAKRREQQKLQSVLEEIHCYEPQLNRLKEKAQQLWEGQAASKSFRHRVSQLSSQYLALSNLTKEKVSRLDRIVAEHNQFSLGIKELQDWMTDAIHMLDSYCHPTSDKSVLDSRTLKLEALLSVKQEKEIQMKMIVTRGESVLQNTSPEGIPTIQQQLQSVKDMWASLLSAGIRCKRVRLPCAYIALKLRVHQHAELRDKTTMLGKAKEAVTKSEKLVRLHQEYQRDLKAFEVWLGQEQEKLDQYSVLEGDAHTHETTLRDLQELQVHCAEGQALLNSVLHTREDVIPSGIPQAEDRALESLRQDWQAYQHRLSETRTQFNNVVNKLRLMEQKFQQVDEWLKTAEEKVSPRTRRQSNRATKEIQLHQMKKWHEEVTAYRDEVEEVGARAQEILDESHVNSRMGCQATQLTSRYQALLLQVLEQIKFLEEEIQSLEESESSLSSYSDWYGSTHKNFKNVATKIDKVDTVMMGKKLKTLEVLLKDMEKGHSLLKSAREKGERAVKYLEEGEAERLRKEIHDHMEQLKELTSTVRKEHMTLEKSLQQTVLSHEPSVKSVREKGEALLELVQDVTLKDKIDQLQSDYQDLCSIGKEHVFSLEAKVKDHEDYNSELQEVEKWLLQMSGRLVAPDLLETSSLETITQQLAHHKMYQSLEHELQKHVSRQDTLQQCQAWLSAVQPDLEPSPQPPLSRAEAIKQVKHFRALQEQARTYLDLLCSMCDLSNASVKTTAKDIQQTEQTIEQKLVQAQNLTQGWEEIKHLKSELWIYLQDADQQLQNMKRRHSELELNIAQNMVSQVKDFVKKLQSKQASVNTIIEKVNKLTKKEESPEHKEINHLNDQWLDLCRQSNNLCLQREEDLQRTRDYHDCMNVVEVFLEKFTTEWDNLARSDAESTAVHLEALKKLALALQERKYAIEDLKDQKQKMIEHLNLDDKELVKEQTSHLEQRWFQLEDLIKRKIQVSVTNLEELNVVQSRFQELMEWAEEQQPNIAEALKQSPPPDMAQNLLMDHLAICSELEAKQMLLKSLIKDADRVMADLGLNERQVIQKALSDAQSHVNCLSDLVGQRRKKHFKEDFDKACHWLKQADIVTFPEINLMNESSELHTQLAKYQNILEQSPEYENLLLTLQRTGQTILPSLNEVDHSYLSEKLNALPRQFNVIVALAKDKFYKVQEAILARKEYASLIELTTQSLSELEAQFLRMSKVPTDLAVEEALSLQDGCRAILDEVAGLGEAVDELNQKKEGFRSTGQPWQPDKMLHLVTLYHRLKRQTEQRVSLLEDTTSAYQEHEKMCQQLERQLKSVKEEQSKVNEETLPAEEKLKMYHSLAGSLQDSGIVLKRVTIHLEDLAPHLDPLAYEKARHQIQSWQGELKLLTSAIGETVTECESRMVQSIDFQTEMSRSLDWLRRVKAELSGPVYLDLNLQDIQEEIRKIQIHQEEVQSSLRIMNALSHKEKEKFTKAKELISADLEHSLAELSELDGDIQEALRTRQATLTEIYSQCQRYYQVFQAANDWLEDAQELLQLAGNGLDVESAEENLKSHMEFFSTEDQFHSNLEELHSLVATLDPLIKPTGKEDLEQKVASLELRSQRMSRDSGAQALVSVVNSFHEKIVALEEKASQLEKTGNDASKATLSRSMTTVWQRWTRLRAVAQDQEKILEDAVDEWTGFNNKVKKATEMIDQLQDKLPGSSAEKASKAELLTLLEYHDTFVLELEQQQSALGMLRQQTLSMLQDGAAPTPGEEPPLMQEITAMQDRCLKMVETQINSVKCWVQETKEYLGNPTIEIDAQLEELQILLTEATNHRQNIEKMAEEQKEKYLGLYTILPSELSLQLAEVALDLKIRDQIQDKIKEVEQSKATSQELSRQIQKLAKDLTTILTKLKAKTDNVVQAKTDQKAASHLEEYNEMLELILKWIEKAKVLAHGTIAWNSASQLREQYILHQTLLEESKEIDSELEAMTEKLQYLTSVYCTEKMSQQVAELGRETEELRQMIKIRLQNLQDAAKDMKKFEAELKKLQAALEQAQATLTSPEVGRLSLKEQLSHRQHLLSEMESLKPKVQAVQLCQSALRIPEDVVASLPLCHAALRLQEEASRLQHTAIQQCNIMQEAVVQYEQYEQEMKHLQQLIEGAHREIEDKPVATSNIQELQAQISRHEELAQKIKGYQEQIASLNSKCKMLTMKAKHATMLLTVTEVEGLAEGTEDLDGELLPTPSAHPSVVMMTAGRCHTLLSPVTEESGEEGTNSEISSPPACRSPSPVANTDASVNQDIAYYQALSAERLQTDAAKIHPSTSASQEFYEPGLEPSATAKLGDLQRSWETLKNVISEKQRTLYEALERQQKYQDSLQSISTKMEAIELKLSESPEPGRSPESQMAEHQALMDEILMLQDEINELQSSLAEELVSESCEADPAEQLALQSTLTVLAERMSTIRMKASGKRQLLEEKLNDQLEEQRQEQALQRYRCEADELDSWLLSTKATLDTALSPPKEPMDMEAQLMDCQNMLVEIEQKVVALSELSVHNENLLLEGKAHTKDEAEQLAGKLRRLKGSLLELQRALHDKQLNMQGTAQEKEESDVDLTATQSPGVQEWLAQARTTWTQQRQSSLQQQKELEQELAEQKSLLRSVASRGEEILIQHSAAETSGDAGEKPDVLSQELGMEGEKSSAEDQMRMKWESLHQEFSTKQKLLQNVLEQEQEQVLYSRPNRLLSGVPLYKGDVPTQDKSAVTSLLDGLNQAFEEVSSQSGGAKRQSIHLEQKLYDGVSATSTWLDDVEERLFVATALLPEETETCLFNQEILAKDIKEMSEEMDKNKNLFSQAFPENGDNRDVIEDTLGCLLGRLSLLDSVVNQRCHQMKERLQQILNFQNDLKVLFTSLADNKYIILQKLANVFEQPVAEQIEAIQQAEDGLKEFDAGIIELKRRGDKLQVEQPSMQELSKLQDMYDELMMIIGSRRSGLNQNLTLKSQYERALQDLADLLETGQEKMAGDQKIIVSSKEEIQQLLDKHKEYFQGLESHMILTETLFRKIISFAVQKETQFHTELMAQASAVLKRAHKRGVELEYILETWSHLDEDQQELSRQLEVVESSIPSVGLVEENEDRLIDRITLYQHLKSSLNEYQPKLYQVLDDGKRLLISISCSDLESQLNQLGECWLSNTNKMSKELHRLETILKHWTRYQSESADLIHWLQSAKDRLEFWTQQSVTVPQELEMVRDHLNAFLEFSKEVDAQSSLKSSVLSTGNQLLRLKKVDTATLRSELSRIDSQWTDLLTNIPAVQEKLHQLQMDKLPSRHAISEVMSWISLMENVIQKDEDNIKNSIGYKAIHEYLQKYKGFKIDINCKQLTVDFVNQSVLQISSQDVESKRSDKTDFAEQLGAMNKSWQILQGLVTEKIQLLEGLLESWSEYENNVQCLKTWFETQEKRLKQQHRIGDQASVQNALKDCQDLEDLIKAKEKEVEKIEQNGLALIQNKKEDVSSIVMSTLRELGQTWANLDHMVGQLKILLKSVLDQWSSHKVAFDKINSYLMEARYSLSRFRLLTGSLEAVQVQVDNLQNLQDDLEKQERSLQKFGSITNQLLKECHPPVTETLTNTLKEVNMRWNNLLEEIAEQLQSSKALLQLWQRYKDYSKQCASTVQQQEDRTNELLKAATNKDIADDEVATWIQDCNDLLKGLGTVKDSLFFLHELGEQLKQQVDASAASAIQSDQLSLSQHLCALEQALCKQQTSLQAGVLDYETFAKSLEALEAWIVEAEEILQGQDPSHSSDLSTIQERMEELKGQMLKFSSMAPDLDRLNELGYRLPLNDKEIKRMQNLNRHWSLISSQTTERFSKLQSFLLQHQTFLEKCETWMEFLVQTEQKLAVEISGNYQHLLEQQRAHELFQAEMFSRQQILHSIIIDGQRLLEQGQVDDRDEFNLKLTLLSNQWQGVIRRAQQRRGIIDSQIRQWQRYREMAEKLRKWLVEVSYLPMSGLGSVPIPLQQARTLFDEVQFKEKVFLRQQGSYILTVEAGKQLLLSADSGAEAALQAELAEIQEKWKSASMRLEEQKKKLAFLLKDWEKCEKGIADSLEKLRTFKKKLSQSLPDHHEELHAEQMRCKELENAVGSWTDDLTQLSLLKDTLSAYISADDISILNERVELLQRQWEELCHQLSLRRQQIGERLNEWAVFSEKNKELCEWLTQMESKVSQNGDILIEEMIEKLKKDYQEEIAIAQENKIQLQQMGERLAKASHESKASEIEYKLGKVNDRWQHLLDLIAARVKKLKETLVAVQQLDKNMSSLRTWLAHIESELAKPIVYDSCNSEEIQRKLNEQQELQRDIEKHSTGVASVLNLCEVLLHDCDACATDAECDSIQQATRNLDRRWRNICAMSMERRLKIEETWRLWQKFLDDYSRFEDWLKSSERTAAFPSSSGVIYTVAKEELKKFEAFQRQVHECLTQLELINKQYRRLARENRTDSACSLKQMVHEGNQRWDNLQKRVTSILRRLKHFIGQREEFETARDSILVWLTEMDLQLTNIEHFSECDVQAKIKQLKAFQQEISLNHNKIEQIIAQGEQLIEKSEPLDAAIIEEELDELRRYCQEVFGRVERYHKKLIRLPLPDDEHDLSDRELELEDSAALSDLHWHDRSADSLLSPQPSSNLSLSLAQPLRSERSGRDTPASVDSIPLEWDHDYDLSRDLESAMSRALPSEDEEGQDDKDFYLRGAVGLSGDHSALESQIRQLGKALDDSRFQIQQTENIIRSKTPTGPELDTSYKGYMKLLGECSSSIDSVKRLEHKLKEEEESLPGFVNLHSTETQTAGVIDRWELLQAQALSKELRMKQNLQKWQQFNSDLNSIWAWLGDTEEELEQLQRLELSTDIQTIELQIKKLKELQKAVDHRKAIILSINLCSPEFTQADSKESRDLQDRLSQMNGRWDRVCSLLEEWRGLLQDALMQCQGFHEMSHGLLLMLENIDRRKNEIVPIDSNLDAEILQDHHKQLMQIKHELLESQLRVASLQDMSCQLLVNAEGTDCLEAKEKVHVIGNRLKLLLKEVSRHIKELEKLLDVSSSQQDLSSWSSADELDTSGSVSPTSGRSTPNRQKTPRGKCSLSQPGPSVSSPHSRSTKGGSDSSLSEPGPGRSGRGFLFRVLRAALPLQLLLLLLIGLACLVPMSEEDYSCALSNNFARSFHPMLRYTNGPPPL

SEQ ID NO: 1850 - protein, 3032 aa, Homo sapiens
MATSRGASRCPRDIANVMQRLQDEQEIVQKRTFTKWINSHLAKRKPPMVVDDLFEDMKDGVKLLALLEVLSGQKLPCEQGRRMKRIHAVANIGTALKFLEGRKIKLVNINSTDIADGRPSIVLGLMWTIILYFQIEELTSNLPQLQSLSSSASSVDSIVSSETPSPPSKRKVTTKIQGNAKKALLKWVQYTAGKQTGIEVKDFGKSWRSGVAFHSVIHAIRPELVDLETVKGRSNRENLEDAFTIAETELGIPRLLDPEDVDVDKPDEKSIMTYVAQFLKHYPDIHNASTDGQEDDREDRVIFKEMKVWIEQFERDLTRAQMVESNLQDKYQSFKHFRVQYEMKRKQIEHLIQPLHRDGKLSLDQALVKQSWDRVTSRLFDWHIQLDKSLPAPLGTIGAWLYRAEVALREEITVQQVHEETANTIQRKLEQHKDLLQNTDAHKRAFHEIYRTRSVNGIPVPPDQLEDMAERFHFVSSTSELHLMKMEFLELKYRLLSLLVLAESKLKSWIIKYGRRESVEQLLQNYVSFIENSKFFEQYEVTYQILKQTAEMYVKADGSVEEAENVMKFMNETTAQWRNLSVEVRSVRSMLEEVISNWDRYGNTVASLQAWLEDAEKMLNQSENAKKDFFRNLPHWIQQHTAMNDAGNFLIETCDEMVSRDLKQQLLLLNGRWRELFMEVKQYAQADEMDRMKKEYTDCVVTLSAFATEAHKKLSEPLEVSFMNVKLLIQDLEDIEQRVPVMDAQYKIITKTAHLITKESPQEEGKEMFATMSKLKEQLTKVKECYSPLLYESQQLLIPLEELEKQMTSFYDSLGKINEIITVLEREAQSSALFKQKHQELLACQENCKKTLTLIEKGSQSVQKFVTLSNVLKHFDQTRLQRQIADIHVAFQSMVKKTGDWKKHVETNSRLMKKFEESRAELEKVLRIAQEGLEEKGDPEELLRRHTEFFSQLDQRVLNAFLKACDELTDILPEQEQQGLQEAVRKLHKQWKDLQGEAPYHLLHLKIDVEKNRFLASVEECRTELDRETKLMPQEGSEKIIKEHRVFFSDKGPHHLCEKRLQLIEELCVKLPVRDPVRDTPGTCHVTLKELRAAIDSTYRKLMEDPDKWKDYTSRFSEFSSWISTNETQLKGIKGEAIDTANHGEVKRAVEEIRNGVTKRGETLSWLKSRLKVLTEVSSENEAQKQGDELAKLSSSFKALVTLLSEVEKMLSNFGDCVQYKEIVKNSLEELISGSKEVQEQAEKILDTENLFEAQQLLLHHQQKTKRISAKKRDVQQQIAQAQQGEGGLPDRGHEELRKLESTLDGLERSRERQERRIQVTLRKWERFETNKETVVRYLFQTGSSHERFLSFSSLESLSSELEQTKEFSKRTESIAVQAENLVKEASEIPLGPQNKQLLQQQAKSIKEQVKKLEDTLEEDIKTMEMVKTKWDHFGSNFETLSVWITEKEKELNALETSSSAMDMQISQIKVTIQEIESKLSSIVGLEEEAQSFAQFVTTGESARIKAKLTQIRRYGEELREHAQCLEGTILGHLSQQQKFEENLRKIQQSVSEFEDKLAVPIKICSSATETYKVLQEHMDLCQALESLSSAITAFSASARKVVNRDSCVQEAAALQQQYEDILRRAKERQTALENLLAHWQRLEKELSSFLTWLERGEAKASSPEMDISADRVKVEGELQLIQALQNEVVSQASFYSKLLQLKESLFSVASKDDVKMMKLHLEQLDERWRDLPQIINKRINFLQSVVAEHQQFDELLLSFSVWIKLFLSELQTTSEISIMDHQVALTRHKDHAAEVESKKGELQSLQGHLAKLGSLGRAEDLHLLQGKAEDCFQLFEEASQVVERRQLALSHLAEFLQSHASLSGILRQLRQTVEATNSMNKNESDLIEKDLNDALQNAKALESAAVSLDGILSKAQYHLKIGSSEQRTSCRATADQLCGEVERIQNLLGTKQSEADALAVLKKAFQDQKEELLKSIEDIEERTDKERLKEPTRQALQQRLRVFNQLEDELNSHEHELCWLKDKAKQIAQKDVAFAPEVDREINRLEVTWDDTKRLIHENQGQCCGLIDLMREYQNLKSAVSKVLENASSVIVTRTTIKDQEDLKWAFSKHETAKNKMNYKQKDLDNFTSKGKHLLSELKKIHSSDFSLVKTDMESTVDKWLDVSEKLEENMDRLRVSLSIWDDVLSTRDEIEGWSNNCVPQMAENISNLDNHLRAEELLKEFESEVKNKALRLEELHSKVNDLKELTKNLETPPDLQFIEADLMQKLEHAKEITEVAKGTLKDFTAQSTQVEKFINDITTWFTKVEESLMNCAQNETCEALKKVKDIQKELQSQQSNISSTQENLNSLCRKYHSAELESLGRAMTGLIKKHEAVSQLCSKTQASLQESLEKHFSESMQEFQEWFLGAKAAAKESSDRTGDSKVLEAKLHDLQNILDSVSDGQSKLDAVTQEGQTLYAHLSKQIVSSIQEQITKANEEFQAFLKQCLKDKQALQDCASELGSFEDQHRKLNLWIHEMEERFNTENLGESKQHIPEKKNEVHKVEMFLGELLAARESLDKLSQRGQLLSEEGHGAGQEGRLCSQLLTSHQNLLRMTKEKLRSCQVALQEHEALEEALQSMWFWVKAIQDRLACAESTLGSKDTLEKRLSQIQDILLMKGEGEVKLNMAIGKGEQALRSSNKEGQRVIQTQLETLKEVWADIMSSSVHAQSTLESVISQWNDYVERKNQLEQWMESVDQKIEHPLQPQPGLKEKFVLLDHLQSILSEAEDHTRALHRLIAKSRELYEKTEDESFKDTAQEELKTQFNDIMTVAKEKMRKVEEIVKDHLMYLDAVHEFTDWLHSAKEELHRWSDMSGDSSATQKKLSKIKELIDSREIGASRLSRVESLAPEVKQNTTASGCELMHTEMQALRADWKQWEDSVFQTQSCLENLVSQMALSEQEFSGQVAQLEQALEQFSALLKTWAQQLTLLEGKNTDEEIVECWHKGQEILDALQKAEPRTEDLKSQLNELCRFSRDLSTYSGKVSGLIKEYNW

SEQ ID NO: 1851 - protein, 494 aa, Homo sapiens
MATSRGASRCPRDIANVMQRLQDEQEIVQKRTFTKWINSHLAKRKPPMVVDDLFEDMKDGVKLLALLEVLSGQKLPCEQGRRMKRIHAVANIGTALKFLEGRKSMHRGSPIKLVNINSTDIADGRPSIVLGLMWTIILYFQIEELTSNLPQLQSLSSSASSVDSIVSSETPSPPSKRKVTTKIQGNAKKALLKWVQYTAGKQTGIEVKDFGKSWRSGVAFHSVIHAIRPELVDLETVKGRSNRENLEDAFTIAETELGIPRLLDPEDVDVDKPDEKSIMTYVAQFLKHYPDIHNASTDGQEDDEILPGFPSFANSVQNFKREDRVIFKEMKVWIEQFERDLTRAQMVESNLQDKYQSFKHFRVQYEMKRKQIEHLIQPLHRDGKLSLDQALVKQSWDRVTSRLFDWHIQLDKSLPAPLGTIGAWLYRAEVALREEITVQQVHEETANTIQRKLEQHKKIEAIRKELPPAPTATSTHLRNCICARIHALHFCYYG

SEQ ID NO: 1852 - protein, 58 aa, Homo sapiens
VIRGWSFDLLLLIAFHVIMIIYSGSTPVTNNVTEMKQIQRKNIFKSFEKKCYSNLRHV

SEQ ID NO: 1853 - protein, 257 aa, Homo sapiens
LPLRTHCSRRARSASSVLPAPPSSGPRSLRDGTEFRRHRRPAGAPAPRPRLSSEQPAPRDAMRTLACLLLLGCGYLAHVLAEEAEIPREVIERLARSQIHSIRDLQRLLEIDSVGSEDSLDTSLRAHGVHATKHVPEKRPLPIRRKRSIEEAVPAVCKTRTVIYEIPRSQVDPTSANFLIWPPCVEVKRCTGCCNTSSVKCQPSRVHHRSVKVAKVEYVRKKPKLKEVQVRLEEHLECACATTSLNPDYREEDTDVR

SEQ ID NO: 1854 - protein, 272 aa, Homo sapiens
LPLRTHCSRRARSASSVLPAPPSSGPRSLRDGTEFRRHRRPAGAPAPRPRLSSEQPAPRDAMRTLACLLLLGCGYLAHVLAEEAEIPREVIERLARSQIHSIRDLQRLLEIDSVGSEDSLDTSLRAHGVHATKHVPEKRPLPIRRKRSIEEAVPAVCKTRTVIYEIPRSQVDPTSANFLIWPPCVEVKRCTGCCNTSSVKCQPSRVHHRSVKVAKVEYVRKKPKLKEVQVRLEEHLECACATTSLNPDYREEDTGRPRESGKKRKRKRLKPT

SEQ ID NO: 1855 - protein, 458 aa, Homo sapiens
LPLGGPLVAGRRRRLRARGSQQDAPALQEAEVRGPERAQPARGRMTKARLFRLWLVLGSVFMILLIIVYWDSAGAAHFYLHTSFSRPHTGPPLPTPGPDRDRELTADSDVDEFLDKFLSAGVKQSDLPRKETEQPPAPGSMEESVRGYDWSPRDARRSPDQGRQQAERRSVLRGFCANSSLAFPTKERAFDDIPNSELSHLIVDDRHGAIYCYVPKVACTNWKRVMIVLSGSLLHRGAPYRDPLRIPREHVHNASAHLTFNKFWRRYGKLSRHLMKVKLKKYTKFLFVRDPFVRLISAFRSKFELENEEFYRKFAVPMLRLYANHTSLPASAREAFRAGLKVSFANFIQYLLDPHTEKLAPFNEHWRQVYRLCHPCQIDYDFVGKLETLDEDAAQLLQLLQVDRQLRFPPSYRNRTASSWEEDWFAKIPLAWRQQLYKLYEADFVLFGYPKPENLLRD

SEQ ID NO: 1856 - protein, 365 aa, Homo sapiens
LPLLPKSSTIEEEENMSGHKCSYPWDLQDRYAQDKSVVNKMQQKYWETKQAFIKATGKKEDEHVVASDADLDAKLELFHSIQRTCLDLSKAIVLYQKRICFLSQEENELGKFLRSQGFQDKTRAGKMMQATGKALCFSSQQRLALRNPLCRFHQEVETFRHRAISDTWLTVNRMEQCRTEYRGALLWMKDVSQELDPDLYKQMEKFRKVQTQVRLAKKNFDKLKMDVCQKVDLLGASRCNLLSHMLATYQTTLLHFWEKTSHTMAAIHESFKGYQPYEFTTLKVWKLEGPLENLEKSKVLFISQAKSIAESIIIPGLRMLKRELCPQQSLFLSFFLSFFFFFFFFTASGFNTMRIYCNPKARIEP

SEQ ID NO: 1857 - protein, 148 aa, Homo sapiens
VSVVLASAWAGVRAQDGAAVVRNPGLSASQEATPGANMSSGTELLWPGAALLVLLGVAASLCVRCSRPGAKRSEKIYQQRSLREDQQSFTGSRTYSLVGQAWPGPLADMAPTRKDKLLQFYPSLEDPASSRYQNFSKGSRHGSEEAYI

SEQ ID NO: 1858 - protein, 280 aa, Homo sapiens
VSVVLASAWAGVRAQDGAAVVRNPGLSASQEATPGANMSSGTELLWPGAALLVLLGVAASLCVRCSRPGAKRSEKIYQQRSLREDQQSFTGSRTYSLVGQAWPGPLADMAPTRKDKLLQFYPSLEDPASSRYQNFSKGSRHGSEEAYIDPIAMEYYNWGRFSKPPEDDDANSYENVLICKQKTTETGAQQEGIGGLCRGDLSLSLALKTGPTSGLCPSASPEEDEESEDYQNSASIHQWRESRKVMGQLQREASPGPVGSPDEEDGEPDYVNGEVAATEA

SEQ ID NO: 1859 - protein, 272 aa, Homo sapiens
LQQFLETHSRGPRLHSPGHASQEATPGANMSSGTELLWPGAALLVLLGVAASLCVRCSRPGAKRSEKIYQQRSLREDQQSFTGSRTYSLVGQAWPGPLADMAPTRKDKLLQFYPSLEDPASSRYQNFSKGSRHGSEEAYIDPIAMEYYNWGRFSKPPEDDDANSYENVLICKQKTTETGAQQEGIGGLCRGDLSLSLALKTGPTSGLCPSASPEEDEESEDYQNSASIHQWRESRKVMGQLQREASPGPVGSPDEEDGEPDYVNGEVAATEA

SEQ ID NO: 1860 - protein, 455 aa, Homo sapiens
MKAIGSRLAVITQNIANLGTGIIISFIYGWQLTLLLLAIVPIIAIAGVVEMKMLSGQALKDKKELEGSGKIATEAIENFRTVVSLTQEQKFEHMYAQSLQVPYRNSLRKAHIFGITFSFTQAMMYFSYAGCFRFGAYLVAHKLMSFEDVLLVFSAVVFGAMAVGQVSSFAPDYAKAKISAAHIIMIIEKTPLIDSYSTEGLMPNTLEGNVTFGEVVFNYPTRPDIPVLQGLSLEVKKGQTLALVGSSGCGKSTVVQLLERFYDPLAGKVLLDGKEIKRLNVQWLRAHLGIVSQEPILFDCSIAENIAYGDNSRVVSQEEIVRAAKEANIHAFIESLPNKYSTKVGDKGTQLSGGQKQRIAIARALVRQPHILLLDEATSALDTESEKVVQEALDKAREGRTCIVIAHRLSTIQNADLIVVFQNGRVKEHGTHQQLLAQKGIYFSMVSVQAGTKRQ

SEQ ID NO: 1861 - protein, 105 aa, Homo sapiens
MAPPTELLARPERGSAPGSRAMGRLVAVGLLGIALALLGERLLALRNRLKASREVESVDLPHCHLIKGIEAGSEDIDILPNGLAFFSVVSVFFLPQIQQRRYKGI

SEQ ID NO: 1862 - protein, 518 aa, Homo sapiens
VPSAAARLSPAVSAPLPGPGSISLSPHPSLCHMGPLSPARTLRLWGPRSLGVALGVFMTIGFALQLLGGPFQRRLPGLQLRQPSAPSLRPALPSCPPRQRLVFLKTHKSGSSSVLSLLHRYGDQHGLRFALPARYQFGYPKLFQASRVKGYRPQGGGTQLPFHILCHHMRFNLKEVLQVMPSDSFFFSIVRDPAALARSAFSYYKSTSSAFRKSPSLAAFLANPRGFYRPGARGDHYARNLLWFDFGLPFPPEKRAKRGNIHPPRDPNPPQLQVLPSGAGPRAQTLNPNALIHPVSTVTDHRSQISSPASFDLGSSSFIQWGLAWLDSVFDLVMVAEYFDESLVLLADALCWGLDDVVGFMHNAQAGHKQGLSTVSNSGLTAEDRQLTARARAWNNLDWALYVHFNRSLWARIEKYGQGRLQTAVAELRARREALAKHCLVGGEASDPKYITDRRFRPFQFGSAKVLGYILRSGLSPQDQEECERLATPELQYKDKLDAKQFPPTVSLPLKTSRPLSP

SEQ ID NO: 1863 - protein, 216 aa, Homo sapiens
LGNIARPHLHEIKKNPTSREAGGVGARPLGPSYRVSGEQWRQPHAPLFLLGPSSPDSVLRPRRYPQVPDEKDLMTQLRQVLESRLQRPLPEDLAEALASGVILCQLANQLRPRSVPFIHVPSPAVPKLSALKARKNVESFLEACRKMGVPEADLCSPSDLLQGTARGLRTALEAVKRVGGKALPPLWPPSGLGGFVVFYVVLMLLLYVTYTRLLGS

SEQ ID NO: 1864 - protein, 105 aa, Homo sapiens
LPQGYGWNLLYGSLLLGLVGGVCTLGAGLYARASFLTFLLVSGSLASVLISFVAVGPRDIRLTPRPGPNGSSLPPRFGHFTGFNSSTLKDNLGGELGAAVAGISG

SEQ ID NO: 1865 - protein, 448 aa, Homo sapiens
LCLAAGPRALSRRPTRPPPAAEFLQLSSRRQSRTNRQSQGTSENFRMQMSPALTCLVLGLALVFGEGSAVHHPPSYVAHLASDFGVRVFQQVAQASKDRNVVFSPYGVASVLAMLQLTTGGETQQQIQAAMGFKIDDKGMAPALRHLYKELMGPWNKDEISTTDAIFVQRDLKLVQGFMPHFFRLFRSTVKQVDFSEVERARFIINDWVKTHTKGMISNLLGKGAVDQLTRLVLVNALYFNGQWKTPFPDSSTHRRLFHKSDGSTVSVPMMAQTNKFNYTEFTTPDGHYYDILELPYHGDTLSMFIAAPYEKEVPLSALTNILSAQLISHWKGNMTRLPRLLVLPKFSLETEVDLRKPLENLGMTDMFRQFQADFTSLSDQEPLHVAQALQKVKIEVNESGTVASSSTAVIVSARMAPEEIIMDRPFLFVVRHNPTGTVLFMGQVMEP

SEQ ID NO: 1866 - protein, 630 aa, Homo sapiens
LLLNVPLLVSGSLLVMKALRLSASALFCLLLINGLGAAPPGRPEAQPPPLSSEHKEPVAGDAVPGPKDGSAPEVRGARNSEPQDEGELFQGVDPRALAAVLLQALDRPASPPAPSGSQQGPEEEAAEALLTETVRSQTHSLPAPESPEPAAPPRPQTPENGPEASDPSEELEALASLLQELRDFSPSSAKRQQETAAAETETRTHTLTRVNLESPGPERVWRASWGEFQARVPERAPLPPPAPSQFQARMPDSGPLPETHKFGEGVSSPKTHLGEALAPLSKAYQGVAAPFPKARRPESALLGGSEAGERLLQQGLAQVEAGRRQAEATRQAAAQEERLADLASDLLLQYLLQGGARQRGLGGRGLQEAAEERESAREEEEAEQERRGGEERVGEEDEEAAEAEAEAEEAERARQNALLFAEEEDGEAGAEDKRSQEETPGHRRKEAEGTEEGGEEEDDEEMDPQTIDSLIELSTKLHLPADDVVSIIEEVEEKRKRKKNAPPEPVPPPRAAPAPTHVRSPQPPPPAPAPARDELPDWNEVLPPWDREEDEVYPPGPYHPFPNYIRPRTLQPPSALRRRHYHHALPPSRHYPGREAQARRAQEEAEAEERRLQEQEELENYIEHVLLRRP

SEQ ID NO: 1867 - protein, 103 aa, Homo sapiens
MDQLTVILIKELLPKGSKEEQRDYVFYLAVGNYRLKEYEKALKYVRGLLQTEPQNNQAKELERLIDKAMKKDGLVGMAIVGGMALGVAGLAGLIGLAVSKSKS

SEQ ID NO: 1868 - protein, 96 aa, Homo sapiens
LIEELLPKGSKEEQRDYVFYLAVGNYRLKEYEKALKYVRGLLQTEPQNNQAKELERLIDKAMKKDGLVGMAIVGGMALGVAGLAGLIGLAVSKSKS

SEQ ID NO: 1869 - protein, 165 aa, Homo sapiens
LKIVNPTLDSLTLEWDPPSHPNGILTEYTLKYQPINSTHELGPLVDLKIPANKTRWTLKNLNFSTRYKFYFYAQTSAGSGSQITEEAVTTVDEAMASRQVDIATQGWFIGLMCAVALLILILLIVCFIRRNKGGKYPVKEKEDAHADPEIQPMKEDDGTFGEYRQ

SEQ ID NO: 1870 - protein, 300 aa, Homo sapiens
VGLCFSYRMREWWVQVGLLAVPLLAAYLHIPPPQLSPALHSWKSSGKFFTYKGLRIFYQDSVGVVGSPEIVVLLHGFPTSSYDWYKIWEGLTLRFHRVIALDFLGFGFSDKPRPHHYSIFEQASIVEALLRHLGLQNRRINLLSHDYGDIVAQELLYRYKQNRSGRLTIKSLCLSNGGIFPETHRPLLLQKLLKDGGVLSPILTRLMNFFVFSRGLLQYINQRKKFRRRWVGALASVTIPIHFIYGPLDPVNPYPEFLELYRKTLPRSTVSILDDHISHYPQLEDPMGFLNAYMGFINSF

SEQ ID NO: 1871 - protein, 367 aa, Homo sapiens
LRPRCWPALHGCGLCGARCSATLRRAAWDNAAMVRRDRLRRMREWWVQVGLLAVPLLAAYLHIPPPQLSPALHSWKSSGKFFTYKGLRIFYQDSVGVVGSPEIVVLLHGFPTSSYDWYKIWEGLTLRFHRVIALDFLGFGFSDKPRPHHYSIFEQASIVEALLRHLGLQNRRINLLSHDYGDIVAQELLYRYKQNRSGRLTIKSLCLSNGGIFPETHRPLLLQKLLKDGGVLSPILTRLMNFFVFSRGLTPVFGPYTRPSESELWDMWAGIRNNDGNLVIDSLLQYINQRKKFRRRWVGALASVTIPIHFIYGPLDPVNPYPEFLELYRKTLPRSTVSILDDHISHYPQLEDPMGFLNAYMGFINSF

SEQ ID NO: 1872 - protein, 917 aa, Homo sapiens
LPPGSLGAWEEKEPGGALRGSHLRIHWLLLRPGLLASTEGCQTWGSLLRASGWGNHRLPQTLTQDPPGGSWDRGWAKMVSVFRSEEMCLSQLFLQVEAAYCCVAELGELGLVQFKDLNMNVNSFQRKFVNEVRRCESLERILRFLEDEMQNEIVVQLLEKSPLTPLPREMITLETVLEKLEGELQEANQNQQALKQSFLELTELKYLLKKTQDFFETETNLADDFFTEDTSGLLELKAVPAYMTGKLGFIAGVINRERMASFERLLWRICRGNVYLKFSEMDAPLEDPVTKEEIQKNIFIIFYQGEQLRQKIKKICDGFRATVYPCPEPAVERREMLESVNVRLEDLITVITQTESHRQRLLQEAAANWHSWLIKVQKMKAVYHILNMCNIDVTQQCVIAEIWFPVADATRIKRALEQGMELSGSSMAPIMTTVQSKTAPPTFNRTNKFTAGFQNIVDAYGVGSYREINPAPYTIITFPFLFAVMFGDCGHGTVMLLAALWMILNERRLLSQKTDNEIWNTFFHGRYLILLMGIFSIYTGLIYNDCFSKSLNIFGSSWSVQPMFRNGTWNTHVMEESLYLQLDPAIPGVYFGNPYPFGIDPIWNLASNKLTFLNSYKMKMSVILGIVQMVFGVILSLFNHIYFRRTLNIILQFIPEMIFILCLFGYLVFMIIFKWCCFDVHVSQHAPSILIHFINMFLFNYSDSSNAPLYKHQQEVQSFFVVMALISVPWMLLIKPFILRASHRKSQLQASRIQEDATENIEGDSSSPSSRSGQRTSADTHGALDDHGEEFNFGDVFVHQAIHTIEYCLGCISNTASYLRLWALSLAHAQLSEVLWTMVMNSGLQTRGWGGIVGVFIIFAVFAVLTVAILLIMEGLSAFLHALRLHWVEFQNKFYVGDGYKFSPFSFKHILDGTAEE

SEQ ID NO: 1873 - protein, 853 aa, Homo sapiens
LCRVPAADRGWAKMVSVFRSEEMCLSQLFLQVEAAYCCVAELGELGLVQFKDLNMNVNSFQRKFVNEVRRCESLERILRFLEDEMQNEIVVQLLEKSPLTPLPREMITLETVLEKLEGELQEANQNQQALKQSFLELTELKYLLKKTQDFFETETNLADDFFTEDTSGLLELKAVPAYMTGKLGFIAGVINRERMASFERLLWRICRGNVYLKFSEMDAPLEDPVTKEEIQKNIFIIFYQGEQLRQKIKKICDGFRATVYPCPEPAVERREMLESVNVRLEDLITVITQTESHRQRLLQEAAANWHSWLIKVQKMKAVYHILNMCNIDVTQQCVIAEIWFPVADATRIKRALEQGMELSGSSMAPIMTTVQSKTAPPTFNRTNKFTAGFQNIVDAYGVGSYREINPAPYTIITFPFLFAVMFGDCGHGTVMLLAALWMILNERRLLSQKTDNEIWNTFFHGRYLILLMGIFSIYTGLIYNDCFSKSLNIFGSSWSVQPMFRNGTWNTHVMEESLYLQLDPAIPGVYFGNPYPFGIDPIWNLASNKLTFLNSYKMKMSVILGIVQMVFGVILSLFNHIYFRRTLNIILQFIPEMIFILCLFGYLVFMIIFKWCCFDVHVSQHAPSILIHFINMFLFNYSDSSNAPLYKHQQEVQSFFVVMALISVPWMLLIKPFILRASHRKSQLQASRIQEDATENIEGDSSSPSSRSGQRTSADTHGALDDHGEEFNFGDVFVHQAIHTIEYCLGCISNTASYLRLWALSLAHAQLSEVLWTMVMNSGLQTRGWGGIVGVFIIFAVFAVLTVAILLIMEGLSAFLHALRLHWVEFQNKFYVGDGYKFSPFSFKHILDGTAEE

SEQ ID NO: 1874 - protein, 898 aa, Homo sapiens
VPGAGEPVLRSCAECLLQSHFQFLHDVASEDRNERNVKQLFSEEKKRERHSQDRGWAKMVSVFRSEEMCLSQLFLQVEAAYCCVAELGELGLVQFKDLNMNVNSFQRKFVNEVRRCESLERILRFLEDEMQNEIVVQLLEKSPLTPLPREMITLETVLEKLEGELQEANQNQQALKQSFLELTELKYLLKKTQDFFETETNLADDFFTEDTSGLLELKAVPAYMTGKLGFIAGVINRERMASFERLLWRICRGNVYLKFSEMDAPLEDPVTKEEIQKNIFIIFYQGEQLRQKIKKICDGFRATVYPCPEPAVERREMLESVNVRLEDLITVITQTESHRQRLLQEAAANWHSWLIKVQKMKAVYHILNMCNIDVTQQCVIAEIWFPVADATRIKRALEQGMELSGSSMAPIMTTVQSKTAPPTFNRTNKFTAGFQNIVDAYGVGSYREINPAPYTIITFPFLFAVMFGDCGHGTVMLLAALWMILNERRLLSQKTDNEIWNTFFHGRYLILLMGIFSIYTGLIYNDCFSKSLNIFGSSWSVQPMFRNGTWNTHVMEESLYLQLDPAIPGVYFGNPYPFGIDPIWNLASNKLTFLNSYKMKMSVILGIVQMVFGVILSLFNHIYFRRTLNIILQFIPEMIFILCLFGYLVFMIIFKWCCFDVHVSQHAPSILIHFINMFLFNYSDSSNAPLYKHQQEVQSFFVVMALISVPWMLLIKPFILRASHRKSQLQASRIQEDATENIEGDSSSPSSRSGQRTSADTHGALDDHGEEFNFGDVFVHQAIHTIEYCLGCISNTASYLRLWALSLAHAQLSEVLWTMVMNSGLQTRGWGGIVGVFIIFAVFAVLTVAILLIMEGLSAFLHALRLHWVEFQNKFYVGDGYKFSPFSFKHILDGTAEE

SEQ ID NO: 1875 - protein, 152 aa, Homo sapiens
MMEALGFLKLEVNGPMVTVALSVALLALLKWYSTSAFSRLEKLGLRHPKPSPFIGNLTFFRQGFWESQMELRKLYGPLCGYYLGRRMFIVISEPDMIKQVLVENFSNFTNRMPQSIMPNSRHHVASRGMWPGGRRLACYLHPFRMAEGIAEV

SEQ ID NO: 1876 - protein, 164 aa, Homo sapiens
VRRKVRKNMAWPNVFQRGSLLSQFSHHHVVVFLLTFFSYSLLHASRKTFSNVKVSISEQWTPSAFNTSVELPVEIWSSNHLFPSAEKATLFLGTLDTIFLFSYAVGLFISGIVGDRLNLRWVLSFGMCSSALVTRSCFWSLECLCFGGQHFGSVPSFFCSSVWL

SEQ ID NO: 1877 - protein, 74 aa, Homo sapiens
VRRKVRKNMAWPNVFQRGSLLSQFSHHHVVVFLLTFFSYSLLHASRKTFSNVKVSISEQWTPSAFNTSVELPVE

SEQ ID NO: 1878 - protein, 502 aa, Homo sapiens
LVETEGLKTTEQTDGQEAIEKLLRLFPFSLHIQPYPSGPPESLSGLSLRLVKKEPRQLELTWAGSRPRSPGANLTYELHVLNQDEERYQMVLEPRVLLTELQPDTTYIVRVRMLTPLGPGPFSPDHEFRTSPPVSRGLTGGEIVAVIFGLLLGAALLLGILVFRSRRAQRQRQQRQRDRATDVDREDKLWLKPYVDLQAYEDPAQGALDFTRELDPAWLMVDTVIGEGEFGEVYRGTLRLPSQDCKTVAIKTLKDTSPGGQWWNFLREATIMGQFSHPHILHLEGVVTKRKPIMIITEFMENGALDAFLRGGKIPIRWTAPEAIAHRIFTTASDVWSFGIVMWEVLSFGDKPYGEMSNQEVMKSIEDGYRLPPPVDCPAPLYELMKNCWAYDRARRPHFQKLQAHLEQLLANPHSLRTIANFDPRMTLRLPSLSGSDGIPYRTVSEWLESIRMKRYILHFHSAGLDTMECVLELTAEDLTQMGITLPGHQKRILCSIQGFKD

SEQ ID NO: 1879 - protein, 71 aa, Homo sapiens
MRCIAVFVGINHASAKLDFANNVQLSLTLAALSLGLWWTFDRSRSGLGLGITIAFLATLITQFLVYNGVYQ

SEQ ID NO: 1880 - protein, 1007 aa, Homo sapiens
LSAAGQAAGMGPPLPLLLLLLLLLPPRVLPAAPSSVPRGRQLPGRLDGVFGRCQKVPAMDFYRYEVSPVALQRLRVALQKLSGTGFTWQDDYTQYVMDQELADLPKTYLRRPEASSPARPSKHSVGSERRYSREGGAALANALRRHLPFLEALSQAPASDVLARTHTAQDRPPAEGDDRFSESILTYVAHTSALTYPPGSRTQLREDLLPRTLGQLQPDELSPKVDSGVDRHHLMAALSAYAAQRPPAPPGEGSLEPQYLLRAPSRMPRPLLAPAAPQKWPSPLGDSEDPSSTGDGARIHTLLKDLQRQPAEVRGLSGLELDGMAELMAGLMQGVDHGVARGSPGRAALGESGEQADGPKATLRGDSFPDDGVQDDDDRLYQEVHRLSATLGGLLQDHGSRLLPGALPFARPLDMERKKSEHPESSLSSEEETAGVENVKSQTYSKDLLGQQPHSEPGAAAFGELQNQMPGPSKEEQSLPAGAQEALSDGLQLEVQPSEEEARGYIVTDRDPLRPEEGRRLVEDVARLLQVPSSAFADVEVLGPAVTFKVSANVQNVTTEDVEKATVDNKDKLEETSGLKILQTGVGSKSKLKFLPPQAEQEDSTKFIALTLVSLACILGVLLASGLIYCLRHSSQHRLKEKLSGLGGDPGADATAAYQELCRQRMATRPPDRPEGPHTSRISSVSSQFSDGPIPSPSARSSASSWSEEPVQSNMDISTGHMILSYMEDHLKNKNRLEKEWEALCAYQAEPNSSFVAQREENVPKNRSLAVLTYDHSRVLLKAENSHSHSDYINASPIMDHDPRNPAYIATQGPLPATVADFWQMVWESGCVVIVMLTPLAENGVRQCYHYWPDEGSNLYHIYEVNLVSEHIWCEDFLVRSFYLKNLQTNETRTVTQFHFLSWYDRGVPSSSRSLLDFRRKVNKCYRGRSCPIIVHCSDGAGRSGTYVLIDMVLNKMAKGAKEIDIAATLEHLRDQRPGMVQTKEQFEFALTAVAEEVNAILKALPQ

SEQ ID NO: 1881 - protein, 1011 aa, Homo sapiens
LGPDSAASRRLPRGHGLSAAGQAAGMGPPLPLLLLLLLLLPPRVLPAAPSSVPRGRQLPGRLGCLLEEGLCGASEACVNDGVFGRCQKVPAMDFYRYEVSPVALQRLRVALQKLSGTGFTWQDDYTQYVMDQELADLPKTYLRRPEASSPARPSKHSVGSERRYSREGGAALANALRRHLPFLEALSQAPASDVLARTHTAQDRPPAEGDDRFSESILTYVAHTSALTYPPGSRTQLREDLLPRTLGQLQPDELSPKVDSGVDRHHLMAALSAYAAQRPPAPPGEGSLEPQYLLRAPSRMPRPLLAPAAPQKWPSPLGDSEDPSSTGDGARIHTLLKDLQRQPAEVRGLSGLELDGMAELMAGLMQGVDHGVARGSPGRAALGESGEQADGPKATLRGDSFPDDGVQDDDDRLYQEVHRLSATLGGLLQDHGSRLLPGALPFARPLDMERKKSEHPESSLSSEEETAGVENVKSQTYSKDLLGQQPHSEPGAAAFGELQNQMPGPSKEEQSLPAGAQEALSDGLQLEVQPSEEEARGYIVTDREVLGPAVTFKVSANVQNVTTEDVEKATVDNKDKLEETSGLKILQTGVGSKSKLKFLPPQAEQEDSTKFIALTLVSLACILGVLLASGLIYCLRHSSQHRLKEKLSGLGGDPGADATAAYQELCRQRMATRPPDRPEGPHTSRISSVSSQFSDGPIPSPSARSSASSWSEEPVQSNMDISTGHMILSYMEDHLKNKNRLEKEWEALCAYQAEPNSSFVAQREENVPKNRSLAVLTYDHSRVLLKAENSHSHSDYINASPIMDHDPRNPAYIATQGPLPATVADFWQMVWESGCVVIVMLTPLAENGVRQCYHYWPDEGSNLYHIYEVNLVSEHIWCEDFLVRSFYLKNLQTNETRTVTQFHFLSWYDRGVPSSSRSLLDFRRKVNKCYRGRSCPIIVHCSDGAGRSGTYVLIDMVLNKMAKGAKEIDIAATLEHLRDQRPGMVQTKEQFEFALTAVAEEVNAILKALPQ

SEQ ID NO: 1882 - protein, 1002 aa, Homo sapiens
LGPDSAASRRLPRGHGLSAAGQAAGMGPPLPLLLLLLLLLPPRVLPAAPSSVPRGRQLPGRLGCLLEEGLCGASEACVNGFTWQDDYTQYVMDQELADLPKTYLRRPEASSPARPSKHSVGSERRYSREGGAALANALRRHLPFLEALSQAPASDVLARTHTAQDRPPAEGDDRFSESILTYVAHTSALTYPPGSRTQLREDLLPRTLGQLQPDELSPKVDSGVDRHHLMAALSAYAAQRPPAPPGEGSLEPQYLLRAPSRMPRPLLAPAAPQKWPSPLGDSEDPSSTGDGARIHTLLKDLQRQPAEVRGLSGLELDGMAELMAGLMQGVDHGVARGSPGRAALGESGEQADGPKATLRGDSFPDDGVQDDDDRLYQEVHRLSATLGGLLQDHGSRLLPGALPFARPLDMERKKSEHPESSLSSEEETAGVENVKSQTYSKDLLGQQPHSEPGAAAFGELQNQMPGPSKEEQSLPAGAQEALSDGLQLEVQPSEEEARGYIVTDRDPLRPEEGRRLVEDVARLLQVPSSAFADVEVLGPAVTFKVSANVQNVTTEDVEKATVDNKDKLEETSGLKILQTGVGSKSKLKFLPPQAEQEDSTKFIALTLVSLACILGVLLASGLIYCLRHSSQHRLKEKLSGLGGDPGADATAAYQELCRQRMATRPPDRPEGPHTSRISSVSSQFSDGPIPSPSARSSASSWSEEPVQSNMDISTGHMILSYMEDHLKNKNRLEKEWEALCAYQAEPNSSFVAQREENVPKNRSLAVLTYDHSRVLLKAENSHSHSDYINASPIMDHDPRNPAYIATQGPLPATVADFWQMVWESGCVVIVMLTPLAENGVRQCYHYWPDEGSNLYHIYEVNLVSEHIWCEDFLVRSFYLKNLQTNETRTVTQFHFLSWYDRGVPSSSRSLLDFRRKVNKCYRGRSCPIIVHCSDGAGRSGTYVLIDMVLNKMAKGAKEIDIAATLEHLRDQRPGMVQTKEQFEFALTAVAEEVNAILKALPQ

SEQ ID NO: 1883 - protein, 894 aa, Homo sapiens
VMTPPSRAEAGVRRSRVPSEGRWRGAEPPGISASTQPASAGRAARHCGAMSGARGEGPEAGAGGAGGRAAPENPGGVLSVELPGLLAQLARSFALLLPVYALGYLGLSFSWVLLALALLAWCRRSRGLKALRLCRALALLEDEERVVRLGVRACDLPAWVHFPDTERAEWLNKTVKHMWPFICQFIEKLFRETIEPAVRGANTHLSTFSFTKVDVGQQPLRINGVKVYTENVDKRQIILDLQISFVGNCEIDLEIKRYFCRAGVKSIQIHGTMRVILEPLIGDMPLVGALSIFFLRKPLLEINWTGLTNLLDVPGLNGLSDTIILDIISNYLVLPNRITVPLVSEVQIAQLRFPVPKGVLRIHFIEAQDLQGKDTYLKGLVKGKSDPYGIIRVGNQIFQSRVIKENLSPKWNEVYEALVYEHPGQELEIELFDEDPDKDDFLGSLMIDLIEVEKERLLDEWFTLDEVPKGKLHLRLEWLTLMPNASNLDKVLTDIKADKDQANDGLSSALLILYLDSARNLPSGKKISSNPNPVVQMSVGHKAQESKIRYKTNEPVWEENFTFFIHNPKRQDLEVEVRDEQHQCSLGNLKVPLSQLLTSEDMTVSQRFQLSNSGPNSTIKMKIALRVLHLEKRERPPDHQHSAQVKRPSVSKEGRKTSIKSHMSGSPGPGGSNTAPSTPVIGGSDKPGMEEKAQPPEAGPQGLHDLGRSSSSLLASPGHISVKEPTPSIASDISLPIATQELRQRLRQLENGTTLGQSPLGQIQLTIRHSSQRNKLIVVVHACRNLIAFSEDGSDPYVRMYLLPDKRRSGRRKTHVSKKTLNPVFDQSFDFSVSLPEVQRRTLDVAVKNSGGFLSKDKGLLGKVLVALASEELAKGWTQWYDLTEDGTRPQAMT

SEQ ID NO: 1884 - protein, 405 aa, Homo sapiens
LKSVRPRTNQFRTHLDSTDSKDSLSSSLKTCYKYLNQTSRSFAAVIQALDGEMRNAVCIFYLVLRALDTLEDDMTISVEKKVPLLHNFHSFLYQPDWRFMESKEKDRQVLEDFPTISLEFRNLAEKYQTVIADICRRMGIGMAEFLDKHVTSEQEWDKYCHYVAGLVGIGLSRLFSASEFEDPLVGEDTERANSMGLFLQKTNIIRDYLEDQQGGREFWPQEVWSRYVKKLGDFAKPENIDLAVQCLNELITNALHHIPDVITYLSRLRNQSVFNFCAIPQVMAIATLAACYNNQQVFKGAVKIRKGQAVTLMMDATNMPAVKAIIYQYMEEIYHRIPDSDPSSSKTRQIISTIRTQNLPNCQLISRSHYSPIYLSFVMLLAALSWQYLTTLSQVTEDYVQTGEH

SEQ ID NO: 1885 - protein, 258 aa, Homo sapiens
LRQDGVREMPWPPRRVLQPGALPDRGQAEASEFEDPLVGEDTERANSMGLFLQKTNIIRDYLEDQQGGREFWPQEVWSRYVKKLGDFAKPENIDLAVQCLNELITNALHHIPDVITYLSRLRNQSVFNFCAIPQVMAIATLAACYNNQQVFKGAVKIRKGQAVTLMMDATNMPAVKAIIYQYMEEIYHRIPDSDPSSSKTRQIISTIRTQNLPNCQLISRSHYSPIYLSFVMLLAALSWQYLTTLSQVTEDYVQTGEH

SEQ ID NO: 1886 - protein, 405 aa, Homo sapiens
LRGSRWLRSPFRPLREHRRLPDSLSSSLKTCYKYLNQTSRSFAAVIQALDGEMRNAVCIFYLVLRALDTLEDDMTISVEKKVPLLHNFHSFLYQPDWRFMESKEKDRQVLEDFPTISLEFRNLAEKYQTVIADICRRMGIGMAEFLDKHVTSEQEWDKYCHYVAGLVGIGLSRLFSASEFEDPLVGEDTERANSMGLFLQKTNIIRDYLEDQQGGREFWPQEVWSRYVKKLGDFAKPENIDLAVQCLNELITNALHHIPDVITYLSRLRNQSVFNFCAIPQVMAIATLAACYNNQQVFKGAVKIRKGQAVTLMMDATNMPAVKAIIYQYMEEIYHRIPDSDPSSSKTRQIISTIRTQNLPNCQLISRSHYSPIYLSFVMLLAALSWQYLTTLSQVTEDYVQTGEH

SEQ ID NO: 1887 - protein, 394 aa, Homo sapiens
LGSLSGQWVLDSLSSSLKTCYKYLNQTSRSFAAVIQALDGEMRNAVCIFYLVLRALDTLEDDMTISVEKKVPLLHNFHSFLYQPDWRFMESKEKDRQVLEDFPTISLEFRNLAEKYQTVIADICRRMGIGMAEFLDKHVTSEQEWDKYCHYVAGLVGIGLSRLFSASEFEDPLVGEDTERANSMGLFLQKTNIIRDYLEDQQGGREFWPQEVWSRYVKKLGDFAKPENIDLAVQCLNELITNALHHIPDVITYLSRLRNQSVFNFCAIPQVMAIATLAACYNNQQVFKGAVKIRKGQAVTLMMDATNMPAVKAIIYQYMEEIYHRIPDSDPSSSKTRQIISTIRTQNLPNCQLISRSHYSPIYLSFVMLLAALSWQYLTTLSQVTEDYVQTGEH

SEQ ID NO: 1888 - protein, 490 aa, Homo sapiens
LSLWRKNSAGSAIPMAAAACGTKAMALFKRTLVLSPAAAPRGPGAGTAPRGCCLPPAAWPCKDWPRGEGGRLWSRLPQSHSHSHSHSHSHSCSSTSPTAVCVVCPQDSLSSSLKTCYKYLNQTSRSFAAVIQALDGEMRNAVCIFYLVLRALDTLEDDMTISVEKKVPLLHNFHSFLYQPDWRFMESKEKDRQVLEDFPTISLEFRNLAEKYQTVIADICRRMGIGMAEFLDKHVTSEQEWDKYCHYVAGLVGIGLSRLFSASEFEDPLVGEDTERANSMGLFLQKTNIIRDYLEDQQGGREFWPQEVWSRYVKKLGDFAKPENIDLAVQCLNELITNALHHIPDVITYLSRLRNQSVFNFCAIPQVMAIATLAACYNNQQVFKGAVKIRKGQAVTLMMDATNMPAVKAIIYQYMEEIYHRIPDSDPSSSKTRQIISTIRTQNLPNCQLISRSHYSPIYLSFVMLLAALSWQYLTTLSQVTEDYVQTGEH

SEQ ID NO: 1889 - protein, 225 aa, Homo sapiens
MVSWMICRLVVLVFGMLCPAYASYKAVKTKNIREYVRWMMYWIVFALFMAAEIVTDIFISWFPFYYEIKMAFVLWLLSPYTKGASLLYRKFVHPSLSRHEKEIDAYIVQAKERSYETVLSFGKRGLNIAASAAVQAATKVLWAPSPPAAPIPPLRPFGLIQLLCQGAQRWQPGSRGEKVTGGYWQKRGAGVRPSFLALALSVSSGSCSLTLVSCWCHIGAGPEAC

SEQ ID NO: 1890 - protein, 399 aa, Homo sapiens
LIFGAFDPPSSLLMGLWGQSVPTASSARAGRYPGARTASGTRPWLLDPKILKFVVFIVAVLLPVRVDSATIPRQDEVPQQTVAPQQQRRSLKEEECPAGSHRSEYTGACNPCTEGVDYTIASNNLPSCLLCTVCKSGQTNKSSCTTTRDTVCQCEKGSFQDKNSPEMCRTCRTGCPRGMVKVSNCTPRSDIKCKNESAASSTGKTPAAEETVTTILGMLASPYHYLIIIVVLVIILAVVVVGFSCRKKFISYLKGICSGGGGGPERVHRVLFRRRSCPSRVPGAEDNARNETLSNRYLQPTQVSEQEIQGQELAELTGVTVELPEEPQRLLEQAEAEGCQRRRLLVPVNDADSADISTLLDASATLEEGHAKETIQDQLVGSEKLFYEEDEAGSATSCL

SEQ ID NO: 1891 - protein, 484 aa, Homo sapiens
LLQAAGGRDASRLSSCSHDGLLFSAEACKDSRIGGMMKTLLLFVGLLLTWESGQVLGDQTVSDNELQEMSNQGSKYVNKEIQNAVNGVKQIKTLIEKTNEERKTLLSNLEEAKKKKEDALNETRESETKLKELPGVCNETMMALWEECKPCLKQTCMKFYARVCRSGSGLVGRQLEEFLNQSSPFYFWMNGDRIDSLLENDRQQTHMLDVMQDHFSRASSIIDELFQDRFFTREPQDTYHYLPFSLPHRRPHFFFPKSRIVRSLMPFSPYEPLNFHAMFQPFLEMIHEAQQAMDIHFHSPAFQHPPTEFIREGDDDRTVCREIRHNSTGCLRMKDQCDKCREILSVDCSTNNPSQAKLRRELDESLQVAERLTRKYNELLKSYQWKMLNTSSLLEQLNEQFNWVSRLANLTQGEDQYYLRVTTVASHTSDSDVPSGVTEVVVKLFDSDPITVTVPVEVSRKNPKFMETVAEKALQEYRKKHREE

SEQ ID NO: 1892 - protein, 501 aa, Homo sapiens
MQVCSQPQRGCVREQSAINTAPPSAHNAASPGGARGHRVPLTEACKDSRIGGMMKTLLLFVGLLLTWESGQVLGDQTVSDNELQEMSNQGSKYVNKEIQNAVNGVKQIKTLIEKTNEERKTLLSNLEEAKKKKEDALNETRESETKLKELPGVCNETMMALWEECKPCLKQTCMKFYARVCRSGSGLVGRQLEEFLNQSSPFYFWMNGDRIDSLLENDRQQTHMLDVMQDHFSRASSIIDELFQDRFFTREPQDTYHYLPFSLPHRRPHFFFPKSRIVRSLMPFSPYEPLNFHAMFQPFLEMIHEAQQAMDIHFHSPAFQHPPTEFIREGDDDRTVCREIRHNSTGCLRMKDQCDKCREILSVDCSTNNPSQAKLRRELDESLQVAERLTRKYNELLKSYQWKMLNTSSLLEQLNEQFNWVSRLANLTQGEDQYYLRVTTVASHTSDSDVPSGVTEVVVKLFDSDPITVTVPVEVSRKNPKFMETVAEKALQEYRKKHREE

SEQ ID NO: 1893 - protein, 536 aa, Homo sapiens
MCVRFPIILVKLTSLRGSLSPDLWQKTAGVNTTDKEMEVLHLRNVSFEDAGEYTCLAGNSIGLSHHSAWLTVLEALEERPAVMTSPLYLEIIIYCTGAFLISCMVGSVIVYKMKSGTKKSDFHSQMAVHKLAKSIPLRRQVTVSADSSASMNSGVLLVRPSRLSSSGTPMLAGVSEYELPEDPRWELPRDRLVLGKPLGEGCFGQVVLAEAIGLDKDKPNRVTKVAVKMLKSDATEKDLSDLISEMEMMKMIGKHKNIINLLGACTQDGPLYVIVEYASKGNLREYLQARRPPGLEYCYNPSHNPEEQLSSKDLVSCAYQVARGMEYLASKKCIHRDLAARNVLVTEDNVMKIADFGLARDIHHIDYYKKTTNGRLPVKWMAPEALFDRIYTHQSDVWSFGVLLWEIFTLGGSPYPGVPVEELFKLLKEGHRMDKPSNCTNELYMMMRDCWHAVPSQRPTFKQLVEDLDRIVALTSNQEYLDLSMPLDQYSPSFPDTRSSTCSSGEDSVFSHEPLPEEPCLPRHPAQLANGGLKRR

SEQ ID NO: 1894 - protein, 486 aa, Homo sapiens
VAKAHRGEWEQDWPRQPALCPDLEALEERPAVMTSPLYLEIIIYCTGAFLISCMVGSVIVYKMKSGTKKSDFHSQMAVHKLAKSIPLRRQVTVSADSSASMNSGVLLVRPSRLSSSGTPMLAGVSEYELPEDPRWELPRDRLVLGKPLGEGCFGQVVLAEAIGLDKDKPNRVTKVAVKMLKSDATEKDLSDLISEMEMMKMIGKHKNIINLLGACTQDGPLYVIVEYASKGNLREYLQARRPPGLEYCYNPSHNPEEQLSSKDLVSCAYQVARGMEYLASKKCIHRDLAARNVLVTEDNVMKIADFGLARDIHHIDYYKKTTNGRLPVKWMAPEALFDRIYTHQSDVWSFGVLLWEIFTLGGSPYPGVPVEELFKLLKEGHRMDKPSNCTNELYMMMRDCWHAVPSQRPTFKQLVEDLDRIVALTSNQEYLDLSMPLDQYSPSFPDTRSSTCSSGEDSVFSHEPLPEEPCLPRHPAQLANGGLKRR

SEQ ID NO: 1895 - protein, 734 aa, Homo sapiens
LKGEEEEGTWGHGACSAKCQALLTGVGQMGKTPPGPGLGPAPEPDQLLLSTLPVSLGFPRAAVAPYWTSPEKMEKKLHAVPAAKTVKFKCPSSGTPNPTLRWLKNGKEFKPDHRIGGYKVRYATWSIIMDSVVPSDKGNYTCIVENEYGSINHTYQLDVVERSPHRPILQAGLPANKTVALGSNVEFMCKVYSDPQPHIQWLKHIEVNGSKIGPDNLPYVQILKTAGVNTTDKEMEVLHLRNVSFEDAGEYTCLAGNSIGLSHHSAWLTVLEALEERPAVMTSPLYLEIIIYCTGAFLISCMVGSVIVYKMKSGTKKSDFHSQMAVHKLAKSIPLRRQVTVSADSSASMNSGVLLVRPSRLSSSGTPMLAGVSEYELPEDPRWELPRDRLVLGKPLGEGCFGQVVLAEAIGLDKDKPNRVTKVAVKMLKSDATEKDLSDLISEMEMMKMIGKHKNIINLLGACTQDGPLYVIVEYASKGNLREYLQARRPPGLEYCYNPSHNPEEQLSSKDLVSCAYQVARGMEYLASKKCIHRDLAARNVLVTEDNVMKIADFGLARDIHHIDYYKKTTNGRLPVKWMAPEALFDRIYTHQSDVWSFGVLLWEIFTLGGSPYPGVPVEELFKLLKEGHRMDKPSNCTNELYMMMRDCWHAVPSQRPTFKQLVEDLDRIVALTSNQEYLDLSMPLDQYSPSFPDTRSSTCSSGEDSVFSHEPLPEEPCLPRHPAQLANGGLKRR

SEQ ID NO: 1896 - protein, 752 aa, Homo sapiens
VEYPWRCGALSPTSNCRTGMWSWKCLLFWAVLVTATLCTARPSPTLPEQDALPSSEDDDDDDDSSSEEKETDNTKPNPVAPYWTSPEKMEKKLHAVPAAKTVKFKCPSSGTPNPTLRWLKNGKEFKPDHRIGGYKVRYATWSIIMDSVVPSDKGNYTCIVENEYGSINHTYQLDVVERSPHRPILQAGLPANKTVALGSNVEFMCKVYSDPQPHIQWLKHIEVNGSKIGPDNLPYVQILKHSGINSSDAEVLTLFNVTEAQSGEYVCKVSNYIGEANQSAWLTVTRPVAKALEERPAVMTSPLYLEIIIYCTGAFLISCMVGSVIVYKMKSGTKKSDFHSQMAVHKLAKSIPLRRQVTVSADSSASMNSGVLLVRPSRLSSSGTPMLAGVSEYELPEDPRWELPRDRLVLGKPLGEGCFGQVVLAEAIGLDKDKPNRVTKVAVKMLKSDATEKDLSDLISEMEMMKMIGKHKNIINLLGACTQDGPLYVIVEYASKGNLREYLQARRPPGLEYCYNPSHNPEEQLSSKDLVSCAYQVARGMEYLASKKCIHRDLAARNVLVTEDNVMKIADFGLARDIHHIDYYKKTTNGRLPVKWMAPEALFDRIYTHQSDVWSFGVLLWEIFTLGGSPYPGVPVEELFKLLKEGHRMDKPSNCTNELYMMMRDCWHAVPSQRPTFKQLVEDLDRIVALTSNQEYLDLSMPLDQYSPSFPDTRSSTCSSGEDSVFSHEPLPEEPCLPRHPAQLANGGLKRR

SEQ ID NO: 1897 - protein, 882 aa, Homo sapiens
LRPLPALVPPLFPPPNFSSNSRSGAGEAAAAPQVSLKRRIELTVEYPWRCGALSPTSNCRTGMWSWKCLLFWAVLVTATLCTARPSPTLPEQAQPWGAPVEVESFLVHPGDLLQLRCRLRDDVQSINWLRDGVQLAESNRTRITGEEVEVQDSVPADSGLYACVTSSPSGSDTTYFSVNVSDALPSSEDDDDDDDSSSEEKETDNTKPNPVAPYWTSPEKMEKKLHAVPAAKTVKFKCPSSGTPNPTLRWLKNGKEFKPDHRIGGYKVRYATWSIIMDSVVPSDKGNYTCIVENEYGSINHTYQLDVVERSPHRPILQAGLPANKTVALGSNVEFMCKVYSDPQPHIQWLKHIEVNGSKIGPDNLPYVQILKTAGVNTTDKEMEVLHLRNVSFEDAGEYTCLAGNSIGLSHHSAWLTVLEALEERPAVMTSPLYLEIIIYCTGAFLISCMVGSVIVYKMKSGTKKSDFHSQMAVHKLAKSIPLRRQVTVSADSSASMNSGVLLVRPSRLSSSGTPMLAGVSEYELPEDPRWELPRDRLVLGKPLGEGCFGQVVLAEAIGLDKDKPNRVTKVAVKMLKSDATEKDLSDLISEMEMMKMIGKHKNIINLLGACTQDGPLYVIVEYASKGNLREYLQARRPPGLEYCYNPSHNPEEQLSSKDLVSCAYQVARGMEYLASKKCIHRDLAARNVLVTEDNVMKIADFGLARDIHHIDYYKKTTNGRLPVKWMAPEALFDRIYTHQSDVWSFGVLLWEIFTLGGSPYPGVPVEELFKLLKEGHRMDKPSNCTNELYMMMRDCWHAVPSQRPTFKQLVEDLDRIVALTSNQEYLDLSMPLDQYSPSFPDTRSSTCSSGEDSVFSHEPLPEEPCLPRHPAQLANGGLKRR

SEQ ID NO: 1898 - protein, 947 aa, Homo sapiens
LRSGGGGHKVWRPRVADGSPPPAPPPGHQLRLHCSRPGWRRRAPSAAGSRAPAAELLRPRQDPNRARGRRAGAGDAGTRPLAQATADSPEAEPPRRARVSLKRRIELTVEYPWRCGALSPTSNCRTGMWSWKCLLFWAVLVTATLCTARPSPTLPEQAQPWGAPVEVESFLVHPGDLLQLRCRLRDDVQSINWLRDGVQLAESNRTRITGEEVEVQDSVPADSGLYACVTSSPSGSDTTYFSVNVSDALPSSEDDDDDDDSSSEEKETDNTKPNPVAPYWTSPEKMEKKLHAVPAAKTVKFKCPSSGTPNPTLRWLKNGKEFKPDHRIGGYKVRYATWSIIMDSVVPSDKGNYTCIVENEYGSINHTYQLDVVERSPHRPILQAGLPANKTVALGSNVEFMCKVYSDPQPHIQWLKHIEVNGSKIGPDNLPYVQILKTAGVNTTDKEMEVLHLRNVSFEDAGEYTCLAGNSIGLSHHSAWLTVLEALEERPAVMTSPLYLEIIIYCTGAFLISCMVGSVIVYKMKSGTKKSDFHSQMAVHKLAKSIPLRRQVTVSADSSASMNSGVLLVRPSRLSSSGTPMLAGVSEYELPEDPRWELPRDRLVLGKPLGEGCFGQVVLAEAIGLDKDKPNRVTKVAVKMLKSDATEKDLSDLISEMEMMKMIGKHKNIINLLGACTQDGPLYVIVEYASKGNLREYLQARRPPGLEYCYNPSHNPEEQLSSKDLVSCAYQVARGMEYLASKKCIHRDLAARNVLVTEDNVMKIADFGLARDIHHIDYYKKTTNGRLPVKWMAPEALFDRIYTHQSDVWSFGVLLWEIFTLGGSPYPGVPVEELFKLLKEGHRMDKPSNCTNELYMMMRDCWHAVPSQRPTFKQLVEDLDRIVALTSNQEYLDLSMPLDQYSPSFPDTRSSTCSSGEDSVFSHEPLPEEPCLPRHPAQLANGGLKRR

SEQ ID NO: 1899 - protein, 949 aa, Homo sapiens
LRSGGGGHKVWRPRVADGSPPPAPPPGHQLRLHCSRPGWRRRAPSAAGSRAPAAELLRPRQDPNRARGRRAGAGDAGTRPLAQATADSPEAEPPRRARVSLKRRIELTVEYPWRCGALSPTSNCRTGMWSWKCLLFWAVLVTATLCTARPSPTLPEQAQPWGAPVEVESFLVHPGDLLQLRCRLRDDVQSINWLRDGVQLAESNRTRITGEEVEVQDSVPADSGLYACVTSSPSGSDTTYFSVNVSDALPSSEDDDDDDDSSSEEKETDNTKPNRMPVAPYWTSPEKMEKKLHAVPAAKTVKFKCPSSGTPNPTLRWLKNGKEFKPDHRIGGYKVRYATWSIIMDSVVPSDKGNYTCIVENEYGSINHTYQLDVVERSPHRPILQAGLPANKTVALGSNVEFMCKVYSDPQPHIQWLKHIEVNGSKIGPDNLPYVQILKTAGVNTTDKEMEVLHLRNVSFEDAGEYTCLAGNSIGLSHHSAWLTVLEALEERPAVMTSPLYLEIIIYCTGAFLISCMVGSVIVYKMKSGTKKSDFHSQMAVHKLAKSIPLRRQVTVSADSSASMNSGVLLVRPSRLSSSGTPMLAGVSEYELPEDPRWELPRDRLVLGKPLGEGCFGQVVLAEAIGLDKDKPNRVTKVAVKMLKSDATEKDLSDLISEMEMMKMIGKHKNIINLLGACTQDGPLYVIVEYASKGNLREYLQARRPPGLEYCYNPSHNPEEQLSSKDLVSCAYQVARGMEYLASKKCIHRDLAARNVLVTEDNVMKIADFGLARDIHHIDYYKKTTNGRLPVKWMAPEALFDRIYTHQSDVWSFGVLLWEIFTLGGSPYPGVPVEELFKLLKEGHRMDKPSNCTNELYMMMRDCWHAVPSQRPTFKQLVEDLDRIVALTSNQEYLDLSMPLDQYSPSFPDTRSSTCSSGEDSVFSHEPLPEEPCLPRHPAQLANGGLKRR

SEQ ID NO: 1900 - protein, 947 aa, Homo sapiens
LRSGGGGHKVWRPRVADGSPPPAPPPGHQLRLHCSRPGWRRRAPSAAGSRAPAAELLRPRQDPNRARGRRAGAGDAGTRPLAQATADSPEAEPPRRARVSLKRRIELTVEYPWRCGALSPTSNCRTGMWSWKCLLFWAVLVTATLCTARPSPTLPEQAQPWGAPVEVESFLVHPGDLLQLRCRLRDDVQSINWLRDGVQLAESNRTRITGEEVEVQDSVPADSGLYACVTSSPSGSDTTYFSVNVSDALPSSEDDDDDDDSSSEEKETDNTKPNRMPVAPYWTSPEKMEKKLHAVPAAKTVKFKCPSSGTPNPTLRWLKNGKEFKPDHRIGGYKVRYATWSIIMDSVVPSDKGNYTCIVENEYGSINHTYQLDVVERSPHRPILQAGLPANKTVALGSNVEFMCKVYSDPQPHIQWLKHIEVNGSKIGPDNLPYVQILKTAGVNTTDKEMEVLHLRNVSFEDAGEYTCLAGNSIGLSHHSAWLTVLEALEERPAVMTSPLYLEIIIYCTGAFLISCMVGSVIVYKMKSGTKKSDFHSQMAVHKLAKSIPLRRQVSADSSASMNSGVLLVRPSRLSSSGTPMLAGVSEYELPEDPRWELPRDRLVLGKPLGEGCFGQVVLAEAIGLDKDKPNRVTKVAVKMLKSDATEKDLSDLISEMEMMKMIGKHKNIINLLGACTQDGPLYVIVEYASKGNLREYLQARRPPGLEYCYNPSHNPEEQLSSKDLVSCAYQVARGMEYLASKKCIHRDLAARNVLVTEDNVMKIADFGLARDIHHIDYYKKTTNGRLPVKWMAPEALFDRIYTHQSDVWSFGVLLWEIFTLGGSPYPGVPVEELFKLLKEGHRMDKPSNCTNELYMMMRDCWHAVPSQRPTFKQLVEDLDRIVALTSNQEYLDLSMPLDQYSPSFPDTRSSTCSSGEDSVFSHEPLPEEPCLPRHPAQLANGGLKRR

SEQ ID NO: 1901 - protein, 860 aa, Homo sapiens
LRSGGGGHKVWRPRVADGSPPPAPPPGHQLRLHCSRPGWRRRAPSAAGSRAPAAELLRPRQDPNRARGRRAGAGDAGTRPLAQATADSPEAEPPRRARVSLKRRIELTVEYPWRCGALSPTSNCRTGMWSWKCLLFWAVLVTATLCTARPSPTLPEQDALPSSEDDDDDDDSSSEEKETDNTKPNRMPVAPYWTSPEKMEKKLHAVPAAKTVKFKCPSSGTPNPTLRWLKNGKEFKPDHRIGGYKVRYATWSIIMDSVVPSDKGNYTCIVENEYGSINHTYQLDVVERSPHRPILQAGLPANKTVALGSNVEFMCKVYSDPQPHIQWLKHIEVNGSKIGPDNLPYVQILKTAGVNTTDKEMEVLHLRNVSFEDAGEYTCLAGNSIGLSHHSAWLTVLEALEERPAVMTSPLYLEIIIYCTGAFLISCMVGSVIVYKMKSGTKKSDFHSQMAVHKLAKSIPLRRQVTVSADSSASMNSGVLLVRPSRLSSSGTPMLAGVSEYELPEDPRWELPRDRLVLGKPLGEGCFGQVVLAEAIGLDKDKPNRVTKVAVKMLKSDATEKDLSDLISEMEMMKMIGKHKNIINLLGACTQDGPLYVIVEYASKGNLREYLQARRPPGLEYCYNPSHNPEEQLSSKDLVSCAYQVARGMEYLASKKCIHRDLAARNVLVTEDNVMKIADFGLARDIHHIDYYKKTTNGRLPVKWMAPEALFDRIYTHQSDVWSFGVLLWEIFTLGGSPYPGVPVEELFKLLKEGHRMDKPSNCTNELYMMMRDCWHAVPSQRPTFKQLVEDLDRIVALTSNQEYLDLSMPLDQYSPSFPDTRSSTCSSGEDSVFSHEPLPEEPCLPRHPAQLANGGLKRR

SEQ ID NO: 1902 - protein, 858 aa, Homo sapiens
LRSGGGGHKVWRPRVADGSPPPAPPPGHQLRLHCSRPGWRRRAPSAAGSRAPAAELLRPRQDPNRARGRRAGAGDAGTRPLAQATADSPEAEPPRRARVSLKRRIELTVEYPWRCGALSPTSNCRTGMWSWKCLLFWAVLVTATLCTARPSPTLPEQDALPSSEDDDDDDDSSSEEKETDNTKPNPVAPYWTSPEKMEKKLHAVPAAKTVKFKCPSSGTPNPTLRWLKNGKEFKPDHRIGGYKVRYATWSIIMDSVVPSDKGNYTCIVENEYGSINHTYQLDVVERSPHRPILQAGLPANKTVALGSNVEFMCKVYSDPQPHIQWLKHIEVNGSKIGPDNLPYVQILKTAGVNTTDKEMEVLHLRNVSFEDAGEYTCLAGNSIGLSHHSAWLTVLEALEERPAVMTSPLYLEIIIYCTGAFLISCMVGSVIVYKMKSGTKKSDFHSQMAVHKLAKSIPLRRQVTVSADSSASMNSGVLLVRPSRLSSSGTPMLAGVSEYELPEDPRWELPRDRLVLGKPLGEGCFGQVVLAEAIGLDKDKPNRVTKVAVKMLKSDATEKDLSDLISEMEMMKMIGKHKNIINLLGACTQDGPLYVIVEYASKGNLREYLQARRPPGLEYCYNPSHNPEEQLSSKDLVSCAYQVARGMEYLASKKCIHRDLAARNVLVTEDNVMKIADFGLARDIHHIDYYKKTTNGRLPVKWMAPEALFDRIYTHQSDVWSFGVLLWEIFTLGGSPYPGVPVEELFKLLKEGHRMDKPSNCTNELYMMMRDCWHAVPSQRPTFKQLVEDLDRIVALTSNQEYLDLSMPLDQYSPSFPDTRSSTCSSGEDSVFSHEPLPEEPCLPRHPAQLANGGLKRR

SEQ ID NO: 1903 - protein, 494 aa, Homo sapiens
LRSGGGGHKVWRPRVADGSPPPAPPPGHQLRLHCSRPGWRRRAPSAAGSRAPAAELLRPRQDPNRARGRRAGAGDAGTRPLAQATADSPEAEPPRRARVSLKRRIELTVEYPWRCGALSPTSNCRTGMWSWKCLLFWAVLVTATLCTARPSPTLPEQAQPWGAPVEVESFLVHPGDLLQLRCRLRDDVQSINWLRDGVQLAESNRTRITGEEVEVQDSVPADSGLYACVTSSPSGSDTTYFSVNVSVPIDALPSSEDDDDDDDSSSEEKETDNTKPNPVAPYWTSPEKMEKKLHAVPAAKTVKFKCPSSGTPNPTLRWLKNGKEFKPDHRIGGYKVRYATWSIIMDSVVPSDKGNYTCIVENEYGSINHTYQLDVVERSPHRPILQAGLPANKTVALGSNVEFMCKVYSDPQPHIQWLKHIEVNGSKIGPDNLPYVQILKHSGINSSDAEVLTLFNVTEAQSGEYVCKVSNYIGEANQSAWLTVTRPVAKDCWS

SEQ ID NO: 1904 - protein, 506 aa, Homo sapiens
LPRKKESKCVLTMLTSKGQGFLHGGLCLWLCVFTPFFKGCVGCATEERLFHKLFSHYNQFIRPVENVSDPVTVHFEVAITQLANVDEVNQIMETNLWLRHIWNDYKLRWDPMEYDGIETLRVPADKIWKPDIVLYNNAVGDFQVEGKTKALLKYNGMITWTPPAIFKSSCPMDITFFPFDHQNCSLKFGSWTYDKAEIDLLIIGSKVDMNDFWENSEWEIIDASGYKHDIKYNCCEEIYTDITYSFYIRRLPMFYTINLIIPCLFISFLTVLVFYLPSDCGEKVTLCISVLLSLTVFLLVITETIPSTSLVVPLVGEYLLFTMIFVTLSIVVTVFVLNIHYRTPTTHTMPRWVKTVFLKLLPQVLLMRWPLDKTRGTGSDAVPRGLARRPAKGKLASHGEPRHLKECFHCHKSNELATSKRRLSHQPLQWVVENSEHSPEVEDVINSVQFIAENMKSHNETKEVEDDWKYVAMVVDRVFLWVFIIVCVFGTAGLFLQPLLGNTGKS

SEQ ID NO: 1905 - protein, 491 aa, Homo sapiens
LPRKKESKCVLTMLTSKGQGFLHGGLCLWLCVFTPFFKGCVGCATEERLFHKLFSHYNQFIRPVENVSDPVTVHFEVAITQLANVIWNDYKLRWDPMEYDGIETLRVPADKIWKPDIVLYNNAVGDFQVEGKTKALLKYNGMITWTPPAIFKSSCPMDITFFPFDHQNCSLKFGSWTYDKAEIDLLIIGSKVDMNDFWENSEWEIIDASGYKHDIKYNCCEEIYTDITYSFYIRRLPMFYTINLIIPCLFISFLTVLVFYLPSDCGEKVTLCISVLLSLTVFLLVITETIPSTSLVVPLVGEYLLFTMIFVTLSIVVTVFVLNIHYRTPTTHTMPRWVKTVFLKLLPQVLLMRWPLDKTRGTGSDAVPRGLARRPAKGKLASHGEPRHLKECFHCHKSNELATSKRRLSHQPLQWVVENSEHSPEVEDVINSVQFIAENMKSHNETKEVEDDWKYVAMVVDRVFLWVFIIVCVFGTAGLFLQPLLGNTGKS

SEQ ID NO: 1906 - protein, 356 aa, Homo sapiens
LRSTAHPSLTRVRCREVSLPQPPPARRAFERRREAASAMASPGCLLCVLGLLLCGAASLELSRPHGDTAKKPIIGILMQKCRNKVMKNYGRYYIAASYVKYLESAGARVVPVRLDLTEKDYEILFKSINGILFPGGSVDLRRSDYAKVAKIFYNLSIQSFDDGDYFPVWGTCLGFEELSLLISGECLLTATDTVDVAMPLNFTGGQLHSRMFQNFPTELLLSLAVEPLTANFHKWSLSVKNFTMNEKLKKFFNVLTTNTDGKIEFISTMEGYKYPVYGVQWHPEKAPYEWKNLDGISHAPNAVKTAFYLAEFFVNEARKNNHHFKSESEEEKALIYQFSPIYTGNISSFQQCYIFD

SEQ ID NO: 1907 - protein, 205 aa, Homo sapiens
MASPGCLLCVLGLLLCGAASLELSRPHGDTAKKPIIGILMQKCRNKVMKNYGRYYIAASYVKYLESAGARVVPVRLDLTEKDYEILFKSINGILFPGGSVDLRRSDYAKVAKIFYNLSIQSFDDGDYFPVWGTCLGFEELSLLISGECLLTATDTVDVAMPLNFTGGQLHSRMFQNFPTELLLSLAVEPLTANFHKWSLSVKVSH

SEQ ID NO: 1908 - protein, 420 aa, Homo sapiens
LPRRAQSGATAPSPGGSGPAQAGSGAAHSNPAGTSGAGAGRSLLVPASVTSAPEPGARLPGSGWARTQALGSCGAPGVAMNIVVEFFVVTFKVLWAFVLAAARWLVRPKEKSVAGQVCLITGAGSGLGRLFALEFARRRALLVLWDINTQSNEETAGMVRHIYRDLEAADAAALQAGNGEEEILPHCNLQVFTYTCDVGKRENVYLTAERVRKEVGEVSVLVNNAGVVSGHHLLECPDELIERTMMVNCHAHFWTTKAFLPTMLEINHGHIVTVASSLGLFSTAGVEDYCASKFGVVGFHESLSHELKAAEKDGIKTTLVCPYLVDTGMFRGCRIRKEIEPFLPPLKPDYCVKQAMKAILTDQPMICTPRLMYIVTFMKSILPFEAVVCMYRFLGADKCMYPFIAQRKQATNNNEAKNGI

SEQ ID NO: 1909 - protein, 45 aa, Homo sapiens
LTSWSSICQDVLQDSAALWASFLWLFVCFSFKNGPTLNHGRAISL

SEQ ID NO: 1910 - protein, 141 aa, Homo sapiens
LRTIRSSSISYSQESGAAADDIKPCPRCAAYIIKMNDGSCNHMTCAVCGCEFCWLCMKEISDLHYLSPSGCTFWGKKPWSRKKKILWQLGTLVGAPVGIALIAGIAIPAMIIGIPVYVGRKVKCILLVSPLSYSKSLGVFF

SEQ ID NO: 1911 - protein, 247 aa, Homo sapiens
VILSPQRPEQACSIHHIRTMSYVFVNDSSQTNVPLLQACIDGDFNYSKRLLESGFDPNIRDSRGRTGLHLAAARGNVDICQLLHKFGADLLATDYQGNTALHLCGHVDTIQFLVSNGLKIDICNHQGATPLVLAKRRGVNKDVIRLLESLEEQEVKGFNRGTHSKLETMQTAESESAMESHSLLNPNLQQGEGVLSSFRTTWQEFVEDLGFWRVLLLIFVIALLSLGIAYYVSGVLPFVENQPELVH

SEQ ID NO: 1912 - protein, 200 aa, Homo sapiens
MRSTGSVCSFVGATNKVLVSTDSLFFGKMAEYDLTTRIAHFLDRHLVFPLLEFLSVKEIYNEKELLQGKLDLLSDTNMVDFAMDVYKNLYSDDIPHALREKRTTVVAQLKQLQAETEPIVKMFEDPETTRQMQSTRDGRMLFDYLADKHGFRQEYLDTLYRYAKFQYECGNYSGAAEYLYFFRVLVSISTCFFFFFFCLL

SEQ ID NO: 1913 - protein, 934 aa, Homo sapiens
LHWRNPKSKRPVQTRAVRSSRPEHSSQVAGLQPRPRPQRPGRNRRRDSRSMTRHADRIISLFTFAVGVNICLGFTAHRIKRAEGWEEGPPTVLSDSPWTNISGSCKGRCFELQEAGPPDCRCDNLCKSYTSCCHDFDELCLKTARGWECTKDRCGEVRNEENACHCSEDCLARGDCCTNYQVVCKGESHWVDDDCEEIKAAECPAGFVRPPLIIFSVDGFRASYMKKGSKVMPNIEKLRSCGTHSPYMRPVYPTKTFPNLYTLATGLYPESHGIVGNSMYDPVFDATFHLRGREKFNHRWWGGQPLWITATKQGVKAGTFFWSVVIPHERRILTILQWLTLPDHERPSVYAFYSEQPDFSGHKYGPFGPEMTNPLREIDKIVGQLMDGLKQLKLHRCVNVIFVGDHGMEDVTCDRTEFLSNYLTNVDDITLVPGTLGRIRSKFSNNAKYDPKAIIANLTCKKPDQHFKPYLKQHLPKRLHYANNRRIEDIHLLVERRWHVARKPLDVYKKPSGKCFFQGDHGFDNKVNSMQTVFVGYGSTFKYKTKVPPFENIELYNVMCDLLGLKPAPNNGTHGSLNHLLRTNTFRPTMPEEVTRPNYPGIMYLQSDFDLGCTCDDKVEPKNKLDELNKRLHTKGSTEAETRKFRGSRNENKENINGNFEPRKERHLLYGRPAVLYRTRYDILYHTDFESGYSEIFLMPLWTSYTVSKQAEVSSVPDHLTSCVRPDVRVSPSFSQNCLAYKNDKQMSYGFLFPPYLSSSPEAKYDAFLVTNMVPMYPAFKRVWNYFQRVLVKKYASERNGVNVISGPIFDYDYDGLHDTEDKIKQYVEGSSIPVPTHYYSIITSCLDFTQPADKCDGPLSVSSFILPHRPDNEESCNSSEDESKWVEELMKMHTARVRDIEHLTSLDFFRKTSRSYPEILTLKTYLHTYESEI

SEQ ID NO: 1914 - protein, 726 aa, Homo sapiens
LPPPPAPPRGTRAGGGAGRERDRRGRRAGAELPALAPAPGRGPGPCPARPCPAHRALVWQRLMAAVGPPQQQVRMAHQQVWAALEVALRVPCLYIIDAIFNSYPDSSQSRFCIVLQIFLRLFGVFASSIVLILSQRSLFKFYTYSSAFLLAATSVLVNYYASLHIDFYGAYNTSAFGIELLPRKGPSLWMALIVLQLTFGIGYVTLLQIHSIYSQLIILDLLVPVIGLITELPLHIRETLLFTSSLILTLNTVFVLAVKLKWFYYSTRYVYLLVRHMYRIYGLQLLMEDTWKRIRFPDILRVFWLTRVTAQATVLMYILRMANETDSFFISWDDFWDLICNLIISGCDSTLTVLGMSAVISSVAHYLGLGILAFIGSTEEDDRRLGFVAPVLFFILALQTGLSGLRPEERLIRLSRNMCLLLTAVLHFIHGMTDPVLMSLSASHVSSFRRHFPVLFVSACLFILPVLLSYVLWHHYALNTWLFAVTAFCVELCLKVIVSLTVYTLFMIDGYYNVLWEKLDDYVYYVRSTGSIIEFIFGVVMFGNGAYTMMFESGSKIRAFMMCLHAYFNIYLQAKNGWKTFMNRRTAVKKINSLPEIKGSRLQEINDVCAICYHEFTTSARITPCNHYFHALCLRKWLYIQDTCPMCHQKVYIEDDIKDNSNVSNNNGFIPPNETPEEAVREAAAESDRELNEDDSTDCDDDVQRERNGVIQHTGAAAEEFNDDTD

SEQ ID NO: 1915 - protein, 443 aa, Homo sapiens
LVNTLQRRKEKREPDPNGGGPTTASGPPAAAEEAQRPRSMTVSAATRVMLLFSVAGWGHLSLAGDHILASNWGAKAALQLEGPGLHSLTSCSTAKSLGKKPCVGMREAELSRVRVGPKQVNSPLAPQTCSAHGGRTGVLLSPPPKATCVFLSSNLQPGEEMEACEELALALSRGLQLDTQRSSRDSLQCSSGYSTQTTTPCCSEDTIPSQVSDYDYFSVSGDQEADQQEFDKSSTIPRNSDISQSYRRMFQAKRPASTAGLPTTLGPAMVTPGVATIRRTPSTKPSVRRGTIGAGPIPIKTPVIPVKTPTVPDLPGVLPAPPDGPEERGEHSPESPSVGEGPQGVTSMPSSMWSGQASVNPPLPGPKPSIPEEHRQAIPESEAEDQEREPPSATVSPGQIPESDPADLSPRDTPQGEDMLNAIRRGVKLKKTTTNDRSAPRFS

SEQ ID NO: 1916 - protein, 506 aa, Homo sapiens
LAASGGVRRLLWLLGPRRAGESRRPRGMLRRKGTNISETSLIGTAACTSTSSQNDPEVIIVGAGVLGSALAAVLSRDGRKVTVIERDLKEPDRIVGEFLQPGGYHVLKDLGLGDTVEGLDAQVVNGYMIHDQESKSEVQIPYPLSENNQVQSGRAFHHGRFIMSLRKAAMAEPNAKFIEGVVLQLLEEDDVVMGVQYKDKETGDIKELHAPLTVVADGLFSKFRKSLVSNKVSVSSHFVGFLMKNAPQFKANHAELILANPSPVLIYQISSSETRVLVDIRGEMPRNLREYMVEKIYPQIPDHLKEPFLEATDNSHLRSMPASFLPPSSVKKRGVLLLGDAYNMRHPLTGGGMTVAFKDIKLWRKLLKGIPDLYDDAAIFEAKKSFYWARKTSHSFVVNILAQALYELFSATDDSLHQLRKACFLYFKLGGECVAGPVGLLSVLSPNPLVLIGHFFAVAIYAVYFCFKSEPWITKPRALLSSGAVLYKACSVIFPLIYSEMKYMVH

SEQ ID NO: 1917 - protein, 624 aa, Homo sapiens
LIGLLVLGHCLLESGRLSVLLLVPHFGENLKPTRADNLRLDRCHQRSLGTMWTFLGIATFTYFYKKFGDFITLANREVLLCVLVFLSLGLVLSYRCRHRNGGLLGRQQSGSQFALFSDILSGLPFIGFFWAKSPPESENKEQLEARRRRKGTNISETSLIGTAACTSTSSQNDPEVIIVGAGVLGSALAAVLSRDGRKVTVIERDLKEPDRIVGEFLQPGGYHVLKDLGLGDTVEGLDAQVVNGYMIHDQESKSEVQIPYPLSENNQVQSGRAFHHGRFIMSLRKAAMAEPNAKFIEGVVLQLLEEDDVVMGVQYKDKETGDIKELHAPLTVVADGLFSKFRKSLVSNKVSVSSHFVGFLMKNAPQFKANHAELILANPSPVLIYQISSSETRVLVDIRGEMPRNLREYMVEKIYPQIPDHLKEPFLEATDNSHLRSMPASFLPPSSVKKRGVLLLGDAYNMRHPLTGGGMTVAFKDIKLWRKLLKGIPDLYDDAAIFEAKKSFYWARKTSHSFVVNILAQALYELFSATDDSLHQLRKACFLYFKLGGECVAGPVGLLSVLSPNPLVLIGHFFAVAIYAVYFCFKSEPWITKPRALLSSGAVLYKACSVIFPLIYSEMKYMVH

SEQ ID NO: 1918 - protein, 62 aa, Homo sapiens
MTWTKCPLPLGPAFFTQCCLIGLLVPLLGWGNQNTQWYPTSKMPDLKDSKTTDLCQHVKHMV

SEQ ID NO: 1919 - protein, 36 aa, Homo sapiens
MTWTKCPLPLGPAFFTQCCLIGLLVPLLGWGNQNTQ

SEQ ID NO: 1920 - protein, 899 aa, Homo sapiens
VRPRAPVSSTPVPALAFQPWEPGRGGGRREHAHRHCGGRAPSLGAGTRGGAKRGPLPPRAPMYAFYSLLIYIFYSLFRRDGGAAAAAEPGDPAQRARKPRGRRRPDLPAPELWTELTGLAASSEPEDGSEGAAEGRAAAVSLEEALLRLAEFLSVQLGAEESCGGPADLGQSGEVPSLLTVTSQLLALLAWLRSPRGRQALLQGTQPAPRVRPPSPDGSTSQEESPSHFTAVPGEPLGDETQGQQPLQLEEDQRAWQRLEQLILGQLEELKQQLEQQEEELGRLRLGVGATDSEKRVQHLTLENEALKQSLSLMRDLLLHWGPGPPIRAPQEEAEALLELQGRLQEAQDTTEALRAQLGVQEVQLQGLQGALQQLQQETEQNCRRELQQMHGQLAGLRARMASLRQGCGDLRGLVSTFTQSCQGSLSEARGQVSWALGALSSGGPGTQLPEGQQGPPAGCPGRLPELKGNIRVLCRLRPGTSSSLVSVEPGPGGTVTTCYRGRHRRFRLDWVFPPDASQEEVFRELEPAVLSCLRGYSVCIFTYGQTGTGKTYSMEGPPEDPGIVPRALQSLFREMGAGRQHRVTLSMVEIYNEAVRDLLAPGPPERLAVRQGPEGQGGIQVAGLTHWDVPNLETLHQMLKLGRSNRATAATAMNQRSSRSHALVTLTLRAASPPRAPGTAGTLHLVDLAGSERARKAGAAGPPRGDPDGARRLREAQTINRSLLALGGVMAALRAHRPHVPFRDSQLTRLLQPALGPGTTAVLLLQVGAGAGQVCACRSPPTRARPPAPLARRSPRGRRISGRQSAPSSSPTEWVKWSWGQPGAAGSRAPPGRLLPSAPTLRSPGPPAPLRRPLAVLHAPVPTTARARLSRPQRACPSSPGSRPCPWGLRPGLCWQRR

SEQ ID NO: 1921 - protein, 209 aa, Homo sapiens
LSSWRVPRGPSSAQLPEAPHQPRFCPPAGHSRKMRIFAVFIFMTYWHLLNAPYNKINQRILVVDPVTSEHELTCQAEGYPKAEVIWTSSDHQVLSGKTTTTNSKREEKLFNVTSTLRINTTTNEIFYCTFRRLDPEENHTAELVIPELPLAHPPNERTHLVILGAILLCLGVALTFIFRLRKGRMMDVKKCGIQDTNSKKQSDTHLEET

SEQ ID NO: 1922 - protein, 117 aa, Homo sapiens
LSGKTTTTNSKREEKLFNVTSTLRINTTTNEIFYCTFRRLDPEENHTAELVIPELPLAHPPNERTHLVILGAILLCLGVALTFIFRLRKGSISLIAVVSTGGEEGVRIGSWLQGNPT

SEQ ID NO: 1923 - protein, 916 aa, Homo sapiens
LGRLGWQLRLVAMEWGSESAAVRRHRVGVERREGAAAAPPPEREARAQEPLVDGCSGGGRTRKRSPGGSGGASRGAGTGLSEVRAALGLALYLIALRTLVQLSLQQLVLRGAAGHRGEFDALQARDYLEHITSIGPRTTGSPENEILTVHYLLEQIKLIEVQSNSLHKISVDVQRPTGSFSIDFLGGFTSYYDNITNVVVKLEPRDGAQHAVLANCHFDSVANSPGASDDAVSCSVMLEVLRVLSTSSEALHHAVIFLFNGAEENVLQASHGFITQHPWASLIRAFINLEAAGVGGKELVFQTGPENPWLVQAYVSAAKHPFASVVAQEVFQSGIIPSDTDFRIYRDFGNIPGIDLAFIENGYIYHTKYDTADRILTDSIQRAGDNILAVLKHLATSDMLAAASKYRHGNMVFFDVLGLFVIAYPSRIGSIINYMVVMGVVLYLGKKFLQPKHKTGNYKKDFLCGLGITLISWFTSLVTVLIIAVFISLIGQSLSWYNHFYVSVCLYGTATVAKIILIHTLAKRFYYMNASAQYLGEVFFDISLFVHCCFLVTLTYQGLCSAFISAVWVAFPLLTKLCVHKDFKQHGAQGKFIAFYLLGMFIPYLYALYLIWAVFEMFTPILGRSGSEIPPDVVLASILAGCTMILSSYFINFIYLAKSTKKTMLTLTLVCAITFLLVCSGTFFPYSSNPANPKPKRVFLQHMTRTFHDLEGNAVKRDSGIWINGFDYTGISHITPHIPEINDSIRAHCEENAPLCGFPWYLPVHFLIRKNWYLPAPEVSPRNPPHFRLISKEQTPWDSIKLTFEATGPSHMSFYVRAHKGSTLSQWSLGNGTPVTSKGGDYFVFYSHGLQASAWQFWIEVQVSEEHPEGMVTVAIAAHYLSGEDKRSPQLDALKEKFPDWTFPSAWVCTYDLFVF

SEQ ID NO: 1924 - protein, 850 aa, Homo sapiens
LGWQLRLVAMEWGSESAAVRRHRVGVERREGAAAAPPPEREARAQEPLVDGCSGGGRTRKRSPGGSGGASRGAGTGLSEVRAALGLALYLIALRTLVQLSLQQLVLRGAAGHRGEFDALQARDYLEHITSIGPRTTGSPENEILTVHYLLEQIKLIEVQSNSLHKISVDVQRPTGSFSIDFLGGFTSYYDNITNVVVKLEPRDGAQHAVLANCHFDSVANSPGASDDAVSCSVMLEVLRVLSTSSEALHHAVIFLFNGAEENVLQASHGFITQHPWASLIRAFINLEAAGVGGKELVFQTGPENPWLVQAYVSAAKHPFASVVAQEVFQSGIIPSDTDFRIYRDFGNIPGIDLAFIENGYIYHTKYDTADRILTDSIQRAGDNILAVLKHLATSDMLAAASKYRHGNMVFFDVLGLFVIAYPSRIGSIINYMVVMGVVLYLGKKFLQPKHKTGNYKKDFLCGLGITLISWFTSLVTVLIIAVFISLIGQSLSWYNHFYVSVCLYGTATVAKIILIHTLAKRFYYMNASAQYLGEVFFDISLFVHCCFLVTLTYQGLCSAFISAVWVAFPLLTKLCVHKDFKQHGAQGKFIAFYLLGMFIPYLYALYLIWAVFEMFTPILGRSGSEIPPDVVLASILAGCTMILSSYFINFIYLAKSTKKTMLTLTLVCAITFLLVCSGTFFPYSSNPANPKPKRVFLQHMTRTFHDLEGNAVKRDSGIWINGFDYTGISHITPHIPEINDSIRAHCEENAPLCGFPWYLPVHFLIRKNWYLPAPEVSPRNPPHFRLISKEQTPWDSIKLTFEATACLPILQILDLPASTIMTKPYVLLCSSPQRVNTFSVVSWQWHPSHK

SEQ ID NO: 1925 - protein, 494 aa, Homo sapiens
VTLLVLLLGSELPGLGACLSPVKLVVQIGVARDYLEHITSIGPRTTGSPENEILTVHYLLEQIKLIEVQSNSLHKISVDVQRPTGSFSIDFLGGFTSYYDNITNVVVKLEPRDGAQHAVLANCHFDSVANSPGASDDAVSCSVMLEVLRVLSTSSEALHHAVIFLFNGAEENVLQASHGFITQHPWASLIRAFINLEAAGVGGKELVFQTGPENPWLVQAYVSAAKHPFASVVAQEVFQSGIIPSDTDFRIYRDFGNIPGIDLAFIENGYIYHTKYDTADRILTDSIQRAGDNILAVLKHLATSDMLAAASKYRHGNMVFFDVLGLFVIAYPSRIGSIINYMVVMGVVLYLGKKFLQPKHKTGNYKKDFLCGLGITLISWFTSLVTVLIIAVFISLIGQSLSWYNHFYVSVCLYGTATVAKIILIHTLAKRFYYMNASAQYLGEVFFDISLFVHCCFLVTLTYQGLCSAFISAVWVAFPLLTKLCVHKDFKQHD

SEQ ID NO: 1926 - protein, 377 aa, Homo sapiens
LGRLGWQLRLVAMEWGSESAAVRRHRVGVERREGAAAAPPPEREARAQEPLVDGCSGGGRTRKRSPGGSGGASRGAGTGLSEVRAALGLALYLIALRTLVQLSLQQLVLRGAAGHRGEFDALQARDYLEHITSIGPRTTGSPENEILTVHYLLEQIKLIEVQSNSLHKISVDVQRPTGSFSIDFLGGFTSYYDNITNVVVKLEPRDGAQHAVLANCHFDSVANSPGASDDAVSCSVMLEVLRVLSTSSEALHHAVIFLFNGAEENVLQASHGFITQHPWASLIRAFINLEAAGVGGKELVFQTGPENPWLVQAYVSAAKHPFASVVAQEVFQSGIIPSDTDFRIYRDFGNIPGILSMVTAYCAAFIYQKQILNLESM

SEQ ID NO: 1927 - protein, 92 aa, Homo sapiens
LGLCSLHVSTAPTQLTPACLSSALPPMSLTMSVCPPRTGQHWWWVPIVSPLLGSIAGVFVYQLMIGCHLEQPPPSNEEENVKLAHVKHKEQI

SEQ ID NO: 1928 - protein, 203 aa, Homo sapiens
LLLTHNSWEGGEGTPEREVWAQASPPTHCVSNLSPDAIWHFADNQLFVSGPNGTAGIFATYPSGHLDMINGFFDQFIGTASLIVCVLAIVDPYNNPVPRGLEAFTVGLVVLVIGTSMGFNSGYAVNPARDFGPRLFTALAGWGSAVFTTGQHWWWVPIVSPLLGSIAGVFVYQLMIGCHLEQPPPSNEEENVKLAHVKHKEQI

SEQ ID NO: 1929 - protein, 317 aa, Homo sapiens
LEAAARCATASRHPCPPDSAAACPAMGRQKELVSRCGEMLHIRYRLLRQALAECLGTLILVMFGCGSVAQVVLSRGTHGGFLTINLAFGFAVTLGILIAGQVSGAHLNPAVTFAMCFLAREPWIKLPIYTLAQTLGAFLGAGIVFGLYYDAIWHFADNQLFVSGPNGTAGIFATYPSGHLDMINGFFDQFIGTASLIVCVLAIVDPYNNPVPRGLEAFTVGLVVLVIGTSMGFNSGYAVNPARDFGPRLFTALAGWGSAVFTTGQHWWWVPIVSPLLGSIAGVFVYQLMIGCHLEQPPPSNEEENVKLAHVKHKEQI

SEQ ID NO: 1930 - protein, 94 aa, Homo sapiens [sequence omitted]

SEQ ID NO: 1931 - protein, 162 aa, Homo sapiens
MGRQKELVSRCGEMLHIRYRLLRQALAECLGTLILVMFGCGSVAQVVLSRGTHGGFLTINLAFGFAVTLGILIAGQVSGAHLNPAVTFAMCFLAREPWIKLPIYTLAQTLGAFLGAGIVFGLYYGKHSPPCPPPLPPSLCSGPAGTRPFDDRRLGPAQAPGS

SEQ ID NO: 1932 - protein, 91 aa, Homo sapiens
MGRQKELVSRCGEMLHIRYRLLRQALAECLGTLILVMFGCGSVAQVVLSRGTHGGFLTINLAFGFAVTLGILIAGQVSGKALTLPPALGPQ

SEQ ID NO: 1933 - protein, 216 aa, Homo sapiens
LRGTGLRRDGSKKCCGNRQAMNQADPRLRAVCLWTLTSAAMSRGDNCTDLLALGIPSITQAWGLWVLLGAVTLLFLISLAAHLSQWTRGRSRSHPGQGRSGESVEEVPLYGNLHYLQTGRLSQDPEPDQQDPTLGGPARAAEEVMCYTSLQLRPPQGRIPGPGTPVKYSEVVLDSEPKSQASGPEPELYASVCAQTRRARASFPDQAYANSQPAAS

SEQ ID NO: 1934 - protein, 244 aa, Homo sapiens
LRGTGLRRDGSKKCCGNRQAMNQADPRLRAVCLWTLTSAAMSRGDNCTDLLALGIPSITQAWGLWVLLGAVTLLFLISLAAHLSQWTRGRSRSHPGQGRWVKDNRDGLTESSLLPRSPHSSPKLCVASGESVEEVPLYGNLHYLQTGRLSQDPEPDQQDPTLGGPARAAEEVMCYTSLQLRPPQGRIPGPGTPVKYSEVVLDSEPKSQASGPEPELYASVCAQTRRARASFPDQAYANSQPAAS

SEQ ID NO: 1935 - protein, 170 aa, Homo sapiens
VPSAPQSDLPRIKTEIEALKNLRHQHICQLYHVLETANKIFMVLEYCPGGELFDYIISQDRLSEEETRVVFRQIVSAVAYVHSQGYAHRDLKPENLLFDEYHKLKLIDFGLCAKPKGNKDYHLQTCCGSLAYAAPELIQGKSYLGSEMFGAWAYCYMFLCVDFYHLMMIM

SEQ ID NO: 1936 - protein, 505 aa, Homo sapiens
LDQRWSFTVSPRLEYSGVISAHCNLRLLDSSDSPASAFRVAGTADVWSMGILLYVLMCGFLPFDDDNVMALYKKIMRGKYDVPKWLSPSSILLLQQMLQVDPKKRISMKNLLNHPWIMQDYNYPVEWQSKNPFIHLDDDCVTELSVHHRNNRQTMEDLISLWQYDHLTATYLLLLAKKARGKPVRLRLSSFSCGQASATPFTDIKSNNWSLEDVTASDKNYVAGLIDYDWCEDDLSTGAATPRTSQFTKYWTESNGVESKSLTPALCRTPANKLKNKENVYTPKSAVKNEEYFMFPEPKTPVNKNQHKREILTTPNRYTTPSKARNQCLKETPIKIPVNSTGTDKLMTGVISPERRCRSVELDLNQAHMEETPKRKGAKVFGSLERGLDKVITVLTRSKRKGSARDGPRRLKLHYNVTTTRLVNPDQLLNEIMSILPKKHVDFVQKGYTLKCQTQSDFGKVTMQFELEVCQLQKPDVVGIRRQRLKGDAWVYKRLVEDILSSCKV

SEQ ID NO: 1937 - protein, 95 aa, Homo sapiens
LHFYFLMQRMNKLNTCFEDRSRCSVWHHVIICLFYNIHVSLRNHGRDVRAEYTQQMLKEKEGSVLQKKKKRTNRILTLLTFPNFPMLLVNIIIVS

SEQ ID NO: 1938 - protein, 37 aa, Homo sapiens
LLEGRQMLLGFLVFVFVFFSPFIFLRGRVGSGWGGGG

SEQ ID NO: 1939 - protein, 711 aa, Homo sapiens
LCAPLVRGTSQRAREQRGAGTMGWGSRCCCPGRLDLLCVLALLGGCLLPVCRTRVYTNHWAVKIAGGFPEANRIASKYGFINIGQIGALKDYYHFYHSRTIKRSVISSRGTHSFISMEPKVEWIQQQVVKKRTKRDYDFSRAQSTYFNDPKWPSMWYMHCSDNTHPCQSDMNIEGAWKRGYTGKNIVVTILDDGIERTHPDLMQNYDALASCDVNGNDLDPMPRYDASNENKHGTRCAGEVAAAANNSHCTVGIAFNAKIGGVRMLDGDVTDMVEAKSVSFNPQHVHIYSASWGPDDDGKTVDGPAPLTRQAFENGVRMGRRGLGSVFVWASGNGGRSKDHCSCDGYTNSIYTISISSTAESGKKPWYLEECSSTLATTYSSGESYDKKIITTDLRQRCTDNHTGTSASAPMAAGIIALALEANPFLTWRDVQHVIVRTSRAGHLNANDWKTNAAGFKVSHLYGFGLMDAEAMVMEAEKWTTVPRQHVCVESTDRQIKTIRPNSAVRSIYKASGCSDNPNRHVNYLEHVVVRITITHPRRGDLAIYLTSPSGTRSQLLANRLFDHSMEGFKNWEFMTIHCWGERAAGDWVLEVYDTPSQLRNFKTPGKLKEWSLVLYGTSVQPYSPTNEFPKVERFRYSRVEDPTDDYGTEDYAGELASSGTQAKKRQLMHHPTTWENRMEWNGMKWNGMKWNGMEWNGMEWNRIESNRIE

SEQ ID NO: 1940 - protein, 934 aa, Homo sapiens
LCAPLVRGTSQRAREQRGAGTMGWGSRCCCPGRLDLLCVLALLGGCLLPVCRTRVYTNHWAVKIAGGFPEANRIASKYGFINIGQIGALKDYYHFYHSRTIKRSVISSRGTHSFISMEPKVEWIQQQVVKKRTKRDYDFSRAQSTYFNDPKWPSMWYMHCSDNTHPCQSDMNIEGAWKRGYTGKNIVVTILDDGIERTHPDLMQNYDALASCDVNGNDLDPMPRYDASNENKHGTRCAGEVAAAANNSHCTVGIAFNAKIGGVRMLDGDVTDMVEAKSVSFNPQHVHIYSASWGPDDDGKTVDGPAPLTRQAFENGVRMGRRGLGSVFVWASGNGGRSKDHCSCDGYTNSIYTISISSTAESGKKPWYLEECSSTLATTYSSGESYDKKIITTDLRQRCTDNHTGTSASAPMAAGIIALALEANPFLTWRDVQHVIVRTSRAGHLNANDWKTNAAGFKVSHLYGFGLMDAEAMVMEAEKWTTVPRQHVCVESTDRQIKTIRPNSAVRSIYKASGCSDNPNRHVNYLEHVVVRITITHPRRGDLAIYLTSPSGTRSQLLANRLFDHSMEGFKNWEFMTIHCWGERAAGDWVLEVYDTPSQLRNFKTPGKLKEWSLVLYGTSVQPYSPTNEFPKVERFRYSRVEDPTDDYGTEDYAGPCDPECSEVGCDGPGPDHCNDCLHYYYKLKNNTRICVSSCPPGHYHADKKRCRKCAPNCESCFGSHGDQCMSCKYGYFLNEETNSCVTHCPDGSYQDTKKNLCRKCSENCKTCTEFHNCTECRDGLSLQGSRCSVSCEDGRYFNGQDCQPCHRFCATCAGAGADGCINCTEGYFMEDGRCVQSCSISYYFDHSSENGYKSCKKCDISCLTCNGPGFKNCTSCPSGYLLDLGMCQMGAICKDATEESWAEGGFCMLVKKNNLCQRKVLQQLCCKTCTFQG

SEQ ID NO: 1941 - protein, 1881 aa, Homo sapiens
LCAPLVRGTSQRAREQRGAGTMGWGSRCCCPGRLDLLCVLALLGGCLLPVCRTRVYTNHWAVKIAGGFPEANRIASKYGFINIGQIGALKDYYHFYHSRTIKRSVISSRGTHSFISMEPKVEWIQQQVVKKRTKRDYDFSRAQSTYFNDPKWPSMWYMHCSDNTHPCQSDMNIEGAWKRGYTGKNIVVTILDDGIERTHPDLMQNYDALASCDVNGNDLDPMPRYDASNENKHGTRCAGEVAAAANNSHCTVGIAFNAKIGGVRMLDGDVTDMVEAKSVSFNPQHVHIYSASWGPDDDGKTVDGPAPLTRQAFENGVRMGRRGLGSVFVWASGNGGRSKDHCSCDGYTNSIYTISISSTAESGKKPWYLEECSSTLATTYSSGESYDKKIITTDLRQRCTDNHTGTSASAPMAAGIIALALEANPFLTWRDVQHVIVRTSRAGHLNANDWKTNAAGFKVSHLYGFGLMDAEAMVMEAEKWTTVPRQHVCVESTDRQIKTIRPNSAVRSIYKASGCSDNPNRHVNYLEHVVVRITITHPRRGDLAIYLTSPSGTRSQLLANRLFDHSMEGFKNWEFMTIHCWGERAAGDWVLEVYDTPSQLRNFKTPGKLKEWSLVLYGTSVQPYSPTNEFPKVERFRYSRVEDPTDDYGTEDYAGPCDPECSEVGCDGPGPDHCNDCLHYYYKLKNNTRICVSSCPPGHYHADKKRCRKCAPNCESCFGSHGDQCMSCKYGYFLNEETNSCVTHCPDGSYQDTKKNLCRKCSENCKTCTEFHNCTECRDGLSLQGSRCSVSCEDGRYFNGQDCQPCHRFCATCAGAGADGCINCTEGYFMEDGRCVQSCSISYYFDHSSENGYKSCKKCDISCLTCNGPGFKNCTSCPSGYLLDLGMCQMGAICKDGEYVDEHGHCQTCEASCAKCQGPTQEDCTTCPMTRIFDDGRCVSNCPSWKFEFENQCHPCHHTCQRCQGSGPTHCTSCGADNYGREHFLYQGECGDSCPEGHYATEGNTCLPCPDNCELCHSVHVCTRCMKGYFIAPTNHTCQKLECGQGEVQDPDYEECVPCEEGCLGCSLDDPGTCTSCAMGYYRFDHHCYKTCPEKTYSEEVECKACDSNCGSCDQNGCYWCEEGFFLLGGSCVRKCGPGFYGDQEMGECESCHRACETCTGPGHDECSSCQEGLQLLRGMCVHATKTQEEGKFWNDILRKLQPCHSSCKTCNGSATLCTSCPKGAYLLAQACVSSCPQGTWPSVRSGSCENCTEACAICSGADLCKKCQMQPGHPLFLHEGRCYSKCPEGSYAEDGICERCSSPCRTCEGNATNCHSCEGGHVLHHGVCQENCPERHVAVKGVCKHCPEMCQDCIHEKTCKECTPEFFLHDDMCHQSCPRGFYADSRHCVPCHKDCLECSGPKADDCELCLESSWVLYDGLCLEECPAGTYYEKETKECRDCHKSCLTCSSSGTCTTCQKGLIMNPRGSCMANEKCSPSEYWDEDAPGCKPCHVKCFHCMGPAEDQCQTCPMNSLLLNTTCVKDCPEGYYADEDSNRCAHCHSSCRTCEGRHSRQCHSCRPGWFQLGKECLLQCREGYYADNSTGRCERCNRSCKGCQGPRPTDCLSCDRFFFLLRSKGECHRSCPDHYYVEQSTQTCERCHPTCDQCKGKGALNCLSCVWSYHLMGGICTSDCLVGEYRVGEGEKFNCEKCHESCMECKGPGAKNCTLCPANLVLHMDDSHCLHCCNTSDPPSAQECCDCQDTTDECILRTSKVRPATEHFKTALFITSSMMLVLLLGAAVVVWKKSRGRVQPAAKAGYEKLADPNKSYSSYKSSYRESTSFEEDQVIEYRDRDYDEDDDDDIVYMGQDGTVYRKFKYGLLDDDDIDELEYDDESYSYYQ

SEQ ID NO: 1942 - protein, 223 aa, Homo sapiens
LADPAKRLGARRMRWAAATLRGKARPRGRAGVTTPAPGNRTGTCAKLRLPPQATFQVLRGNGASVGTVLMFRCPSNHQMVGSGLLTCTWKGSIAEWSSGSPVCKLVPPHETFGFKVAVIASIVSCAIILLMSMAFLTCCLLKCVKKSKRRRSNRDHGESTSKLASVTRSVDKDPGIPRALSLSGSSSSPQAQVMVHMANPRQPLPASGLATGMPQQPAAYALG

SEQ ID NO: 1943 - protein, 102 aa, Homo sapiens
LGALQAAPQPGTPTPLRSPQASGPHPSEAQGSPVHAGFSPGPMSFLAGLGLAVGLALLLYCYPPDPKGLPGTRRVLGFSPVIIDRHVSRYLLAFLADDLGGL

SEQ ID NO: 1944 - protein, 570 aa, Homo sapiens
VVFNFAMVLLIFPAILSMDLYRREDRRLDIFCCFTSPCVSRVIQVEPQAYTDTHDNTRYSPPPPYSSHSFAHETQITMQSTVQLRTEYDPHTHVYYTTAEPRSEISVQPVTVTQDTLSCQSPESTSSTRDLLSQFSDSSLHCLEPPCTKWTLSSFAEKHYAPFLLKPKAKVVVIFLFLGLLGVSLYGTTRVRDGLDLTDIVPRETREYDFIAAQFKYFSFYNMYIVTQKADYPNIQHLLYDLHRSFSNVKYVMLEENKQLPKMWLHYFRDWLQGLQDAFDSDWETGKIMPNNYKNGSDDGVLAYKLLVQTGSRDKPIDISQLTKQRLVDADGIINPSAFYIYLTAWVSNDPVAYAASQANIRPHRPEWVHDKADYMPETRLRIPAAEPIEYAQFPFYLNGLRDTSDFVEAIEKVRTICSNYTSLGLSSYPNGYPFLFWEQYIGLRHWLLLFISVVLACTFLVCAVFLLNPWTAGIIVMVLALMTVELFGMMGLIGIKLSAVPVVILIASVGIGVEFTVHVALAFLTAIGDKNRRAVLALEHMFAPVLDGAVSTLLGVLMLAGSEFDFIVR

SEQ ID NO: 1945 - protein, 490 aa, Homo sapiens
LASRSLQFHRRKKNKTSNSALQCFCHLCTKDNFTCVTDGLCFVSVTETTDKVIHNSMCIAEIDLIPRDRPFVCAPSSKTGSVTTTYCCNQDHCNKIELPTTVKSSPGLGPVELAAVIAGPVCFVCISLMLMVYICHNRTVIHHRVPNEEDPSLDRPFISEGTTLKDLIYDMTTSGSGSGLPLLVQRTIARTIVLQESIGKGRFGEVWRGKWRGEEVAVKIFSSREERSWFREAEIYQTVMLRHENILGFIAADNKDNGTWTQLWLVSDYHEHGSLFDYLNRYTVTVEGMIKLALSTASGLAHLHMEIVGTQGKPAIAHRDLKSKNILVKKNGTCCIADLGLAVRHDSATDTIDIAPNHRVGTKRYMAPEVLDDSINMKHFESFKRADIYAMGLVFWEIARRCSIGGIHEDYQLPYYDLVPSDPSVEEMRKVVCEQKLRPNIPNRWQSCEALRVMAKIMRECWYANGAARLTALRIKKTLSQLSQQEGIKM

SEQ ID NO: 1946 - protein, 764 aa, Homo sapiens
LRAPGGGAGAPGGTGGGMGRGPWDAGPSRRLLPLLLLLGLARGAAGAPGPDGLDVCATCHEHATCQQREGKKICICNYGFVGNGRTQCVDKNECQFGATLVCGNHTSCHNTPGGFYCICLEGYRATNNNKTFIPNDGTFCTDIDECEVSGLCRHGGRCVNTHGSFECYCMDGYLPRNGPEPFHPTTDATSCTEIDCGTPPEVPDGYIIGNYTSSLGSQVRYACREGFFSVPEDTVSSCTGLGTWESPKLHCQEINCGNPPEMRHAILVGNHSSRLGGVARYVCQEGFESPGGKITSVCTEKGTWRESTLTCTEILTKINDVSLFNDTCVRWQINSRRINPKISYVISIKGQRLDPMESVREETVNLTTDSRTPEVCLALYPGTNYTVNISTAPPRRSMPAVIGFQTAEVDLLEDDGSFNISIFNETCLKLNRRSRKVGSEHMYQFTVLGQRWYLANFSHATSFNFTTREQVPVVCLDLYPTTDYTVNVTLLRSPKRHSVQITIATPPAVKQTISNISGFNETCLRWRSIKTADMEEMYLFHIWGQRWYQKEFAQEMTFNISSSSRDPEVCLDLRPGTNYNVSLRALSSELPVVISLTTQITEPPLPEVEFFTVHRGPLPRLRLRKAKEKNGPISSYQVLVLPLALQSTFSCDSEGASSFFSNASDADGYVAAELLAKDVPDDAMEIPIGDRLYYGEYYNAPLKRGSDYCIILRITSEWNKVRRHSCAVWAQVKDSSLMLLQMAGVGLGSLAVVIILTFLSFSAV

SEQ ID NO: 1947 - protein, 196 aa, Homo sapiens
LCLWLLRAFPAAPGLATRTGECDCVSGSMAEKRHTRDSEAQRLPDSFKDSPSKGLGPCGWILVAFSFLFTVITFPISIWMCIKIIKEYERAIIFRLGRILQGGAKGPGLFFILPCTDSFIKVDMRTISFDIPPQEILTKDSVTISVDGVVYYRVQNATLAVANITNADSATRLLAQTTLRNVLGTKNLSQISSLRL

SEQ ID NO: 1948 - protein, 137 aa, Homo sapiens
LATRTGECDCVSGSMAEKRHTRDSEAQRLPDSFKDSPSKGLGPCGWILVAFSFLFTVITFPISIWMCIKVIAAEGEMNASRALKEASMVITESPAALQLRYLQTLTTIAAEKNSTIVFPLPIDMLQGIIGAKHSHLG

SEQ ID NO: 1949 - protein, 383 aa, Homo sapiens
LAARGRCGPHSQGPWRFRRQSWPIGVGRRHDARGPRGNPAASGASWRQVYISEIAYPAVRGLLGSCVQLMVVVGILLAYLAGWVLEWRWLAVLGCVPPSLMLLLMCFMPETPRFLLTQHRRQEAMAALRFLWGSEQGWEDPPIGAEQSFHLALLRQPGIYKPFIIGVSLMAFQQLSGVNAVMFYAETIFEEAKFKDSSLASVVVGVIQVLFTAVAALIMDRAGRRLLLVLSGVVMVFSTSAFGAYFKLTQGGPGNSSHVAISAPVSAQPVDASVGLAWLAVGSMCLFIAGFAVGWGPIPWLLMSEIFPLHVKGVATGICVLTNWLMAFLVTKEFSSLMEVLRPYGAFWLASAFCIFSVLFTLFCVPETKGKTLEQITAHFEGR

SEQ ID NO: 1950 - protein, 505 aa, Homo sapiens
LREAGAGRTRRARGGSGARAGRSALAADMTPEDPEETQPLLGPPGGSAPRGRRVFLAAFAAALGPLSFGFALGYSSPAIPSLQRAAPPAPRLDDAAASWFGAVVTLGAAAGGVLGGWLVDRAGRKLSLLLCSVPFVAGFAVITAAQDVWMLLGGRLLTGLACGVASLVAPVYISEIAYPAVRGLLGSCVQLMVVVGILLAYLAGWVLEWRWLAVLGCVPPSLMLLLMCFMPETPRFLLTQHRRQEAMAALRFLWGSEQGWEDPPIGAEQSFHLALLRQPGIYKPFIIGVSLMAFQQLSGVNAVMFYAETIFEEAKFKDSSLASVVVGVIQVLFTAVAALIMDRAGRRLLLVLSGVVMVFSTSAFGAYFKLTQGGPGNSSHVAISAPVSAQPVDASVGLAWLAVGSMCLFIAGFAVGWGPIPWLLMSEIFPLHVKGVATGICVLTNWLMAFLVTKEFSSLMEVLRPYGAFWLASAFCIFSVLFTLFCVPETKGKTLEQITAHFEGR

SEQ ID NO: 1951 - protein, 45 aa, Homo sapiens
VNSTDPACPPVACRPEARSRCVTLAGVQWLLTGMIIAYCSLELLD

SEQ ID NO: 1952 - protein, 56 aa, Homo sapiens
LSKGAERRQAKRTTCDMVGHAGIFQREARSRCVTLAGVQWLLTGMIIAYCSLELLD

SEQ ID NO: 1953 - protein, 103 aa, Homo sapiens
VPSGLTPNRRPSRTVPRRCREPGAALCGLGETRGVCLSPLFYKMWGFLKRPVVVTADINLSLVALTGMGLLSRLWRLTYPRAVVLFRRIRWQFFVEQNWSRIQ

SEQ ID NO: 1954 - protein, 2480 aa, Homo sapiens
LIPNSLCRDQTRPNMGRKTSRVQQGPPRSPACSAHGERSWGLEFPPFRWLLGIAGRTHLAALPPFQWVLAFEIFIPLVLFFILLGLRQKKPTISVKEVAFYTAAPLTSAGILPVMQSLCPDGQRDEFGFLQYANSTVTQLLERLDRVVEEGNLFDPARPSLGSELEALRQHLEALSAGPGTSGSHLDRSTVSSFSLDSVARNPQELWRFLTQNLSLPNSTAQALLAARVDPPEVYHLLFGPSSALDSQSGLHKGQEPWSRLGGNPLFRMEELLLAPALLEQLTCTPGSGELGRILTVPESQKGALQGYRDAVCSGQAAARARRFSGLSAELRNQLDVAKVSQQLGLDAPNGSDSSPQAPPPRRLQALLGDLLDAQKVLQDVDVLSALALLLPQGACTGRTPGPPASGAGGAANGTGAGAVMGPNATAEEGAPSAAALATPDTLQGQCSAFVQLWAGLQPILCGNNRTIEPEALRRGNMSSLGFTSKEQRNLGLLVHLMTSNPKILYAPAGSEVDRVILKANETFAFVGNVTHYAQVWLNISAEIRSFLEQGRLQQHLRWLQQYVAELRLHPEALNLSLDELPPALRQDNFSLPSGMALLQQLDTIDNAACGWIQFMSKVSVDIFKGFPDEESIVNYTLNQAYQDNVTVFASVIFQTRKDGSLPPHVHYKIRQNSSFTEKTNEIRRAYWRPGPNTGGRFYFLYGFVWIQDMMERAIIDTFVGHDVVEPGSYVQMFPYPCYTRDDFLFVIEHMMPLCMVISWVYSVAMTIQHIVAEKEHRLKEVMKTMGLNNAVHWVAWFITGFVQLSISVTALTAILKYGQVLMHSHVVIIWLFLAVYAVATIMFCFLVSVLYSKAKLASACGGIIYFLSYVPYMYVAIREEVAHDKITAFEKCIASLMSTTAFGLGSKYFALYEVAGVGIQWHTFSQSPVEGDDFNLLLAVTMLMVDAVVYGILTWYIEAVHPGMYGLPRPWYFPLQKSYWLGSGRTEAWEWSWPWARTPRLSVMEEDQACAMESRRFEETRGMEEEPTHLPLVVCVDKLTKVYKDDKKLALNKLSLNLYENQVVSFLGHNGAGKTTTMSILTGLFPPTSGSATIYGHDIRTEMDEIRKNLGMCPQHNVLFDRLTVEEHLWFYSRLKSMAQEEIRREMDKMIEDLELSNKRHSLVQTLSGGMKRKLSVAIAFVGGSRAIILDEPTAGVDPYARRAIWDLILKYKPGRTILLSTHHMDEADLLGDRIAIISHGKLKCCGSPLFLKGTYGDGYRLTLVKRPAEPGGPQEPGLASSPPGRAPLSSCSELQVSQFIRKHVASCLLVSDTSTELSYILPSEAAKKGAFERLFQHLERSLDALHLSSFGLMDTTLEEVFLKVSEEDQSLENSEADVKESRKDVLPGAEGPASGEGHAGNLARCSELTQSQASLQSASSVGSARGDEGAGYTDVYGDYRPLFDNPQDPDNVSLQEVEAEALSRVGQGSRKLDGGWLKVRQFHGLLVKRFHCARRNSKALFSQILLPAFFVCVAMTVALSVPEIGDLPPLVLSPSQYHNYTQPRGNFIPYANEERREYRLRLSPDASPQQLVSTFRLPSGVGATCVLKSPANGSLGPTLNLSSGESRLLAARFFDSMCLESFTQGLPLSNFVPPPPSPAPSDSPASPDEDLQAWNVSLPPTAGPEMWTSAPSLPRLVREPVRCTCSAQGTGFSCPSSVGGHPPQMRVVTGDILTDITGHNVSEYLLFTSDRFRLHRYGAITFGNVLKSIPASFGTRAPPMVRKIAVRRAAQVFYNNKGYHSMPTYLNSLNNAILRANLPKSKGNPAAYGITVTNHPMNKTSASLSLDYLLQGTDVVIAIFIIVAMSFVPASFVVFLVAEKSTKAKHLQFVSGCNPIIYWLANYVWDMLNYLVPATCCVIILFVFDLPAYTSPTNFPAVLSLFLLYGWSITPIMYPASFWFEVPSSAYVFLIVINLFIGITATVATFLLQLFEHDKDLKVVNSYLKSCFLIFPNYNLGHGLMEMAYNEYINEYYAKIGQFDKMKSPFEWDIVTRGLVAMAVEGVVGFLLTIMCQYNFLRRPQRMPVSTKPVEDDVDVASERQRVLRGDADNDMVKIENLTKVYKSRKIGRILAVDRLCLGVRPGECFGLLGVNGAGKTSTFKMLTGDESTTGGEAFVNGHSVLKELLQVQQSLGYCPQCDALFDELTAREHLQLYTRLRGISWKDEARVVKWALEKLELTKYADKPAGTYSGGNKRKLSTAIALIGYPAFIFLDEPTTGMDPKARRFLWNLILDLIKTGRSVVLTSHSMEECEALCTRLAIMVNGRLRCLGSIQHLKNRFGDGYMITVRTKSSQSVKDVVRFFNRNFPEAMLKERHHTKVQYQLKSEHISLAQVFSKMEQVSGVLGIEDYSVSQTTLDNVFVNFAKKQSDNLEQQETEPPSALQSPLGCLLSLLRPRSAPTELRALVADEPEDLDTEDEGLISFEEERAQLSFNTDTLC

SEQ ID NO: 1955 - protein, 2038 aa, Homo sapiens
LIPNSLCRDQTRPNMGRKTSRVQQGPPRSPACSAHGERSWGLEFPPFRWLLGIAGRTHLAALPPFQWVLAFEIFIPLVLFFILLGLRQKKPTISVKEAFYTAAPLTSAGILPVMQSLCPDGQRDEFGFLQYANSTVTQLLERLDRVVEEGNLFDPARPSLGSELEALRQHLEALSAGPGTSGSHLDRSTVSSFSLDSVARNPQELWRFLTQNLSLPNSTAQALLAARVDPPEVYHLLFGPSSALDSQSGLHKGQEPWSRLGGNPLFRMEELLLAPALLEQLTCTPGSGELGRILTVPESQKGALQGYRDAVCSGQAAARARRFSGLSAELRNQLDVAKVSQQLGLDAPNGSDSSPQAPPPRRLQALLGDLLDAQKVLQDVDVLSALALLLPQGACTGRTPGPPASGAGGAANGTGAGAVMGPNATAEEGAPSAAALATPDTLQGQCSAFVQLWAGLQPILCGNNRTIEPEALRRGNMSSLGFTSKEQRNLGLLVHLMTSNPKILYAPAGSEVDRVILKANETFAFVGNVTHYAQVWLNISAEIRSFLEQGRLQQHLRWLQQYVAELRLHPEALNLSLDELPPALRQDNFSLPSGMALLQQLDTIDNAACGWIQFMSKVSVDIFKGFPDEESIVNYTLNQAYQDNVTVFASVIFQTRKDGSLPPHVHYKIRQNSSFTEKTNEIRRAYWRPGPNTGGRFYFLYGFVWIQDMMERAIIDTFVGHDVVEPGSYVQMFPYPCYTRDDFLFVIEHMMPLCMVISWVYSVAMTIQHIVAEKEHRLKEVMKTMGLNNAVHWVAWFITGFVQLSISVTALTAILKYGQVLMHSHVVIIWLFLAVYAVATIMFCFLVSVLYSKAKLASACGGIIYFLSYVPYMYVAIREEVAHDKITAFEKCIASLMSTTAFGLGSKYFALYEVAGVGIQWHTFSQSPVEGDDFNLLLAVTMLMVDAVVYGILTWYIEAVHPGMYGLPRPWYFPLQKSYWLGSGRTEAWEWSWPWARTPRLSVMEEDQACAMESRRFEETRGMEEEPTHLPLVVCVDKLTKVYKDDKKLALNKLSLNLYENQVVSFLGHNGAGKTTTMSILTGLFPPTSGSATIYGHDIRTEMDEIRKNLGMCPQHNVLFDRLTVEEHLWFYSRLKSMAQEEIRREMDKMIEDLELSNKRHSLVQTLSGGMKRKLSVAIAFVGGSRAIILDEPTAGVDPYARRAIWDLILKYKPGRTILLSTHHMDEADLLGDRIAIISHGKLKCCGSPLFLKGTYGDGYRLTLVKRPAEPGGPQEPGLASSPPGRAPLSSCSELQVSQFIRKHVASCLLVSDTSTELSYILPSEAAKKGAFERLFQHLERSLDALHLSSFGLMDTTLEEVFLKVSEEDQSLENSEADVKESRKDVLPGAEGPASGEGHAGNLARCSELTQSQASLQSASSVGSARGDEGAGYTDVYGDYRPLFDNPQDPDNVSLQEVEAEALSRVGQGSRKLDGGWLKVRQFHGLLVKRFHCARRNSKALFSQILLPAFFVCVAMTVALSVPEIGDLPPLVLSPSQYHNYTQPRGNFIPYANEERREYRLRLSPDASPQQLVSTFRLPSGVGATCVLKSPANGSLGPTLNLSSGESRLLAARFFDSMCLESFTQGLPLSNFVPPPPSPAPSDSPASPDEDLQAWNVSLPPTAGPEMWTSAPSLPRLVREPVRCTCSAQGTGFSCPSSVGGHPPQMRVVTGDILTDITGHNVSEYLLFTSDRFRLHRYGAITFGNVLKSIPASFGTRAPPMVRKIAVRRAAQVFYNNKGYHSMPTYLNSLNNAILRANLPKSKGNPAAYGITVTNHPMNKTSASLSLDYLLQGTDVVIAIFIIVAMSFVPASFVVFLVAEKSTKAKHLQFVSGCNPIIYWLANYVWDMLNYLVPATCCVIILFVFDLPAYTSPTNFPAVLSLFLLYGWSITPIMYPASFWFEVPSSAYVFLIVINLFIGITATVATFLLQLFEHDKDLKVVNSYLKSCFLIFPNYNLGHGLMEMAYNEYINEYYAKIGEGARGAGKAVGAPQGPEHRP

SEQ ID NO: 1956 - protein, 964 aa, Homo sapiens
MASSRGTLRLCTQKSYWLGSGRTEAWEWSWPWARTPRLSVMEEDQACAMESRRFEETRGMEEEPTHLPLVVCVDKLTKVYKDDKKLALNKLSLNLYENQVVSFLGHNGAGKTTTMSILTGLFPPTSGSATIYGHDIRTEMDEIRKNLGMCPQHNVLFDRLTVEEHLWFYSRLKSMAQEEIRREMDKMIEDLELSNKRHSLVQTLSGGMKRKLSVAIAFVGGSRAIILDEPTAGVDPYARRAIWDLILKYKPGRTILLSTHHMDEADLLGDRIAIISHGKLKCCGSPLFLKGTYGDGYRLTLVKRPAEPGGPQEPGLASSPPGRAPLSSCSELQVSQFIRKHVASCLLVSDTSTELSYILPSEAAKKGAFERLFQHLERSLDALHLSSFGLMDTTLEEVFLKVSEEDQSLENSEADVKESRKDVLPGAEGPASGEGHAGNLARCSELTQSQASLQSASSVGSARGDEGAGYTDVYGDYRPLFDNPQDPDNVSLQEVEAEALSRVGQGSRKLDGGWLKVRQFHGLLVKRFHCARRNSKALFSQILLPAFFVCVAMTVALSVPEIGDLPPLVLSPSQYHNYTQPRGNFIPYANEERREYRLRLSPDASPQQLVSTFRLPSGVGATCVLKSPANGSLGPTLNLSSGESRLLAARFFDSMCLESFTQGLPLSNFVPPPPSPAPSDSPASPDEDLQAWNVSLPPTAGPEMWTSAPSLPRLVREPVRCTCSAQGTGFSCPSSVGGHPPQMRVVTGDILTDITGHNVSEYLLFTSDRFRLHRYGAITFGNVLKSIPASFGTRAPPMVRKIAVRRAAQVFYNNKGYHSMPTYLNSLNNAILRANLPKSKGNPAAYGITVTNHPMNKTSASLSLDYLLQGTDVVIAIFIIVAMSFVPASFVVFLVAEKSTKAKHLQFVSGCNPIIYWLANYVWDMLNYLVPATCCVIILFVFDLPAYTSPTNFPAVLSLFLLYG

SEQ ID NO: 1957 - protein, 1003 aa, Homo sapiens
LIPNSLCRDQTRPNMGRKTSRVQQGPPRSPACSAHGERSWGLEFPPFRWLLGIAGRTHLAALPPFQWVLAFEIFIPLVLFFILLGLRQKKPTISVKEAFYTAAPLTSAGILPVMQSLCPDGQRDEFGFLQYANSTVTQLLERLDRVVEEGNLFDPARPSLGSELEALRQHLEALSAGPGTSGSHLDRSTVSSFSLDSVARNPQELWRFLTQNLSLPNSTAQALLAARVDPPEVYHLLFGPSSALDSQSGLHKGQEPWSRLGGNPLFRMEELLLAPALLEQLTCTPGSGELGRILTVPESQKGALQGYRDAVCSGQAAARARRFSGLSAELRNQLDVAKVSQQLGLDAPNGSDSSPQAPPPRRLQALLGDLLDAQKVLQDVDVLSALALLLPQGACTGRTPGPPASGAGGAANGTGAGAVMGPNATAEEGAPSAAALATPDTLQGQCSAFVQLWAGLQPILCGNNRTIEPEALRRGNMSSLGFTSKEQRNLGLLVHLMTSNPKILYAPAGSEVDRVILKANETFAFVGNVTHYAQVWLNISAEIRSFLEQGRLQQHLRWLQQYVAELRLHPEALNLSLDELPPALRQDNFSLPSGMALLQQLDTIDNAACGWIQFMSKVSVDIFKGFPDEESIVNYTLNQAYQDNVTVFASVIFQTRKDGSLPPHVHYKIRQNSSFTEKTNEIRRAYWRPGPNTGGRFYFLYGFVWIQDMMERAIIDTFVGHDVVEPGSYVQMFPYPCYTRDDFLFVIEHMMPLCMVISWVYSVAMTIQHIVAEKEHRLKEVMKTMGLNNAVHWVAWFITGFVQLSISVTALTAILKYGQVLMHSHVVIIWLFLAVYAVATIMFCFLVSVLYSKAKLASACGGIIYFLSYVPYMYVAIREEVAHDKITAFEKCIASLMSTTAFGLGSKYFALYEVAGVGIQWHTFSQSPVEGDDFNLLLAVTMLMVDAVVYGILTWYIEAVHPEVLLAGQWADRSLGVELAVGTHPPPQCHGGGPGLCHGEPAL

SEQ ID NO: 1958 - protein, 484 aa, Homo sapiens
MGFLHQLQLLLWKNVTLKRRSPWVLAFEIFIPLVLFFILLGLRQKKPTISVKEVSFYTAAPLTSAGILPVMQSLCPDGQRDEFGFLQYANSTVTQLLERLDRVVEEGNLFDPARPSLGSELEALRQHLEALSAGPGTSGSHLDRSTVSSFSLDSVARNPQELWRFLTQNLSLPNSTAQALLAARVDPPEVYHLLFGPSSALDSQSGLHKGQEPWSRLGGNPLFRMEELLLAPALLEQLTCTPGSGELGRILTVPESQKGALQGYRDAVCSGQAAARARRFSGLSAELRNQLDVAKVSQQLGLDAPNGSDSSPQAPPPRRLQALLGDLLDAQKVLQDVDVLSALALLLPQGACTGRTPGPPASGAGGAANGTGAGAVMGPNATAEEGAPSAAALATPDTLQGQCSAFVQLWAGLQPILCGNNRTIEPEALRRGNMSSLGFTSKEQRNLGLLVHLMTSNPKILYAPAGSEVDRVILKVHGSGTLHV

SEQ ID NO: 1959 - protein, 279 aa, Homo sapiens
MGRKTSRVQQGPPRSPACSAHGERSWGLEFPPFRWLLGIAGRTHLAALPPFQWVLAFEIFIPLVLFFILLGLRQKKPTISVKEVSFYTAAPLTSAGILPVMQSLCPDGQRDEFGFLQYANSTVTQLLERLDRVVEEGNLFDPARPSLGSELEALRQHLEALSAGPGTSGSHLDRSTVSSFSLDSVARNPQELWRFLTQNLSLPNSTAQALLAARVDPPEVYHLLFGPSSALDSQSGLHKGQEPWSRLGGNPLFRMEVRASMCGMGLECCLPLGVLLLRG

SEQ ID NO: 1960 - protein, 278 aa, Homo sapiens
MGRKTSRVQQGPPRSPACSAHGERSWGLEFPPFRWLLGIAGRTHLAALPPFQWVLAFEIFIPLVLFFILLGLRQKKPTISVKEAFYTAAPLTSAGILPVMQSLCPDGQRDEFGFLQYANSTVTQLLERLDRVVEEGNLFDPARPSLGSELEALRQHLEALSAGPGTSGSHLDRSTVSSFSLDSVARNPQELWRFLTQNLSLPNSTAQALLAARVDPPEVYHLLFGPSSALDSQSGLHKGQEPWSRLGGNPLFRMEVRASMCGMGLECCLPLGVLLLRG

SEQ ID NO: 1961 - protein, 91 aa, Homo sapiens
MGFLHQLQLLLWKNVTLKRRSPWVLAFEIFIPLVLFFILLGLRQKKPTISVKEAFYTAAPLTSAGILPVMQSLCPDGQRDEFGFLQYANST

SEQ ID NO: 1962 - protein, 56 aa, Homo sapiens
MGFLHQLQLLLWKNVTLKRRSPWVLAFEIFIPLVLFFILLGLRQKKPTISVKEVCK

SEQ ID NO: 1963 - protein, 51 aa, Homo sapiens
LLGIAGRTHLAALPPFQWVLAFEIFIPLVLFFILLGLRQKKPTISVKEVCK

SEQ ID NO: 1964 - protein, 350 aa, Homo sapiens
LTDPGRLWMNNAGHGPTRRLRGLGVLAGVALLAALWLLWLLGSAPRGTPAPQPTITILVWHWPFTDQPPELPSDTCTRYGIARCHLSANRSLLASADAVVFHHRELQTRRSHLPLAQRPRGQPWVWASMESPSHTHGLSHLRGIFNWVLSYRRDSDIFVPYGRLEPHWGPSPPLPAKSRVAAWVVSNFQERQLRARLYRQLAPHLRVDVFGRANGRPLCASCLVPTVAQYRFYLSFENSQHRDYITEKFWRNALVAGTVPVVLGPPRATYEAFVPADAFVHVDDFGSARELAAFLTGMNESRYQRFFAWRDRLRVRLFTDWRERFCAICDRYPHLPRSQVYEDLEGWFQA

SEQ ID NO: 1965 - protein, 217 aa, Homo sapiens
LELVLFPWPHTKVLLPPAPWWPCLLSLLTGLPGMGAGWGGMEACPAGGAPRTRSCHSCPGLCGGLWPRTARVCLGRGEARRRPPLPVGPRPPGGRLPDGVPPASQLQARVPGQRARLADYCAGAMFVQQLLSRGYGFDERAFGGVIFQKKAADTAVGWALGYMLNLTNLIPADPPGLRKGTDFSSWVVLLLLFASALLAALVLLLRQVHSAKLPSTI

SEQ ID NO: 1966 - protein, 389 aa, Homo sapiens
LHPVTWRPSELSPATSAAASAQSPGEDPSRMQVPNSTGPDNATLQMLRNPAIAVALPVVYSLVAAVSIPGNLFSLWVLCRRMGPRSPSVIFMINLSVTDLMLASVLPFQIYYHCNRHHWVFGVLLCNVVTVAFYANMYSSILTMTCISVERFLGVLYPLSSKRWRRRRYAVAACAGTWLLLLTALSPLARTDLTYPVHALGIITCFDVLKWTMLPSVAMWAVFLFTIFILLFLIPFVITVACYTATILKLLRTEEAHGREQRRRAVGLAAVVLLAFVTCFAPNNFVLLAHIVSRLFYGKSYYHVYKLTLCLSCLNNCLDPFVYYFASREFQLRLREYLGCRRVPRDTLDTRRESLFSARTTSVRSEAGAHPEGMEGATRPGLQRQESVF

SEQ ID NO: 1967 - protein, 594 aa, Homo sapiens
LRVERRTRAAEERGGGGLAATGSGRRPPEGGSGGGRRTRARMPLPWSLALPLLLSWVAGGFGNAASARHHGLLASARQPGVCHYGTKLACCYGWRRNSKGVCEATCEPGCKFGECVGPNKCRCFPGYTGKTCSQDVNECGMKPRPCQHRCVNTHGSYKCFCLSGHMLMPDATCVNSRTCAMINCQYSCEDTEEGPQCLCPSSGLRLAPNGRDCLDIDECASGKVICPYNRRCVNTFGSYYCKCHIGFELQYISGRYDCIDINECTMDSHTCSHHANCFNTQGSFKCKCKQGYKGNGLRCSAIPENSVKEVLRAPGTIKDRIKKLLAHKNSMKKKAKIKNVTPEPTRTPTPKVNLQPFNYEEIVSRGGNSHGGKKGNEEKMKEGLEDEKREEKALKNDIEERSLRGDVFFPKVNEAGEFGLILVQRKALTSKLEHKDLNISVDCSFNHGICDWKQDREDDFDWNPADRDNAIGFYMAVPALAGHKKDIGRLKLLLPDLQPQSNFCLLFDYRLAGDKVGKLRVFVKNSNNALAWEKTTSEDEKWKTGKIQLYQGTDATKSIIFEAERGKGKTGEIAVDGVLLVSGLCPDSLLSVDD

SEQ ID NO: 1968 - protein, 595 aa, Homo sapiens
LRVERRTRAAEERGGGGLAATGSGRRPPEGGSGGGRRTRARMPLPWSLALPLLLSWVAGGFGNAASARHHGLLASARQPGVCHYGTKLACCYGWRRNSKGVCEATCEPGCKFGECVGPNKCRCFPGYTGKTCSQDVNECGMKPRPCQHRCVNTHGSYKCFCLSGHMLMPDATCVNSRTCAMINCQYSCEDTEEGPQCLCPSSGLRLAPNGRDCLDIDECASGKVICPYNRRCVNTFGSYYCKCHIGFELQYISGRYDCIDINECTMDSHTCSHHANCFNTQGSFKCKCKQGYKGNGLRCSAIPENSVKEVLRAPGTIKDRIKKLLAHKNSMKKKAKIKNVTPEPTRTPTPKVNLQPFNYEEIVSRGGNSHGGKKGNEEKMKEGLEDEKREEKALKNDIEERSLRGDVFFPKVNEAGEFGLILVQRKALTSKLEHKADLNISVDCSFNHGICDWKQDREDDFDWNPADRDNAIGFYMAVPALAGHKKDIGRLKLLLPDLQPQSNFCLLFDYRLAGDKVGKLRVFVKNSNNALAWEKTTSEDEKWKTGKIQLYQGTDATKSIIFEAERGKGKTGEIAVDGVLLVSGLCPDSLLSVDD

SEQ ID NO: 1969 - protein, 750 aa, Homo sapiens
LMEAETGSSVETGKKANRGTRIALVVFVGGTLVLGTILFLVSQGLLSLQAKQEYCLKPECIEAAAAILSKVNLSVDPCDNFFRFACDGWISNNPIPEDMPSYGVYPWLRHNVDLKLKELLEKSISRRRDTEAIQKAKILYSSCMNEKAIEKADAKPLLHILRHSPFRWPVLESNIGPEGVWSERKFSLLQTLATFRGQYSNSVFIRLYVSPDDKASNEHILKLDQATLSLAVREDYLDNSTEAKSYRDALYKFMVDTAVLLGANSSRAEHDMKSVLRLEIKIAEIMIPHENRTSEAMYNKMNISELSAMIPQFDWLGYIKKVIDTRLYPHLKDISPSENVVVRVPQYFKDLFRILGSERKKTIANYLVWRMVYSRIPNLSRRFQYRWLEFSRVIQGTTTLLPQWDKCVNFIESALPYVVGKMFVDVYFQEDKKEMMEELVEGVRWAFIDMLEKENEWMDAGTKRKAKEKARAVLAKVGYPEFIMNDTHVNEDLKAIKFSEADYFGNVLQTRKYLAQSDFFWLRKAVPKTEWFTNPTTVNAFYSASTNQIRFPAGELQKPFFWGTEYPRSLSYGAIGVIVGHEFTHGFDNNGRKYDKNGNLDPWWSTESEEKFKEKTKCMINQYSNYYWKKAGLNVKGKRTLGENIADNGGLREAFRAYRKWINDRRQGLEEPLLPGITFTNNQLFFLSYAHVRCNSYRPEAAREQVQIGAHSPPQFRVNGAISNFEEFQKAFNCPPNSTMNRGMDSCRLW

SEQ ID NO: 1970 - protein, 156 aa, Homo sapiens
MSVFNLSNAIMGSGILGLAYAMAHTGVIFFLALLLCIALLSSYSIHLLLTCAGIAGIRAYEQLGQRAFGPAGKVVVATVICLHNVGAMSSYLFIIKSELPLVIGTFLYMDPEGRRRRRRRRRRRPGPGGAFAQPSPLCLLLAEAVCQDYPRAKEEK

SEQ ID NO: 1971 - protein, 179 aa, Homo sapiens
MGFWGIGPGALSTSCIPYPLSHGPGSVKAEMLHMYSQKDPLILCVRLAVLLAVTLTVPVVLFPIRRALQQLLFPGKAFSWPRHVAIALILLVLVNVLVICVPTIRDIFGVIGSTSAPSLIFILPSIFYLRIVPSEVEPFLSWPKIQALCFGVLGVLFMAVSLGFMFANWATGQSRMSGH

SEQ ID NO: 1972 - protein, 431 aa, Homo sapiens
VQFEGKTSFGMSVFNLSNAIMGSGILGLAYAMAHTGVIFFLALLLCIALLSSYSIHLLLTCAGIAGIRAYEQLGQRAFGPAGKVVVATVICLHNVGAMSSYLFIIKSELPLVIGTFLYMDPEGDWFLKGNLLIIIVSVLIILPLALMKHLGYLGYTSGLSLTCMLFFLVSVIYKKFQLGCAIGHNETAMESEALVGLPSQGLNSSCEAQMFTVDSQMSYTVPIMAFAFVCHPEVLPIYTELCRPSKRRMQAVANVSIGAMFCMYGLTATFGYLTFYSSVKAEMLHMYSQKDPLILCVRLAVLLAVTLTVPVVLFPIRRALQQLLFPGKAFSWPRHVAIALILLVLVNVLVICVPTIRDIFGVIGSTSAPSLIFILPSIFYLRIVPSEVEPFLSWPKIQALCFGVLGVLFMAVSLGFMFANWATGQSRMSGH

SEQ ID NO: 1973 - protein, 199 aa, Homo sapiens
LGLGLGGGGRPGAGASELFPSVTTDLSVSKQKVCLTCVDFVTVHVCMGFWGIGPGALSTSCIPYPLSHGPGSVKAEMLHMYSQKDPLILCVRLAVLLAVTLTVPVVLFPIRRALQQLLFPGKAFSWPRHVAIALILLVLVNVLVICVPTIRDIFGVIGSTSAPSLIFILPSIFYLRIVPSEVEPFLSWPKIQVSIPGQS

SEQ ID NO: 1974 - protein, 185 aa, Homo sapiens
VQFEGKTSFGMSVFNLSNAIMGSGILGLAYAMAHTGVIFFLALLLCIALLSSYSIHLLLTCAGIAGIRAYEQLGQRAFGPAGKVVVATVICLHNVGAMSSYLFIIKSELPLVIGTFLYMDPEGGLVLEGKPPHHHRQCVNHPAPRPHETLGLPGVHQWSLSDLHAVFPCFGHLQEVPTWLCYRPQ

SEQ ID NO: 1975 - protein, 264 aa, Homo sapiens
VGGRCRRAPWFFCSFFFFFFNFLPIHTQPSAHKDMTTNAGPLHPYWPQHLRLDNFVPNDRPTWHILAGLFSVTGVLVVTTWLLSGRAAVVPLGTWRRLSLCWFAVCGFIHLVIEGWFVLYYEDLLGDQAFLSQLWKEYAKGDSRYILGDNFTVCMETITACLWGPLSLWVVIAFLRQHPLRFILQLVVSVGQIYGDVLYFLTEHRDGFQHGELGHPLYFWFYFVFMNALWLVLPGVLVLDAVKHLTHAQSTLDAKATKAKSKKN

SEQ ID NO: 1976 - protein, 122 aa, Homo sapiens
LSSCRDPQLSQVCVPFTAFILHISLFFSSGKEYAKGDSRYILGDNFTVCMETITACLWGPLSLWVVIAFLRQHPLRFILQLVVSVGKERALEGHWALEGLMGDPQTQMYPCGWDLSTVPFQG

SEQ ID NO: 1977 - protein, 205 aa, Homo sapiens
VMSILLPNMAEFDTISELEEEEEEEAATSSSSPSSSSSVSGPDDDEEDEEEEEEEEEEEEEEEEEEEEEAPPPPRVVSEEHLRRYAPDPVLVRGAGHITVFGLSNKFDTEFPSVLTGKVAPEEFKTSIGRVNACLKKALPVNVKWLLCGCLCCCCTLGCSLWPVICLNKRTRRSIQKLIEWENNRLYHKVILIEFLPKYPIFRPD

SEQ ID NO: 1978 - protein, 225 aa, Homo sapiens
VMSILLPNMAEFDTISELEEEEEEEAATSSSSPSSSSSVSGPDDDEEDEEEEEEEEEEEEEEEEEEEEEAPPPPRVVSEEHLRRYAPDPVLVRGAGHITVFGLSNKFDTEFPSVLTGKVAPEEFKTSIGRVNACLKKALPVNVKWLLCGCLCCCCTLGCSLWPVICLNKRTRRSIQKLIEWENNRLYHKLALHWKLTKRKCETSNMMEYVILIEFLPKYPIFRPD

SEQ ID NO: 1979 - protein, 201 aa, Homo sapiens
LYSVSGPSQLWTLITGVILLAVGIWGKVSLENYFSLLNEKATNVPFVLIATGTVIILLGTFGCFATCRASAWMLKLYAMFLTLVFLVELVAAIVGFVFRHEIKNSFKNNYEKALKQYNSTGDYRSHAVDKIQNTLHCCGVTDYRDWTDTNYYSEKGFPKSCCKLEDCTPQRDADKVNNELIGIFLAYCLSRAITNNQYEIV

SEQ ID NO: 1980 - protein, 314 aa, Homo sapiens
LHPVVFSMGEQNHSPGKELQHRTRAEAPGKKSWHSQAYALGAVSNFMSTFLTFPIYKVVFRQQIHAMAVSEAVRQLWHEGPQYFYRGIYPPLLSKTLQGTLLFGTYDSLLCFLSPVGPHTLGHRWAAGLMSGVVEAVALSPFERVQNVLQDGRKQARFPSTFSILKEFNSYGLWGRLSLGYYRGFWPVLARNSLGSALYFSFKDPIQDGLAEQGLPHWVPALVSGSVNGTITCLVLYPLIVLVANMQSHIGWQNMPSLWASAQDVWNTRGRKLLLIYRGGSLVILRSSVTWGLTTAIHDFLQRKSHSRKELKTD

SEQ ID NO: 1981 - protein, 464 aa, Homo sapiens
LLGDAQQISQANLGVIEEANLRLSLVQASYWHLLLSTNLHTMVFAFWKVFLILSCLAGQVSVVQVTIPDGFVNVTVGSNVTLICIYTTTVASREQLSIQWSFFHKKEMEPISHSSCLSTEGMEEKAVSQCLKMTHARDARGRCSWTSEIYFSQGGQAVAIGQFKDRITGSNDPGNASITISHMQPADSGIYICDVNNPPDFLGQNQGILNVSVLVKPSKPLCSVQGRPETGHTISLSCLSALGTPSPVYYWHKLEGRDIVPVKENFNPTTGILVIGNLTNFEQGYYQCTAINRLGNSSCEIDLTSSHPEVGIIVGALIGSLVGAAIIISVVCFARNKAKAKAKERNSKTIAELEPMTKINPRGESEAMPREDATQLEVTLPSSIHETGPDTIQEPDYEPKPTQEPAPEPAPGSEPMAVPDLDIELELEPETQSELEPEPEPEPESEPGVVVEPLSEDEKGVVKA

SEQ ID NO: 1982 - protein, 408 aa, Homo sapiens
LRLSLVQASYWHLLLSTNLHTMVFAFWKVFLILSCLAGQVSVVQVTIPDGFVNVTVGSNVTLICIYTTTVASREQLSIQWSFFHKKEMEPISIYFSQGGQAVAIGQFKDRITGSNDPGNASITISHMQPADSGIYICDVNNPPDFLGQNQGILNVSVLVKPSKPLCSVQGRPETGHTISLSCLSALGTPSPVYYWHKLEGRDIVPVKENFNPTTGILVIGNLTNFEQGYYQCTAINRLGNSSCEIDLTSSHPEVGIIVGALIGSLVGAAIIISVVCFARNKAKAKAKERNSKTIAELEPMTKINPRGESEAMPREDATQLEVTLPSSIHETGPDTIQEPDYEPKPTQEPAPEPAPGSEPMAVPDLDIELELEPETQSELEPEPEPEPESEPGVVVEPLSEDEKGVVKA

SEQ ID NO: 1983 - protein, 120 aa, Homo sapiens [sequence omitted]

SEQ ID NO: 1984 - protein, 709 aa, Homo sapiens
LSARAQERPEGRGRGKSPPSLPCPSIHPAPASGDPMARAHWGCCPWLVLLCACAWGHTKPVDLGGQDVRNCSTNPPYLPVTVVNTTMSLTALRQQMQTQNLSAYIIPGTDAHMNEYIGQHDERRAWITGFTGSAGTAVVTMKKAAVWTDSRYWTQAERQMDCNWELHKEVGTTPIVTWLLTEIPAGGRVGFDPFLLSIDTWESYDLALQGSNRQLVSITTNLVDLVWGSERPPVPNQPIYALQEAFTGSTWQEKVSGVRSQMQKHQKVPTAVLLSALEETAWLFNLRASDIPYNPFFYSYTLLTDSSIRLFANKSRFSSETLSYLNSSCTGPMCVQIEDYSQVRDSIQAYSLGDVRIWIGTSYTMYGIYEMIPKEKLVTDTYSPVMMTKAVKNSKEQALLKASHVRDAVAVIRYLVWLEKNVPKGTVDEFSGAEIVDKFRGEEQFSSGPSFETISASGLNAALAHYSPTKELNRKLSSDEMYLLDSGGQYWDGTTDITRTVHWGTPSAFQKEAYTRVLIGNIDLSRLIFPAATSGRMVEAFARRALWDAGLNYGHGTGHGIGNFLCVHEWPVGFQSNNIAMAKGMFTSIEPGYYKDGEFGIRLEDVALVVEAKTKYPGSYLTFEVVSFVPYDRNLIDVSLLSPEHLQYLNRYYQTIREKVGPELQRRQLLEEFEWLQQHTEPLAARAPDTASWASVLVVSTLAILGWSV

SEQ ID NO: 1985 - protein, 133 aa, Homo sapiens
MEKFIQSSGQPVPLVVESCIRFINLNGLQHEGIFRVSGAQLRVSEIRDAFERGEDPLVEGCTAHDLDSVAGVLKLYFRSLEPPLFPPDLFGELLASSELEATAERVEHVSRLLWRLPAPVLVVLRYLFTFLNQ

SEQ ID NO: 1986 - protein, 269 aa, Homo sapiens
MGGGTGERLFTPSCLVGLVPLGLRISLVTCPLQCGIMWQLLLPTALLLLVSAGMRTEDLPKAVVFLEPQWYSVLEKDSVTLKCQGAYSPEDNSTQWFHNENLISSQASSYFIDAATVNDSGEYRCQTNLSTLSDPVQLEVHIGWLLLQAPRWVFKEEDPIHLRCHSWKNTALHKVTYLQNGKDRKYFHHNSDFHIPKATLKDSGSYFCRGLVGSKNVSSETVNITITQGLAVSTISSFSPPGYQVSFCLVMVLLFAVDTGLYFSVKTNI

SEQ ID NO: 1987 - protein, 38 aa, Homo sapiens
LELTAQIFYRALIFLIYYLDDIICPHLSPSVFLAMTLL

SEQ ID NO: 1988 - protein, 45 aa, Homo sapiens
VAQFRFWEGAEQVKHRKLKRRNPHFGPIFLLDYFLISILPIVLMF

SEQ ID NO: 1989 - protein, 23 aa, Homo sapiens
LASVLAVILAVFFFFLQGISVST

SEQ ID NO: 1990 - protein, 94 aa, Homo sapiens
VGRGWGAVPRIPLYAFCGDHGLLRDNGKPGAEARSLTTRAWPPLQEDCHQKIDDLFSGKLYLIGIAAIVVAVIMVSGRGRRACSLGCPFRGALC

SEQ ID NO: 1991 - protein, 61 aa, Homo sapiens
LPGGGARRVCVLILAIGARACEPVGVAAAGTIGLSRGRHVAFRGAFMGLSGMGFLFLIVNR

SEQ ID NO: 1992 - protein, 100 aa, Homo sapiens
LTAVRAARHPERRQRPRRGEDPGNSPFHPNPDRQPSRALCSTPRMHRLWIGPAFFLMTSLSVSGAVIPRNGGPGGVSSGPCLLQLLCGQAGSSTIRKIPS

SEQ ID NO: 1993 - protein, 48 aa, Homo sapiens
LDSWPENIRRSFPVFGKAEILKAPGLTGFFVLSTGFCFTTGHKHVRQK

SEQ ID NO: 1994 - protein, 173 aa, Homo sapiens
LSVGSLGTPSAAALATITFIATITALTSGLVTQCHPVPDTVLDSVLGHMPCSVILPPPPIACPPAWGVHRHTSHHTHHPLSARLPPPHKLRRLPPTSARHTRRKRKKEKTSAPPSEGTPPIQEEGGAGVDEEEEEEEEEEGESEAEPVEPPHSGTPQKAKVTDWRTTLVCGDT

SEQ ID NO: 1995 - protein, 36 aa, Homo sapiens
LLLIKTFPLKLASGLISLFQESLWLVGFQYAPVPDC

SEQ ID NO: 1996 - protein, 81 aa, Homo sapiens
VTGCLADLQQSDSDRIMAMMEVQGGPSLGQTCVLIVIFTVLLQSLCVAVTYVYFTNELKQFAENDCQRLMSGQQTGSLLPS

SEQ ID NO: 1997 - protein, 56 aa, Homo sapiens [sequence omitted]

SEQ ID NO: 1998 - protein, 459 aa, Homo sapiens
LPKHPDKSWTEAKAAAPASRPAQSLSPAGDPPSSPPTPYPHAAQRPMLALPLPPCWSGAPPGEEGESAAGPWCFQHPVSLQAGSRCTTVWKRLPRVRDGCTGRPGPGPACCAEPPAAPVSPDLNLLPGRNPPACNRWRHRAPAQRRWCPARPRPLRLLGSTSHASCAMTSPLATTMGSALVKAARGPLSFPQLQGFFRRSIQKNMVYTCHRDKNCIINKVTRNRCQYCRLQKCFEVGMSKEAVRNDRNKKKKEVKEEGSPDSYELSPQLEELITKVSKAHQETFPSLCQLGKYTTNSSADHRVQLDLGLWDKFSELATKCIIKIVEFAKRLPGFTGLSIADQITLLKAACLDILMLRICTRYTPEQDTMTFSDGLTLNRTQMHNAGFGPLTDLVFAFAGQLLPLEMDDTETGLLSAICLICGGAGAPPGVCSVLSLLSHHSMRNLSGRGRGGPSGLFCW

SEQ ID NO: 1999 - protein, 250 aa, Homo sapiens
LGLRPLHQLLSTLASGPGAGGPWAPAHWPACPPLPGLPRLQLPPPHHAQPCPDGVRLPDPGQCQGHPQAPEAAGVAGSGEVAPGGGPVATAAGARPERLSGPQVPCLPSFAPAVLLPRMPMPWLPGPPGPAAGPLRRGCRGTAFPLPWTARCPGLRPQIPLPQRRGAVTPTPASPKPPWGPFRPPYSIFQTPGDHRPSQWLQGLPQRSPKMDTQPQRQQEKHMGIFFLYFNLIPLKCLFFIVFFIIYIIY

SEQ ID NO: 2000 - protein, 249 aa, Homo sapiens
LGAVPSPSLLPVLPARSYNESCPPDPAEQGGPKTCCTLDDVPLISKCGSYPPESCLFSLIGNMGAFMVALICLLRYGQLLEQSRHSWVNTTALITGCTNAAGLLVVGNFQVDHARSLHYVGAGVAFPAGLLFVCLHCALSYQGATAPLDLAVAYLRSVLAVIAFITLVLSGVFFVHESSQLQHGAALCEWVCVIDILIFYGTFSYEFGAVSSDTLVAALQPTPGRACKSSGSSSTSTHLNCAPESIAMI

SEQ ID NO: 2001 - protein, 188 aa, Homo sapiens
LLPSPLSSWPLAPEWSSCALPPFGHFLEGSRSLVVRLVMRYWEPIPKGPVLWEARAEPWATWVPLLCFVLHVISWLLIFSILLVFDYAELMGLKQVYYHVLGLGEPLALKSPRALRLFSHLRHPVCVELLTVLWVVPTLGTDRLLLAFLLTLYLGLAHGLDQQDLRYLRAQLQRKLHLLSRPQDGEAE

SEQ ID NO: 2002 - protein, 114 aa, Homo sapiens
LVSFHMTQAGQSSGCTALWFPSMLFSLSLLSNLNQIGSSHLDRPHIPGQSAQLFIYQMSSQQLQQQPSANKKAGKIHNTPFANQLNPTQHLAKPFQQILPGRQSGSLTSPFLAC

SEQ ID NO: 2003 - protein, 177 aa, Homo sapiens
VAAGSGPGRNSSRAIHWSLPRALVPATGTRASGSQKRQRPPKGQEALWSRPHSRHSAERAGGSHSDPGRLSAPLGLGLPSGRGRLTAMPGRAPLRTVPGALGAWLLGGLWAWTLCGLCSLGAVGAPRPCQAPQQWEGRQVMYQQSSGRNSRALLSYDGLNQRVRVLDERKALIPCKR

SEQ ID NO: 2004 - protein, 170 aa, Homo sapiens
VVPSSPSVAPVSLPHPCLRMPGSEPPLLWRRFSPEVLGLCASTALVWVVMEVLALLLGLYLATVRSDLSTFHLLAYSGYKYVGMILSVLTGLLFGSDGYYVALAWTSSALMYFIVSLVHPPIPLPSLEGKPPPPGQASVLLSSRCALCGQQPWAPTAWGAPSPGSVSSST

SEQ ID NO: 2005 - protein, 75 aa, Homo sapiens
LQAGAKPAGKANHALISEVPGGGLSSVSFSPTLSKSVALTFLLDRPGIGSWRGFASAQKALCFRFSFLFFFLFFF

SEQ ID NO: 2006 - protein, 31 aa, Homo sapiens
VVNGDSKDATLTILLTSVALSFSRVVMFLQP

SEQ ID NO: 2007 - protein, 59 aa, Homo sapiens
MYHGARHFAWSSGYFRFRRGAFLSLFHCKAAAGEVVVLVSLSHPVPSSSLQRHTLSPPP

SEQ ID NO: 2008 - protein, 139 aa, Homo sapiens
VAVVVPSGEEQRYMCHVQHEGLPEPLTLRWEPSSQPTIPIVGIVAGLFLLGAVVTGAVVAAAMWRKKSSGSNCAQYSDASHDTCKEFSPPPPRLNPSCCRRQRIPGETRTFSPPSLPFFTVFRINYLGFVSGGKRAERP

SEQ ID NO: 2009 - protein, 344 aa, Homo sapiens
LGMPQTCDGTGQMHLGSNCCKNGQTLLQRTCHGVSCCGWWFQAARSILGKGPSAQSLAGWTLESEALRRDMGTWLLACICICTCVCLGVSVTGEGQGPRSRTFTCLTNNILRIDCHWSAPELGQGSSPWLLFTRLLAAHISASCGAVSAPSCCHLRQCSCHLTISPSLSTTACLGGSRSAWWTRSTCPGDTSNISSGHCILTWSISPALEPMTTLLSYELAFKKQEEAWEQAQHRDHIVGVTWLILEAFELDPGFIHEARLRVQMATLEDDVVEEERYTGQWSEWSQPVCFQAPQRQGPLIPPWGWPGNTLVAVSIFLLLTGPTYLLFKLSPRLGWGPTGPVCC

SEQ ID NO: 2010 - protein, 36 aa, Homo sapiens
LPESRVRGKLEGVVLLSQLSCLSAMFSGRVWLGLPP

SEQ ID NO: 2011 - protein, 113 aa, Homo sapiens
LVMLCVCVSGVQARFLTPHVCCVCPGTVPYAPCVLCVSCLYMWLPLMLTRWGTILARVGWDQTLFSSSPEIMLPKISSQTQRMGWWGAPCEVAPERWGPLQGTSGVLLQLTLG

SEQ ID NO: 2012 - protein, 144 aa, Homo sapiens
VPVPVFAAAVRATTQRGRGEPPVAEEQEKGGKFRRALGGGGPAPEPRERGSRVLVGGSRTATGSRASPRPCGLYTPYSCRFCCCLWLEGPPGAESLGLDPVPSPFPHSPAGREHLFPRLIPLLGGGGCVCVCVCVCVLGEASLK

SEQ ID NO: 2013 - protein, 83 aa, Homo sapiens
MLSEGKPIPRREGKTATTERTFAVPVWKEIGISWRGLASTAGLFKSSTSILEENNADSRKMACHFGMCLAALLIKGKVLFFTF

SEQ ID NO: 2014 - protein, 87 aa, Homo sapiens
LPVPAWPLSKAGILSWPGLPACPPTMLATHLLFSPLRSRHHGFLQSSAGGASTLGLPAARGQGLQCAPLHFPAHSWGQSGAGRSGRG

SEQ ID NO: 2015 - protein, 122 aa, Homo sapiens
LGQAVAGTPRVWQAAKRSGESRTALLPAARWSDPITLKMKGWGWLALLLGALLGTAWARRSQDLHCGACRALVDELEWEIAQVDPKKTIQMGSFRINPDGSQSVVEVTVTVPPNKVAHSGFG

SEQ ID NO: 2016 - protein, 96 aa, Homo sapiens
VASTLSVLVGLFQVGLGLIHFGFVVTYLSEPLVRGYTTAAAVQVFVSQLKYVFGLHLSSHSGPLSLIYCWRSAGSCPRARLAPWSLQLWLGWCSWW

SEQ ID NO: 2017 - protein, 61 aa, Homo sapiens
LKRRIELTVEYPWRCGALSPTSNCRTGMWSWKCLLFWAVLVTATLCTARPSPTLPEQDCWS

SEQ ID NO: 2018 - protein, 173 aa, Homo sapiens
VRRGGRKRNYATSPAAECTQQPGVTSGRRRGAGSRGPWPWPGTPPPTARRTTFSRQPRPARHLSPESPPLLPIHPREILKNTLYKSTCASFSPRVAPGRKERGKELKQRAFSPGEKNQDVPFSPPSVLTSAPARSPLLGILLMLLRVRRVGIICHLEFLCLADLSSDLPIYQR

SEQ ID NO: 2019 - protein, 52 aa, Homo sapiens
LPSRALRCTPDTGLSISVSSLQVDGVARSRGEALAFQTLAPRVFLFLFFFFF

SEQ ID NO: 2020 - protein, 100 aa, Homo sapiens
LKPSPPPGQKKKKKKTGHILDLLGAWSPVVGIVVTLGAEKKQPGALIRGLSRRVPGWHPMAQPLPFAWTLPHARSPSPWSLRSSSSSPLLAMWSSVWPWA

SEQ ID NO: 2021 - protein, 59 aa, Homo sapiens
LESFFLDSILLINTATSSLLLSLQMLQHNQKFPLFFPSCIFSRFPCVRSPGGKLKVFSR

SEQ ID NO: 2022 - protein, 58 aa, Homo sapiens
LKDNGSILLGSAIVSSAGPGSSFDFCALVILYPVYRLPTSHVIMISFEGELNEIPLRA

SEQ ID NO: 2023 - protein, 64 aa, Homo sapiens
LHTRRLWVLDLAAWAFQTGTPTRMLPTLTAPTLALLLLPKISCLLTSTHPRTQGSRAHFPRAWR

SEQ ID NO: 2024 - protein, 49 aa, Homo sapiens
MRKFTILKGSMLFSISLYLISDLKLLMQFMNLRKKNVNGNQMKKMRFRN

SEQ ID NO: 2025 - protein, 91 aa, Homo sapiens
LGSSCWAGCGSPAGLPPAAQRVLCLALLYLCRFWLRASTSTARSVCPSGGSSSTSHSRGSTSGFPTASVSGCPGHEQAPDSSARLPLWSVW

SEQ ID NO: 2026 - protein, 63 aa, Homo sapiens
LYTAPRKGAPRGRSLKPCLSFTFTFFFFSLEERRTECSILPYLCFYSGTNVGCVCVCFLVLVF

SEQ ID NO: 2027 - protein, 26 aa, Homo sapiens
MKNKWLSFNDACGMCVCAQAIILLRM

SEQ ID NO: 2028 - protein, 53 aa, Homo sapiens
VRLAPSGTEKARRQVSLEKTGLVLAGACVVGLWAAGLQRRKTTSSRFFFQFLL

SEQ ID NO: 2029 - protein, 80 aa, Homo sapiens
MAGSRGGPLLEGSKIGYKRQGGGRKPVSLNSPAALGFFVASFVIGARPTPQQPCPRDLQLVLILAPPTLVWVFSSTEKSR

SEQ ID NO: 2030 - protein, 52 aa, Homo sapiens
MQSPRIQGQRRAQPSQLEAHGAEARSRCVTLAGVQWLLTGMIIAYCSLELLD

SEQ ID NO: 2031 - protein, 67 aa, Homo sapiens
MEPAVSLAVCALLFLLWVRLKGLEFAYLRYLLLRARLGGVQAQQRSAPARAARAGHPEAGAGMEGAG

SEQ ID NO: 2032 - protein, 235 aa, Homo sapiens
LPPFSHRGVCTEIFLRFYFLPQRDGIGEEGMGSGGLGAWSAGSSVSAFHSTNAVSVFSLSLFRACTPVPDPAPWPIPCRGASGKKTGRPARARLRRGHPASPPTARCLTCFATDSCSQPLGASVFGVGELLRDCARPRPPTLKCQHHQHQILRRHTALRTRRPGRLVSSCIKLSPCPLLPLPPVFLLIFFSPFPPSLSAFFPWFSTGKTVPLPPCLHGSPAHVMLPSLFFVCVFI

SEQ ID NO: 2033 - protein, 135 aa, Homo sapiens
VAVVVPSGEEQRYMCHVQHEGLPEPLTLRWEPSSQPTIPIVGIVAGLFLLGAVVTGAVVAAAMWRKKSSGSNCAQYSDASHDTCKEDYACSCSGVCVLISFSPGCPSSLTAAGVIFPVINPTRWKAAPAHRSLWY

SEQ ID NO: 2034 - protein, 36 aa, Homo sapiens
LPSRALVDGVARSRGEALAFQTLAPRVFLFLFFFFF

SEQ ID NO: 2035 - protein, 75 aa, Homo sapiens
VMQTSSEWGMMAFSCWHFSFSDYFTGYFNGQYWLWWIFLVLGLLLFFRGFVNYLKVRNMSESMAAAHRTRYFFLL

SEQ ID NO: 2036 - protein, 121 aa, Homo sapiens
LRANPRRELESLILREFTDCPLPFLHRRPRLPRGNASARDYISRHASPAGPRVLTIAAGLLAGALALLWFVSAVSECQLLALLVALSLLLAFLEQVCQTSQRILRQNQENEQAFIAMAHLL

SEQ ID NO: 2037 - protein, 64 aa, Homo sapiens
LMLPPCRLTWPSPVNTPPEGLCFLFASNHIFSIEKSFLSPVHYESEVYFFFVFFFVPVYFKCIF

SEQ ID NO: 2038 - protein, 82 aa, Homo sapiens
LTFLLQAPCFHIFPLTVSCCCCCYYLQGPQKWNTERRSVRMPICPASTPQPPQGTSCPSAGAKEPVLCLNVATWCSGLMKGM

SEQ ID NO: 2039 - protein, 147 aa, Homo sapiens
VADGSPPPAPPPGHQLRLHCSRPGWRRRAPSAAGSRAPAAELLRPRQDPNRARGRRAGAGDAGTRPLAQATADSPEAEPPRRARVSLKRRIELTVEYPWRCGALSPTSNCRTGMWSWKCLLFWAVLVTATLCTARPSPTLPEQGWQL

SEQ ID NO: 2040 - protein, 67 aa, Homo sapiens
LIGRCTSVSVQGPPPTSFCFGSTVMGCFLLASGMGAFASEDLQCHNKHMPALFYREPWRSWDRGHID

SEQ ID NO: 2041 - protein, 89 aa, Homo sapiens
LGVSWPLAAPWCPTGCACRSASWVSLSAIFTMGSCRKRWWIVPGAGSMLPVLSPIWVPWSPAIQHYSLSTTQLRSLVNPASQSQSCSLG

SEQ ID NO: 2042 - protein, 93 aa, Homo sapiens
VSVEDERLRNCECADLEPLFLYLCKVSLSLTGWSAVIRSSLTAGFQVAGTRIITTLMTTNDFTILLRFVIMLALNIWVTVTVLRYRKTAIKAE

SEQ ID NO: 2043 - protein, 38 aa, Homo sapiens
LSVVCVLISLISGMFFCLMNAILNAVLERGVGVRVYSI

SEQ ID NO: 2044 - protein, 115 aa, Homo sapiens
VASDLGLFLYLHIVVLYTIAKVGLLSTLLCLKLQRFCPDVSWNNAEDCLSGSRPIQFTSSRKYLTPALDPAALLRAEEGGNPMCLLPELPQPIFPQLGTWKKEPRTRLCFSFGPS

SEQ ID NO: 2045 - protein, 116 aa, Homo sapiens
VASDLGLFLYLHIVVLYTIAKVGLLSTLLCLKLQRFCPDVSWNNAEDCLSGSRPIQFTSSRKYLTPALDPAALLRAEEGGNPMCLLPELPQPIFPQLGTWKKEPRTRLCFSFGPSW

SEQ ID NO: 2046 - protein, 299 aa, Homo sapiens
VPTEASPVPLGFTCSCCLSLEPWGLPRNVPHPPPCCPGIGLGGRCSSMAPQRPLVQAGRAAQGGYHACCPLTGLPSGHPELPEDTPAGRLQPDQHRPGPHGTLSPPSLPLPTSCPSACPAPDSDGRVTRDRISGLEPHWLPTSGSCSGVTGPASYSWAAPLHCRVLMLPGEGRPHPGAVGQPRVSPSQVSALLFSSFLWFAIRCGCSLDRKGKYTLTPRACGRQPQEPSLLRCSQGGPTHCLHSEAVAIGPRGCSGSLRWLQESDAAPLPLSCHLAAHRALQGRSRGGLSGCPERGLSD

SEQ ID NO: 2047 - protein, 71 aa, Homo sapiens
LTSGDLVHGVLCFLGGGGAWGLSPAPLPFRSHRVDQRPGRLRCAPGAAQGPRGAADTVGQGDLQTAGQDPQ

SEQ ID NO: 2048 - protein, 72 aa, Homo sapiens
LTSGDLVHGVLCFLGGGGAWGLSPAPLPFRSHRVDQRPGRLRCAPGAAQGPRGAADTVGQGDLQTAGQDPQW

SEQ ID NO: 2049 - protein, 58 aa, Homo sapiens
LSSRFAARAAAAAADCCGARTRTPGIRCRRRRPARRPASVRWFPPCVLWVALSWVFPA

SEQ ID NO: 2050 - protein, 301 aa, Homo sapiens
MLLPTALFSAHTGSPGSLCLRDAAAAAAAAPAVGRALAQDARFRLEMPESVTVQEGLCIFVHCSVFYLEYGWKDSTPAYGHWFREGVSVDQETPVATNNSTQKVQKETQGRFHLLGDPSRNNCSLSIRDARRRDNGSYFFWVARGRTKFSYKYSPLSVYVTALTHRPDILIPEFLKSGHPSNLTCSVPWVCEQGTPPIFSWMSAAPTSLGPRTLHSSVLTIIPRPQDHGTNLICQVTFPGAGVTTERTIQLSVSWKSGTVEEVVVLAVGVVAVKILLLCLCLIILRSLSLHSMSVSTRRRR

SEQ ID NO: 2051 - protein, 307 aa, Homo sapiens
MLLPTALFSAHTGSPGSLCLRDAAAAAAAAPAVGRALAQDARFRLEMPESVTVQEGLCIFVHCSVFYLEYGWKDSTPAYGHWFREGVSVDQETPVATNNSTQKVQKETQGRFHLLGDPSRNNCSLSIRDARRRDNGSYFFWVARGRTKFSYKYSPLSVYVTALTHRPDILIPEFLKSGHPSNLTCSVPWVCEQGTPPIFSWMSAAPTSLGPRTLHSSVLTIIPRPQDHGTNLICQVTFPGAGVTTERTIQLSVSWKSGTVEEVVVLAVGVVAVKILLLCLCLIILSFHKKKAVRAVEVEENVYAVMG

SEQ ID NO: 2052 - protein, 242 aa, Homo sapiens
LEMPESVTVQEGLCIFVHCSVFYLEYGWKDSTPAYGHWFREGVSVDQETPVATNNSTQKVQKETQGRFHLLGDPSRNNCSLSIRDARRRDNGSYFFWVARGRTKFSYKYSPLSVYVTALTHRPDILIPEFLKSGHPSNLTCSVPWVCEQGTPPIFSWMSAAPTSLGPRTLHSSVLTIIPRPQDHGTNLICQVTFPGAGVTTERTIQLSVSWKSGTVEEVVVLAVGVVAVKILLLCLCLIILR

SEQ ID NO: 2053 - protein, 279 aa, Homo sapiens
LEMPESVTVQEGLCIFVHCSVFYLEYGWKDSTPAYGHWFREGVSVDQETPVATNNSTQKVQKETQGRFHLLGDPSRNNCSLSIRDARRRDNGSYFFWVARGRTKFSYKYSPLSVYVTALTHRPDILIPEFLKSGHPSNLTCSVPWVCEQGTPPIFSWMSAAPTSLGPRTLHSSVLTIIPRPQDHGTNLICQVTFPGAGVTTERTIQLSVSYPLMNPVIEASLEDGTGKSGTVEEVVVLAVGVVAVKILLLCLCLIILSFHKKKAVRAVEVEENVYAVMG

SEQ ID NO: 2054 - protein, 37 aa, Homo sapiens
LGKAQDGCLRLSTRVKLAGTVPVIFLGLFGVLLKGGD

SEQ ID NO: 2055 - protein, 50 aa, Homo sapiens
LLPQEHLYTGLRSSMLFLVKQALLCPGAAILSHLRFCLKGFFGKTFSLSP

SEQ ID NO: 2056 - protein, 83 aa, Homo sapiens
MSLFAQPSVVSGGFSCWEASGWTMWAPCWLALQIVSAARLRSIAGGRTMGTSSPSWKGRIQGTAMGTPVSTSRTSQGISLPYT

SEQ ID NO: 2057 - protein, 129 aa, Homo sapiens
LLPSPLSSWPLAPEWSSCALPPFGHFLEGSRSLVVRVYYHVLGLGEPLALKSPRALRLFSHLRHPVCVELLTVLWVVPTLGTDRLLLAFLLTLYLGLAHGLDQQDLRYLRAQLQRKLHLLSRPQDGEAE

SEQ ID NO: 2058 - protein, 61 aa, Homo sapiens
MCPTSFTKGGGREGKGMRRQVSQKCLVLCTCPFVVVVVVKGISFFKRNLRRCGFHFSVTNR

SEQ ID NO: 2059 - protein, 261 aa, Homo sapiens
LSAFSITGIWTVYAMAVMNHHVCPVENWSYNESCPPDPAEQGGPKTCCTLDDVPLISKCGSYPPESCLFSLIGNMGAFMVALICLLRYGQLLEQSRHSWVNTTALITGCTNAAGLLVVGNFQVDHARSLHYVGAGVAFPAGLLFVCLHCALSYQGATAPLDLAVAYLRSVLAVIAFITLVLSGVFFVHESSQLQHGAALCEWVCVIDILIFYGTFSYEFGAVSSDTLVAALQPTPGRACKSSGSSSTSTHLNCAPESIAMI

SEQ ID NO: 2060 - protein, 127 aa, Homo sapiens
LPAAAPHVFSPTVVLTSLSRPLPSLTMAFWTQLMLLLWKNFMYRRRQPVQLLVELLWPLFLFFILVAVRHSHPPLEHHECHFPNKPLPSAGTVPWLQGLICNVNNTCFPQLTPGEEPGRLSNFNDSL

SEQ ID NO: 2061 - protein, 67 aa, Homo sapiens
LIWCLEHLLNRLMFTEVLFVQFWMKLLWAIIALSLRMAKLALEKLLQWKVKGHLMKSIPGKRIPWLV

SEQ ID NO: 2062 - protein, 47 aa, Homo sapiens
LLGLFLFGLISRLGLLGTATLTVWFQTPVPGWIPAIHAPSLISRSSQ

SEQ ID NO: 2063 - protein, 250 aa, Homo sapiens
LPAAAPHVFSPTVVLTSLSRPLPSLTMAFWTQLMLLLWKNFMYRRRQPVQLLVELLWPLFLFFILVAVRHSHPPLEHHECHFPNKPLPSAGTVPWLQGLICNVNNTCFPQLTPGEEPGRLSNFNDSLVSRLLADARTVLGGASAHRTLAGLGKLIATLRAARSTAQPQPTKQSPLEPPMLDVAELLTSLLRTVGCRGGTALTSWDTALGMSWHCPTPGQGPPVPGIQAVPGLCGDAACPSGPPDRVCLTQ

SEQ ID NO: 2064 - protein, 61 aa, Homo sapiens
LARGNHRLFSRILFFSHLLAFFFLPPWLPSPNPAIPSSTPVLPSPAILSHPTCNLLSFAPP

SEQ ID NO: 2065 - protein, 23 aa, Homo sapiens
MNSLSQIFSLITVSTFLVMAHLF

SEQ ID NO: 2066 - protein, 24 aa, Homo sapiens
LGWESEGFLASFLLLLFSSLLLCR

SEQ ID NO: 2067 - protein, 912 aa, Homo sapiens
RSADSGAAGAGRGGGGEAAGKEEEGESRSRRASMGRLASRPLLLALLSLALCRGRVVRVPTATLVRVVGTELVIPCNVSDYDGPSEQNFDWSFSSLGSSFVELASTWEVGFPAQLYQERLQRGEILLRRTANDAVELHIKNVQPSDQGHYKCSTPSTDATVQGNYEDTVQVKVLADSLHVGPSARPPPSLSLREGEPFELRCTAASASPLHTHLALLWEVHRGPARRSVLALTHEGRFHPGLGYEQRYHSGDVRLDTVGSDAYRLSVSRALSADQGSYRCIVSEWIAEQGNWQEIQEKAVEVATVVIQPSVLRAAVPKNVSVAEGKELDLTCNITTDRADDVRPEVTWSFSRMPDSTLPGSRVLARLDRDSLVHSSPHVALSHVDARSYHLLVRDVSKENSGYYYCHVSLWAPGHNRSWHKVAEAVSSPAGVGVTWLEPDYQVYLNASKVPGFADDPTELACRVVDTKSGEANVRFTVSWYYRMNRRSDNVVTSELLAVMDGDWTLKYGERSKQRAQDGDFIFSKEHTDTFNFRIQRTTEEDRGNYYCVVSAWTKQRNNSWVKSKDVFSKPVNIFWALEDSVLVVKARQPKPFFAAGNTFEMTCKVSSKNIKSPRYSVLIMAEKPVGDLSSPNETKYIISLDQDSVVKLENWTDASRVDGVVLEKVQEDEFRYRMYQTQVSDAGLYRCMVTAWSPVRGSLWREAATSLSNPIEIDFQTSGPIFNASVHSDTPSVIRGDLIKLFCIITVEGAALDPDDMAFDVSWFAVHSFGLDKAPVLLSSLDRKGIVTTSRRDWKSDLSLERVSVLEFLLQVHGSEDQDFGNYYCSVTPWVKSPTGSWQKEAEIHSKPVFITVKMDVLNAFKYPLLIGVGLSTVIGLLSCLIGYCSSHWCCKKEVQETRRERRRLMSMEMD

SEQ ID NO: 2068 - protein, 1037 aa, Homo sapiens
RMYLVAGDRGLAGCGHLLVSLLGLLLLLARSGTRALVCLPCDESKCEEPRNCPGSIVQGVCGCCYTCASQRNESCGGTFGIYGTCDRGLRCVIRPPLNGDSLTEYEAGVCEDENWTDDQLLGFKPCNENLIAGCNIINGKCECNTIRTCSNPFEFPSQDMCLSALKRIEEEKPDCSKARCEVQFSPRCPEDSVLIEGYAPPGECCPLPSRCVCNPAGCLRKVCQPGNLNILVSKASGKPGECCDLYECKPVFGVDCRTVECPPVQQTACPPDSYETQVRLTADGCCTLPTRCECLSGLCGFPVCEVGSTPRIVSRGDGTPGKCCDVFECVNDTKPACVFNNVEYYDGDMFRMDNCRFCRCQGGVAICFTAQCGEINCERYYVPEGECCPVCEDPVYPFNNPAGCYANGLILAHGDRWREDDCTFCQCVNGERHCVATVCGQTCTNPVKVPGECCPVCEEPTIITVDPPACGELSNCTLTGKDCINGFKRDHNGCRTCQCINTEELCSERKQGCTLNCPFGFLTDAQNCEICECRPRPKKCRPIICDKYCPLGLLKNKHGCDICRCKKCPELSCSKICPLGFQQDSHGCLICKCREASASAGPPILSGTCLTVDGHHHKNEESWHDGCRECYCLNGREMCALITCPVPACGNPTIHPGQCCPSCADDFVVQKPELSTPSICHAPGGEYFVEGETWNIDSCTQCTCHSGRVLCETEVCPPLLCQNPSRTQDSCCPQCTDQPFRPSLSRNNSVPNYCKNDEGDIFLAAESWKPDVCTSCICIDSVISCFSESCPSVSCERPVLRKGQCCPYCIEDTIPKKVVCHFSGKAYADEERWDLDSCTHCYCLQGQTLCSTVSCPPLPCVEPINVEGSCCPMCPEMYVPEPTNIPIEKTNHRGEVDLEVPLWPTPSENDIVHLPRDMGHLQVDYRDNRLHPSEDSSLDSIASVVVPIIICLSIIIAFLFINQKKQWIPLLCWYRTPTKPSSLNNQLVSVDCKKGTRVQVDSSQRMLRIAEPDARFSGFYSMQKQNHLQADNFYQTV

SEQ ID NO: 2069 - protein, 80 aa, Homo sapiens
LALLGVLRRNGCWFLLGVGPWLVGPPVFCFSPLSCCLVKRKPWRSESPGTRKLMLKIRRRSTWQAQSAFLRPLLQPPSPD

SEQ ID NO: 2070 - protein, 327 aa, Homo sapiens
TWGDACDPAAPQRPLEACFSVQSRTSSPMEPPIPQSAPLTPNSVMVQPLLDSRMSHSRLQHPLTILPIDQVKTSHVENDYIDNPSLALTTGPKRTRGGAPELAPTPARCDQDVTHHWISFSGRPSSVSSSSSTSSDQRLLDHMAPPPVADQASPRAVRIQPKVVHCQPLDLKGPAVPPELDKHFLLCEACGKCKCKECASPRTLPSCWVCNQECLCSAQTLVNYGTCMCLVQGIFYHCTNEDDEGSCADHPCSCSRSNCCARWSFMGALSVVLPCLLCYLPATGCVKLAQRGYDRLRRPGCRCKHTNSVICKAASGDAKTSRPDKPF

SEQ ID NO: 2071 - protein, 266 aa, Homo sapiens
VWQEGMGHEQNQGAALLQMLPLLWLLPHSWAVPEAPTPMWPDDLQNHTFLHTVYCQDGSPSVGLSEAYDEDQLFFFDFSQNTRVPRLPEFADWAQEQGDAPAILFDKEFCEWMIQQIGPKLDGKIPVSRGFPIAEVFTLKPLEFGKPNTLVCFVSNLFPPMLTVNWQHHSVPVEGFGPTFVSAVDGLSFQAFSYLNFTPEPSDIFSCIVTHEIDRYTAIAYWVPRNALPSDLLENVLCGVAFGLGVLGIIVGIVLIIYFRKPCSGD

SEQ ID NO: 2072 - protein, 666 aa, Homo sapiens
TGRQTSTVAPTPATARSRGGRVPIFPCPHPAPTLLSTSRVVTPAVSGSLLVMKALRLSASALFCLLLINGLGAAPPGRPEAQPPPLSSEHKEPVAGDAVPGPKDGSAPEVRGARNSEPQDEGELFQGVDPRALAAVLLQALDRPASPPAPSGSQQGPEEEAAEALLTETVRSQTHSLPAPESPEPAAPPRPQTPENGPEASDPSEELEALASLLQELRDFSPSSAKRQQETAAAETETRTHTLTRVNLESPGPERVWRASWGEFQARVPERAPLPPPAPSQFQARMPDSGPLPETHKFGEGVSSPKTHLGEALAPLSKAYQGVAAPFPKARRPESALLGGSEAGERLLQQGLAQVEAGRRQAEATRQAAAQEERLADLASDLLLQYLLQGGARQRGLGGRGLQEAAEERESAREEEEAEQERRGGEERVGEEDEEAAEAEAEAEEAERARQNALLFAEEEDGEAGAEDKRSQEETPGHRRKEAEGTEEGGEEEDDEEMDPQTIDSLIELSTKLHLPADDVVSIIEEVEEKRKRKKNAPPEPVPPPRAAPAPTHVRSPQPPPPAPAPARDELPDWNEVLPPWDREEDEVYPPGPYHPFPNYIRPRTLQPPSALRRRHYHHALPPSRHYPGREAQARRAQEEAEAEERRLQEQEELENYIEHVLLRRP

SEQ ID NO: 2073 - protein, 418 aa, Homo sapiens
RMEFVKCLGHPEEFYNLVRFRIGGKRKVMPKMDQDSLSSSLKTCYKYLNQTSRSFAAVIQALDGEMRNAVCIFYLVLRALDTLEDDMTISVEKKVPLLHNFHSFLYQPDWRFMESKEKDRQVLEDFPTISLEFRNLAEKYQTVIADICRRMGIGMAEFLDKHVTSEQEWDKYCHYVAGLVGIGLSRLFSASEFEDPLVGEDTERANSMGLFLQKTNIIRDYLEDQQGGREFWPQEVWSRYVKKLGDFAKPENIDLAVQCLNELITNALHHIPDVITYLSRLRNQSVFNFCAIPQVMAIATLAACYNNQQVFKGAVKIRKGQAVTLMMDATNMPAVKAIIYQYMEEIYHRIPDSDPSSSKTRQIISTIRTQNLPNCQLISRSHYSPIYLSFVMLLAALSWQYLTTLSQVTEDYVQTGEH

SEQ ID NO: 2074 - protein, 261 aa, Homo sapiens
KAGKMVSWMICRLVVLVFGMLCPAYASYKAVKTKNIREYVRWMMYWIVFALFMAAEIVTDIFISWFPFYYEIKMAFVLWLLSPYTKGASLLYRKFVHPSLSRHEKEIDAYIVQAKERSYETVLSFGKRGLNIAASAAVQAATKSQGALAGRLRSFSMQDLRSISDAPAPAYHDPLYLEDQVSHRRPPIGYRAGGLQDSDTEDECWSDTEAVPRAPARPREKPLIRSQSLRVVKRKPPVREGTSRSLKVRTRKKTVPSDVDS

SEQ ID NO: 2075 - protein, 799 aa, Homo sapiens
KMNLQPIFWIGLISSVCCVFAQTDENRCLKANAKSCGECIQAGPNCGWCTNSTFLQEGMPTSARCDDLEALKKKGCPPDDIENPRGSKDIKKNKNVTNRSKGTAEKLKPEDITQIQPQQLVLRLRSGEPQTFTLKFKRAEDYPIDLYYLMDLSYSMKDDLENVKSLGTDLMNEMRRITSDFRIGFGSFVEKTVMPYISTTPAKLRNPCTSEQNCTSPFSYKNVLSLTNKGEVFNELVGKQRISGNLDSPEGGFDAIMQVAVCGSLIGWRNVTRLLVFSTDAGFHFAGDGKLGGIVLPNDGQCHLENNMYTMSHYYDYPSIAHLVQKLSENNIQTIFAVTEEFQPVYKELKNLIPKSAVGTLSANSSNVIQLIIDAYNSLSSEVILENGKLSEGVTISYKSYCKNGVNGTGENGRKCSNISIGDEVQFEISITSNKCPKKDSDSFKIRPLGFTEEVEVILQYICECECQSEGIPESPKCHEGNGTFECGACRCNEGRVGRHCECSTDEVNSEDMDAYCRKENSSEICSNNGECVCGQCVCRKRDNTNEIYSGKFCECDNFNCDRSNGLICGGNGVCKCRVCECNPNYTGSACDCSLDTSTCEASNGQICNGRGICECGVCKCTDPKFQGQTCEMCQTCLGVCAEHKECVQCRAFNKGEKKDTCTQECSYFNITKVESRDKLPQPVQPDPVSHCKEKDVDDCWFYFTYSVNGNNEVMVHVVENPECPTGPDIIPIVAGVVAGIVLIGLALLLIWKLLMIIHDRREFAKFEKEKMNAKWDTGENPIYKSAVTTVVNPKYEGK

SEQ ID NO: 2076 - protein, 49 aa, Homo sapiens
ISMLCKRYCPSNIFHHSLELFRLPFELRGPWLCCSTLILSTAFCITFEV

SEQ ID NO: 2077 - protein, 499 aa, Homo sapiens
ITAMGTQKVTPALIFAITVATIGSFQFGYNTGVINAPEKIIKEFINKTLTDKGNAPPSEVLLTSLWSLSVAIFSVGGMIGSFSVGLFVNRFGRRNSMLIVNLLAVTGGCFMGLCKVAKSVEMLILGRLVIGLFCGLCTGFVPMYIGEISPTALRGAFGTLNQLGIVVGILVAQIFGLEFILGSEELWPLLLGFTILPAILQSAALPFCPESPRFLLINRKEEENAKQILQRLWGTQDVSQDIQEMKDESARMSQEKQVTVLELFRVSSYRQPIIISIVLQLSQQLSGINAVFYYSTGIFKDAGVQEPIYATIGAGVVNTIFTVVSLFLVERAGRRTLHMIGLGGMAFCSTLMTVSLLLKDNYNGMSFVCIGAILVFVAFFEIGPGPIPWFIVAELFSQGPRPAAMAVAGCSNWTSNFLVGLLFPSAAHYLGAYVFIIFTGFLITFLAFTFFKVPETRGRTFEDITRAFEGQAHGADRSGKDGVMEMNSIEPAKETTTNV

SEQ ID NO: 2078 - protein, 31 aa, Homo sapiens
LTWTMTFNGTIMIGCTVTQHVYLLLLLLLGL

SEQ ID NO: 2079 - protein, 305 aa, Homo sapiens
IAMARGKAKEEGSWKKFIWNSEKKEFLGRTGGSWFKILLFYVIFYGCLAGIFIGTIQVMLLTISEFKPTYQDRVAPPGLTQIPQIQKTEISFRPNDPKSYEAYVLNIVRFLEKYKDSAQRDDMIFEDCGDVPSEPKERGDFNHERGERKVCRFKLEWLGNCSGLNDETYGYKEGKPCIIIKLNRVLGFKPKPPKNESLETYPVMKYNPNVLPVQCTGKRDEDKDKVGNVEYFGLGNSPGFPLQYYPYYGKLLQPKYLQPLLAVQFTNLTMDTEIRIECKAYGENIGYSEKDRFQGRFDVKIEVKS

SEQ ID NO: 2080 - protein, 262 aa, Homo sapiens
IPVPDFIMGNSCYNIVATLLLVLNFERTRSLQDPCSNCPAGTFCDNNRNQICSPCPPNSFSSAGGQRTCDICRQCKGVFRTRKECSSTSNAECDCTPGFHCLGAGCSMCEQDCKQGQELTKKGCKDCCFGTFNDQKRGICRPWTNCSLDGKSVLVNGTKERDVVCGPSPADLSPGASSVTPPAPAREPGHSPQIISFFLALTSTALLFLLFFLTLRFSVVKRGRKKLLYIFKQPFMRPVQTTQEEDGCSCRFPEEEEGGCEL

SEQ ID NO: 2081 - protein, 51 aa, Homo sapiens
IEHMKYSKMKIYGKSMTNMEKRDLRIIKVASMKAGTIIVMILVFMMMILKS

SEQ ID NO: 2082 - protein, 31 aa, Homo sapiens
MHLASFSFSLLAFYLAFWISFNFLKTLKYDF

SEQ ID NO: 2083 - protein, 41 aa, Homo sapiens
LAAIKLVAKGRRRGLSFRGSLPFLCCRSVTLALSPCLDHFL

SEQ ID NO: 2084 - protein, 38 aa, Homo sapiens
MVDSLSITFISMFLEVGKCIGLLVKHVLGIIFSSLGND

SEQ ID NO: 2085 - protein, 269 aa, Homo sapiens
IFTEQSMITFLPLLLGLSLGCTGAGGFVAHVESTCLLDDAGTPKDFTYCISFNKDLLTCWDPEENKMAPCEFGVLNSLANVLSQHLNQKDTLMQRLRNGLQNCATHTQPFWGSLTNRTRPPSVQVAKTTPFNTREPVMLACYVWGFYPAEVTITWRKNGKLVMPHSSAHKTAQPNGDWTYQTLSHLALTPSYGDTYTCVVEHTGAPEPILRDWTPGLSPMQTLKVSVSAVTLGLGLIIFSLGVISWRRAGHSSYTPLPGSNYSEGWHIS

SEQ ID NO: 2086 - protein, 1065 aa, Homo sapiens
IPASRMEQLNELELLMEKSFWEEAELPAELFQKKVVASFPRTVLSTGMDNRYLVLAVNTVQNKEGNCEKRLVITASQSLENKELCILRNDWCSVPVEPGDIIHLEGDCTSDTWIIDKDFGYLILYPDMLISGTSIASSIRCMRRAVLSETFRSSDPATRQMLIGTVLHEVFQKAINNSFAPEKLQELAFQTIQEIRHLKEMYRLNLSQDEIKQEVEDYLPSFCKWAGDFMHKNTSTDFPQMQLSLPSDNSKDNSTCNIEVVKPMDIEESIWSPRFGLKGKIDVTVGVKIHRGYKTKYKIMPLELKTGKESNSIEHRSQVVLYTLLSQERRADPEAGLLLYLKTGQMYPVPANHLDKRELLKLRNQMAFSLFHRISKSATRQKTQLASLPQIIEEEKTCKYCSQIGNCALYSRAVEQQMDCSSVPIVMLPKIEEETQHLKQTHLEYFSLWCLMLTLESQSKDNKKNHQNIWLMPASEMEKSGSCIGNLIRMEHVKIVCDGQYLHNFQCKHGAIPVTNLMAGDRVIVSGEERSLFALSRGYVKEINMTTVTCLLDRNLSVLPESTLFRLDQEEKNCDIDTPLGNLSKLMENTFVSKKLRDLIIDFREPQFISYLSSVLPHDAKDTVACILKGLNKPQRQAMKKVLLSKDYTLIVGMPGTGKTTTICTLVRILYACGFSVLLTSYTHSAVDNILLKLAKFKIGFLRLGQIQKVHPAIQQFTEQEICRSKSIKSLALLEELYNSQLIVATTCMGINHPIFSRKIFDFCIVDEASQISQPICLGPLFFSRRFVLVGDHQQLPPLVLNREARALGMSESLFKRLEQNKSAVVQLTVQYRMNSKIMSLSNKLTYEGKLECGSDKVANAVINLRHFKDVKLELEFYADYSDNPWLMGVFEPNNPVCFLNTDKVPAPEQVEKGGVSNVTEAKLIVFLTSIFVKAGCSPSDIGIIAPYRQQLKIINDLLARSIGMVEVNTVDKYQGRDKSIVLVSFVRSNKDGTVGELLKDWRRLNVAITRAKHKLILLGCVPSLNCYPPLEKLLNHLNSEKLIIDLPSREHESLCHILGDFQRE

SEQ ID NO: 2087 - protein, 61 aa, Homo sapiens
TTARRAFPIPFGSKSNMATLKDQLIYNLLKEEQTPQNKITVVGVGAVGMACAISILMKWIS

SEQ ID NO: 2088 - protein, 512 aa, Homo sapiens
ILRQEGRDTPERRREGWGRGRGGRSRRRQKPKAKRARAAHTGWEAAVCAASSRRGEAAVHGASQSAGSMGKGGNQGEGAAEREVSVPTFSWEEIQKHNLRTDRWLVIDRKVYNITKWSIQHPGGQRVIGHYAGEDATDAFRAFHPDLEFVGKFLKPLLIGELAPEEPSQDHGKNSKITEDFRALRKTAEDMNLFKTNHVFFLLLLAHIIALESIAWFTVFYFGNGWIPTLITAFVLATSQAQAGWLQHDYGHLSVYRKPKWNHLVHKFVIGHLKGASANWWNHRHFQHHAKPNIFHKDPDVNMLHVFVLGEWQPIEYGKKKLKYLPYNHQHEYFFLIGPPLLIPMYFQYQIIMTMIVHKNWVDLAWAVSYYIRFFITYIPFYGILGALLFLNFIRFLESHWFVWVTQMNHIVMEIDQEAYRDWFSSQLTATCNVEQSFFNDWFSGHLNFQIEHHLFPTMPRHNLHKIAPLVKSLCAKHGIEYQEKPLLRALLDIIRSLKKSGKLWLDAYLHK

SEQ ID NO: 2089 - protein, 38 aa, Homo sapiens
LSSSSVIPPFLPSRHRPSLPILTTSLVCLFRFMKASVP

SEQ ID NO: 2090 - protein, 642 aa, Homo sapiens
TPAAPACRSPSPGGAPASFPGRAPRSLASQPAARAAAAPAMPSAKQRGSKGGHGAASPSEKGAHPSGGADDVAKKPPPAPQQPPPPPAPHPQQHPQQHPQNQAHGKGGHRGGGGGGGKSSSSSSASAAAAAAAASSSASCSRRLGRALNFLFYLALVAAAAFSGWCVHHVLEEVQQVRRSHQDFSRQREELGQGLQGVEQKVQSLQATFGTFESILRSSQHKQDLTEKAVKQGESEVSRISEVLQKLQNEILKDLSDGIHVVKDARERDFTSLENTVEERLTELTKSINDNIAIFTEVQKRSQKEINDMKAKVASLEESEGNKQDLKALKEAVKEIQTSAKSREWDMEALRSTLQTMESDIYTEVRELVSLKQEQQAFKEAADTERLALQALTEKLLRSEESVSRLPEEIRRLEEELRQLKSDSHGPKEDGGFRHSEAFEALQQKSQGLDSRLQHVEDGVLSMQVASARQTESLESLLSKSQEHEQRLAALQGRLEGLGSSEADQDGLASTVRSLGETQLVLYGDVEELKRSVGELPSTVESLQKVQEQVHTLLSQDQAQAARLPPQDFLDRLSSLDNLKASVSQVEADLKMLRTAVDSLVAYSVKIETNENNLESAKGLLDDLRNDLDRLFVKVEKIHEKV

SEQ ID NO: 2091 - protein, 462 aa, Homo sapiens
IGGCSDPGLPQGVPQQCLAAWAGTLSLKQRSHFFWAHEAAVPCSAEHGGAMPLQLLLLLILLGPGNSLQLWDTWADEAEKALGPLLARDRRQATEYEYLDYDFLPETEPPEMLRNSTDTTPLTGPGTPESTTVEPAARRSTGLDAGGAVTELTTELANMGNLSTDSAAMEIQTTQPAATEAQTTQPVPTEAQTTPLAATEAQTTRLTATEAQTTPLAATEAQTTPPAATEAQTTQPTGLEAQTTAPAAMEAQTTAPAAMEAQTTPPAAMEAQTTQTTAMEAQTTAPEATEAQTTQPTATEAQTTPLAAMEALSTEPSATEALSMEPTTKRGLFIPFSVSSVTHKGIPMAASNLSVNYPVGAPDHISVKQCLLAILILALVATIFFVCTVVLAVRLSRKGHMYPVRNYSPTEMVCISSLLPDGGEGPSATANGGLSKAKSPGLTPEPREDREGDDLTLHSFLP

SEQ ID NO: 2092 - protein, 67 aa, Homo sapiens
MQERKKRGWYPGSSRCNFREVLVCLVRELRGPGIVFKVVLLPTCPVVPAPVLTATLPFFHPRVGSTK

SEQ ID NO: 2093 - protein, 185 aa, Homo sapiens
IMLQMAGQCSQNEYFDSLLHACIPCQLRCSSNTPPLTCQRYCNASVTNSVKGTNAILWTCLGLSLIISLAVFVLMFLLRKINSEPLKDEFKNTGSGLLGMANIDLEKSRTGDEIILPRGLEYTVEECTCEDCIKSKPKVDSDHCFPLPAMEEGATILVTTKTNDYCKSLPAALSATEIEKSISAR

SEQ ID NO: 2094 - protein, 227 aa, Homo sapiens
KMPGGPGVLQALPATIFLLFLLSAVYLGPGCQALWMHKVPASLMVSLGEDAHFQCPHNSSNNANVTWWRVLHGNYTWPPEFLGPGEDPNGTLIIQNVNKSHGGIYVCRVQEGNESYQQSCGTYLRVRQPPPRPFLDMGEGTKNRIITAEGIILLFCAVVPGTLLLFRKRWQNEKLGLDAGDEYEDENLYEGLNLDDCSMYEDISRGLQGTYQDVGSLNIGDVQLEKP

SEQ ID NO: 2095 - protein, 261 aa, Homo sapiens
ISVSSEVEGPRRVSPAPDTLGMEESVVRPSVFVVDGQTDIPFTRLGRSHRRQSCSVARVGLGLLLLLMGAGLAVQGWFLLQLHWRLGEMVTRLPDGPAGSWEQLIQERRSHEVNPAAHLTGANSSLTGSGGPLLWETQLGLAFLRGLSYHDGALVVTKAGYYYIYSKVQLGGVGCPLGLASTITHGLYKRTPRYPEELELLVSQQSPCGRATSSSRVWWDSSFLGGVVHLEAGEKVVVRVLDERLVRLRDGTRSYFGAFMV

SEQ ID NO: 2096 - protein, 296 aa, Homo sapiens
TNEPSTGRMERPQPDSMPQDLSEALKEATKEVHTQAENAEFMRNFQKGQVTRDGFKLVMASLYHIYVALEEEIERNKESPVFAPVYFPEELHRKAALEQDLAFWYGPRWQEVIPYTPAMQRYVKRLHEVGRTEPELLVAHAYTRYLGDLSGGQVLKKIAQKALDLPSSGEGLAFFTFPNIASATKFKQLYRSRMNSLEMTPAVRQRVIEEAKTAFLLNIQLFEELQELLTHDTKDQSPSRAPGLRQRASNKVQDSAPVETPRGKPPLNTRSQAPLLRWVLTLSFLVATVAVGLYAM

SEQ ID NO: 2097 - protein, 61 aa, Homo sapiens
LPAATQPPSRPAPHETRPELPSSPSHEHRNVSDPHGGGGLPAAQFLHLLLLFSAWRGCGFR

SEQ ID NO: 2098 - protein, 51 aa, Homo sapiens
MTKTALLKLFVAIVITFILILPEYFKTPKETWGYKKERQLFDQGVFSREDN

SEQ ID NO: 2099 - protein, 475 aa, Homo sapiens
RRRPGALFASLGVLLGPRPPPGIPRTRACSMGGVGEPGPREGPAQPGAPLPTFCWEQIRAHDQPGDKWLVIERRVYDISRWAQRHPGGSRLIGHHGAEDATDAFRAFHQDLNFVRKFLQPLLIGELAPEEPSQDGPLNAQLVEDFRALHQAAEDMKLFDASPTFFAFLLGHILAMEVLAWLLIYLLGPGWVPSALAAFILAISQAQSWCLQHDLGHASIFKKSWWNHVAQKFVMGQLKGFSAHWWNFRHFQHHAKPNIFHKDPDVTVAPVFLLGESSVEYGKKKRRYLPYNQQHLYFFLIGPPLLTLVNFEVENLAYMLVCMQWADLLWAASFYARFFLSYLPFYGVPGVLLFFVAVRVLESHWFVWITQMNHIPKEIGHEKHRDWVSSQLAATCNVEPSLFTNWFSGHLNFQIEHHLFPRMPRHNYSRVAPLVKSLCAKHGLSYEVKPFLTALVDIVRSLKKSGDIWLDAYLHQ

SEQ ID NO: 2100 - protein, 627 aa, Homo sapiens
KNFGSARGTRDQAETRGASPGRGSGSRPEMPCIQAQYGTPAPSPGPRDHLASDPLTPEFIKPTMDLASPEAAPAAPTALPSFSTFMDGYTGEFDTFLYQLPGTVQPCSSASSSASSTSSSSATSPASASFKFEDFQVYGCYPGPLSGPVDEALSSSGSDYYGSPCSAPSPSTPSFQPPQLSPWDGSFGHFSPSQTYEGLRAWTEQLPKASGPPQPPAFFSFSPPTGPSPSLAQSPLKLFPSQATHQLGEGESYSMPTAFPGLAPTSPHLEGSGILDTPVTSTKARSGAPGGSEGRCAVCGDNASCQHYGVRTCEGCKGFFKRTVQKNAKYICLANKDCPVDKRRRNRCQFCRFQKCLAVGMVKEVVRTDSLKGRRGRLPSKPKQPPDASPANLLTSLVRAHLDSGPSTAKLDYSKFQELVLPHFGKEDAGDVQQFYDLLSGSLEVIRKWAEKIPGFAELSPADQDLLLESAFLELFILRLAYRSKPGEGKLIFCSGLVLHRLQCARGFGDWIDSILAFSRSLHSLLVDVPAFACLSALVLITDRHGLQEPRRVEELQNRIASCLKEHVAAVAGEPQPASCLSRLLGKLPELRTLCTQGLQRIFYLKLEDLVPPPPIIDKIFMDTLPF

SEQ ID NO: 2101 - protein, 35 aa, Homo sapiens
LTWTMTFNGTIMIGCTVTQHVYLLLLLLLGPLRRS

SEQ ID NO: 2102 - protein, 43 aa, Homo sapiens
RFEDAAFGLDEFQILLACFLILICLYTYTLCTKCRVIIMLTWT

SEQ ID NO: 2103 - protein, 41 aa, Homo sapiens [sequence omitted]

SEQ ID NO: 2104 - protein, 602 aa, Homo sapiens
RISDLGNNTLDMAPEINLPGPMSLIDNTKGQLVVNPEALKILSAITQPVVVVAIVGLYRTGKSYLMNKLAGKKNGFSLGSTVKSHTKGIWMWCVPHPKKPEHTLVLLDTEGLGDIEKGDNENDSWIFALAILLSSTFVYNSMGTINQQAMDQLHYVTELTDRIKANSSPGNNSVDDSADFVSFFPAFVWTLRDFTLELEVDGEPITADDYLELSLKLRKGTDKKSKSFNDPRLCIRKFFPKRKCFVFDWPAPKKYLAHLEQLKEEELNPDFIEQVAEFCSYILSHSNVKTLSGGIPVNGPRLESLVLTYVNAISSGDLPCMENAVLALAQIENSAAVEKAIAHYEQQMGQKVQLPTETLQELLDLHRDSEREAIEVFMKNSFKDVDQMFQRKLGAQLEARRDDFCKQNSKASSDCCMALLQDIFGPLEEDVKQGTFSKPGGYRLFTQKLQELKNKYYQVPRKGIQAKEVLKKYLESKEDVADALLQTDQSLSEKEKAIEVERIKAESAEAAKKMLEEIQKKNEEMMEQKEKSYQEHVKQLTEKMERDRAQLMAEQEKTLALKLQEQERLLKEGFENESKRLQKDIWDIQMRSKSLEPICNIL

SEQ ID NO: 2105 - protein, 46 aa, Homo sapiens
KTFFYTINNFFLSYTFFRYKRLTNIVQFLLLVGFLSCVSLVFVKFN

SEQ ID NO: 2106 - protein, 46 aa, Homo sapiens
IDDTIFHVLLKQGVGKSILRGHFHHQFSFFFLVVALFWGGWVCWFH

SEQ ID NO: 2107 - protein, 320 aa, Homo sapiens
KMTNSSFFCPVYKDLEPFTYFFYLVFLVGIIGSCFATWAFIQKNTNHRCVSIYLINLLTADFLLTLALPVKIVVDLGVAPWKLKIFHCQVTACLIYINMYLSIIFLAFVSIDRCLQLTHSCKIYRIQEPGFAKMISTVVWLMVLLIMVPNMMIPIKDIKEKSNVGCMEFKKEFGRNWHLLTNFICVAIFLNFSAIILISNCLVIRQLYRNKDNENYPNVKKALINILLVTTGYIICFVPYHIVRIPYTLSQTEVITDCSTRISLFKAKEATLLLAVSNLCFDPILYYHLSKAFRSKVTETFASPKETKAQKEKLRCENNA

SEQ ID NO: 2108 - protein, 161 aa, Homo sapiens
IYLPVRSTNSSVRKMAGNSILLAAVSILSACQQSYFALQVGKARLKYKVTPPAVTGSPEFERVFRAQQNCVEFYPIFIITLWMAGWYFNQVFATCLGLVYIYGRHLYFWGYSEAAKKRITGFRLSLGILALLTLLGALGIANSFLDEYLDLNIAKKLRRQF

SEQ ID NO: 2109 - protein, 662 aa, Homo sapiens
VMAFDVSCFFWVVLFSAGCKVITSWDQMCIEKEANKTYNCENLGLSEIPDTLPNTTEFLEFSFNFLPTIHNRTFSRLMNLTFLDLTRCQINWIHEDTFQSHHQLSTLVLTGNPLIFMAETSLNGPKSLKHLFLIQTGISNLEFIPVHNLENLESLYLGSNHISSIKFPKDFPARNLKVLDFQNNAIHYISREDMRSLEQAINLSLNFNGNNVKGIELGAFDSTIFQSLNFGGTPNLSVIFNGLQNSTTQSLWLGTFEDIDDEDISSAMLKGLCEMSVESLNLQEHRFSDISSTTFQCFTQLQELDLTATHLKGLPSGMKGLNLLKKLVLSVNHFDQLCQISAANFPSLTHLYIRGNVKKLHLGVGCLEKLGNLQTLDLSHNDIEASDCCSLQLKNLSHLQTLNLSHNEPLGLQSQAFKECPQLELLDLAFTRLHINAPQSPFQNLHFLQVLNLTYCFLDTSNQHLLAGLPVLRHLNLKGNHFQDGTITKTNLLQTVGSLEVLILSSCGLLSIDQQAFHSLGKMSHVDLSHNSLTCDSIDSLSHLKGIYLNLAANSINIISPRLLPILSQQSTINLSHNPLDCTCSNIHFLTWYKENLHKLEGSEETTCANPPSLRGVKLSDVKLSCGITAIGIFFLIVFLLLLAILLFFAVKYLLRWKYQHI

SEQ ID NO: 2110 - protein, 39 aa, Homo sapiens
IIGVQLLLLLVPLSNYQILNRYAVTCVGFVIKMLLIKIV

SEQ ID NO: 2111 - protein, 1294 aa, Homo sapiens
ISRLGGRSKEREVGMDLEGDRNGGAKKKNFFKLNNKSEKDKKEKKPTVSVFSMFRYSNWLDKLYMVVGTLAAIIHGAGLPLMMLVFGEMTDIFANAGNLEDLMSNITNRSDINDTGFFMNLEEDMTRYAYYYSGIGAGVLVAAYIQVSFWCLAAGRQIHKIRKQFFHAIMRQEIGWFDVHDVGELNTRLTDDVSKINEGIGDKIGMFFQSMATFFTGFIVGFTRGWKLTLVILAISPVLGLSAAVWAKILSSFTDKELLAYAKAGAVAEEVLAAIRTVIAFGGQKKELERYNKNLEEAKRIGIKKAITANISIGAAFLLIYASYALAFWYGTTLVLSGEYSIGQVLTVFFSVLIGAFSVGQASPSIEAFANARGAAYEIFKIIDNKPSIDSYSKSGHKPDNIKGNLEFRNVHFSYPSRKEVKILKGLNLKVQSGQTVALVGNSGCGKSTTVQLMQRLYDPTEGMVSVDGQDIRTINVRFLREIIGVVSQEPVLFATTIAENIRYGRENVTMDEIEKAVKEANAYDFIMKLPHKFDTLVGERGAQLSGGQKQRIAIARALVRNPKILLLDEATSALDTESEAVVQVALDKARKGRTTIVIAHRLSTVRNADVIAGFDDGVIVEKGNHDELMKEKGIYFKLVTMQTAGNEVELENAADESKSEIDALEMSSNDSRSSLIRKRSTRRSVRGSQAQDRKLSTKEALDESIPPVSFWRIMKLNLTEWPYFVVGVFCAIINGGLQPAFAIIFSKIIGVFTRIDDPETKRQNSNLFSLLFLALGIISFITFFLQGFTFGKAGEILTKRLRYMVFRSMLRQDVSWFDDPKNTTGALTTRLANDAAQVKGAIGSRLAVITQNIANLGTGIIISFIYGWQLTLLLLAIVPIIAIAGVVEMKMLSGQALKDKKELEGSGKIATEAIENFRTVVSLTQEQKFEHMYAQSLQVPYRNSLRKAHIFGITFSFTQAMMYFSYAGCFRFGAYLVAHKLMSFEDVLLVFSAVVFGAMAVGQVSSFAPDYAKAKISAAHIIMIIEKTPLIDSYSTEGLMPNTLEGNVTFGEVVFNYPTRPDIPVLQGLSLEVKKGQTLALVGSSGCGKSTVVQLLERFYDPLAGKVLLDGKEIKRLNVQWLRAHLGIVSQEPILFDCSIAENIAYGDNSRVVSQEEIVRAAKEANIHAFIESLPNKYSTKVGDKGTQLSGGQKQRIAIARALVRQPHILLLDEATSALDTESEKVVQEALDKAREGRTCIVIAHRLSTIQNADLIVVFQNGRVKEHGTHQQLLAQKGIYFSMVSVQAGTKRQ

SEQ ID NO: 2112 - protein, 43 aa, Homo sapiens
MCHLELGVIVVLGKILPMFKLRQFGPLCFVYMNLISLMDTFPL

SEQ ID NO: 2113 - protein, 29 aa, Homo sapiens
MTIWMRMIMYQWVGLIVLIQWIPLNQCQP

SEQ ID NO: 2114 - protein, 226 aa, Homo sapiens
KMRLREPLLSGSAAMPGASLQRACRLLVAVCALHLGVTLVYYLAGRDLSRLPQLVGVSTPLQGGSNSAAAIGQSSGELRTGGARPPPPLGASSQPRPGGDSSPVVDSGPGPASNLTSVPVPHTTALSLPACPEESPLLVGPMLIEFNMPVDLELVAKQNPNVKMGGRYAPRDCVSPHKVAIIIPFRNRQEHLKYWLYYLHPVLQRQQLDYGIYVINQYEKIRRLLW

SEQ ID NO: 2115 - protein, 52 aa, Homo sapiens
LSVIISLKLKRKLLMLKMYHLSFQHLTTTSSVSTGISSSLYLSYRPKCHLSL

SEQ ID NO: 2116 - protein, 53 aa, Homo sapiens
IPFGSKSNMATLKDQLIYNLLKEEQTPQNKITVVGVGAVGMACAISILMKTIM

SEQ ID NO: 2117 - protein, 89 aa, Homo sapiens
TCTYKYLMGWIRGRRSRHSWEMSEFHNYNLDLKKSDFSTRWQKQRCPVVKSKCRENASPFFFCCFIAVAMGIRFIIMVTIWSAVFLNCK

SEQ ID NO: 2118 - protein, 223 aa, Homo sapiens
TCTYKYLMGWIRGRRSRHSWEMSEFHNYNLDLKKSDFSTRWQKQRCPVVKSKCRENASPFFFCCFIAVAMGIRFIIMVTIWSAVFLNSLFNQEVQIPLTESYCGPCPKNWICYKNNCYQFFDESKNWYESQASCMSQNASLLKVYSKEDQDLLKLVKSYHWMGLVHIPTNGSWQWEDGSILSPNLLTIIEMQKGDCALYASSFKGYIENCSTPNTYICMQRTV

SEQ ID NO: 2119 - protein, 204 aa, Homo sapiens
ILRIKMSSENCFVAENSSLHPESGQENDATSPHFSTRHEGSFQVPVLCAVMNVVFITILIIALIALSVGQYNCPGQYTFSMPSDSHVSSCSEDWVGYQRKCYFISTVKRSWTSAQNACSEHGATLAVIDSEKDMNFLKRYAGREEHWVGLKKEPGHPWKWSNGKEFNNWFNVTGSDKCVFLKNTEVSSMECEKNLYWICNKPYK

SEQ ID NO: 2120 - protein, 44 aa, Homo sapiens
VMALCSALMTIFTIKMGTGIMLINLVMPMTGTRTEVCFGLSVPG

SEQ ID NO: 2121 - protein, 41 aa, Homo sapiens
LGSPLSEHALSLLLQVSLSQGSIYTVLSALSFLQWCRVQCS

SEQ ID NO: 2122 - protein, 3359 aa, Homo sapiens
MGRHVATSCHVAWLLVLISGCWGQVNRLPFFTNHFFDTYLLISEDTPVGSSVTQLLAQDMDNDPLVFGVSGEEASRFFAVEPDTGVVWLRQPLDRETKSEFTVEFSVSDHQGVITRKVNIQVGDVNDNAPTFHNQPYSVRIPEVGATGNTPVGTPIFIVNATDPDLGAGGSVLYSFQPPSQFFAIDSARGIVTVIRELDYETTQAYQLTVNATDQDKTRPLSTLANLAIIITDVQDMDPIFINLPYSTNIYEHSPPGTTVRIITAIDQDKGRPRGIGYTIVSGNTNSIFALDYISGVLTLNGLLDRENPLYSHGFILTVKGTELNDDRTPSDATVTTTFNILVIDINDNAPEFNSSEYSVAITELAQVGFALPLFIQVVDKDENLGLNSMFEVYLVGNNSHHFIISPTSVQGKADIRIRVAIPLDYETVDRYDFDLFANESVPDHVGYAKVKITLINENDNRPIFSQPLYNISLYENVTVGTSVLTVLATDNDAGTFGEVSYFFSDDPDRFSLDKDTGLIMLIARLDYELIQRFTLTIIARDGGGEETTGRVRINVLDVNDNVPTFQKDAYVGALRENEPSVTQLVRLRATDEDSPPNNQITYSIVSASAFGSYFDISLYEGYGVISVSRPLDYEQISNGLIYLTVMAMDAGNPPLNSTVPVTIEVFDENDNPPTFSKPAYFVSVVENIMAGATVLFLNATDLDRSREYGQESIIYSLEGSTQFRINARSGEITTTSLLDRETKSEYILIVRAVDGGVGHNQKTGIATVNITLLDINDNHPTWKDAPYYINLVEMTPPDSDVTTVVAVDPDLGENGTLVYSIQPPNKFYSLNSTTGKIRTTHAMLDRENPDPHEAELMRKIVVSVTDCGRPPLKATSSATVFVNLLDLNDNDPTFQNLPFVAEVLEGIPAGVSIYQVVAIDLDEGLNGLVSYRMPVGMPRMDFLINSSSGVVVTTTELDRERIAEYQLRVVASDAGTPTKSSTSTLTIHVLDVNDETPTFFPAVYNVSVSEDVPREFRVVWLNCTDNDVGLNAELSYFITGGNVDGKFSVGYRDAVVRTVVGLDRETTAAYMLILEAIDNGPVGKRHTGTATVFVTVLDVNDNRPIFLQSSYEASVPEDIPEGHSILQLKATDADEGEFGRVWYRILHGNHGNNFRIHVSNGLLMRGPRPLDRERNSSHVLIVEAYNHDLGPMRSSVRVIVYVEDINDEAPVFTQQQYSRLGLRETAGIGTSVIVVQATDRDSGDGGLVNYRILSGAEGKFEIDESTGLIITVNYLDYETKTSYMMNVSATDQAPPFNQGFCSVYITLLNELDEAVQFSNASYEAAILENLALGTEIVRVQAYSIDNLNQITYRFNAYTSTQAKALFKIDAITGVITVQGLVDREKGDFYTLTVVADDGGPKVDSTVKVYITVLDENDNSPRFDFTSDSAVSIPEDCPVGQRVATVKAWDPDAGSNGQVVFSLASGNIAGAFEIVTTNDSIGEVFVARPLDREELDHYILQVVASDRGTPPRKKDHILQVTILDINDNPPVIESPFGYNVSVNENVGGGTAVVQVRATDRDIGINSVLSYYITEGNKDMAFRMDRISGEIATRPAPPDRERQSFYHLVATVEDEGTPTLSATTHVYVTIVDENDNAPMFQQPHYEVLLDEGPDTLNTSLITIQALDLDEGPNGTVTYAIVAGNIVNTFRIDRHMGVITAAKELDYEISHGRYTLIVTATDQCPILSHRLTSTTTVLVNVNDINDNVPTFPRDYEGPFEVTEGQPGPRVWTFLAHDRDSGPNGQVEYSIMDGDPLGEFVISPVEGVLRVRKDVELDRETIAFYNLTICARDRGMPPLSSTMLVGIRVLDINDNDPVLLNLPMNITISENSPVSSFVAHVLASDADSGCNARLTFNITAGNRERAFFINATTGIVTVNRPLDRERIPEYKLTISVKDNPENPRIARRDYDLLLIFLSDENDNHPLFTKSTYQAEVMENSPAGTPLTVLNGPILALDADQDIYAVVTYQLLGAQSGLFDINSSTGVVTVRSGVIIDREAFSPPILELLLLAEDIGLLNSTAHLLITILDDNDNRPTFSPATLTVHLLENCPPGFSVLQVTATDEDSGLNGELVYRIEAGAQDRFLIHLVTGVIRVGNATIDREEQESYRLTVVATDRGTVPLSGTAIVTILIDDINDSRPEFLNPIQTVSVLESAEPGTVIANITAIDHDLNPKLEYHIVGIVAKDDTDRLVPNQEDAFAVNINTGSVMVKSPMNRELVATYEVTLSVIDNASDLPERSVSVPNAKLTVNVLDVNDNTPQFKPFGITYYMERILEGATPGTTLIAVAAVDPDKGLNGLVTYTLLDLVPPGYVQLEDSSAGKVIANRTVDYEEVHWLNFTVRASDNGSPPRAAEIPVYLEIVDINDNNPIFDQPSYQEAVFEDVPVGTIILTVTATDADSGNFALIEYSLGDGESKFAINPTTGDIYVLSSLDREKKDHYILTALAKDNPGDVASNRRENSVQVVIQVLDVNDCRPQFSKPQFSTSVYENEPAGTSVITMMATDQDEGPNGELTYSLEGPGVEAFHVDMDSGLVTTQRPLQSYEKFSLTVVATDGGEPPLWGTTMLLVEVIDVNDNRPVFVRPPNGTILHIREEIPLRSNVYEVYATDKDEGLNGAVRYSFLKTAGNRDWEFFIIDPISGLIQTAQRLDRESQAVYSLILVASDLGQPVPYETMQPLQVALEDIDDNEPLFVRPPKGSPQYQLLTVPEHSPRGTLVGNVTGAVDADEGPNAIVYYFIAAGNEEKNFHLQPDGCLLVLRDLDREREAIFSFIVKASSNRSWTPPRGPSPTLDLVADLTLQEVRVVLEDINDQPPRFTKAEYTAGVATDAKVGSELIQVLALDADIGNNSLVFYSILAIHYFRALANDSEDVGQVFTMGSMDGILRTFDLFMAYSPGYFVVDIVARDLAGHNDTAIIGIYILRDDQRVKIVINEIPDRVRGFEEEFIHLLSNITGAIVNTDNVQFHVDKKGRVNFAQTELLIHVVNRDTNRILDVDRVIQMIDENKEQLRNLFRNYNVLDVQPAISVRLPDDMSALQMAIIVLAILLFLAAMLFVLMNWYYRTVHKRKLKAIVAGSAGNRGFIDIMDMPNTNKYSFDGANPVWLDPFCRNLELAAQAEHEDDLPENLSEIADLWNSPTRTHGTFGREPAAVKPDDDRYLRAAIQEYDNIAKLGQIIREGPIKGSLLKVVLEDYLRLKKLFAQRMVQKASSCHSSISELIQTELDEEPGDHSPGQGSLRFRHKPPVELKGPDGIHVVHGSTGTLLATDLNSLPEEDQKGLGRSLETLTAAEATAFERNARTESAKSTPLHKLRDVIMETPLEITEL

SEQ ID NO: 2123 - protein, 756 aa, Homo sapiens
IAKALRLIQPGTHIPPTGSPAPQPLPVPAEMLLPRSVSSERAPGVPEPEELWEAEMERLRGSGTPVRGLPYAMMDKRLIWQLREPAGVQTLRWQRWQRRRQTVERRLREAAQRLARGLGLWEGALYEIGGLFGTGIRSYFTFLRFLLLLNLLSLLLTASFVLLPLVWLRPPDPGPTLNLTLQCPGSRQSPPGVLRFHNQLWHVLTGRAFTNTYLFYGAYRVGPESSSVYSIRLAYLLSPLACLLLCFCGTLRRMVKGLPQKTLLGQGYQAPLSAKVFSSWDFCIRVQEAATIKKHEISNEFKVELEEGRRFQLMQQQTRAQTACRLLSYLRVNVLNGLLVVGAISAIFWATKYSQDNKEESLFLLLQYLPPGVIALVNFLGPLLFTFLVQLENYPPNTEVNLTLIWCVVLKLASLGMFSVSLGQTILCIGRDKSSCESYGYNVCDYQCWENSVGEELYKLSIFNFLLTVAFAFLVTLPRRLLVDRFSGRFWAWLEREEFLVPKNVLDIVAGQTVTWMGLFYCPLLPLLNSVFLFLTFYIKKYTLLKNSRASSRPFRASSSTFFFQLVLLLGLLLAAVPLGYVVSSIHSSWDCGLFTNYSAPWQVVPELVALGLPPIGQRALHYLGSHAFSFPLLIMLSLVLTVCVSQTQANARAIHRLRKQLVWQVQEKWHLVEDLSRLLPEPGPSDSPGPKYPASQASRPQSFCPGCPCPGSPGHQAPRPGPSVVDAAGLRSPCPGQHGAPASARRFRFPSGAEL

SEQ ID NO: 2124 - protein, 58 aa, Homo sapiens
RRCMPWSPSETPNTPTLWSSGTLRSFTAAMLASTSASVWMSMTTTWLTWRPFTTSWRS

SEQ ID NO: 2125 - protein, 64 aa, Homo sapiens
IHTAQNSWILLSLCQRKIPWRMPHNHLEGDALLRVPVLCIWRAWLRAEVGGRAPLPGRSVGHRN

SEQ ID NO: 2126 - protein, 340 aa, Homo sapiens
IVSLERIMPANYTCTRPDGDNTDFRYFIYAVTYTVILVPGLIGNILALWVFYGYMKETKRAVIFMINLAIADLLQVLSLPLRIFYYLNHDWPFGPGLCMFCFYLKYVNMYASIYFLVCISVRRFWFLMYPFRFHDCKQKYDLYISIAGWLIICLACVLFPLLRTSDDTSGNRTKCFVDLPTRNVNLAQSVVMMTIGELIGFVTPLLIVLYCTWKTVLSLQDKYPMAQDLGEKQKALKMILTCAGVFLICFAPYHFSFPLDFLVKSNEIKSCLARRVILIFHSVALCLASLNSCLDPVIYYFSTNEFRRRLSRQDLHDSIQLHAKSFVSNHTASTMTPELC

SEQ ID NO: 2127 - protein, 56 aa, Homo sapiens
VERGVDCEVTLAAYFRFLAMRIRVTLTPRFPPLDWFYCGSGLISMSCCGAFTAFGL

SEQ ID NO: 2128 - protein, 604 aa, Homo sapiens
KEKKNRQGNSLDMASEIHMTGPMCLIENTNGRLMANPEALKILSAITQPMVVVAIVGLYRTGKSYLMNKLAGKKKGFSLGSTVQSHTKGIWMWCVPHPKKPGHILVLLDTEGLGDVEKGDNQNDSWIFALAVLLSSTFVYNSIGTINQQAMDQLYYVTELTHRIRSKSSPDENENEVEDSADFVSFFPDFVWTLRDFSLDLEADGQPLTPDEYLTYSLKLKKGTSQKDETFNLPRLCIRKFFPKKKCFVFDRPVHRRKLAQLEKLQDEELDPEFVQQVADFCSYIFSNSKTKTLSGGIQVNGPRLESLVLTYVNAISSGDLPCMENAVLALAQIENSAAVQKAIAHYEQQMGQKVQLPTETLQELLDLHRDSEREAIEVFIRSSFKDVDHLFQKELAAQLEKKRDDFCKQNQEASSDRCSALLQVIFSPLEEEVKAGIYSKPGGYRLFVQKLQDLKKKYYEEPRKGIQAEEILQTYLKSKESMTDAILQTDQTLTEKEKEIEVERVKAESAQASAKMLQEMQRKNEQMMEQKERSYQEHLKQLTEKMENDRVQLLKEQERTLALKLQEQEQLLKEGFQKESRIMKNEIQDLQTKMRRRKACTIS

SEQ ID NO: 2129 - protein, 60 aa, Homo sapiens
TGVGGLRSTRAEAGLGKRSRDLQGLYISAGSLRPFPGVIPSCAVVLWSSVLLSPSAFSPT

SEQ ID NO: 2130 - protein, 1112 aa, Homo sapiens
ISSKDTMRLPGAMPALALKGELLLLSLLLLLEPQISQGLVVTPPGPELVLNVSSTFVLTCSGSAPVVWERMSQEPPQEMAKAQDGTFSSVLTLTNLTGLDTGEYFCTHNDSRGLETDERKRLYIFVPDPTVGFLPNDAEELFIFLTEITEITIPCRVTDPQLVVTLHEKKGDVALPVPYDHQRGFSGIFEDRSYICKTTIGDREVDSDAYYVYRLQVSSINVSVNAVQTVVRQGENITLMCIVIGNEVVNFEWTYPRKESGRLVEPVTDFLLDMPYHIRSILHIPSAELEDSGTYTCNVTESVNDHQDEKAINITVVESGYVRLLGEVGTLQFAELHRSRTLQVVFEAYPPPTVLWFKDNRTLGDSSAGEIALSTRNVSETRYVSELTLVRVKVAEAGHYTMRAFHEDAEVQLSFQLQINVPVRVLELSESHPDSGEQTVRCRGRGMPQPNIIWSACRDLKRCPRELPPTLLGNSSEEESQLETNVTYWEEEQEFEVVSTLRLQHVDRPLSVRCTLRNAVGQDTQEVIVVPHSLPFKVVVISAILALVVLTIISLIILIMLWQKKPRYEIRWKVIESVSSDGHEYIYVDPMQLPYDSTWELPRDQLVLGRTLGSGAFGQVVEATAHGLSHSQATMKVAVKMLKSTARSSEKQALMSELKIMSHLGPHLNVVNLLGACTKGGPIYIITEYCRYGDLVDYLHRNKHTFLQHHSDKRRPPSAELYSNALPVGLPLPSHVSLTGESDGGYMDMSKDESVDYVPMLDMKGDVKYADIESSNYMAPYDNYVPSAPERTCRATLINESPVLSYMDLVGFSYQVANGMEFLASKNCVHRDLAARNVLICEGKLVKICDFGLARDIMRDSNYISKGSTFLPLKWMAPESIFNSLYTTLSDVWSFGILLWEIFTLGGTPYPELPMNEQFYNAIKRGYRMAQPAHASDEIYEIMQKCWEEKFEIRPPFSQLVLLLERLLGEGYKKKYQQVDEEFLRSDHPAILRSQARLPGFHGLRSPLDTSSVLYTAVQPNEGDNDYIIPLPDPKPEVADEGPLEGSPSLASSTLNEVNTSSTISCDSPLEPQDEPEPEPQLELQVEPEPELEQLPDSGCPAPRAEAEDSFL

SEQ ID NO: 2131 - protein, 420 aa, Homo sapiens
TMSCAGRAGPARLAALALLTCSLWPARADNASQEYYTALINVTVQEPGRGAPLTFRIDRGRYGLDSPKAEVRGQVLAPLPLHGVADHLGCDPQTRFFVPPNIKQWIALLQRGNCTFKEKISRAAFHNAVAVVIYNNKSKEEPVTMTHPGTGDIIAVMITELRGKDILSYLEKNISVQMTIAVGTRMPPKNFSRGSLVFVSISFIVLMIISSAWLIFYFIQKIRYTNARDRNQRRLGDAAKKAISKLTTRTVKKGDKETDPDFDHCAVCIESYKQNDVVRILPCKHVFHKSCVDPWLSEHCTCPMCKLNILKALGIVPNLPCTDNVAFDMERLTRTQAVNRRSALGDLAGDNSLGLEPLRTSGISPLPQDGELTPRTGEINIAVTKEWFIIASFGLLSALTLCYMIIRATASLNANEVEWF

SEQ ID NO: 2132 - protein, 246 aa, Homo sapiens
TKRSNLKAYACSIHHIRTMSYVFVNDSSQTNVPLLQACIDGDFNYSKRLLESGFDPNIRDSRGRTGLHLAAARGNVDICQLLHKFGADLLATDYQGNTALHLCGHVDTIQFLVSNGLKIDICNHQGATPLVLAKRRGVNKDVIRLLESLEEQEVKGFNRGTHSKLETMQTAESESAMESHSLLNPNLQQGEGVLSSFRTTWQEFVEDLGFWRVLLLIFVIALLSLGIAYYVSGVLPFVENQPELVH

SEQ ID NO: 2133 - protein, 644 aa, Homo sapiens
TGQTNQPRVGSATMPRYGASLRQSCPRSGREQGQDGTAGAPGLLWMGLVLALALALALALALSDSRVLWAPAEAHPLSPQGHPARLHRIVPRLRDVFGWGNLTCPICKGLFTAINLGLKKEPNVARVGSVAIKLCNLLKIAPPAVCQSIVHLFEDDMVEVWRRSVLSPSEACGLLLGSTCGHWDIFSSWNISLPTVPKPPPKPPSPPAPGAPVSRILFLTDLHWDHDYLEGTDPDCADPLCCRRGSGLPPASRPGAGYWGEYSKCDLPLRTLESLLSGLGPAGPFDMVYWTGDIPAHDVWHQTRQDQLRALTTVTALVRKFLGPVPVYPAVGNHESTPVNSFPPPFIEGNHSSRWLYEAMAKAWEPWLPAEALRTLRIGGFYALSPYPGLRLISLNMNFCSRENFWLLINSTDPAGQLQWLVGELQAAEDRGDKVHIIGHIPPGHCLKSWSWNYYRIVARYENTLAAQFFGHTHVDEFEVFYDEETLSRPLAVAFLAPSATTYIGLNPGYRVYQIDGNYSGSSHVVLDHETYILNLTQANIPGAIPHWQLLYRARETYGLPNTLPTAWHNLVYRMRGDMQLFQTFWFLYHKGHPPSEPCGTPCRLATLCAQLSARADSPALCRHLMPDGSLPEAQSLWPRPLFC

SEQ ID NO: 2134 - protein, 498 aa, Homo sapiens
RGRFKKEKFPSAVKLFGKRLEGPMAAKSQPNIPKAKSLDGVTNDRTASQGQWGRAWEVDWFSLASVIFLLLFAPFIVYYFIMACDQYSCALTGPVVDIVTGHARLSDIWAKTPPITRKAAQLYTLWVTFQVLLYTSLPDFCHKFLPGYVGGIQEGAVTPAGVVNKYQINGLQAWLLTHLLWFANAHLLSWFSPTIIFDNWIPLLWCANILGYAVSTFAMVKGYFFPTSARDCKFTGNFFYNYMMGIEFNPRIGKWFDFKLFFNGRPGIVAWTLINLSFAAKQRELHSHVTNAMVLVNVLQAIYVIDFFWNETWYLKTIDICHDHFGWYLGWGDCVWLPYLYTLQGLYLVYHPVQLSTPHAVGVLLLGLVGYYIFRVANHQKDLFRRTDGRCLIWGRKPKVIECSYTSADGQRHHSKLLVSGFWGVARHFNYVGDLMGSLAYCLACGGGHLLPYFYIIYMAILLTHRCLRDEHRCASKYGRDWERYTAAVPYRLLPGIF

SEQ ID NO: 2135 - protein, 281 aa, Homo sapiens
VDARKFSAVSGETRGLRVSLSVFQSPGAVVQGLGLVMASPSRRLQTKPVITCFKSVLLIYTFIFWITGVILLAVGIWGKVSLENYFSLLNEKATNVPFVLIATGTVIILLGTFGCFATCRASAWMLKLYAMFLTLVFLVELVAAIVGFVFRHEIKNSFKNNYEKALKQYNSTGDYRSHAVDKIQNTLHCCGVTDYRDWTDTNYYSEKGFPKSCCKLEDCTPQRDADKVNNEGCFIKVMTIIESEMGVVAGISFGVACFQLIGIFLAYCLSRAITNNQYEIV

SEQ ID NO: 2136 - protein, 59 aa, Homo sapiens
KGSGRASGIAASGFLFSTNRIWSLVLHLLSVARIPPSPLASPLLGSSPVGIHVSSLTPP

SEQ ID NO: 2137 - protein, 41 aa, Homo sapiens
LGRKFWDLSISAFPVLSGQMAVANPMLLILCFLCLAIEHKK

SEQ ID NO: 2138 - protein, 31 aa, Homo sapiens
MIIREHKLLQKLSQRFGRPLLLLVLITIQLM

SEQ ID NO: 2139 - protein, 45 aa, Homo sapiens
KLMIWALKLVTLKSFHCILHFHLSSSNAFLSLHLPKNRMEQLEER

SEQ ID NO: 2140 - protein, 509 aa, Homo sapiens
IFPPCVPTMVRKPVVSTISKGGYLQGNVNGRLPSLGNKEPPGQEKVQLKRKVTLLRGVSIIIGTIIGAGIFISPKGVLQNTGSVGMSLTIWTVCGVLSLFGALSYAELGTTIKKSGGHYTYILEVFGPLPAFVRVWVELLIIRPAATAVISLAFGRYILEPFFIQCEIPELAIKLITAVGITVVMVLNSMSVSWSARIQIFLTFCKLTAILIIIVPGVMQLIKGQTQNFKDAFSGRDSSITRLPLAFYYGMYAYAGWFYLNFVTEEVENPEKTIPLAICISMAIVTIGYVLTNVAYFTTINAEELLLSNAVAVTFSERLLGNFSLAVPIFVALSCFGSMNGGVFAVSRLFYVASREGHLPEILSMIHVRKHTPLPAVIVLHPLTMIMLFSGDLDSLLNFLSFARWLFIGLAVAGLIYLRYKCPDMHRPFKVPLFIPALFSFTCLFMVALSLYSDPFSTGIGFVITLTGVPAYYLFIIWDKKPRWFRIMSEKITRTLQIILEVVPEEDKL

SEQ ID NO: 2141 - protein, 80 aa, Homo sapiens
LANSGLSSFLVSEGPFCFQGGACEKWHLERGRKRRKNRSSASDLRWLKERMYLVSAISLHPSMTLLSMSLIFLARKPSAV

SEQ ID NO: 2142 - protein, 82 aa, Homo sapiens
LANSGLSSFLVSEGPFCFQGGACEVRKWHLERGRKRRKNRSSASDLRWLKERMYLVSAISLHPSMTLLSMSLIFLARKPSAV

SEQ ID NO: 2143 - protein, 58 aa, Homo sapiens
RMRTMQISPTASSRPPACSVTGYSHLLKKHFHTVSLSISLILTAWFINMDLNFMDTLS

SEQ ID NO: 2144 - protein, 34 aa, Homo sapiens
LQQRRRKMRRRRSLKSQMMTWDLAFLIKFLLPCK

SEQ ID NO: 2145 - protein, 31 aa, Homo sapiens
IGLSRGRHVAFRGAFMGLSGMGFLFLIVNSR

SEQ ID NO: 2146 - protein, 64 aa, Homo sapiens
IQLFSFILLRATDSTEMETIRRLSIHLNKYLALTPPRRNSLMLWLIPWSMTSFMAKMVFFLHMV

SEQ ID NO: 2147 - protein, 695 aa, Homo sapiens
RKMTPQSLLQTTLFLLSLLFLVQGAHGRGHREDFRFCSQRNQTHRSSLHYKPTPDLRISIENSEEALTVHAPFPAAHPASRSFPDPRGLYHFCLYWNRHAGRLHLLYGKRDFLLSDKASSLLCFQHQEESLAQGPPLLATSVTSWWSPQNISLPSAASFTFSFHSPPHTAAHNASVDMCELKRDLQLLSQFLKHPQKASRRPSAAPASQQLQSLESKLTSVRFMGDMVSFEEDRINATVWKLQPTAGLQDLHIHSRQEEEQSEIMEYSVLLPRTLFQRTKGRSGEAEKRLLLVDFSSQALFQDKNSSQVLGEKVLGIVVQNTKVANLTEPVVLTFQHQLQPKNVTLQCVFWVEDPTLSSPGHWSSAGCETVRRETQTSCFCNHLTYFAVLMVSSVEVDAVHKHYLSLLSYVGCVVSALACLVTIAAYLCSRVPLPCRRKPRDYTIKVHMNLLLAVFLLDTSFLLSEPVALTGSEAGCRASAIFLHFSLLTCLSWMGLEGYNLYRLVVEVFGTYVPGYLLKLSAMGWGFPIFLVTLVALVDVDNYGPIILAVHRTPEGVIYPSMCWIRDSLVSYITNLGLFSLVFLFNMAMLATMVVQILRLRPHTQKWSHVLTLLGLSLVLGLPWALIFFSFASGTFQLVVLYLFSIITSFQGFLIFIWYWSMRLQARGGPSPLKSNSDSARLPISSGSTSSSRI

SEQ ID NO: 2148 - protein, 218 aa, Homo sapiens
LEPTVGGERTTSLPWRAEGRPGEEGASAQLLGGWPVSCPGEECCSEWDCMCVQPEFHCGDPCCTTCRHHPCPPGQGVQSQGKFSFGFQCIDCASGTFSGGHEGHCKPWTDCTQFGFLTVFPGNKTHNAVCVPGSPPAEPLGWLTVVLLAVAACVLLLTSAQLGLHIWQLRSQCMWPRETQLLLEVPPSTEDARSCQFPEEERGERSAEEKGRLGDLWV

SEQ ID NO: 2149 - protein, 314 aa, Homo sapiens
VRLGGWAMETLPQAGLAAGGGGGVGKGGWGCHGTSPRLWPGREGPGASGAAGAPSLRGGRRPLPTALCVVGRPTCPPVPTLPEDPVHSPHLTTPPSGPCSGSGSERKQLCTATQDTVCRCRAGTQPLDSYKPGVDCAPCPPGHFSPGDNQACKPWTNCTLAGKHTLQPASNSSDAICEDRDPPATQPQETQGPPARPITVQPTEAWPRTSQGPSTRPVEVPGGRAVAAILGLGLVLGLLGPLAILLALYLLRRDQRLPPDAHKPPGECLMALPHCSWRVRPTHQSLLFSSPGGGSFRTPIQEEQADAHSTLAKI

SEQ ID NO: 2150 - protein, 7559 aa, Homo sapiens
TGLEMPLLDSSYLPPTIFILTHVLGVAGVLYWKRHARGRADERDRVQKKTFTKWVNKHLMKVRKHINDLYEDLRDGHNLISLLEVLSGIKLEPAGLKTLRLVSMPSWCHTNNEEQAEEDDDDVPREKGRMRFHRLQNVQIALDFLKQRQVKLVNIRNDDITDGNPKLTLGLIWTIILHFQISDIYISGESGDMSAKEKLLLWTQKVTAGYTGIKCTNFSSCWSDGKMFNALIHRYRPDLVDMERVQIQSNRENLEQAFEVAERLGVTRLLDAEDVDVPSPDEKSVITYVSSIYDAFPKVPEGGEGISATEVDSRWQEYQSRVDSLIPWIKQHTILMSDKTFPQNPVELKALYNQYIHFKETEILAKEREKGRIEELYKLLEVWIEFGRIKLPQGYHPNDVEEEWGKLIIEMLEREKSLRPAVERLELLLQIANKIQNGALNCEEKLTLAKNTLQADAAHLESGQPVQCESDVIMYIQECEGLIRQLQVDLQILRDENYYQLEELAFRVMRLQDELVTLRLECTNLYRKGHFTSLELVPPSTLTTTHLKAEPLTKATHSSSTSWFRKPMTRAELVAISSSEDEGNLRFVYELLSWVEEMQMKLERAEWGNDLPSVELQLETQQHIHTSVEELGSSVKEARLYEGKMSQNFHTSYAETLGKLETQYCKLKETSSFRMRHLQSLHKFVSRATAELIWLNEKEEEELAYDWSDNNSNISAKRNYFSELTMELEEKQDVFRSLQDTAELLSLENHPAKQTVEAYSAAVQSQLQWMKQLCLCVEQHVKENTAYFQFFSDARELESFLRNLQDSIKRKYSCDHNTSLSRLEDLLQDSMDEKEQLIQSKSSVASLVGRSKTIVQLKPRSPDHVLKNTISVKAVCDYRQIEITICKNDECVLEDNSQRTKWKVISPTGNEAMVPSVCFLIPPPNKDAIEMASRVEQSYQKVMALWHQLHVNTKSLISWNYLRKDLDLVQTWNLEKLRSSAPGECHQIMKNLQAHYEDFLQDSRDSVLFSVADRLRLEEEVEACKARFQHLMKSMENEDKEETVAKMYISELKNIRLRLEEYEQRVVKRIQSLASSRTDRDAWQDNALRIAEQEHTQEDLQQLRSDLDAVSMKCDSFLHQSPSSSSVPTLRSELNLLVEKMDHVYGLSTVYLNKLKTVDVIVRSIQDAELLVKGYEIKLSQEEVVLADLSALEAHWSTLRHWLSDVKDKNSVFSVLDEEIAKAKVVAEQMSRLTPERNLDLERYQEKGSQLQERWHRVIAQLEIRQSELESIQEVLGDYRACHGTLIKWIEETTAQQEMMKPGQAEDSRVLSEQLSQQTALFAEIERNQTKLDQCQKFSQQYSTIVKDYELQLMTYKAFVESQQKSPGKRRRMLSSSDAITQEFMDLRTRYTALVTLTTQHVKYISDALRRLEEEEKVVEEEKQEHVEKVKELLGWVSTLARNTQGKATSSETKESTDIEKAILEQQVLSEELTTKKEQVSEAIKTSQIFLAKHGHKLSEKEKKQISEQLNALNKAYHDLCDGSANQLQQLQSQLAHQTEQKECRAVAGVIDLGTVEIFPIFKAMQKGLLDQDTGLVLLESQVIMSGLIAPETGENLSLEEGIARNLINPQMYQQLRELQDALALISRLTESRGPLSVVEAIEKRIISETVGLKILEAHLATGGFSLSPSENCINLEEAFHQGLISAWLHSVLESYLRTSKNLIDPNTAEKIGLLDLMQRCIVHQESGFKLLPVKQLAGGMVSLKSGRKVSIFRAVQEGLIDRQVTVRLLEAQLFAGGIVDPRTGHRLTVEEAVRHNLIDQDMACAILIRQLQTGGIIDTVTGQRLTIDEAVSNDLVAAKIALVILESLWSFMGLLWPESGEILPITDALEQGIVSTELAHKILSNRQHIKALFLPATTEILSWKKAIESGILDRDLANNLKSICIPDVMPHMQLADSAEQNINPGAAVLPCSKSHPKATASQSENLLFQLMTHSYINVQNGQRLLLLDKELMETLTSRDEYQTSPPKVVEIGHQRQKTPEGLQESANVKISGTFSSGWTVRLPEFQFSSQNKEYPDREDCTTEKGKKTTVETEDSSVENPEQDLFVEQKERNPNIDALKVINKVKLEVQRQLIGTQREDQTAVSVRENASRGHLLTIPPAEAEGVPLVVDKDVFSVETPKKEHQPLRNTSFTCQNEQAHTLETEYIHDETGGSHIKPQSKKLQVQVKKTLGIKLELKSETDGNVHPLDKKEMLKKTFLAKDDHKESQEAQNIAGGSMMMSEKTDEEDSGREIFLSCSHPLELLEEATLNVLSAQLLDGGIFHEQTGQKLLLNEAISRGIVPSHTAVKLMEKLNMFQGFFDSQTCESLTTEEVINEGLMDEKLLHNVLMADKAISGVLDPRTQTLCSVKDAVTVGLLDKETATRILERQVVTGGIIDLKRGKKVSVTLASTLGLVDVADQPELINLEKASKGRDAEKTVRERLISLQMETTGLIDPDSKAPLTVVQSIDRGLLEREEAVRLLTKQVVDGGIIHHISGMRLSVDNAFRHGLIGEDLAEKLKRVENLNIHQIFNPETKENISLPKAIKLDLITSDLKREIQEVQAFTGNFVDLISGQRLTLAEAKKEGLLTNEAVLSPGMMHGIVDPENCRIVPYSELVKKCKIDIESGQRYLEVIPFSDIKDGVSDKVLTLSQAIQLGKVDFASTLKVLEAQANTGGIIDTATGKRLTLASALEEKLVDENMVRIIASHQVLNGGIVDIFSDQRVTLVEAIEKRLISPELANMIQIDSSEFSDHRAQIEKQEGIEVCALQNEFLGKDMLIACNQTAEMSCNKVEESERLFQVENQSAQEKVKVRVSDGEQAKKSREISLKEFGCKDQRKPRMSSDAKEFISIINPHNLKGKSLGQVSLTHPYSECDFKLKEVARNNMGNDTNEEQEKAVTKIEIISHMKQSTSCLDSEEIRENQGEVILEVQETYCETSGKLPSEQVLQQPMNARVKSKREKREVIVEESIRTCKPAFLSEEKLYQETAIRDEHDSHIKSQPREMTSSEKGKEADTEMGFSITFKIEESSSQVVPQGISVKHLDALTLFSSKQANEGKVNNLSLCLTLKPEENLSREIACGAQSEPFPCMTPRPEGLHYQESDGKAQVTGPSQISKTDKSFQGTTRQETNYQDSWVTSKTKETKHQISSSNECKEKSYQEVSFDPARGLKLEEITVSRPDSKEVRYLEFSDRKDLHHQGSKSDDKLCGTLKSEIATQELTGEKFLEMANPNVAGLEAGSIEDIVTQRGSRVLGSFLPEKLFKGVSQKENTGQQNAIISPTVLETSEEKTVSLTVCSAVKTEKTPQEKLRESPGSEQTPFMTAPEGKGNGGVNPEPFRATQNVFTRQLCLEHDEKLVSYLSLLRNIEMRTKQIQPLELNLAELQDLLCQAKVLERELKDLTTLVSQELECVNQIIISQPQEVPAQLLKALEKDAKNLQKSLSSVSDTWNSRLLHFQNAVEIEKTKVLNQHTQLEGRLQDLRAWVGNKNLILNSKGSNSEIDVDSLNLCLQQYEDLKQPMAERKAQLDALAFDIQFFISEHAQDLSPQQNRQMLRLLNELQRSFQDILEQTAAQVDALQGHLQQMEQEALVKTLQKQQNTCHQQLEDLCSWVGQAERALAGHQGRTTQQDLSALQKNQSDLKDLQDDIQNRATSFATVVKDIEGFMEENQTKLSPRELTALREKLHQAKEQYEALQEETRVAQKELEEAVTSALQQETEKSKAAKELAENKKKIDALLDWVTSVGSSGGQLLTNLPGMEQLSGASLEKGALDTTDGYMGVNQAPEKLDKQCEMMKARHQELLSQQQNFILATQSAQAFLDQHGHNLTPEEQQMLQQKLGELKEQYSTSLAQSEAELKQVQTLQDELQKFLQDHKEFESWLERSEKELENMHKGGSSPETLPSLLKRQGSFSEDVISHKGDLRFVTISGQKVLDMENSFKEGKEPSEIGNLVKDKLKDATERYTALHSKCTRLGSHLNMLLGQYHQFQNSADSLQAWMQACEANVEKLLSDTVASDPGVLQEQLATTKQLQEELAEHQVPVEKLQKVARDIMEIEGEPAPDHRHVQETTDSILSHFQSLSYSLAERSSLLQKAIAQSQSVQESLESLLQSIGEVEQNLEGKQVSSLSSGVIQEALATNMKLKQDIARQKSSLEATREMVTRFMETADSTTAAVLQGKLAEVSQRFEQLCLQQQEKESSLKKLLPQAEMFEHLSGKLQQFMENKSRMLASGNQPDQDITHFFQQIQELNLEMEDQQENLDTLEHLVTELSSCGFALDLCQHQDRVQNLRKDFTELQKTVKEREKDASSCQEQLDEFRKLVRTFQKWLKETEGSIPPTETSMSAKELEKQIEHLKSLLDDWASKGTLVEEINCKGTSLENLIMEITAPDSQGKTGSILPSVGSSVGSVNGYHTCKDLTEIQCDMSDVNLKYEKLGGVLHERQESLQAILNRMEEVHKEANSVLQWLESKEEVLKSMDAMSSPTKTETVKAQAESNKAFLAELEQNSPKIQKVKEALAGLLVTYPNSQEAENWKKIQEELNSRWERATEVTVARQRQLEESASHLACFQAAESQLRPWLMEKELMMGVLGPLSIDPNMLNAQKQQVQFMLKEFEARRQQHEQLNEAAQGILTGPGDVSLSTSQVQKELQSINQKWVELTDKLNSRSSQIDQAIVKSTQYQELLQDLSEKVRAVGQRLSVQSAISTQPEAVKQQLEETSEIRSDLEQLDHEVKEAQTLCDELSVLIGEQYLKDELKKRLETVALPLQGLEDLAADRINRLQAALASTQQFQQMFDELRTWLDDKQSQQAKNCPISAKLERLQSQLQENEEFQKSLNQHSGSYEVIVAEGESLLLSVPPGEEKRTLQNQLVELKNHWEELSKKTADRQSRLKDCMQKAQKYQWHVEDLVPWIEDCKAKMSELRVTLDPVQLESSLLRSKAMLNEVEKRRSLLEILNSAADILINSSEADEDGIRDEKAGINQNMDAVTEELQAKTGSLEEMTQRLREFQESFKNIEKKVEGAKHQLEIFDALGSQACSNKNLEKLRAQQEVLQALEPQVDYLRNFTQGLVEDAPDGSDASQLLHQAEVAQQEFLEVKQRVNSGCVMMENKLEGIGQFHCRVREMFSQLADLDDELDGMGAIGRDTDSLQSQIEDVRLFLNKIHVLKLDIEASEAECRHMLEEEGTLDLLGLKRELEALNKQCGKLTERGKARQEQLELTLGRVEDFYRKLKGLNDATTAAEEAEALQWVVGTEVEIINQQLADFKMFQKEQVDPLQMKLQQVNGLGQGLIQSAGKDCDVQGLEHDMEEINARWNTLNKKVAQRIAQLQEALLHCGKFQDALEPLLSWLADTEELIANQKPPSAEYKVVKAQIQEQKLLQRLLDDRKATVDMLQAEGGRIAQSAELADREKITGQLESLESRWTELLSKAAARQKQLEDILVLAKQFHETAEPISDFLSVTEKKLANSEPVGTQTAKIQQQIIRHKALEEDIENHATDVHQAVKIGQSLSSLTSPAEQGVLSEKIDSLQARYSEIQDRCCRKAALLDQALSNARLFGEDEVEVLNWLAEVEDKLSSVFVKDFKQDVLHRQHADHLALNEEIVNRKKNVDQAIKNGQALLKQTTGEEVLLIQEKLDGIKTRYADITVTSSKALRTLEQARQLATKFQSTYEELTGWLREVEEELATSGGQSPTGEQIPQFQQRQKELKKEVMEHRLVLDTVNEVSRALLELVPWRAREGLDKLVSDANEQYKLVSDTIGQRVDEIDAAIQRSQQYEQAADAELAWVAETKRKLMALGPIRLEQDQTTAQLQVQKAFSIDIIRHKDSMDELFSHRSEIFGTCGEEQKTVLQEKTESLIQQYEAISLLNSERYARLERAQVLVNQFWETYEELSPWIEETRALIAQLPSPAIDHEQLRQQQEEMRQLRESIAEHKPHIDKLLKIGPQLKELNPEEGEMVEEKYQKAENMYAQIKEEVRQRALALDEAVSQSTQFHDKIEPMLETLENLSSRLRMPPLIPAEVDKIRECISDNKSATVELEKLQPSFEALKRRGEELIGRSQGADKDLAAKEIQDKLDQMVFFWEDIKARAEEREIKFLDVLELAEKFWYDMAALLTTIKDTQDIVHDLESPGIDPSIIKQQVEAAETIKEETDGLHEELEFIRILGADLIFACGETEKPEVRKSIDEMNNAWENLNKTWKERLEKLEDAMQAAVQYQDTLQAMFDWLDNTVIKLCTMPPVGTDLNTVKDQLNEMKEFKVEVYQQQIEMEKLNHQGELMLKKATDETDRDIIREPLTELKHLWENLGEKIAHRQHKLEGALLALGQFQHALEELMSWLTHTEELLDAQRPISGDPKVIEVELAKHHVLKNDVLAHQATVETVNKAGNELLESSAGDDASSLRSRLEAMNQCWESVLQKTEEREQQLQSTLQQAQGFHSEIEDFLLELTRMESQLSASKPTGGLPETAREQLDTHMELYSQLKAKEETYNQLLDKGRLMLLSRDDSGSGSKTEQSVALLEQKWHVVSSKMEERKSKLEEALNLATEFQNSLQEFINWLTLAEQSLNIASPPSLILNTVLSQIEEHKVFANEVNAHRDQIIELDQTGNQLKFLSQKQDVVLIKNLLVSVQSRWEKVVQRSIERGRSLDDARKRAKQFHEAWKKLIDWLEDAESHLDSELEISNDPDKIKLQLSKHKEFQKTLGGKQPVYDTTIRTGRALKEKTLLPEDSQKLDNFLGEVRDKWDTVCGKSVERQHKLEEALLFSGQFMDALQALVDWLYKVEPQLAEDQPVHGDLDLVMNLMDAHKVFQKELGKRTGTVQVLKRSGRELIENSRDDTTWVKGQLQELSTRWDTVCKLSVSKQSRLEQALKQAEVFRDTVHMLLEWLSEAEQTLRFRGALPDDTEALQSLIDTHKEFMKKVEEKRVDVNSAVAMGEVILAVCHPDCITTIKHWITIIRARFEEVLTWAKQHQQRLETALSELVANAELLEELLAWIQWAETTLIQRDQEPIPQNIDRVKALIAEHQTFMEEMTRKQPDVDRVTKTYKRKNIEPTHAPFIEKSRSGGRKSLSQPTPPPMPILSQSEAKNPRINQLSARWQQVWLLALERQRKLNDALDRLEELKEFANFDFDVWRKKYMRWMNHKKSRVMDFFRRIDKDQDGKITRQEFIDGILASKFPTTKLEMTAVADIFDRDGDGYIDYYEFVAALHPNKDAYRPTTDADKIEDEVTRQVAQCKCAKRFQVEQIGENKYRFFLGNQFGDSQQLRLVRILRSTVMVRVGGGWMALDEFLVKNDPCRVHHPGSKIKRSDSSSSISSQSPIARGRTNIELREKFILPEGASQGMTPFRSRGRRSKPSSRAASPTRSSSSASQSNHSCTSMPSSPATPASGTKTSLQFSRCYDKPWLVNSKAGTPIRDSHSPDLQLPTPEVIPSSGSKLKRPTPTFHSSRTSLAGDTSNSSSPASTGAKTNRADPKKSASRPGSRAGSRAGSRASSRRGSDASDFDLLETQSACSDTSESSAAGGQGNSRRGLNKPSKIPTMSKKTTTASPRTPGPKR

SEQ ID NO: 2151 - protein, 39 aa, Homo sapiens
RAHSFSPQSRSGKATQIRFVTKSVMLSLMPTFSRILMPK

SEQ ID NO: 2152 - protein, 37 aa, Homo sapiens
VWELARRIRQSLSRLLLTQAWCISWMISAPCQLCLSS

SEQ ID NO: 2153 - protein, 37 aa, Homo sapiens
LSGLSCSAFPVLSGQMAVANPMLLILCFLCLAIEHKK

SEQ ID NO: 2154 - protein, 45 aa, Homo sapiens
RWRWQRGRCCFIVFSTPNLSSNTVSRLLLWLVLILHQKSKKHLEE

SEQ ID NO: 2155 - protein, 1598 aa, Homo sapiens
LGAGGKPGRSAPAATLGSAERARAPVAASYGARGGGGSGEPPGPPVSRRAEEAPARTMSFLEEARAAGRAVVLALVLLLLPAVPVGASVPPRPLLPLQPGMPHVCAEQELTLVGRRQPCVQALSHTVPVWKAGCGWQAWCVGHERRTVYYMGYRQVYTTEARTVLRCCRGWMQQPDEEGCLSAECSASLCFHGGRCVPGSAQPCHCPPGFQGPRCQYDVDECRTHNGGCQHRCVNTPGSYLCECKPGFRLHTDSRTCLAINSCALGNGGCQHHCVQLTITRHRCQCRPGFQLQEDGRHCVRRSPCANRNGSCMHRCQVVRGLARCECHVGYQLAADGKACEDVDECAAGLAQCAHGCLNTQGSFKCVCHAGYELGADGRQCYRIEMEIVNSCEANNGGCSHGCSHTSAGPLCTCPRGYELDTDQRTCIDVDDCADSPCCQQVCTNNPGGYECGCYAGYRLSADGCGCEDVDECASSRGGCEHHCTNLAGSFQCSCEAGYRLHEDRRGCSPLEEPMVDLDGELPFVRPLPHIAVLQDELPQLFQDDDVGADEEEAELRGEHTLTEKFVCLDDSFGHDCSLTCDDCRNGGTCLLGLDGCDCPEGWTGLICNETCPPDTFGKNCSFSCSCQNGGTCDSVTGACRCPPGVSGTNCEDGCPKGYYGKHCRKKCNCANRGRCHRLYGACLCDPGLYGRFCHLTCPPWAFGPGCSEECQCVQPHTQSCDKRDGSCSCKAGFRGERCQAECELGYFGPGCWQACTCPVGVACDSVSGECGKRCPAGFQGEDCGQECPVGTFGVNCSSSCSCGGAPCHGVTGQCRCPPGRTGEDCEADCPEGRWGLGCQEICPACQHAARCDPETGACLCLPGFVGSRCQDVCPAGWYGPSCQTRCSCANDGHCHPATGHCSCAPGWTGFSCQRACDTGHWGPDCSHPCNCSAGHGSCDAISGLCLCEAGYVGPRCEQQCPQGHFGPGCEQRCQCQHGAACDHVSGACTCPAGWRGTFCEHACPAGFFGLDCRSACNCTAGAACDAVNGSCLCPAGRRGPRCAETCPAHTYGHNCSQACACFNGASCDPVHGQCHCAPGWMGPSCLQACPAGLYGDNCRHSCLCQNGGTCDPVSGHCACPEGWAGLACEKECLPRDVRAGCRHSGGCLNGGLCDPHTGRCLCPAGWTGDKCQSPCLRGWFGEACAQRCSCPPGAACHHVTGACRCPPGFTGSGCEQACPPGSFGEDCAQMCQCPGENPACHPATGTCSCAAGYHGPSCQQRCPPGRYGPGCEQLCGCLNGGSCDAATGACRCPTGFLGTDCNLTCPQGRFGPNCTHVCGCGQGAACDPVTGTCLCPPGRAGVRCERGCPQNRFGVGCEHTCSCRNGGLCHASNGSCSCGLGWTGRHCELACPPGRYGAACHLECSCHNNSTCEPATGTCRCGPGFYGQACEHPCPPGFHGAGCQGLCWCQHGAPCDPISGRCLCPAGFHGHFCERGCEPGSFGEGCHQRCDCDGGAPCDPVTGLCLCPPGRSGATCNLDCRRGQFGPSCTLHCDCGGGADCDPVSGQCHCVDGYMGPTCREGGPLRLPENPSLAQGSAGTLPASSRPTSRSGGPARH

SEQ ID NO: 2156 - protein, 31 aa, Homo sapiens
MSAGPMVVPCVLNVFVTGSSVLSLSRSRKSL

SEQ ID NO: 2157 - protein, 89 aa, Homo sapiens
IKLVKSASLLTCSTFLIILMSQALAGWVKMRKMKKLMRPLILLYIAQLYMLMKKNSPNIVDCLSLQLLQEKKQKEVQTLLEMKQVKSNL

SEQ ID NO: 2158 - protein, 463 aa, Homo sapiens
ISLRMTILGTTFGMVFSLLQVVSGESGYAQNGDLEDAELDDYSFSCYSQLEVNGSQHSLTCAFEDPDVNITNLEFEICGALVEVKCLNFRKLQEIYFIETKKFLLIGKSNICVKVGEKSLTCKKIDLTTIVKPEAPFDLSVVYREGANDFVVTFNTSHLQKKYVKVLMHDVAYRQEKDENKWTHVNLSSTKLTLLQRKLQPAAMYEIKVRSIPDHYFKGFWSEWSPSYYFRTPEINNSSGEMDPILLTISILSFFSVALLVILACVLWKKRIKPIVWPSLPDHKKTLEHLCKKPRKNLNVSFNPESFLDCQIHRVDDIQARDEVEGFLQDTFPQQLEESEKQRLGGDVQSPNCPSEDVVITPESFGRDSSLTCLAGNVSACDAPILSSSRSLDCRESGKNGPHVYQDLLLSLGTTNSTLPPPFSLQSGILTLNPVAQGQPILTSLGSNQEEAYVTMSSFYQNQ

SEQ ID NO: 2159 - protein, 80 aa, Homo sapiens
LPDLRSKLERGSACSNRSIKKEDDSSQSSTCVVDTTTRGCSEEAATWRGRFGPSLVRGLLAVSLAANALFTSVFLYQSLR

SEQ ID NO: 2160 - protein, 31 aa, Homo sapiens
MVSISIHPQISSIFVLGSLVYFSQEASRWGT

SEQ ID NO: 2161 - protein, 45 aa, Homo sapiens
VPSQKCQIAQQLCWALAANSRSFPHCATCFVLCLMMEYLILKTQP

SEQ ID NO: 2162 - protein, 127 aa, Homo sapiens
LSRDGAACCEPEGDSPRSLAADNLFLGGLLATIFLDIVHISIFYPRVSLTDTGRFGVGMAILSLLLKPLSCCFVYHMYRERGGELLVHTGFLGSSQDRSAYQTIDSAEAPADPFAVPEGRSQDARGY

SEQ ID NO: 2163 - protein, 165 aa, Homo sapiens
LPNQDWKPLSSPVHFANFEVQRTGQQLGCIVFSGSYAWANFTILALGVWAVAQRDSIDAISMFLGGLLATIFLDIVHISIFYPRVSLTDTGRFGVGMAILSLLLKPLSCCFVYHMYRERGGELLVHTGFLGSSQDRSAYQTIDSAEAPADPFAVPEGRSQDARGY

SEQ ID NO: 2164 - protein, 918 aa, Homo sapiens
ILDMARRSSFQSCQIISLFTFAVGVNICLGFTAHRIKRAEGWEEGPPTVLSDSPWTNISGSCKGRCFELQEAGPPDCRCDNLCKSYTSCCHDFDELCLKTARGWECTKDRCGEVRNEENACHCSEDCLARGDCCTNYQVVCKGESHWVDDDCEEIKAAECPAGFVRPPLIIFSVDGFRASYMKKGSKVMPNIEKLRSCGTHSPYMRPVYPTKTFPNLYTLATGLYPESHGIVGNSMYDPVFDATFHLRGREKFNHRWWGGQPLWITATKQGVKAGTFFWSVVIPHERRILTILQWLTLPDHERPSVYAFYSEQPDFSGHKYGPFGPEESSYGSPFTPAKRPKRKVAPKRRQERPVAPPKKRRRKIHRMDHYAAETRQDKMTNPLREIDKIVGQLMDGLKQLKLHRCVNVIFVGDHGMEDVTCDRTEFLSNYLTNVDDITLVPGTLGRIRSKFSNNAKYDPKAIIANLTCKKPDQHFKPYLKQHLPKRLHYANNRRIEDIHLLVERRWHVARKPLDVYKKPSGKCFFQGDHGFDNKVNSMQTVFVGYGSTFKYKTKVPPFENIELYNVMCDLLGLKPAPNNGTHGSLNHLLRTNTFRPTMPEEVTRPNYPGIMYLQSDFDLGCTCDDKVEPKNKLDELNKRLHTKGSTEERHLLYGRPAVLYRTRYDILYHTDFESGYSEIFLMPLWTSYTVSKQAEVSSVPDHLTSCVRPDVRVSPSFSQNCLAYKNDKQMSYGFLFPPYLSSSPEAKYDAFLVTNMVPMYPAFKRVWNYFQRVLVKKYASERNGVNVISGPIFDYDYDGLHDTEDKIKQYVEGSSIPVPTHYYSIITSCLDFTQPADKCDGPLSVSSFILPHRPDNEESCNSSEDESKWVEELMKMHTARVRDIEHLTSLDFFRKTSRSYPEILTLKTYLHTYESEI

SEQ ID NO: 2165 - protein, 158 aa, Homo sapiens
LPNQDWKPLSSPVHFANFEVQRTGQQLGCIVFSGSYAWANFTILALGVWAVAQRDSIDAISMFLGGLLATIFLDIVHISIFYPRVSLTDTGRFGVGMAILSLLLKPLSCCFVYHMYRERGGFLGSSQDRSAYQTIDSAEAPADPFAVPEGRSQDARGY

SEQ ID NO: 2166 - protein, 103 aa, Homo sapiens
MFLGGLLATIFLDIVHISIFYPRVSLTDTGRFGVGMAILSLLLKPLSCCFVYHMYRERGGELLVHTGFLGSSQDRSAYQTIDSAEAPADPFAVPEGRSQDARG

SEQ ID NO: 2167 - protein, 654 aa, Homo sapiens
KRTMKDYDELLKYYELHETIGTGGFAKVKLACHILTGEMVAIKIMDKNTLGSDLPRIKTEIEALKNLRHQHICQLYHVLETANKIFMVLEYCPGGELFDYIISQDRLSEEETRVVFRQIVSAVAYVHSQGYAHRDLKPENLLFDEYHKLKLIDFGLCAKPKGNKDYHLQTCCGSLAYAAPELIQGKSYLGSEADVWSMGILLYVLMCGFLPFDDDNVMALYKKIMRGKYDVPKWLSPSSILLLQQMLQVDPKKRISMKNLLNHPWIMQDYNYPVEWQSKNPFIHLDDDCVTELSVHHRNNRQTMEDLISLWQYDHLTATYLLLLAKKARGKPVRLRLSSFSCGQASATPFTDIKSNNWSLEDVTASDKNYVAGLIDYDWCEDDLSTGAATPRTSQFTKYWTESNGVESKSLTPALCRTPANKLKNKENVYTPKSAVKNEEYFMFPEPKTPVNKNQHKREILTTPNRYTTPSKARNQCLKETPIKIPVNSTGTDKLMTGVISPERRCRSVELDLNQAHMEETPKRKGAKVFGSLERGLDKVITVLTRSKRKGSARDGPRRLKLHYNVTTTRLVNPDQLLNEIMSILPKKHVDFVQKGYTLKCQTQSDFGKVTMQFELEVCQLQKPDVVGIRRQRLKGDAWVYKRLVEDILSSCKV

SEQ ID NO: 2168 - protein, 642 aa, Homo sapiens
VAAAGVCWSLKSTRAAENRRDRTWAPRASPASQVGAGRQATSRPAPGMRVLLAALGLLFLGALRAFPQDRPFEDTCHGNPSHYYDKAVRRCCYRCPMGLFPTQQCPQRPTDCRKQCEPDYYLDEADRCTACVTCSRDDLVEKTPCAWNSSRVCECRPGMFCSTSAVNSCARCFFHSVCPAGMIVKFPGTAQKNTVCEPASPGVSPACASPENCKEPSSGTIPQAKPTPVSPATSSASTMPVRGGTRLAQEAASKLTRAPDSPSSVGRPSSDPGLSPTQPCPEGSGDCRKQCEPDYYLDEAGRCTACVSCSRDDLVEKTPCAWNSSRTCECRPGMICATSATNSCARCVPYPICAAETVTKPQDMAEKDTTFEAPPLGTQPDCNPTPENGEAPASTSPTQSLLVDSQASKTLPIPTSAPVALSSTGKPVLDAGPVLFWVILVLVVVVGSSAFLLCHRRACRKRIRQKLHLCYPVQTSQPKLELVDSRPRRSSTQLRSGASVTEPVAEERGLMSQPLMETCHSVGAAYLESLPLQDASPAGGPSSPRDLPEPRVSTEHTNNKIEKIYIMKADTVIVGTVKAELPEGRGLAGPAEPELEEELEADHTPHYPEQETEPPLGSCSDVMLSVEEEGKEDPLPTAASGK

SEQ ID NO: 2169 - protein, 589 aa, Homo sapiens
VGAARFPRFPGGRRPPGHLTSGPGDARPPRRAGTAVPGGATSLPTGLFPTQQCPQRPTDCRKQCEPDYYLDEADRCTACVTCSRDDLVEKTPCAWNSSRVCECRPGMFCSTSAVNSCARCFFHSVCPAGMIVKFPGTAQKNTVCEPASPGVSPACASPENCKEPSSGTIPQAKPTPVSPATSSASTMPVRGGTRLAQEAASKLTRAPDSPSSVGRPSSDPGLSPTQPCPEGSGDCRKQCEPDYYLDEAGRCTACVSCSRDDLVEKTPCAWNSSRTCECRPGMICATSATNSCARCVPYPICAAETVTKPQDMAEKDTTFEAPPLGTQPDCNPTPENGEAPASTSPTQSLLVDSQASKTLPIPTSAPVALSSTGKPVLDAGPVLFWVILVLVVVVGSSAFLLCHRRACRKRIRQKLHLCYPVQTSQPKLELVDSRPRRSSTLRSGASVTEPVAEERGLMSQPLMETCHSVGAAYLESLPLQDASPAGGPSSPRDLPEPRVSTEHTNNKIEKIYIMKADTVIVGTVKAELPEGRGLAGPAEPELEEELEADHTPHYPEQETEPPLGSCSDVMLSVEEEGKEDPLPTAASGK

SEQ ID NO: 2170 - protein, 227 aa, Homo sapiens
LCGCSKAKSVGRLCVPGPVLFWVILVLVVVVGSSAFLLCHRRACRKRIRQKLHLCYPVQTSQPKLELVDSRPRRSSTQLRSGASVTEPVAEERGLMSQPLMETCHSVGAAYLESLPLQDASPAGGPSSPRDLPEPRVSTEHTNNKIEKIYIMKADTVIVGTVKAELPEGRGLAGPAEPELEEELEADHTPHYPEQETEPPLGSCSDVMLSVEEEGKEDPLPTAASGK

SEQ ID NO: 2171 - protein, 64 aa, Homo sapiens
VLFWVILVLVVVVGSSAFLLCHRRACRKRIRQKLHLCYPVQTSQPKLELVDSRPRRSSTRKSTS

SEQ ID NO: 2172 - protein, 452 aa, Homo sapiens
LERRRWAARARGREGRGQPDPARTHGARRRLGRAGRRTGALGCGARLARPGQHAKVFCTKTSDTVCDSCEDSTYTQLWNWVPECLSCGSRCSSDQVETQACTREQNRICTCRPGWYCALSKQEGCRLCAPLRKCRPGFGVARPGTETSDVVCKPCAPGTFSNTTSSTDICRPHQICNVVAIPGNASMDAVCTSTSPTRSMAPGAVHLPQPVSTRSQHTQPTPEPSTAPSTSFLLPMGPSPPAEGSTGDFALPVGLIVGVTALGLLIIGVVNCVIMTQVKKKPLCLQREAKVPHLPADKARGTQGPEQQHLLITAPSSSSSSLESSASALDRRAPTRNQPQAPGVEASGAGEARASTGSSDSSPGGHGTQVNVTCIVNVCSSSDHSSQCSSQASSTMGDTDSSPSESPKDEQVPFSKEECAFRSQLETPETLLGSTEEKPLPLGVPDAGMKPS

SEQ ID NO: 2173 - protein, 173 aa, Homo sapiens
LRGREGARAGGNRTPPAPMAPVAVWAALAVGLELWAAAHALPAQVAFTPYAPEPGSTCRLREYYDQTAQMCCSKCSPGQHAKVFCTKTSDTVCDSCEDSTYTQLWNWVPECLSCGSRCSSDQVETQACTREQNRICTCRPGWYCALSKQEGCRLCAPLRKCRPGFGVARPDLS

SEQ ID NO: 2174 - protein, 479 aa, Homo sapiens
LRGREGARAGGNRTPPAPMAPVAVWAALAVGLELWAAAHALPAQVAFTPYAPEPGSTCRLREYYDQTAQMCCSKCSPGQHAKVFCTKTSDTVCDSCEDSTYTQLWNWVPECLSCGSRCSSDQVETQACTREQNRICTCRPGWYCALSKQEGCRLCAPLRKCRPGFGVARPGTETSDVVCKPCAPGTFSNTTSSTDICRPHQICNVVAIPGNASMDAVCTSTSPTRSMAPGAVHLPQPVSTRSQHTQPTPEPSTAPSTSFLLPMGPSPPAEGSTGDFALPVGLIVGVTALGLLIIGVVNCVIMTQVKKKPLCLQREAKVPHLPADKARGTQGPEQQHLLITAPSSSSSSLESSASALDRRAPTRNQPQAPGVEASGAGEARASTGSSDSSPGGHGTQVNVTCIVNVCSSSDHSSQCSSQASSTMGDTDSSPSESPKDEQVPFSKEECAFRSQLETPETLLGSTEEKPLPLGVPDAGMKPS

SEQ ID NO: 2175 - protein, 327 aa, Homo sapiens
TTIAMAALIAENFRFLSLFFKSKDVMIFNGLVALGTVGSQELFSVVAFHCPCSPARNYLYGLAAIGVPALVLFIIGIILNNHTWNLVAECQHRRTKNCSAAPTFLLLSSILGRAAVAPVTWSVISLLRGEAYVCALSEFVDPSSLTAREEHFPSAHATEILARFPCKENPDNLSDFREEVSRRLRYESQLFGWLLIGVVAILVFLTKCLKHYCSPLSYRQEAYWAQYRANEDQLFQRTAEVHSRVLAANNVRRFFGFVALNKDDEELIANFPVEGTQPRPQWNAITGVYLYRENQGLPLYSRLHKWAQGLAGNGAAPDNVEMALLPS

SEQ ID NO: 2176 - protein, 552 aa, Homo sapiens
THLEREAAFEVAILLRRMEEGARHRNNTEKKHPGGGESDASPEAGSGGGGVALKKEIGLVSACGIIVGNIIGSGIFVSPKGVLENAGSVGLALIVWIVTGFITVVGALCYAELGVTIPKSGGDYSYVKDIFGGLAGFLRLWIAVLVIYPTNQAVIALTFSNYVLQPLFPTCFPPESGLRLLAAICLLLLTWVNCSSVRWATRVQDIFTAGKLLALALIIIMGIVQICKGEYFWLEPKNAFENFQEPDIGLVALAFLQGSFAYGGWNFLNYVTEELVDPYKNLPRAIFISIPLVTFVYVFANVAYVTAMSPQELLASNAVAVTFGEKLLGVMAWIMPISVALSTFGGVNGSLFTSSRLFFAGAREGHLPSVLAMIHVKRCTPIPALLFTCISTLLMLVTSDMYTLINYVGFINYLFYGVTVAGQIVLRWKKPDIPRPIKINLLFPIIYLLFWAFLLVFSLWSEPVVCGIGLAIMLTGVPVYFLGVYWQHKPKCFSDFIELLTLVSQKMCVVVYPEVERGSGTEEANEDMEEQQQPMYQPTPTKDKDVAGQPQP

SEQ ID NO: 2177 - protein, 1374 aa, Homo sapiens
ISSQIKGMKSGSGGGSPTSLWGLLFLSAALSLWPTSGEICGPGIDIRNDYQQLKRLENCTVIEGYLHILLISKAEDYRSYRFPKLTVITEYLLLFRVAGLESLGDLFPNLTVIRGWKLFYNYALVIFEMTNLKDIGLYNLRNITRGAIRIEKNADLCYLSTVDWSLILDAVSNNYIVGNKPPKECGDLCPGTMEEKPMCEKTTINNEYNYRCWTTNRCQKMCPSTCGKRACTENNECCHPECLGSCSAPDNDTACVACRHYYYAGVCVPACPPNTYRFEGWRCVDRDFCANILSAESSDSEGFVIHDGECMQECPSGFIRNGSQSMYCIPCEGPCPKVCEEEKKTKTIDSVTSAQMLQGCTIFKGNLLINIRRGNNIASELENFMGLIEVVTGYVKIRHSHALVSLSFLKNLRLILGEEQLEGNYSFYVLDNQNLQQLWDWDHRNLTIKAGKMYFAFNPKLCVSEIYRMEEVTGTKGRQSKGDINTRNNGERASCESDVLHFTSTTTSKNRIIITWHRYRPPDYRDLISFTVYYKEAPFKNVTEYDGQDACGSNSWNMVDVDLPPNKDVEPGILLHGLKPWTQYAVYVKAVTLTMVENDHIRGAKSEILYIRTNASVPSIPLDVLSASNSSSQLIVKWNPPSLPNGNLSYYIVRWQRQPQDGYLYRHNYCSKDKIPIRKYADGTIDIEEVTENPKTEVCGGEKGPCCACPKTEAEKQAEKEEAEYRKVFENFLHNSIFVPRPERKRRDVMQVANTTMSSRSRNTTAADTYNITDPEELETEYPFFESRVDNKERTVISNLRPFTLYRIDIHSCNHEAEKLGCSASNFVFARTMPAEGADDIPGPVTWEPRPENSIFLKWPEPENPNGLILMYEIKYGSQVEDQRECVSRQEYRKYGGAKLNRLNPGNYTARIQATSLSGNGSWTDPVFFYVQAKTGYENFIHLIIALPVAVLLIVGGLVIMLYVFHRKRNNSRLGNGVLYASVNPEYFSAADVYVPDEWEVAREKITMSRELGQGSFGMVYEGVAKGVVKDEPETRVAIKTVNEAASMRERIEFLNEASVMKEFNCHHVVRLLGVVSQGQPTLVIMELMTRGDLKSYLRSLRPEMENNPVLAPPSLSKMIQMAGEIADGMAYLNANKFVHRDLAARNCMVAEDFTVKIGDFGMTRDIYETDYYRKGGKGLLPVRWMSPESLKDGVFTTYSDVWSFGVVLWEIATLAEQPYQGLSNEQVLRFVMEGGLLDKPDNCPDMLFELMRMCWQYNPKMRPSFLEIISSIKEEMEPGFREVSFYYSEENKLPEPEELDLEPENMESVPLDPSASSSSLPLPDRHSGHKAENGPGPGVLVLRASFDERQPYAHMNGGRKNERALPLPQSSTC

SEQ ID NO: 2178 - protein, 37 aa, Homo sapiens
RNRIVCPLSRTSTLSTPLLMQVRVMTCFLLALRIISI

SEQ ID NO: 2179 - protein, 63 aa, Homo sapiens
ICRLAGRLQESLSLNFQPQRPPPLSPRAMGRVSGLVPSRFLTLLAHLVVVITLFWSRCPSSCH

SEQ ID NO: 2180 - protein, 168 aa, Homo sapiens
ICRLAGRLQESLSLNFQPQRPPPLSPRAMGRVSGLVPSRFLTLLAHLVVVITLFWSRDSNIQACLPLTFTPEEYDKQDIQLVAALSVTLGLFAVELAGFLSGVSMFNSTQSLISIGAHCSASVALSFFIFERWECTTYWYIFVFCSALPAVTEMALFVTVFGLKKKPF

SEQ ID NO: 2181 - protein, 612 aa, Homo sapiens
LATLPRDPHPGRRSGRPPLTAPPQTRAWTPRASGATGRATMLMRKVPGFVPASPWGLRLPQKFLFLLFLSGLVTLCFGALFLLPHSSRLKRLFLAPRTQQPGLEVVAEIAGHAPAREQEPPPNPAPAAPAPGEDDPSSWASPRRRKGGLRRTRPTGPREEATAARGNSIPASRPGDEGVPFRFDFNAFRSRLRHPVLGTRADESQEPQSQVRAQREKIKEMMQFAWQSYKRYAMGKNELRPLTKDGYEGNMFGGLSGATVIDSLDTLYLMELKEEFQEAKAWVGESFHLNVSGEASLFEVNIRYIGGLLSAFYLTGEEVFRIKAIRLGEKLLPAFNTPTGIPKGVVSFKSGNWGWATAGSSSILAEFGSLHLEFLHLTELSGNQVFAEKATVRNIRKVLRKIEKPFGLYPNFLSPVSGNWVQHHVSVGGLGDSFYEYLIKSWLMSGKTDMEAKNMYYEALEAIETYLLNVSPGGLTYIAEWRGGILDHKMGHLACFSGGMIALGAEDAKEEKRAHYRELAAQITKTCHESYARSDTKLGPEAFWFNSGREAVATQLSESYYILRPEVVESYMYLWRQTHNPIYREWGWEGQGGLGEILSDRSRFLWDPRRVQ

SEQ ID NO: 2182 - protein, 670 aa, Homo sapiens
LATLPRDPHPGRRSGRPPLTAPPQTRAWTPRASGATGRATMLMRKVPGFVPASPWGLRLPQKFLFLLFLSGLVTLCFGALFLLPHSSRLKRLFLAPRTQQPGLEVVAEIAGHAPAREQEPPPNPAPAAPAPGEDDPSSWASPRRRKGGLRRTRPTGPREEATAARGNSIPASRPGDEGVPFRFDFNAFRSRLRHPVLGTRADESQEPQSQVRAQREKIKEMMQFAWQSYKRYAMGKNELRPLTKDGYEGNMFGGLSGATVIDSLDTLYLMELKEEFQEAKAWVGESFHLNVSGEASLFEVNIRYIGGLLSAFYLTGEEVFRIKAIRLGEKLLPAFNTPTGIPKGVVSFKSGNWGWATAGSSSILAEFGSLHLEFLHLTELSGNQVFAEKVRNIRKVLRKIEKPFGLYPNFLSPVSGNWVQHHVSVGGLGDSFYEYLIKSWLMSGKTDMEAKNMYYEALEAIETYLLNVSPGGLTYIAEWRGGILDHKMGHLACFSGGMIALGAEDAKEEKRAHYRELAAQITKTCHESYARSDTKLGPEAFWFNSGREAVATQLSESYYILRPEVVESYMYLWRQTHNPIYREWGWEVVLALEKYCRTEAGFSGIQDVYSSTPNHDNKQQSFFLAETLKYLYLLFSEDDLLSLEDWVFNTEAHPLPVNHSDSSGRAWGRH

SEQ ID NO: 2183 - protein, 93 aa, Homo sapiens
TADLQPKMIPAVVLLLLLLVEQAAALGEPQLCYILDAILFLYGIVLTLLYCRLKIQVRKAAITSYEKSDGVYTGLSTRNQETYETLKHEKPPQ

SEQ ID NO: 2184 - protein, 624 aa, Homo sapiens
IITSRCPYLSSGKIILASAAYKSGNQNSTYIRQSNILDMALEIHMSDPMCLIENFNEQLKVNQEALEILSAITQPVVVVAIVGLYRTGKSYLMNKLAGKNKGFSVASTVQSHTKGIWIWCVPHPNWPNHTLVLLDTEGLGDVEKADNKNDIQIFALALLLSSTFVYNTVNKIDQGAIDLLHNVTELTDLLKARNSPDLDRVEDPADSASFFPDLVWTLRDFCLGLEIDGQLVTPDEYLENSLRPKQGSDQRVQNFNLPRLCIQKFFPKKKCFIFDLPAHQKKLAQLETLPDDELEPEFVQQVTEFCSYIFSHSMTKTLPGGIMVNGSRLKNLVLTYVNAISSGDLPCIENAVLALAQRENSAAVQKAIAHYDQQMGQKVQLPMETLQELLDLHRTSEREAIEVFMKNSFKDVDQSFQKELETLLDAKQNDICKRNLEASSDYCSALLKDIFGPLEEAVKQGIYSKPGGHNLFIQKTEELKAKYYREPRKGIQAEEVLQKYLKSKESVSHAILQTDQALTETEKKKKEAQVKAEAEKAEAQRLAAIQRQNEQMMQERERLHQEQVRQMEIAKQNWLAEQQKMQEQQMQEQAAQLSTTFQAQNRSLLSELQHAQRTVNNDDPCVLL

SEQ ID NO: 2185 - protein, 1961 aa, Homo sapiens
IPLQGGDRRSLPSMAPTWGPGMVSVVGPMGLLVVLLVGGCAAEEPPRFIKEPKDQIGVSGGVASFVCQATGDPKPRVTWNKKGKKVNSQRFETIEFDESAGAVLRIQPLRTPRDENVYECVAQNSVGEITVHAKLTVLREDQLPSGFPNIDMGPQLKVVERTRTATMLCAASGNPDPEITWFKDFLPVDPSASNGRIKQLRSETFESTPIRGALQIESSEETDQGKYECVATNSAGVRYSSPANLYVRELREVRRVAPRFSILPMSHEIMPGGNVNITCVAVGSPMPYVKWMQGAEDLTPEDDMPVGRNVLELTDVKDSANYTCVAMSSLGVIEAVAQITVKSLPKAPGTPMVTENTATSITITWDSGNPDPVSYYVIEYKSKSQDGPYQIKEDITTTRYSIGGLSPNSEYEIWVSAVNSIGQGPPSESVVTRTGEQAPASAPRNVQARMLSATTMIVQWEEPVEPNGLIRGYRVYYTMEPEHPVGNWQKHNVDDSLLTTVGSLLEDETYTVRVLAFTSVGDGPLSDPIQVKTQQGVPGQPMNLRAEARSETSITLSWSPPRQESIIKYELLFREGDHGREVGRTFDPTTSYVVEDLKPNTEYAFRLAARSPQGLGAFTPVVRQRTLQSKPSAPPQDVKCVSVRSTAILVSWRPPPPETHNGALVGYSVRYRPLGSEDPEPKEVNGIPPTTTQILLEALEKWTQYRITTVAHTEVGPGPESSPVVVRTDEDVPSAPPRKVEAEALNATAIRVLWRSPAPGRQHGQIRGYQVHYVRMEGAEARGPPRIKDVMLADAQWETDDTAEYEMVITNLQPETAYSITVAAYTMKGDGARSKPKVVVTKGAVLGRPTLSVQQTPEGSLLARWEPPAGTAEDQVLGYRLQFGREDSTPLATLEFPPSEDRYTASGVHKGATYVFRLAARSRGGLGEEAAEVLSIPEDTPRGHPQILEAAGNASAGTVLLRWLPPVPAERNGAIVKYTVAVREAGALGPARETELPAAAEPGAENALTLQGLKPDTAYDLQVRAHTRRGPGPFSPPVRYRTFLRDQVSPKNFKVKMIMKTSVLLSWEFPDNYNSPTPYKIQYNGLTLDVDGRTTKKLITHLKPHTFYNFVLTNRGSSLGGLQQTVTAWTAFNLLNGKPSVAPKPDADGFIMVYLPDGQSPVPVQSYFIVMVPLRKSRGGQFLTPLGSPEDMDLEELIQDISRLQRRSLRHSRQLEVPRPYIAARFSVLPPTFHPGDQKQYGGFDNRGLEPGHRYVLFVLAVLQKSEPTFAASPFSDPFQLDNPDPQPIVDGEEGLIWVIGPVLAVVFIICIVIAILLYKNKPDSKRKDSEPRTKCLLNNADLAPHHPKDPVEMRRINFQTPDSGLRSPLREPGFHFESMLSHPPIPIADMAEHTERLKANDSLKLSQEYESIDPGQQFTWEHSNLEVNKPKNRYANVIAYDHSRVILQPIEGIMGSDYINANYVDGYRCQNAYIATQGPLPETFGDFWRMVWEQRSATIVMMTRLEEKSRIKCDQYWPNRGTETYGFIQVTLLDTIELATFCVRTFSLHKNGSSEKREVRQFQFTAWPDHGVPEYPTPFLAFLRRVKTCNPPDAGPIVVHCSAGVGRTGCFIVIDAMLERIKPEKTVDVYGHVTLMRSQRNYMVQTEDQYSFIHEALLEAVGCGNTEVPARSLYAYIQKLAQVEPGEHVTGMELEFKRLANSKAHTSRFISANLPCNKFKNRLVNIMPYESTRVCLQPIRGVEGSDYINASFIDGYRQQKAYIATQGPLAETTEDFWRMLWENNSTIVVMLTKLREMGREKCHQYWPAERSARYQYFVVDPMAEYNMPQYILREFKVTDARDGQSRTVRQFQFTDWPEQGVPKSGEGFIDFIGQVHKTKEQFGQDGPISVHCSAGVGRTGVFITLSIVLERMRYEGVVDIFQTVKMLRTQRPAMVQTEDEYQFCYQAALEYLGSFDHYAT

SEQ ID NO: 2186 - protein, 219 aa, Homo sapiens
VLPRPGSPAGPEGRRDPSGRGRPDPVYAAAGRAGAGQPGSGALTAGRGAAPQSSMDAPRRDMELLSNSLAAYAHIRANPESFGLYFVLGVCFGLLLTLCLLVISISWAPRPRPRGPAQRRDPRSSTLEPEDDDEDEEDTVTRLGPDDTLPGPELSAEPDGPLNVNVFTSAEELERAQRLEERERILREIWRTGQPDLLGTGTLGPSPTATGTLGRMHYY

SEQ ID NO: 2187 - protein, 179 aa, Homo sapiens
LSGGAGRGAAPQSSMDAPRRDMELLSNSLAAYAHIRANPESFGLYFVLGVCFGLLLTLCLLVISISWAPRPRPRGPAQRRDPRSSTLEPEDDDEDEEDTVTRLGPDDTLPGPELSAEPDGPLNVNVFTSAEELERAQRLEERERILREIWRTGQPDLLGTGTLGPSPTATGTLGRMHYY

SEQ ID NO: 2188 - protein, 385 aa, Homo sapiens
LPAGLASARRPWLRLLRSELGRSSGLRGRGASRLPGPKRRGPRVMAKGEGAESGSAAGLLPTSILQSTERPAQVKKEPKKKKQQLSVCNKLCYALGGAPYQVTGCALGFFLQIYLLDVAQVGPFSASIILFVGRAWDAITDPLVGLCISKSPWTCLGRLMPWIIFSTPLAVIAYFLIWFVPDFPHGQTYWYLLFYCLFETMVTCFHVPYSALTMFISTEQTERDSATAYRMTVEVLGTVLGTAIQGQIVGQADTPCFQDLNSSTVASQSANHTHGTTSHRETQKAYLLAAGVIVCIYIICAVILILGVREQREPYEAQQSEPIAYFRGLRLVMSHGPYIKLITGFLFTSLAFMLVEGNFVLFCTYTLGFRNEFQNLLLAIMVHAA

SEQ ID NO: 2189 - protein, 574 aa, Homo sapiens
LPAGLASARRPWLRLLRSELGRSSGLRGRGASRLPGPKRRGPRVMAKGEGAESGSAAGLLPTSILQSTERPAQVKKEPKKKKQQLSVCNKLCYALGGAPYQVTGCALGFFLQIYLLDVAQVGPFSASIILFVGRAWDAITDPLVGLCISKSPWTCLGRLMPWIIFSTPLAVIAYFLIWFVPDFPHGQTYWYLLFYCLFETMVTCFHVPYSALTMFISTEQTERDSATAYRMTVEVLGTVLGTAIQGQIVGQADTPCFQDLNSSTVASQSANHTHGTTSHRETQKAYLLAAGVIVCIYIICAVILILGVREQREPYEAQQSEPIAYFRGLRLVMSHGPYIKLITGFLFTSLAFMLVEGNFVLFCTYTLGFRNEFQNLLLAIMLSATLTIPIWQWFLTRFGKKTAVYVGISSAVPFLILVALMESNLIITYAVAVAAGISVAAAFLLPWSMLPDVIDDFHLKQPHFHGTEPIFFSFYVFFTKFASGVSLGISTLSLDFAGYQTRGCSQPERVKFTLNMLVTMAPIVLILLGLLLFKMYPIDEERRRQNKKALQALRDEASSSGCSETDSTELASIL

SEQ ID NO: 2190 - protein, 587 aa, Homo sapiens
LPAGLASARRPWLRLLRSELGRSSGLRGRGASRLPGPKRRGPRVMAKGEGAESGSAAGLLPTSILQSTERPAQVKKEPKKKKQQLSVCNKLCYALGGAPYQVTGCALGFFLQIYLLDVAQKDEEVVFCFSSFQVGPFSASIILFVGRAWDAITDPLVGLCISKSPWTCLGRLMPWIIFSTPLAVIAYFLIWFVPDFPHGQTYWYLLFYCLFETMVTCFHVPYSALTMFISTEQTERDSATAYRMTVEVLGTVLGTAIQGQIVGQADTPCFQDLNSSTVASQSANHTHGTTSHRETQKAYLLAAGVIVCIYIICAVILILGVREQREPYEAQQSEPIAYFRGLRLVMSHGPYIKLITGFLFTSLAFMLVEGNFVLFCTYTLGFRNEFQNLLLAIMLSATLTIPIWQWFLTRFGKKTAVYVGISSAVPFLILVALMESNLIITYAVAVAAGISVAAAFLLPWSMLPDVIDDFHLKQPHFHGTEPIFFSFYVFFTKFASGVSLGISTLSLDFAGYQTRGCSQPERVKFTLNMLVTMAPIVLILLGLLLFKMYPIDEERRRQNKKALQALRDEASSSGCSETDSTELASIL

SEQ ID NO: 2191 - protein, 186 aa, Homo sapiens
LAVIAYFLIWFVPDFPHGQTYWYLLFYCLFETMVTCFHVPYSALTMFISTEQTERDSATAYRMTVEVLGTVLGTAIQGQIVGQADTPCFQDLNSSTVASQSANHTHGTTSHRETQKAYLLAAGVIVCIYIICAVILILGVREQRALGHFNHSHLAVVLDPVWQEDSCICWDLISSAISHLGGPHGE

SEQ ID NO: 2192 - protein, 116 aa, Homo sapiens
LILGVREQREPYEAQQSEPIAYFRGLRLVMSHGPYIKLITGFLFTSLAFMLVEGNFVLFCTYTLGFRNEFQNLLLAIMLSATLTIPIWQWFLTRFGKKTAVYVGISVSGVEEQSLG

SEQ ID NO: 2193 - protein, 166 aa, Homo sapiens
LASSSPPWLSCWWRGTLSCFAPTPWASAMNSRIYSWPSWSMLPDVIDDFHLKQPHFHGTEPIFFSFYVFFTKFASGVSLGISTLSLDFAGYQTRGCSQPERVKFTLNMLVTMAPIVLILLGLLLFKMYPIDEERRRQNKKALQALRDEASSSGCSETDSTELASIL

SEQ ID NO: 2194 - protein, 36 aa, Homo sapiens
VPFLILVALMESNLIITYAVAVAAGISVAAAFLLPW

SEQ ID NO: 2195 - protein, 50 aa, Homo sapiens
LRDGRWTLGRVCSSGPAVPTPAAVAAMTGLALLYSGVFVAFWACALAVGS

SEQ ID NO: 2196 - protein, 602 aa, Homo sapiens
LTSVGYAVGLGNVWRFPYLCYRNGGGAFMFPYFIMLIFCGIPLFFMELSFGQFASQGCLGVWRISPMFKGVGYGMMVVSTYIGIYYNVVICIAFYYFFSSMTHVLPWAYCNNPWNTHDCAGVLDASNLTNGSRPAALPSNLSHLLNHSLQRTSPSEEYWRLYVLKLSDDIGNFGEVRLPLLGCLGVSWLVVFLCLIRGVKSSGKVVYFTATFPYVVLTILFVRGVTLEGAFDGIMYYLTPQWDKILEAKVWGDAASQIFYSLGCAWGGLITMASYNKFHNNCYRDSVIISITNCATSVYAGFVIFSILGFMANHLGVDVSRVADHGPGLAFVAYPEALTLLPISPLWSLLFFFMLILLGLGTQFCLLETLVTAIVDEVGNEWILQKKTYVTLGVAVAGFLLGIPLTSQAGIYWLLLMDNYAASFSLVVISCIMCVAIMYIYGHRNYFQDIQMMLGFPPPLFFQICWRFVSPAIIFLQAQVHRRLPQNPLHFASLPERNVLLHQLPQRGGVPEHDPPTPPSPARTYGPQVRVREVPRARRQRSPNPAPLWAPPSPKPHPCSAAGPLGWDCPFRNCQSLALSSARLLADSDAGGPETRQWEPGP

SEQ ID NO: 2197 - protein, 592 aa, Homo sapiens
VWSPSPEPQPTAAMVGKGAKGMLNGAVPSEATKRDQNLKRGNWGNQIEFVLTSVGYAVGLGNVWRFPYLCYRNGGGAFMFPYFIMLIFCGIPLFFMELSFGQFASQGCLGVWRISPMFKGVGYGMMVVSTYIGIYYNVVICIAFYYFFSSMTHVLPWAYCNNPWNTHDCAGVLDASNLTNGSRPAALPSNLSHLLNHSLQRTSPSEEYWRLYVLKLSDDIGNFGEVRLPLLGCLGVSWLVVFLCLIRGVKSSGKVVYFTATFPYVVLTILFVRGVTLEGAFDGIMYYLTPQWDKILEAKVWGDAASQIFYSLGCAWGGLITMASYNKFHNNCYRDSVIISITNCATSVYAGFVIFSILGFMANHLGVDVSRVADHGPGLAFVAYPEALTLLPISPLWSLLFFFMLILLGLGTQFCLLETLVTAIVDEVGNEWILQKKTYVTLGVAVAGFLLGIPLTSQAGIYWLLLMDNYAASFSLVVISCIMCVAIMYIYGEHSSLRPPATRPLARPLCPAGLLTPHLSRAPELLPGHPDDAGIPTTPLLSDLLALRLSRHHLPPGSGPPPPPPESSSLRVAPGAERAPPPAPTARGSAGA

SEQ ID NO: 2198 - protein, 646 aa, Homo sapiens
VWSPSPEPQPTAAMVGKGAKGMLNGAVPSEATKRDQNLKRGNWGNQIEFVLTSVGYAVGLGNVWRFPYLCYRNGGGAFMFPYFIMLIFCGIPLFFMELSFGQFASQGCLGVWRISPMFKGVGYGMMVVSTYIGIYYNVVICIAFYYFFSSMTHVLPWAYCNNPWNTHDCAGVLDASNLTNGSRPAALPSNLSHLLNHSLQRTSPSEEYWRLYVLKLSDDIGNFGEVRLPLLGCLGVSWLVVFLCLIRGVKSSGKVVYFTATFPYVVLTILFVRGVTLEGAFDGIMYYLTPQWDKILEAKVWGDAASQIFYSLGCAWGGLITMASYNKFHNNCYRDSVIISITNCATSVYAGFVIFSILGFMANHLGVDVSRVADHGPGLAFVAYPEALTLLPISPLWSLLFFFMLILLGLGTQFCLLETLVTAIVDEVGNEWILQKKTYVTLGVAVAGFLLGIPLTSQAGIYWLLLMDNYAASFSLVVISCIMCVAIMYIYGHRNYFQDIQMMLGFPPPLFFQICWRFVSPAIIFFILVFTVIQYQPITYNHYQYPGWAVAIGFLMALSSVLCIPLYAMFRLCRTDGDTLLQRLKNATKPSRDWGPALLEHRTGRYAPTIAPSPEDGFEVQPLHPDKAQIPIVGSNGSSRLQDSRI

SEQ ID NO: 2199 - protein, 556 aa, Homo sapiens
LEAEPVSVVPVTRAPTHRRHGRKRCQRDAGVGYGMMVVSTYIGIYYNVVICIAFYYFFSSMTHVLPWAYCNNPWNTHDCAGVLDASNLTNGSRPAALPSNLSHLLNHSLQRTSPSEEYWRLYVLKLSDDIGNFGEVRLPLLGCLGVSWLVVFLCLIRGVKSSGKVVYFTATFPYVVLTILFVRGVTLEGAFDGIMYYLTPQWDKILEAKVWGDAASQIFYSLGCAWGGLITMASYNKFHNNCYRDSVIISITNCATSVYAGFVIFSILGFMANHLGVDVSRVADHGPGLAFVAYPEALTLLPISPLWSLLFFFMLILLGLGTQFCLLETLVTAIVDEVGNEWILQKKTYVTLGVAVAGFLLGIPLTSQAGIYWLLLMDNYAASFSLVVISCIMCVAIMYIYGHRNYFQDIQMMLGFPPPLFFQICWRFVSPAIIFFILVFTVIQYQPITYNHYQYPGWAVAIGFLMALSSVLCIPLYAMFRLCRTDGDTLLQRLKNATKPSRDWGPALLEHRTGRYAPTIAPSPEDGFEVQPLHPDKAQIPIVGSNGSSRLQDSRI

SEQ ID NO: 2200 - protein, 175 aa, Homo sapiens
LAAVNARFGNRKVEREVLGSASISVALFSPSWYSPPNLGFLHARVASCSTSLSLILVSTSSPGKFPFSRLALPTRASDFHPSFSLLASDYPPPIPPRPAAQLPPPFTRTGTIIPTPLRPVWDSTCLLPNPTLISAWSLPLWPNLSSRLIGDGHSHSLVPNTSSWMDSRHPCPLFN

SEQ ID NO: 2201 - protein, 27 aa, Homo sapiens
LARSFLFSFHLLFISSETHALVLAFGP

SEQ ID NO: 2202 - protein, 54 aa, Homo sapiens
MWWLSIGALIGLSVAAVVLLAFIVTACVLCYLFISSKPHTKLDLGLSLQTAGGS

SEQ ID NO: 2203 - protein, 984 aa, Homo sapiens
LRRGGGGAGSAGRGGRSPGPAMGLPEPGPLRLLALLLLLLLLLLLQLQHLAAAAADPLLGGQGPAKDCEKDQFQCRNERCIPSVWRCDEDDDCLDHSDEDDCPKKTCADSDFTCDNGHCIHERWKCDGEEECPDGSDESEATCTKQVCPAEKLSCGPTSHKCVPASWRCDGEKDCEGGADEAGCATLCAPHEFQCGNRSCLAAVFVCDGDDDCGDGSDERGCADPACGPREFRCGGDGGGACIPERWVCDRQFDCEDRSDEAAELCGRPGPGATSAPAACATASQFACRSGECVHLGWRCDGDRDCKDKSDEADCPLGTCRGDEFQCGDGTCVLAIKHCNQEQDCPDGSDEAGCLQGLNECLHNNGGCSHICTDLKIGFECTCPAGFQLLDQKTCGDIDECKDPDACSQICVNYKGYFKCECYPGYEMDLLTKNCKAAAGKSPSLIFTNRHEVRRIDLVKRNYSRLIPMLKNVVALDVEVATNRIYWCDLSYRKIYSAYMDKASDPKEQEVLIDEQLHSPEGLAVDWVHKHIYWTDSGNKTISVATVDGGRRRTLFSRNLSEPRAIAVDPLRGFMYWSDWGDQAKIEKSGLNGVDRQTLVSDNIEWPNGITLDLLSQRLYWVDSKLHQLSSIDFSGGNRKTLISSTDFLSHPFGIAVFEDKVFWTDLENEAIFSANRLNGLEISILAENLNNPHDIVIFHELKQPRAPDACELSVQPNGGCEYLCLPAPQISSHSPKYTCACPDTMWLGPDMKRCYRAPQSTSTTTLASTMTRTVPATTRAPGTTVHRSTYQNHSTETPSLTAAVPSSVSVPRAPSISPSTLSPATSNHSQHYANEDSKMGSTVTAAVIGIIVPIVVIALLCMSGYLIWRNWKRKNTKSMNFDNPVYRKTTEEEDEDELHIGRTAQIGHVYPAAISSFDRPLWAEPCLGETREPEDPAPALKELFVLPGEPRSQLHQLPKNPLSELPVVKSKRVALSLEDDGLP

SEQ ID NO: 2204 - protein, 925 aa, Homo sapiens
LRRGGGGAGSAGRGGRSPGPAMGLPEPGPLRLLALLLLLLLLLLLQLQHLAAAAADPLLGGQGPAKDCEKDQFQCRNERCIPSVWRCDEDDDCLDHSDEDDCPKKTCADSDFTCDNGHCIHERWKCDGEEECPDGSDESEATCTKQVCPAEKLSCGPTSHKCVPASWRCDGEKDCEGGADEAGCATLCAPHEFQCGNRSCLAAVFVCDGDDDCGDGSDERGCADPACGPREFRCGGDGGGACIPERWVCDRQFDCEDRSDEAAELCGRPGPGATSAPAACATASQFACRSGECVHLGWRCDGDRDCKDKSDEADCPLGTCRGDEFQCGDGTCVLAIKHCNQEQDCPDGSDEAGCLQGLNECLHNNGGCSHICTDLKIGFECTCPAGFQLLDQKTCGDIDECKDPDACSQICVNYKGYFKCECYPGYEMDLLTKNCKAAAGKSPSLIFTNRHEVRRIDLVKRNYSRLIPMLKNVVALDVEVATNRIYWCDLSYRKIYSAYMDKASDPKEQEVLIDEQLHSPEGLAVDWVHKHIYWTDSGNKTISVATVDGGRRRTLFSRNLSEPRAIAVDPLRGFMYWSDWGDQAKIEKSGLNGVDRQTLVSDNIEWPNGITLDLLSQRLYWVDSKLHQLSSIDFSGGNRKTLISSTDFLSHPFGIAVFEDKVFWTDLENEAIFSANRLNGLEISILAENLNNPHDIVIFHELKQPRAPDACELSVQPNGGCEYLCLPAPQISSHSPKYTCACPDTMWLGPDMKRCYRAPQSTSTTTLASTMTRTVPATTRAPGTTVHRSTYQNHSTETPSLTAAVPSSVSVPRAPSISPSTLSPATSNHSQHYANEDSKMGSTVTAAVIGIIVPIVVIALLCMSGYLIWRNWKRKNTKSMNFDNPVYRKTTEEEDEDELHIGRTAQIGHVYPARVALSLEDDGLP

SEQ ID NO: 2205 - protein, 547 aa, Homo sapiens
LWATGAERARRGAGGSDRRREPAALTARRRTMEPAVSLAVCALLFLLWVRLKGLEFVLIHQRWVFVCLFLLPLSLIFDIYYYVRAWVVFKLSSAPRLHEQRVRDIQKQVREWKEQGSKTFMCTGRPGWLTVSLRVGKYKKTHKNIMINLMDILEVDTKKQIVRVEPLVTMGQVTALLTSIGWTLPVLPELDDLTVGGLIMGTGIESSSHKYGLFQHICTAYELVLADGSFVRCTPSENSDLFYAVPWSCGTLGFLVAAEIRIIPAKKYVKLRFEPVRGLEAICAKFTHESQRQENHFVEGLLYSLDEAVIMTGVMTDEAEPSKLNSIGNYYKPWFFKHVENYLKTNREGLEYIPLRHYYHRHTRSIFWELQDIIPFGNNPIFRYLFGWMVPPKISLLKLTQGETLRKLYEQHHVVQDMLVPMKCLQQALHTFQNDIHVYPIWLCPFILPSQPGLVHPKGNEAELYIDIGAYGEPRVKHFEARSCMRQLEKFVRSVHGFQMLYADCYMNREEFWEMFDGSLYHKLREKLGCQDAFPEVYDKICKAARH

SEQ ID NO: 2206 - protein, 1253 aa, Homo sapiens
LLCLVACWLLGAGAEADFSILDEAQVLASQMRRLAAEELGVVTMQRIFNSFVYTEKISNGESEVQQLAKKIREKFNRYLDVVNRNKQVVEASYTAHLTSPLTAIQDCCTIPPSMMEFDGNFNTNVSRTISCDRLSTTVNSRAFNPGRDLNSVLADNLKSNPGIKWQYFSSEEGIFTVFPAHKFRCKGSYEHRSRPIYVSTVRPQSKHIVVILDHGASVTDTQLQIAKDAAQVILSAIDEHDKISVLTVADTVRTCSLDQCYKTFLSPATSETKRKMSTFVSSVKSSDSPTQHAVGFQKAFQLIRSTNNNTKFQANTDMVIIYLSAGITSKDSSEEDKKATLQVINEENSFLNNSVMILTYALMNDGVTGLKELAFLRDLAEQNSGKYGVPDRMALPVIKGSMMVLNQLSNLETTVGRFYTNLPNRMIDEAVFSLPFSDEMGDGLIMTVSKPCYFGNLLLGIVGVDVNLAYILEDVTYYQDSLASYTFLIDDKGYTLMHPSLTRPYLLSEPPLHTDIIHYENIPKFELVRQNILSLPLGSQIIAVPVNSSLSWHINKLRETGKEAYNVSYAWKMVQDTSFILCIVVIQPEIPVKQLKNLNTVPSSKLLYHRLDLLGQPSACLHFKQLATLESPTIMLSAGSFSSPYEHLSQPETKRMVEHYTAYLSDNTRLIANPGLKFSVRNEVMATSHVTDEWMTQMEMSSLNTYIVRRYIATPNGVLRIYPGSLMDKAFDPTRRQWYLHAVANPGLISLTGPYLDVGGAGYVVTISHTIHSSSTQLSSGHTVAVMGIDFTLRYFYKVLMDLLPVCNQDGGNKIRCFIMEDRGYLVAHPTLIDPKGHAPVEQQHITHKEPLVANDILNHPNFVKKNLCNSFSDRTVQRFYKFNTSLAGDLTNLVHGSHCSKYRLARIPGTNAFVGIVNETCDSLAFCACSMVDRLCLNCHRMEQNECECPCECPLEVNECTGNLTNAENRNPSCEVHQEPVTYTAIDPGLQDALHQCVNSRCSQRLESGDCFGVLDCEWCMVDSDGKTHLDKPYCAPQKECFGGIVGAKSPYVDDMGAIGDEVITLNMIKSAPVGPVAGGIMGCIMVLVLAVYAYRHQIHRRSHQHMSPLAAQEMSVRMSNLENDRDERDDDSHEDRGIISNTRFIAAVIERHAHSPERRRRYWGRSGTESDHGYSTMSPQEDSENPPCNNDPLSAGVDVGNHDEDLDLDTPPQTAALLSHKFHHYRSHHPTLHHSHHLQAAVTVHTVDAEC

SEQ ID NO: 2207 - protein, 649 aa, Homo sapiens
VELCASNRLKEGNSLFLLPDMNQVTIQWDAVIALYILFSWCHGGITNINCSGHIWVEPATIFKMGMNISIYCQAAIKNCQPRKLHFYKNGIKERFQITRINKTTARLWYKNFLEPHASMYCTAECPKHFQETLICGKDISSGYPPDIPDEVTCVIYEYSGNMTCTWNAGKLTYIDTKYVVHVKSLETEEEQQYLTSSYINISTDSLQGGKKYLVWVQAANALGMEESKQLQIHLDDIVIPSAAVISRAETINATVPKTIIYWDSQTTIEKVSCEMRYKATTNQTWNVKEFDTNFTYVQQSEFYLEPNIKYVFQVRCQETGKRYWQPWSSLFFHKTPETVPQVTSKAFQHDTWNSGLTVASISTGHLTSDNRGDIGLLLGMIVFAVMLSILSLIGIFNRSFRTGIKRRILLLIPKWLYEDIPNMKNSNVVKMLQENSELMNNNSSEQVLYVDPMITEIKEIFIPEHKPTDYKKENTGPLETRDYPQNSLFDNTTVVYIPDLNTGYKPQISNFLPEGSHLSNNNEITSLTLKPPVDSLDSGNNPRLQKHPNFAFSVSSVNSLSNTIFLGELSLILNQGECSSPDIQNSVEEETTMLLENDSPSETIPEQTLLPDEFVSCLGIVNEELPSINTYFPQNILESHFNRISLLEK

SEQ ID NO: 2208 - protein, 387 aa, Homo sapiens
LPPLSKKSLLPPTMILRPYQPCGTVKEFDTNFTYVQQSEFYLEPNIKYVFQVRCQETGKRYWQPWSSLFFHKTPETVPQVTSKAFQHDTWNSGLTVASISTGHLTSDNRGDIGLLLGMIVFAVMLSILSLIGIFNRSFRTGIKRRILLLIPKWLYEDIPNMKNSNVVKMLQENSELMNNNSSEQVLYVDPMITEIKEIFIPEHKPTDYKKENTGPLETRDYPQNSLFDNTTVVYIPDLNTGYKPQISNFLPEGSHLSNNNEITSLTLKPPVDSLDSGNNPRLQKHPNFAFSVSSVNSLSNTIFLGELSLILNQGECSSPDIQNSVEEETTMLLENDSPSETIPEQTLLPDEFVSCLGIVNEELPSINTYFPQNILESHFNRISLLEK

SEQ ID NO: 2209 - protein, 661 aa, Homo sapiens
LLMAHTFRGCSLAFMFIITWLLIKAKIDACKRGDVTVKPSHVILLGSTVNITCSLKPRQGCFHYSRRNKLILYKFDRRINFHHGHSLNSQVTGLPLGTTLFVCKLACINSDEIQICGAEIFVGVAPEQPQNLSCIQKGEQGTVACTWERGRDTHLYTEYTLQLSGPKNLTWQKQCKDIYCDYLDFGINLTPESPESNFTAKVTAVNSLGSSSSLPSTFTFLDIVRPLPPWDIRIKFQKASVSRCTLYWRDEGLVLLNRLRYRPSNSRLWNMVNVTKAKGRHDLLDLKPFTEYEFQISSKLHLYKGSWSDWSESLRAQTPEEEPTGMLDVWYMKRHIDYSRQQISLFWKNLSVSEARGKILHYQVTLQELTGGKAMTQNITGHTSWTTVIPRTGNWAVAVSAANSKGSSLPTRINIMNLCEAGLLAPRQVSANSEGMDNILVTWQPPRKDPSAVQEYVVEWRELHPGGDTQVPLNWLRSRPYNVSALISENIKSYICYEIRVYALSGDQGGCSSILGNSKHKAPLSGPHINAITEEKGSILISWNSIPVQEQMGCLLHYRIYWKERDSNSQPQLCEIPYRVSQNSHPINSLQPRVTYVLWMTALTAAGESSHGNEREFCLQGKANWMAFVAPSICIAIIMVGIFSTHYFQQKRRHSCPWTGS

SEQ ID NO: 2210 - protein, 637 aa, Homo sapiens
LLMAHTFRGCSLAFMFIITWLLIKAKIDACKRGDVTVKPSHVILLGSTVNITCSLKPRQGCFHYSRRNKLILYKFDRRINFHHGHSLNSQVTGLPLGTTLFVCKLACINSDEIQICGAEIFVGVAPEQPQNLSCIQKGEQGTVACTWERGRDTHLYTEYTLQLSGPKNLTWQKQCKDIYCDYLDFGINLTPESPESNFTAKVTAVNSLGSSSSLPSTFTFLDIVRPLPPWDIRIKFQKASVSRCTLYWRDEGLVLLNRLRYRPSNSRLWNMVNVTKAKGRHDLLDLKPFTEYEFQISSKLHLYKGSWSDWSESLRAQTPEEEPTGMLDVWYMKRHIDYSRQQISLFWKNLSVSEARGKILHYQVTLQELTGGKAMTQNITGHTSWTTVIPRTGNWAVAVSAANSKGSSLPTRINIMNLCEAGLLAPRQVSANSEGMDNILVTWQPPRKDPSAVQEYVVEWRELHPGGDTQVPLNWLRSRPYNVSALISENIKSYICYEIRVYALSGDQGGCSSILGNSKHKAPLSGPHINAITEEKGSILISWNSIPVQEQMGCLLHYRIYWKERDSNSQPQLCEIPYRVSQNSHPINSLQPRVTYVLWMTALTAAGESSHGNEREFCLQGEDTAALGQAPDRLAHA

SEQ ID NO: 2211 - protein, 864 aa, Homo sapiens
LLMAHTFRGCSLAFMFIITWLLIKAKIDACKRGDVTVKPSHVILLGSTVNITCSLKPRQGCFHYSRRNKLILYKFDRRINFHHGHSLNSQVTGLPLGTTLFVCKLACINSDEIQICGAEIFVGVAPEQPQNLSCIQKGEQGTVACTWERGRDTHLYTEYTLQLSGPKNLTWQKQCKDIYCDYLDFGINLTPESPESNFTAKVTAVNSLGSSSSLPSTFTFLDIVRPLPPWDIRIKFQKASVSRCTLYWRDEGLVLLNRLRYRPSNSRLWNMVNVTKAKGRHDLLDLKPFTEYEFQISSKLHLYKGSWSDWSESLRAQTPEEEPTGMLDVWYMKRHIDYSRQQISLFWKNLSVSEARGKILHYQVTLQELTGGKAMTQNITGHTSWTTVIPRTGNWAVAVSAANSKGSSLPTRINIMNLCEAGLLAPRQVSANSEGMDNILVTWQPPRKDPSAVQEYVVEWRELHPGGDTQVPLNWLRSRPYNVSALISENIKSYICYEIRVYALSGDQGGCSSILGNSKHKAPLSGPHINAITEEKGSILISWNSIPVQEQMGCLLHYRIYWKERDSNSQPQLCEIPYRVSQNSHPINSLQPRVTYVLWMTALTAAGESSHGNEREFCLQGKANWMAFVAPSICIAIIMVGIFSTHYFQQKVFVLLAALRPQWCSREIPDPANSTCAKKYPIAEEKTQLPLDRLLIDWPTPEDPEPLVISEVLHQVTPVFRHPPCSNWPQREKGIQGHQASEKDMMHSASSPPPPRALQAESRQLVDLYKVLESRGSDPKPENPACPWTVLPAGDLPTHDGYLPSNIDDLPSHEAPLADSLEELEPQHISLSVFPSSSLHPLTFSCGDKLTLDQLKMRCDSLML

SEQ ID NO: 2212 - protein, 778 aa, Homo sapiens
LLMAHTFRGCSLAFMFIITWLLIKAKIDACKRGDVTVKPSHVILLGSTVNITCSLKPRQGCFHYSRRNKLILYKFDRRINFHHGHSLNSQVTGLPLGTTLFVCKLACINSDEIQICGAEIFVGVAPEQPQNLSCIQKGEQGTVACTWERGRDTHLYTEYTLQLSGPKNLTWQKQCKDIYCDYLDFGINLTPESPESNFTAKVTAVNSLGSSSSLPSTFTFLDIVRPLPPWDIRIKFQKASVSRCTLYWRDEGLVLLNRLRYRPSNSRLWNMVNVTKAKGRHDLLDLKPFTEYEFQISSKLHLYKGSWSDWSESLRAQTPEEEPTGMLDVWYMKRHIDYSRQQISLFWKNLSVSEARGKILHYQVTLQELTGGKAMTQNITGHTSWTTVIPRTGNWAVAVSAANSKGSSLPTRINIMNLCEAGLLAPRQVSANSEGMDNILVTWQPPRKDPSAVQEYVVEWRELHPGGDTQVPLNWLRSRPYNVSALISEIPYRVSQNSHPINSLQPRVTYVLWMTALTAAGESSHGNEREFCLQGKANWMAFVAPSICIAIIMVGIFSTHYFQQKVFVLLAALRPQWCSREIPDPANSTCAKKYPIAEEKTQLPLDRLLIDWPTPEDPEPLVISEVLHQVTPVFRHPPCSNWPQREKGIQGHQASEKDMMHSASSPPPPRALQAESRQLVDLYKVLESRGSDPKPENPACPWTVLPAGDLPTHDGYLPSNIDDLPSHEAPLADSLEELEPQHISLSVFPSSSLHPLTFSCGDKLTLDQLKMRCDSLML

SEQ ID NO: 2213 - protein, 661 aa, Homo sapiens
LDFQLLRTVRFSRIQAQEDRAMGERTLHAAVPTPGYPESESIMMAPICLVENQEEQLTVNSKALEILDKISQPVVVVAIVGLYRTGKSYLMNRLAGKRNGFPLGSTVQSETKGIWMWCVPHLSKPNHTLVLLDTEGLGDVEKSNPKNDSWIFALAVLLSSSFVYNSVSTINHQALEQLHYVTELAELIRAKSCPRPDEAEDSSEFASFFPDFIWTVRDFTLELKLDGNPITEDEYLENALKLIPGKNPKIQNSNMPRECIRHFFRKRKCFVFDRPTNDKQYLNHMDEVPEENLERHFLMQSDNFCSYIFTHAKTKTLREGIIVTGKRLGTLVVTYVDAINSGAVPCLENAVTALAQLENPAAVQRAADHYSQQMAQQLRLPTDTLQELLDVHAACEREAIAVFMEHSFKDENHEFQKKLVDTIEKKKGDFVLQNEEASAKYCQAELKRLSEHLTESILRGIFSVPGGHNLYLEEKKQVEWDYKLVPRKGVKANEVLQNFLQSQVVVEESILQSDKALTAGEKAIAAERAMKEAAEKEQELLREKQKEQQQMMEAQERSFQEYMAQMEKKLEEERENLLREHERLLKHKLKVQEEMLKEEFQKKSEQLNKEINQLKEKIESTKNEQLRLLKILDMASNIMIVTLPGASKLLGVGTKYLGSRI

SEQ ID NO: 2214 - protein, 651 aa, Homo sapiens
LFLDLRCYRAGSSRLAVAMESGPKMLAPVCLVENNNEQLLVNQQAIQILEKISQPVVVVAIVGLYRTGKSYLMNHLAGQNHGFPLGSTVQSETKGIWMWCVPHPSKPNHTLVLLDTEGLGDVEKGDPKNDSWIFALAVLLCSTFVYNSMSTINHQALEQLHYVTELTELIKAKSSPRPDGVEDSTEFVSFFPDFLWTVRDFTLELKLNGHPITEDEYLENALKLIQGNNPRVQTSNFPRECIRRFFPKRKCFVFDRPTNDKDLLANIEKVSEKQLDPKFQEQTNIFCSYIFTHARTKTLREGITVTGNRLGTLAVTYVEAINSGAVPCLENAVITLAQRENSAAVQRAADYYSQQMAQRVKLPTDTLQELLDMHAACEREAIAIFMEHSFKDENQEFQKKFMETTMNKKGDFLLQNEESSVQYCQAKLNELSKGLMESISAGSFSVPGGHKLYMETKERIEQDYWQVPRKGVKAKEVFQRFLESQMVIEESILQSDKALTDREKAVAVDRAKKEAAEKEQELLKQKLQEQQQQMEAQDKSRKENIAQLKEKLQMEREHLLREQIMMLEHTQKVQNDWLHEGFKKKYEEMNAEISQFKRMIDTTKNDDTPWIARTLDNLADELTAILSAPAKLIGHGVKGVSSLFKKHKLPF

SEQ ID NO: 2215 - protein, 705 aa, Homo sapiens
LNTLPGTHRWDTNKGFGTTIFSSRQQLKMPGKMVVILGASNILWIMFAASQAFKIETTPESRYLAQIGDSVSLTCSTTGSFPKDPEIHLSGPLEAGKPITVKCSVADVYPFDRLEIDLLKGDHLMKSQEFLEDADRKSLETKSLEVTFTPVIEDIGKVLVCRAKLHIDEMDSVPTVRQAVKELQVYISPKNTVISVNPSTKLQEGGSVTMTCSSEGLPAPEIFWSKKLDNGNLQHLSGNATLTLIAMRMEDSGIYVCEGVNLIGKNRKEVELIVQEKPFTVEISPGPRIAAQIGDSVMLTCSVMGCESPSFSWRTQIDSPLSGKVRSEGTNSTLTLSPVSFENEHSYLCTVTCGHKKLEKGIQVELYSFPRDPEIEMSGGLVNGSSVTVSCKVPSVYPLDRLEIELLKGETILENIEFLEDTDMKSLENKSLEMTFIPTIEDTGKALVCQAKLHIDDMEFEPKQRQSTQTLYVNVAPRDTTVLVSPSSILEEGSSVNMTCLSQGFPAPKILWSRQLPNGELQPLSENATLTLISTKMEDSGVYLCEGINQAGRSRKEVELIIQVTPKDIKLTAFPSESVKEGDTVIISCTCGNVPETWIILKKKAETGDTVLKSIDGAYTIRKAQLKDAGVYECESKNKVGSQLRSLTLDVQGRENNKDYFSPELLVLYFASSLIIPAIGMIIYFARKANMKGSYSLVEAQKSKV

SEQ ID NO: 2216 - protein, 675 aa, Homo sapiens
LNTLPGTHRWDTNKGFGTTIFSSRQQLKMPGKMVVILGASNILWIMFAASQAFKIETTPESRYLAQIGDSVSLTCSTTGCESPFFSWRTQIDSPLNGKVTNEGTTSTLTMNPVSFGNEHSYLCTATCESRKLEKGIQVEIYSFPKDPEIHLSGPLEAGKPITVKCSVADVYPFDRLEIDLLKGDHLMKSQEFLEDADRKSLETKSLEVTFTPVIEDIGKVLVCRAKLHIDEMDSVPTVRQAVKELQVYISPKNTVISVNPSTKLQEGGSVTMTCSSEGLPAPEIFWSKKLDNGNLQHLSGNATLTLIAMRMEDSGIYVCEGVNLIGKNRKEVELIVQAFPRDPEIEMSGGLVNGSSVTVSCKVPSVYPLDRLEIELLKGETILENIEFLEDTDMKSLENKSLEMTFIPTIEDTGKALVCQAKLHIDDMEFEPKQRQSTQTLYVNVAPRDTTVLVSPSSILEEGSSVNMTCLSQGFPAPKILWSRQLPNGELQPLSENATLTLISTKMEDSGVYLCEGINQAGRSRKEVELIIQVTPKDIKLTAFPSESVKEGDTVIISCTCGNVPETWIILKKKAETGDTVLKSIDGAYTIRKAQLKDAGVYECESKNKVGSQLRSLTLDVQGRENNKDYFSPELLVLYFASSLIIPAIGMIIYFARKANMKGSYSLVEAQKSKV

SEQ ID NO: 2217 - protein, 767 aa, Homo sapiens
LNTLPGTHRWDTNKGFGTTIFSSRQQLKMPGKMVVILGASNILWIMFAASQAFKIETTPESRYLAQIGDSVSLTCSTTGCESPFFSWRTQIDSPLNGKVTNEGTTSTLTMNPVSFGNEHSYLCTATCESRKLEKGIQVEIYSFPKDPEIHLSGPLEAGKPITVKCSVADVYPFDRLEIDLLKGDHLMKSQEFLEDADRKSLETKSLEVTFTPVIEDIGKVLVCRAKLHIDEMDSVPTVRQAVKELQVYISPKNTVISVNPSTKLQEGGSVTMTCSSEGLPAPEIFWSKKLDNGNLQHLSGNATLTLIAMRMEDSGIYVCEGVNLIGKNRKEVELIVQEKPFTVEISPGPRIAAQIGDSVMLTCSVMGCESPSFSWRTQIDSPLSGKVRSEGTNSTLTLSPVSFENEHSYLCTVTCGHKKLEKGIQVELYSFPRDPEIEMSGGLVNGSSVTVSCKVPSVYPLDRLEIELLKGETILENIEFLEDTDMKSLENKSLEMTFIPTIEDTGKALVCQAKLHIDDMEFEPKQRQSTQTLYVNVAPRDTTVLVSPSSILEEGSSVNMTCLSQGFPAPKILWSRQLPNGELQPLSENATLTLISTKMEDSGVYLCEGINQAGRSRKEVELIIQVTPKDIKLTAFPSESVKEGDTVIISCTCGNVPETWIILKKKAETGDTVLKSIDGAYTIRKAQLKDAGVYECESKNKVGSQLRSLTLDVQGRENNKDYFSPELLVLYFASSLIIPAIGMIIYFARKANMKGSYSLVEAQKSKV

SEQ ID NO: 2218 - protein, 568 aa, Homo sapiens
LNTLPGTHRWDTNKGFGTTIFSSRQQLKMPGKMVVILGASNILWIMFAASQAFKIETTPESRYLAQIGDSVSLTCSTTGCESPFFSWRTQIDSPLNGKVTNEGTTSTLTMNPVSFGNEHSYLCTATCESRKLEKGIQVEIYSFPKDPEIHLSGPLEAGKPITVKCSVADVYPFDRLEIDLLKGDHLMKSQEFLEDADRKSLETKSLEVTFTPVIEDIGKVLVCRAKLHIDEMDSVPTVRQAVKELQVYISPKNTVISVNPSTKLQEGGSVTMTCSSEGLPAPEIFWSKKLDNGNLQHLSGNATLTLIAMRMEDSGIYVCEGVNLIGKNRKEVELIVQVAPRDTTVLVSPSSILEEGSSVNMTCLSQGFPAPKILWSRQLPNGELQPLSENATLTLISTKMEDSGVYLCEGINQAGRSRKEVELIIQVTPKDIKLTAFPSESVKEGDTVIISCTCGNVPETWIILKKKAETGDTVLKSIDGAYTIRKAQLKDAGVYECESKNKVGSQLRSLTLDVQGRENNKDYFSPELLVLYFASSLIIPAIGMIIYFARKANMKGSYSLVEAQKSKV

SEQ ID NO: 2219 - protein, 105 aa, Homo sapiens
LKKKCTSNFLSPEKQNSKSNSVPIILAIVGLMLVTVVAGVLIVKKYVCGGRTSWNSSSEELDPAWMVEPQYLLHSLWLQLQEINFPLRGTQLCFCCFHQSQKDLH

SEQ ID NO: 2220 - protein, 730 aa, Homo sapiens
LKHVFDDLRGSVSLSWVGDSTGVILVLTTFHVPLVIMTFGQSKLYRSEDYGKNFKDITDLINNTFIRTEFGMAIGPENSGKVVLTAEVSGGSRGGRIFRSSDFAKNFVQTDLPFHPLTQMMYSPQNSDYLLALSTENGLWVSKNFGGKWEEIHKAVCLAKWGSDNTIFFTTYANGSCTDLGALELWRTSDLGKSFKTIGVKIYSFGLGGRFLFASVMADKDTTRRIHVSTDQGDTWSMAQLPSVGQEQFYSILAANDDMVFMHVDEPGDTGFGTIFTSDDRGIVYSKSLDRHLYTTTGGETDFTNVTSLRGVYITSVLSEDNSIQTMITFDQGGRWTHLRKPENSECDATAKNKNECSLHIHASYSISQKLNVPMAPLSEPNAVGIVIAHGSVGDAISVMVPDVYISDDGGYSWTKMLEGPHYYTILDSGGIIVAIEHSSRPINVIKFSTDEGQCWQTYTFTRDPIYFTGLASEPGARSMNISIWGFTESFLTSQWVSYTIDFKDILERNCEEKDYTIWLAHSTDPEDYEDGCILGYKEQFLRLRKSSVCQNGRDYVVTKQPSICLCSLEDFLCDFGYYRPENDSKCVEQPELKGHDLEFCLYGREEHLTTNGYRKIPGDKCQGGVNPVREVKDLKKKCTSNFLSPEKQNSKSNSVPIILAIVGLMLVTVVAGVLIVKKYVCGGRFLVHRYSVLQQHAEANGVDGVDALDTASHTNKSGYHDDSDEDLLE

SEQ ID NO: 2221 - protein, 511 aa, Homo sapiens [sequence omitted]

SEQ ID NO: 2222 - protein, 628 aa, Homo sapiens
MPPSPLLKGCAEGWPVRLGPGKVKVCLGPLGARAALRIPGQRCGPRPGRPLRSSQRASERARAADAPGRDPAARMTAPGAAGRCPPTTWLGSLLLLVCLLASRSITEEVSEYCSHMIGSGHLQSLQRLIDSQMETSCQITFEFVDQEQLKDPVCYLKKAFLLVQDIMEDTMRFRDNTPNAIAIVQLQELSLRLKSCFTKDYEEHDKACVRTFYETPLQLLEKVKNVFNETKNLLDKDWNIFSKNCNNSFAECSSQDVVTKPDCNCLYPKAIPSSDPASVSPHQPLAPSMAPVAGLTWEDSEGTEGSSLLPGEQPLHTVDPGSAKQRPPRSTCQSFEPPETPVVKDSTIGGSPQPRPSVGAFNPGMEDILDSAMGTNWVPEEASGEASEIPVPQGTELSPSRPGGGSMQTEPARPSNFLSASSPLPASAKGQQPADVTGTALPRVGPVRPTGQDWNHTPQKTDHPSALLRDPPEPGSPRISSLRPQGLSNPSTLSAQPQLSRSHSSGSVLPLGELEGRRSTRDRRSPAEPEGGPASEGAARPLPRFNSVPLTDTGHERQSEGSFSPQLQESVFHLLVPSVILVLLAVGGLLFYRWRRRSHQEPQRADSPLEQPEGSPLTQDDRQVELPV

SEQ ID NO: 2223 - protein, 161 aa, Homo sapiens
LKGDDSMGGNGSTCKPDTERQGTLSTAAPTTSPAPCLSNHHNKKHLILAFCAGVLLTLLLIAFIFLIIKSYRKYRRERLPISPGPLLRWVPLLSGTMADHSKPQAPDPHSDPPAKLSSIPGESLTYASTTFKLSEEKSNHLAENHSADFDPIVYAQIKVTN

SEQ ID NO: 2224 - protein, 136 aa, Homo sapiens
LKGDDSMGGNGSTCKPDTERQGTLSTAAPTTSPAPCLSNHHNKKHLILAFCAGVLLTLLLIAFIFLIIKSYRKYHSKPQAPDPHSDPPAKLSSIPGESLTYASTTFKLSEEKSNHLAENHSADFDPIVYAQIKVTN

SEQ ID NO: 2225 - protein, 396 aa, Homo sapiens
LGTLLGSQRSRAGPQFPVGGGVTVFLNSLTPKFYVALTGTSSLISGLIFIFEWWYFHKHGTSFIEQVSVSHLQPLMGGTESSISEPGSPSRNRENETSRQNLSECKVWRNPLNLFRGAEYRRYTWVTGKEPLTYYDMNLSAQDHQTFFTCDTDFLRPSDTVMQKAWRERNPPARIKAAYQALELNNDCATAYVLLAEEEATTIVDAERLFKQALKAGETIYRQSQQCQHQSPQHEAQLRRDTNVLVYIKRRLAMCARKLGRIREAVKIMRDLMKEFPPLTMLNIHENLLESLLELQAYPDVQAVLAKYDDISLPKSAAICYTAALLKTRTVSEKFSPETASRRGLSTAEINAVEAIHRAVEFNPHVPKVEIYPFSPQLNIKAVDNSAISKYPANIY

SEQ ID NO: 2226 - protein, 175 aa, Homo sapiens
LRLCENLAAVTVFLNSLTPKFYVALTGTSSLISGLIFIFEWWYFHKHGTSFIEQVSVSHLQPLMGGTESSISEPGSPSRNRENETSRQNLSECKVWRNPLNLFRGAEYRRYTWVTGKEPLTYYDMNLSAQDHQTFFTCDTDFLRPSDTVMQKAWRERNPPARIKAAYQALELNNE

SEQ ID NO: 2227 - protein, 230 aa, Homo sapiens
LGIPPPGRSMGRFRGGLRCIKYLLLGFNLLFWLAGSAVIAFGLWFRFGGAIKELSSEDKSPEYFYVGLYVLVGAGALMMAVGFFGCCGAMRESQCVLGSFFTCLLVIFAAEVTTGVFAFIGKGVAIRHVQTMYEEAYNDYLKDRGKGNGTLITFHSTFQCCGKESSEQVQPTCPKELLGHKNCIDEIETIISVKLQLIGIVGIGIAGLTIFGMIFSMVLCCAIRNSRDVI

SEQ ID NO: 2228 - protein, 217 aa, Homo sapiens
LPLPALVARAWGLGIPPPGRSMGRFRGGLRCIKYLLLGFNLLFWLAGSAVIAFGLWFRFGGAIKELSSEDKSPEYFYVGLYVLVGAGALMMAVGFFGCCGAMRESQCVLGSAIRHVQTMYEEAYNDYLKDRGKGNGTLITFHSTFQCCGKESSEQVQPTCPKELLGHKNCIDEIETIISVKLQLIGIVGIGIAGLTIFGMIFSMVLCCAIRNSRDVI

SEQ ID NO: 2229 - protein, 1036 aa, Homo sapiens
MLVTLLGRKRTVLAQMAGISYVASFFLLLTKLSIGQREVTVQKGPLFRAEGYPVSIGCNVTGHQGPSEQHFQWSVYLPTNPTQEVQIISTKDAAFSYAVYTQRVRSGDVYVERVQGNSVLLHISKLQMKDAGEYECHTPNTDEKYYGSYSAKTNLIVIPDTLSATMSSQTLGKEEGEPLALTCEASKATAQHTHLSVTWYLTQDGGGSQATEIISLSKDFILVPGPLYTERFAASDVQLNKLGPTTFRLSIERLQSSDQGQLFCEATEWIQDPDETWMFITKKQTDQTTLRIQPAVKDFQVNITADSLFAEGKPLELVCLVVSSGRDPQLQGIWFFNGTEIAHIDAGGVLGLKNDYKERASQGELQVSKLGPKAFSLKIFSLGPEDEGAYRCVVAEVMKTRTGSWQVLQRKQSPDSHVHLRKPAARSVVMSTKNKQQVVWEGETLAFLCKAGGAESPLSVSWWHIPRDQTQPEFVAGMGQDGIVQLGASYGVPSYHGNTRLEKMDWATFQLEITFTAITDSGTYECRVSEKSRNQARDLSWTQKISVTVKSLESSLQVSLMSRQPQVMLTNTFDLSCVVRAGYSDLKVPLTVTWQFQPASSHIFHQLIRITHNGTIEWGNFLSRFQKKTKVSQSLFRSQLLVHDATEEETGVYQCEVEVYDRNSLYNNRPPRASAISHPLRIAVTLPESKLKVNSRSQVQELSINSNTDIECSILSRSNGNLQLAIIWYFSPVSTNASWLKILEMDQTNVIKTGDEFHTPQRKQKFHTEKVSQDLFQLHILNVEDSDRGKYHCAVEEWLLSTNGTWHKLGEKKSGLTELKLKPTGSKVRVSKVYWTENVTEHREVAIRCSLESVGSSATLYSVMWYWNRENSGSKLLVHLQHDGLLEYGEEGLRRHLHCYRSSSTDFVLKLHQVEMEDAGMYWCRVAEWQLHGHPSKWINQASDESQRMVLTVLPSEPTLPSRICSSAPLLYFLFICPFVLLLLLLISLLCLYWKARKLSTLRSNTRKEKALWVDLKEAGGVTTNRREDEEEDEGN

SEQ ID NO: 2230 - protein, 85 aa, Homo sapiens
LCLQQEPTLPSRICSSAPLLYFLFICPFVLLLLLLISLLCLYWKARKLSTLRSNTRKEKALWVDLKEAGGVTTNRREDEEEDEGN

SEQ ID NO: 2231 - protein, 394 aa, Homo sapiens
LPPGPEPACPPTAPPRPCHPCRPVPISLSASAGPWSGSRGGSMLAVGCALLAALLAAPGAALAPRRCPAQEVARGVLTSLPGDSVTLTCPGVEPEDNATVHWVLRKPAAGSHPSRWAGMGRRLLLRSVQLHDSGNYSCYRAGRPAGTVHLLVDVPPEEPQLSCFRKSPLSNVVCEWGPRSTPSLTTKAVLLVRKFQNSPAEDFQEPCQYSQESQKFSCQLAVPEGDSSFYIVSMCVASSVGSKFSKTQTFQGCGILQPDPPANITVTAVARNPRWLSVTWQDPHSWNSSFYRLRFELRYRAERSKTFTTWMVKDLQHHCVIHDAWSGLRHVVQLRAQEEFGQGEWSEWSPEAMGTPWTDRLSPRCPGWSTAVQSQLTATSASWVQAILPPQPPK

SEQ ID NO: 2232 - protein, 407 aa, Homo sapiens
LPPGPEPACPPTAPPRPCHPCRPVPISLSASAGPWSGSRGGSMLAVGCALLAALLAAPGAALAPRRCPAQEVARGVLTSLPGDSVTLTCPGVEPEDNATVHWVLRKPAAGSHPSRWAGMGRRLLLRSVQLHDSGNYSCYRAGRPAGTVHLLVDVPPEEPQLSCFRKSPLSNVVCEWGPRSTPSLTTKAVLLVRKFQNSPAEDFQEPCQYSQESQKFSCQLAVPEGDSSFYIVSMCVASSVGSKFSKTQTFQGCGILQPDPPANITVTAVARNPRWLSVTWQDPHSWNSSFYRLRFELRYRAERSKTFTTWMVKDLQHHCVIHDAWSGLRHVVQLRAQEEFGQGEWSEWSPEAMGTPWTESRSPPAENEVSTPMQALTTNKDDDNILFRDSANATSLPGSRRRGSCGL

SEQ ID NO: 2233 - protein, 510 aa, Homo sapiens
LPPGPEPACPPTAPPRPCHPCRPVPISLSASAGPWSGSRGGSMLAVGCALLAALLAAPGAALAPRRCPAQEVARGVLTSLPGDSVTLTCPGVEPEDNATVHWVLRKPAAGSHPSRWAGMGRRLLLRSVQLHDSGNYSCYRAGRPAGTVHLLVDVPPEEPQLSCFRKSPLSNVVCEWGPRSTPSLTTKAVLLVRKFQNSPAEDFQEPCQYSQESQKFSCQLAVPEGDSSFYIVSMCVASSVGSKFSKTQTFQGCGILQPDPPANITVTAVARNPRWLSVTWQDPHSWNSSFYRLRFELRYRAERSKTFTTWMVKDLQHHCVIHDAWSGLRHVVQLRAQEEFGQGEWSEWSPEAMGTPWTESRSPPAENEVSTPMQALTTNKDDDNILFRDSANATSLPVQDSSSVPLPTFLVAGGSLAFGTLLCIAIVLRFKKTWKLRALKEGKTSMHPPYSLGQLVPERPRPTPVLVPLISPPVSPSSLGSDNTSSHNRPDARDPRSPYDISNTDYFFPR

SEQ ID NO: 2234 - protein, 746 aa, Homo sapiens
LVQVAATAASGTSATMASCPDSDNSWVLAGSESLPVETLGPASRMDPESERALQAPHSPSKTDGKELAGTMDGEGTLFQTESPQSGSILTEETEVKGTLEGDVCGVEPPGPGDTVVQGDLQETTVVTGLGPDTQDLEGQSPPQSLPSTPKAAWIREEGRCSSSDDDTDVDMEGLRRRRGREAGPPQPMVPLAVENQAGGEGAGGELGISLNMCLLGALVLLGLGVLLFSGGLSESETGPMEEVERQVLPDPEVLEAVGDRQDGLREQLQAPVPPDSVPSLQNMGLLLDKLAKENQDIRLLQAQLQAQKEELQSLMHQPKGLEEENAQLRGALQQGEAFQRALESELQQLRARLQGLEADCVRGPDGVCLSGGRGPQGDKAIREQGPREQEPELSFLKQKEQLEAEAQALRQELERQRRLLGSVQQDLERSLQDASRGDPAHAGLAELGHRLAQKLQGLENWGQDPGVSANASKAWHQKSHFQNSREWSGKEKWWDGQRDRKAEHWKHKKEESGRERKKNWGGQEDREPAGRWKEGRPRVEESGSKKEGKRQGPKEPPRKSGSFHSSGEKQKQPRWREGTKDSHDPLPSWAELLRPKYRAPQGCSGVDECARQEGLTFFGTELAPVRQQELASLLRTYLARLPWAGQLTKELPLSPAFFGEDGIFRHDRLRFRDFVDALEDSLEEVAVQQTGDDDEVDDFEDFIFSHFFGDKALKKRSGKKDKHSQSPRAAGPREGHSHSHHHHHRG

SEQ ID NO: 2235 - protein, 792 aa, Homo sapiens
LRDRKAWHSRGRETQRHPQAPELPGDSLWLSMALPALGLDPWSLLGLFLFQLLQLLLPTTTAGGGGQGPMPRVRYYAGDERRALSFFHQKGLQDFDTLLLSGDGNTLYVGAREAILALDIQDPGVPRLKNMIPWPASDRKKSECAFKKKSNETQCFNFIRVLVSYNVTHLYTCGTFAFSPACTFIELQDSYLLPISEDKVMEGKGQSPFDPAHKHTAVLVDGMLYSGTMNNFLGSEPILMRTLGSQPVLKTDNFLRWLHHDASFVAAIPSTQVVYFFFEETASEFDFFERLHTSRVARVCKNDVGGEKLLQKKWTTFLKAQLLCTQPGQLPFNVIRHAVLLPADSPTAPHIYAVFTSQWQVGGTRSSAVCAFSLLDIERVFKGKYKELNKETSRWTTYRGPETNPRPGSCSVGPSSDKALTFMKDHFLMDEQVVGTPLLVKSGVEYTRLAVETAQGLDGHSHLVMYLGTTTGSLHKAVVSGDSSAHLVEEIQLFPDPEPVRNLQLAPTQGAVFVGFSGGVWRVPRANCSVYESCVDCVLARDPHCAWDPESRTCCLLSAPNLNSWKQDMERGNPEWACASGPMSRSLRPQSRPQIIKEVLAVPNSILELPCPHLSALASYYWSHGPAAVPEASSTVYNGSLLLIVQDGVGGLYQCWATENGFSYPVISYWVDSQDQTLALDPELAGIPREHVKVPLTRVSGGAALAAQQSYWPHFVTVTVLFALVLSGALIILVASPLRALRARGKVQGCETLRPGEKAPLSREQHLQSPKECRTSASDVDADNNCLGTEVA

SEQ ID NO: 2236 - protein, 156 aa, Homo sapiens
LEEGTWEALELPGDSLWLSMALPALGLDPWSLLGLFLFQLLQLLLPTTTAGGGGQGPMPRVRYYAGKCPTAGSVGIAIESWRWVEEGERNRGGEEMDMEKQGHRERCQGETEDLGERETQPETEVQKERKATGEQIEENRWPRGQGHASSSSPCWG

SEQ ID NO: 2237 - protein, 813 aa, Homo sapiens
LPQCPTPATNTHASAAWGSPIGPRGDVVRTAHPESARVPVSPELPGDSLWLSMALPALGLDPWSLLGLFLFQLLQLLLPTTTAGGGGQGPMPRVRYYAGDERRALSFFHQKGLQDFDTLLLSGDGNTLYVGAREAILALDIQDPGVPRLKNMIPWPASDRKKSECAFKKKSNETQCFNFIRVLVSYNVTHLYTCGTFAFSPACTFIELQDSYLLPISEDKVMEGKGQSPFDPAHKHTAVLVDGMLYSGTMNNFLGSEPILMRTLGSQPVLKTDNFLRWLHHDASFVAAIPSTQVVYFFFEETASEFDFFERLHTSRVARVCKNDVGGEKLLQKKWTTFLKAQLLCTQPGQLPFNVIRHAVLLPADSPTAPHIYAVFTSQWQVGGTRSSAVCAFSLLDIERVFKGKYKELNKETSRWTTYRGPETNPRPGSCSVGPSSDKALTFMKDHFLMDEQVVGTPLLVKSGVEYTRLAVETAQGLDGHSHLVMYLGTTTGSLHKAVVSGDSSAHLVEEIQLFPDPEPVRNLQLAPTQGAVFVGFSGGVWRVPRANCSVYESCVDCVLARDPHCAWDPESRTCCLLSAPNLNSWKQDMERGNPEWACASGPMSRSLRPQSRPQIIKEVLAVPNSILELPCPHLSALASYYWSHGPAAVPEASSTVYNGSLLLIVQDGVGGLYQCWATENGFSYPVISYWVDSQDQTLALDPELAGIPREHVKVPLTRVSGGAALAAQQSYWPHFVTVTVLFALVLSGALIILVASPLRALRARGKVQGCETLRPGEKAPLSREQHLQSPKECRTSASDVDADNNCLGTEVA

SEQ ID NO: 2238 - protein, 31 aa, Homo sapiens
LHRVAMMGHRPVLVLIRSSFIFLAHPLVAVI

SEQ ID NO: 2239 - protein, 507 aa, Homo sapiens
LAALICLAPSVPPILTVKSWDTMQLRAARSRCTNLLAASYIENQQHLQHLELRDLRGLGELRNLTIVKSGLRFVAPDAFHFTPRLSRLNLSFNALESLSWKTVQGLSLQELVLSGNPLHCSCALRWLQRWEEEGLGGVPEQKLQCHGQGPLAHMPNASCGVPTLKVQVPNASVDVGDDVLLRCQVEGRGLEQAGWILTELEQSATVMKSGGLPSLGLTLANVTSDLNRKNVTCWAENDVGRAEVSVQVNVSFPASVQLHTAVEMHHWCIPFSVDGQPAPSLRWLFNGSVLNETSFIFTEFLEPAANETVRHGCLRLNQPTHVNNGNYTLLAANPFGQASASIMAAFMDNPFEFNPEDPIPDTNSTSGDPVEKKDETPFGVSVAVGLAVFACLFLSTLLLVLNKCGRRNKFGINRPAVLAPEDGLAMSLHFMTLGGSSLSPTEGKGSGLQGHIIENPQYFSDACEGLCWVKGRDECVCVCVCVCVCVEAPRPERSLPFSHPSPALFQP

SEQ ID NO: 2240 - protein, 816 aa, Homo sapiens
MSGEAWQLQLGAHRRLPRLSEAGAAAMLRGGRRGQLGWHSWAAGPGSLLAWLILASAGAAPCPDACCPHGSSGLRCTRDGALDSLHHLPGAENLTELYIENQQHLQHLELRDLRGLGELRNLTIVKSGLRFVAPDAFHFTPRLSRLNLSFNALESLSWKTVQGLSLQELVLSGNPLHCSCALRWLQRWEEEGLGGVPEQKLQCHGQGPLAHMPNASCGVPTLKVQVPNASVDVGDDVLLRCQVEGRGLEQAGWILTELEQSATVMKSGGLPSLGLTLANVTSDLNRKNVTCWAENDVGRAEVSVQVNVSFPASVQLHTAVEMHHWCIPFSVDGQPAPSLRWLFNGSVLNETSFIFTEFLEPAANETVRHGCLRLNQPTHVNNGNYTLLAANPFGQASASIMAAFMDNPFEFNPEDPIPDTNSTSGDPVEKKDETPFGVSVAVGLAVFACLFLSTLLLVLNKCGRRNKFGINRPAVLAPEDGLAMSLHFMTLGGSSLSPTEGKGSGLQGHIIENPQYFSDACVHHIKRRDIVLKWELGEGAFGKVFLAECHNLLPEQDKMLVAVKALKEASESARQDFQREAELLTMLQHQHIVRFFGVCTEGRPLLMVFEYMRHGDLNRFLRSHGPDAKLLAGGEDVAPGPLGLGQLLAVASQVAAGMVYLAGLHFVHRDLATRNCLVGQGLVVKIGDFGMSRDIYSTDYYRVGGRTMLPIRWMPPESILYRKFTTESDVWSFGVVLWEIFTYGKQPWYQLSNTEAIDCITQGRELERPRACPPEVYAIMRGCWQREPQQRHSIKDVHARLQALAQAPPVYLDVLG

SEQ ID NO: 2241 - protein, 807 aa, Homo sapiens
LPRLSEAGAAAMLRGGRRGQLGWHSWAAGPGSLLAWLILASAGAAPCPDACCPHGSSGLRCTRDGALDSLHHLPGAENLTELYIENQQHLQHLELRDLRGLGELRNLTIVKSGLRFVAPDAFHFTPRLSRLNLSFNALESLSWKTVQGLSLQELVLSGNPLHCSCALRWLQRWEEEGLGGVPEQKLQCHGQGPLAHMPNASCGVPTLKVQVPNASVDVGDDVLLRCQVEGRGLEQAGWILTELEQSATVMKSGGLPSLGLTLANVTSDLNRKNVTCWAENDVGRAEVSVQVNVSFPASVQLHTAVEMHHWCIPFSVDGQPAPSLRWLFNGSVLNETSFIFTEFLEPAANETVRHGCLRLNQPTHVNNGNYTLLAANPFGQASASIMAAFMDNPFEFNPEDPIPVSFSPVDTNSTSGDPVEKKDETPFGVSVAVGLAVFACLFLSTLLLVLNKCGRRNKFGINRPAVLAPEDGLAMSLHFMTLGGSSLSPTEGKGSGLQGHIIENPQYFSDACVHHIKRRDIVLKWELGEGAFGKVFLAECHNLLPEQDKMLVAVKALKEASESARQDFQREAELLTMLQHQHIVRFFGVCTEGRPLLMVFEYMRHGDLNRFLRSHGPDAKLLAGGEDVAPGPLGLGQLLAVASQVAAGMVYLAGLHFVHRDLATRNCLVGQGLVVKIGDFGMSRDIYSTDYYRVGGRTMLPIRWMPPESILYRKFTTESDVWSFGVVLWEIFTYGKQPWYQLSNTEAIDCITQGRELERPRACPPEVYAIMRGCWQREPQQRHSIKDVHARLQALAQAPPVYLDVLG

SEQ ID NO: 2242 - protein, 804 aa, Homo sapiens
LPRLSEAGAAAMLRGGRRGQLGWHSWAAGPGSLLAWLILASAGAAPCPDACCPHGSSGLRCTRDGALDSLHHLPGAENLTELYIENQQHLQHLELRDLRGLGELRNLTIVKSGLRFVAPDAFHFTPRLSRLNLSFNALESLSWKTVQGLSLQELVLSGNPLHCSCALRWLQRWEEEGLGGVPEQKLQCHGQGPLAHMPNASCGVPTLKVQVPNASVDVGDDVLLRCQVEGRGLEQAGWILTELEQSATVMKSGGLPSLGLTLANVTSDLNRKNVTCWAENDVGRAEVSVQVNVSFPASVQLHTAVEMHHWCIPFSVDGQPAPSLRWLFNGSVLNETSFIFTEFLEPAANETVRHGCLRLNQPTHVNNGNYTLLAANPFGQASASIMAAFMDNPFEFNPEDPIPDTNSTSGDPVEKKDETPFGVSVAVGLAVFACLFLSTLLLVLNKCGRRNKFGINRPAVLAPEDGLAMSLHFMTLGGSSLSPTEGKGSGLQGHIIENPQYFSDASPSGVHHIKRRDIVLKWELGEGAFGKVFLAECHNLLPEQDKMLVAVKALKEASESARQDFQREAELLTMLQHQHIVRFFGVCTEGRPLLMVFEYMRHGDLNRFLRSHGPDAKLLAGGEDVAPGPLGLGQLLAVASQVAAGMVYLAGLHFVHRDLATRNCLVGQGLVVKIGDFGMSRDIYSTDYYRVGGRTMLPIRWMPPESILYRKFTTESDVWSFGVVLWEIFTYGKQPWYQLSNTEAIDCITQGRELERPRACPPEVYAIMRGCWQREPQQRHSIKDVHARLQALAQAPPVYLDVLG

SEQ ID NO: 2243 - protein, 570 aa, Homo sapiens
VSWARAPGPHAQCQLWCAHAEGPGAQCLGGCGGRRAAAVPGGGAGPGAGRLDPHRAGAVSHGDVPASVQLHTAVEMHHWCIPFSVDGQPAPSLRWLFNGSVLNETSFIFTEFLEPAANETVRHGCLRLNQPTHVNNGNYTLLAANPFGQASASIMAAFMDNPFEFNPEDPIPDTNSTSGDPVEKKDETPFGVSVAVGLAVFACLFLSTLLLVLNKCGRRNKFGINRPAVLAPEDGLAMSLHFMTLGGSSLSPTEGKGSGLQGHIIENPQYFSDACVHHIKRRDIVLKWELGEGAFGKVFLAECHNLLPEQDKMLVAVKALKEASESARQDFQREAELLTMLQHQHIVRFFGVCTEGRPLLMVFEYMRHGDLNRFLRSHGPDAKLLAGGEDVAPGPLGLGQLLAVASQVAAGMVYLAGLHFVHRDLATRNCLVGQGLVVKIGDFGMSRDIYSTDYYRVGGRTMLPIRWMPPESILYRKFTTESDVWSFGVVLWEIFTYGKQPWYQLSNTEAIDCITQGRELERPRACPPEVYAIMRGCWQREPQQRHSIKDVHARLQALAQAPPVYLDVLG

SEQ ID NO: 2244 - protein, 744 aa, Homo sapiens
VPMLLWLLLLILTPGREQSGVAPKAVLLLNPPWSTAFKGEKVALICSSISHSLAQGDTYWYHDEKLLKIKHDKIQITEPGNYQCKTRGSSLSDAVHVEFSPDWLILQALHPVFEGDNVILRCQGKDNKNTHQKVYYKDGKQLPNSYNLEKITVNSVSRDNSKYHCTAYRKFYILDIEVTSKPLNIQVQELFLHPVLRASSSTPIEGSPMTLTCETQLSPQRPDVQLQFSLFRDSQTLGLGWSRSPRLQIPAMWTEDSGSYWCEVETVTHSIKKRSLRSQIRVQRVPVSNVNLEIRPTGGQLIEGENMVLICSVAQGSGTVTFSWHKEGRVRSLGRKTQRSLLAELHVLTVKESDAGRYYCAADNVHSPILSTWIRVTVRIPVSHPVLTFRAPRAHTVVGDLLELHCESLRGSPPILYRFYHEDVTLGNSSAPSGGGASFNLSLTAEHSGNYSCDADNGLGAQHSHGVSLRVTVPVSRPVLTLRAPGAQAVVGDLLELHCESLRGSFPILYWFYHEDDTLGNISAHSGGGASFNLSLTTEHSGNYSCEADNGLGAQHSKVVTLNVTGTSRNRTGLTAAGITGLVLSILVLAAAAALLHYARARRKPGGLSATGTSSHSPSECQEPSSSRPSRIDPQEPTHSKPLAPMELEPMYSNVNPGDSNPIYSQIWSIQHTKENSANCPMMHQEHEELTVLYSELKKTHPDDSAGEASSRGRAHEEDDEENYENILNPRKNKVQDFPCLCNT

SEQ ID NO: 2245 - protein, 460 aa, Homo sapiens
MPSCVPPGVPVSNVNLEIRPTGGQLIEGENMVLICSVAQGSGTVTFSWHKEGRVRSLGRKTQRSLLAELHVLTVKESDAGRYYCAADNVHSPILSTWIRVTVRIPVSHPVLTFRAPRAHTVVGDLLELHCESLRGSPPILYRFYHEDVTLGNSSAPSGGGASFNLSLTAEHSGNYSCDADNGLGAQHSHGVSLRVTVPVSRPVLTLRAPGAQAVVGDLLELHCESLRGSFPILYWFYHEDDTLGNISAHSGGGASFNLSLTTEHSGNYSCEADNGLGAQHSKVVTLNVTGTSRNRTGLTAAGITGLVLSILVLAAAAALLHYARARRKPGGLSATGTSSHSPSECQEPSSSRPSRIDPQEPTHSKPLAPMELEPMYSNVNPGDSNPIYSQIWSIQHTKENSANCPMMHQEHEELTVLYSELKKTHPDDSAGEASSRGRAHEEDDEENYENVPRVLLASDH

SEQ ID NO: 2246 - protein, 641 aa, Homo sapiens
VPMLLWLLLLILTPGREQSGVAPKAVLLLNPPWSTAFKGEKVALICSSISHSLAQGDTYWYHDEKLLKIKHDKIQITEPGNYQCKTRGSSLSDAVHVEFSPDWLILQALHPVFEGDNVILRCQGKDNKNTHQKVYYKDGKQLPNSYNLEKITVNSVSRDNSKYHCTAYRKFYILDIEVTSKPLNIQVQGVPVSNVNLEIRPTGGQLIEGENMVLICSVAQGSGTVTFSWHKEGRVRSLGRKTQRSLLAELHVLTVKESDAGRYYCAADNVHSPILSTWIRVTVRIPVSHPVLTFRAPRAHTVVGDLLELHCESLRGSPPILYRFYHEDVTLGNSSAPSGGGASFNLSLTAEHSGNYSCDADNGLGAQHSHGVSLRVTVPVSRPVLTLRAPGAQAVVGDLLELHCESLRGSFPILYWFYHEDDTLGNISAHSGGGASFNLSLTTEHSGNYSCEADNGLGAQHSKVVTLNVTGTSRNRTGLTAAGITGLVLSILVLAAAAALLHYARARRKPGGLSATGTSSHSPSECQEPSSSRPSRIDPQEPTHSKPLAPMELEPMYSNVNPGDSNPIYSQIWSIQHTKENSANCPMMHQEHEELTVLYSELKKTHPDDSAGEASSRGRAHEEDDEENYENVPRVLLASDH

SEQ ID NO: 2247 - protein, 742 aa, Homo sapiens
VPMLLWLLLLILTPGREQSGVAPKAVLLLNPPWSTAFKGEKVALICSSISHSLAQGDTYWYHDEKLLKIKHDKIQITEPGNYQCKTRGSSLSDAVHVEFSPDWLILQALHPVFEGDNVILRCQGKDNKNTHQKVYYKDGKQLPNSYNLEKITVNSVSRDNSKYHCTAYRKFYILDIEVTSKPLNIQVQELFLHPVLRASSSTPIEGSPMTLTCETQLSPQRPDVQLQFSLFRDSQTLGLGWSRSPRLQIPAMWTEDSGSYWCEVETVTHSIKKRSLRSQIRVQRVPVSNVNLEIRPTGGQLIEGENMVLICSVAQGSGTVTFSWHKEGRVRSLGRKTQRSLLAELHVLTVKESDAGRYYCAADNVHSPILSTWIRVTVRTLLSPSVPVSHPVLTFRAPRAHTVVGDLLELHCESLRGSPPILYRFYHEDVTLGNSSAPSGGGASFNLSLTAEHSGNYSCDADNGLGAQHSHGVSLRVTVPVSRPVLTLRAPGAQAVVGDLLELHCESLRGSFPILYWFYHEDDTLGNISAHSGGGASFNLSLTTEHSGNYSCEADNGLGAQHSKVVTLNVTGTSRNRTGLTAAGITGLVLSILVLAAAAALLHYARARRKPGGLSATGTSSHSPSECQEPSSSRPSRIDPQEPTHSKPLAPMELEPMYSNVNPGDSNPIYSQIWSIQHTKENSANCPMMHQEHEELTVLYSELKKTHPDDSAGEASSRGRAHEEDDEENYENVPRVLLASDH

SEQ ID NO: 2248 - protein, 736 aa, Homo sapiens
VPMLLWLLLLILTPGREQSGVAPKAVLLLNPPWSTAFKGEKVALICSSISHSLAQGDTYWYHDEKLLKIKHDKIQITEPGNYQCKTRGSSLSDAVHVEFSPDWLILQALHPVFEGDNVILRCQGKDNKNTHQKVYYKDGKQLPNSYNLEKITVNSVSRDNSKYHCTAYRKFYILDIEVTSKPLNIQVQELFLHPVLRASSSTPIEGSPMTLTCETQLSPQRPDVQLQFSLFRDSQTLGLGWSRSPRLQIPAMWTEDSGSYWCEVETVTHSIKKRSLRSQIRVQRVPVSNVNLEIRPTGGQLIEGENMVLICSVAQGSGTVTFSWHKEGRVRSLGRKTQRSLLAELHVLTVKESDAGRYYCAADNVHSPILSTWIRVTVRIPVSHPVLTFRAPRAHTVVGDLLELHCESLRGSPPILYRFYHEDVTLGNSSAPSGGGASFNLSLTAEHSGNYSCDADNGLGAQHSHGVSLRVTVPVSRPVLTLRAPGAQAVVGDLLELHCESLRGSFPILYWFYHEDDTLGNISAHSGGGASFNLSLTTEHSGNYSCEADNGLGAQHSKVVTLNVTGTSRNRTGLTAAGITGLVLSILVLAAAAALLHYARARRKPGGLSATGTSSHSPSECQEPSSSRPSRIDPQEPTHSKPLAPMELEPMYSNVNPGDSNPIYSQIWSIQHTKENSANCPMMHQEHEELTVLYSELKKTHPDDSAGEASSRGRAHEEDDEENYENVPRVLLASDH

SEQ ID NO: 2249 - protein, 171 aa, Homo sapiens
LVLSILVLAAAAALLHYARARRKPGGLSATGTSSHSPSECQEPSSSRPSRIDPQEPTHSKPLAPMELEPMYSNVNPGDSNPIYSQIWSIQHTKENSESNRGNSQEIKQIKKIGLEYFFYVGLEESSRGNSKRSSKSRRLVWNAVCVRCKLEYIAHSLILFFATPTQQLIVQ

SEQ ID NO: 2250 - protein, 260 aa, Homo sapiens
MKKMAPAMESPTLLCVALLFFAPDGVLAVPQKPKVSLNPPWNRIFKGENVTLTCNGNNFFEVSSTKWFHNGSLSEETNSSLNIVNAKFEDSGEYKCQHQQVNESEPVYLEVFSDWLLLQASAEVVMEGQPLFLRCHGWRNWDVYKVIYYKDGEALKYWYENHNISITNATVEDSGTYYCTGKVWQLDYESEPLNITVIKAPREKYWLQFFIPLLVVILFAVDTGLFISTQQQVTFLLKIKRTRKGFRLLNPHPKPNPKNN

SEQ ID NO: 2251 - protein, 227 aa, Homo sapiens
MKKMAPAMESPTLLCVALLFFAPDGVLAVSSTKWFHNGSLSEETNSSLNIVNAKFEDSGEYKCQHQQVNESEPVYLEVFSDWLLLQASAEVVMEGQPLFLRCHGWRNWDVYKVIYYKDGEALKYWYENHNISITNATVEDSGTYYCTGKVWQLDYESEPLNITVIKAPREKYWLQFFIPLLVVILFAVDTGLFISTQQQVTFLLKIKRTRKGFRLLNPHPKPNPKNN

SEQ ID NO: 2252 - protein, 347 aa, Homo sapiens
LTASRSQAPVFTAESMLWLFQSLLFVFCFGPGNVVSQSSLTPLMVNGILGESVTLPLEFPAGEKVNFITWLFNETSLAFIVPHETKSPEIHVTNPKQGKRLNFTQSYSLQLSNLKMEDTGSYRAQISTKTSAKLSSYTLRILRQLRNIQVTNHSQLFQNMTCELHLTCSVEDADDNVSFRWEALGNTLSSQPNLTVSWDPRISSEQDYTCIAENAVSNLSFSVSAQKLCEDVKIQYTDTKMILFMVSGICIVFGFIILLLLVLRKRRDSLSLSTQRTQGPAESARNLEYVSVSPTNNTVYASVTHSNRETEIWTPRENDTITIYSTINHSKESKPTFSRATALDNVV

SEQ ID NO: 2253 - protein, 236 aa, Homo sapiens
LTASRSQAPVFTAESMLWLFQSLLFVFCFGPGQLRNIQVTNHSQLFQNMTCELHLTCSVEDADDNVSFRWEALGNTLSSQPNLTVSWDPRISSEQDYTCIAENAVSNLSFSVSAQKLCEDVKIQYTDTKMILFMVSGICIVFGFIILLLLVLRKRRDSLSLSTQRTQGPAESARNLEYVSVSPTNNTVYASVTHSNRETEIWTPRENDTITIYSTINHSKESKPTFSRATALDNVV

SEQ ID NO: 2254 - protein, 391 aa, Homo sapiens
LGTAEPVHGRESGGVEGLAWPLCPVEMLGQVVTLILLLLLKVYQGKGCQGSADHVVSISGVPLQLQPNSIQTKVDSIAWKKLLPSQNGFHHILKWENGSLPSNTSNDRFSFIVKNLSLLIKAAQQQDSGLYCLEVTSISGKVQTATFQVFVFDKVEKPRLQGQGKILDRGRCQVALSCLVSRDGNVSYAWYRGSKLIQTAGNLTYLDEEVDINGTHTYTCNVSNPVSWESHTLNLTQDCQNAHQEFRFWPFLVIIVILSALFLGTLACFCVWRRKRKEKQSETSPKEFLTIYEDVKDLKTRRNHEQEQTFPGGGSTIYSMIQSQSSAPTSQEPAYTLYSLIQPSRKSGSRKRNHSPSFNSTIYEVIGKSQPKAQNPARLSRKELENFDVYS

SEQ ID NO: 2255 - protein, 396 aa, Homo sapiens
LGTAEPVHGRESGGVEGLAWPLCPVEMLGQVVTLILLLLLKVYQGKGCQGSADHVVSISGVPLQLQPNSIQTKVDSIAWKKLLPSQNGFHHILKWENGSLPSNTSNDRFSFIVKNLSLLIKAAQQQDSGLYCLEVTSISGKVQTATFQVFVFESLLPDKVEKPRLQGQGKILDRGRCQVALSCLVSRDGNVSYAWYRGSKLIQTAGNLTYLDEEVDINGTHTYTCNVSNPVSWESHTLNLTQDCQNAHQEFRFWPFLVIIVILSALFLGTLACFCVWRRKRKEKQSETSPKEFLTIYEDVKDLKTRRNHEQEQTFPGGGSTIYSMIQSQSSAPTSQEPAYTLYSLIQPSRKSGSRKRNHSPSFNSTIYEVIGKSQPKAQNPARLSRKELENFDVYS

SEQ ID NO: 2256 - protein, 125 aa, Homo sapiens
LHSAVRTADLQPKMIPAVVLLLLLLVEQAAALGEPQLCYILDAILFLYGIVLTLLYCRLKIQVRKAAITSYEKSDGVYTMESPSITRLECSGMIWAHCNLCLLGSRDSRASPSRVAKTTGTTMPS

SEQ ID NO: 2257 - protein, 375 aa, Homo sapiens
LVLGGSKSRRWGKHPGMAEGTLWQILCVSSDAQPQTFEGVKGADPPTLPPGSFLPGPVLWWGSLARLQTEKSDEVSRKGNWWVTEMGGGAGERLFTSSCLVGLVPLGLRISLVTCPLQCGIMWQLLLPTALLLLVSAGMRTEDLPKAVVFLEPQWYRVLEKDSVTLKCQGAYSPEDNSTQWFHNESLISSQASSYFIDAATVDDSGEYRCQTNLSTLSDPVQLEVHIGWLLLQAPRWVFKEEDPIHLRCHSWKNTALHKVTYLQNGKGRKYFHHNSDFYIPKATLKDSGSYFCRGLFGSKNVSSETVNITITQGLAVSTISSFFPPGYQVSFCLVMVLLFAVDTGLYFSVKTNIRSSTRDWKDHKFKWRKDPQDK

SEQ ID NO: 2258 - protein, 251 aa, Homo sapiens
LVPLGLRISLVTCPLQCGIMWQLLLPTALLLLVSAGMRTDLPKAVVFLEPQWYSVLEKDSVTLKCQGAYSPEDNSTQWFHNENLISSQASSYFIDAATVNDSGEYRCQTNLSTLSDPVQLEVHIGWLLLQAPRWVFKEEDPIHLRCHSWKNTALHKVTYLQNGKDRKYFHHNSDFHIPKATLKDSGSYFCRGLVGSKNVSSETVNITITQGLAVSTISSFSPPGYQVSFCLVMVLLFAVDTGLYFSVKTNI

SEQ ID NO: 2259 - protein, 351 aa, Homo sapiens
VDLNPGDGGKHPGKAEGTLWQILCVSSDAQPQTFGRVKGAHPPTLPPGSFLPIPVLWWGSIARLQIEKSDEVSRKGNWQVTEMGGGTGERLFTPSCLVGLVPLGLRISLVTCPLQCGIMWQLLLPTALLLLVSAGMRTEDLPKAVVFLEPQWYSVLEKDSVTLKCQGAYSPEDNSTQWFHNENLISSQASSYFIDAATVNDSGEYRCQTNLSTLSDPVQLEVHIGWLLLQAPRWVFKEEDPIHLRCHSWKNTALHKVTYLQNGKDRKYFHHNSDFHIPKATLKDSGSYFCRGLVGSKNVSSETVNITITQGLAVSTISSFSPPGYQVSFCLVMVLLFAVDTGLYFSVKTNI

SEQ ID NO: 2260 - protein, 365 aa, Homo sapiens
VGEKRENCRDLQLGQARSCCSFNQTAQTCLEAASDRLGLGQRRSKTMVGKMWPVLWTLCAVRVTVDAISVETPQDVLRASQGKSVTLPCTYHTSTSSREGLIQWDKLLLTHTERVVIWPFSNKNYIHGELYKNRVSISNNAEQSDASITIDQLTMADNGTYECSVSLMSDLEGNTKSRVRLLVLVPPSKPECGIEGETIIGNNIQLTCQSKEGSPTPQYSWKRYNILNQEQPLAQPASGQPVSLKNISTDTSGYYICTSSNEEGTQFCNITVAVRSPSMNVALYVGIAVGVVAALIIIGIIIYCCCCRGKDDNTEDKEDARPNREAYEEPPEQLRELSREREEEDDYRQEEQRSTGRESPDHLDQ

SEQ ID NO: 2261 - protein, 175 aa, Homo sapiens
VGLRLRCRAGEPRLGPEWGARRGGATRRGWRRDQKPLPQAEPTSAGTRAQGRGGGGGDCSGWTMAASAGAGAVIAAPDSRRWLWSVLAAALGLLTAGVSALEVYTPKEIFVANGTQGKLTCKFKSTSTTGGLTSVSWSFQPEGADTTVSVRMLDFSWLVLPHRFLYCCIIGDPFF

SEQ ID NO: 2262 - protein, 332 aa, Homo sapiens
VGLRLRCRAGEPRLGPEWGARRGGATRRGWRRDQKPLPQAEPTSAGTRAQGRGGGGGDCSGWTMAASAGAGAVIAAPDSRRWLWSVLAAALGLLTAGVSALEVYTPKEIFVANGTQGKLTCKFKSTSTTGGLTSVSWSFQPEGADTTVSFFHYSQGQVYLGNYPPFKDRISWAGDLDKKDASINIENMQFIHNGTYICDVKNPPDIVVQPGHIRLYVVEKENLPVFPVWVVVGIVTAVVLGLTLLISMILAVLYRRKNSKRDYTGCSTSESLSPVKQAPRKSPSDTEGLVKSLPSGSHQGPVIYAQLDHSGGHHSDKINKSESVVYADIRKN

SEQ ID NO: 2263 - protein, 145 aa, Homo sapiens
LGPEWGARRGGATRRGWRRDQKPLPQAEPTSAGTRAQGRGGGGGDCSGWTMAASAGAGAVIAAPDSRRWLWSVLAAALGLLTAGVSALEVYTPKEIFVANGTQGKLTCKFKSTSTTGGLTSVSWSFQPEGADTTVSRICLCFQFG

SEQ ID NO: 2264 - protein, 252 aa, Homo sapiens
LGPEWGARRGGATRRGWRRDQKPLPQAEPTSAGTRAQGRGGGGGDCSGWTMAASAGAGAVIAAPDSRRWLWSVLAAALGLLTAGVSALEVYTPKEIFVANGTQGKLTCKFKSTSTTGGLTSVSWSFQPEGADTTVSFFHYSQGQVYLGNYPPFKDRISWAGDLDKKDASINIENMQFIHNGTYICDVKNPPDIVVQPGHIRLYVVEKENLPVFPVWVVVGIVTAVVLGLTLLISMILAVLYRRKNSKRDYTG

SEQ ID NO: 2265 - protein, 169 aa, Homo sapiens
LGPEWGARRGGATRRGWRRDQKPLPQAEPTSAGTRAQGRGGGGGDCSGWTMAASAGAGAVIAAPDSRRWLWSVLAAALGLLTAGVSALEVYTPKEIFVANGTQGKLTCKFKSTSTTGGLTSVSWSFQPEGADTTVSGPVIYAQLDHSGGHHSDKINKSESVVYADIRKN

SEQ ID NO: 2266 - protein, 239 aa, Homo sapiens
VTAGVSALEVYTPKEIFVANGTQGKLTCKFKSTSTTGGLTSVSWSFQPEGADTTVSFFHYSQGQVYLGNYPPFKDRISWAGDLDKKDASINIENMQFIHNGTYICDVKNPPDIVVQPGHIRLYVVEKENLPVFPVWVVVGIVTAVVLGLTLLISMILAVLYRRKNSKRDYTGCSTSESLSPVKQAPRKSPSDTEGLVKSLPSGSHQGPVIYAQLDHSGGHHSDKINKSESVVYADIRKN

SEQ ID NO: 2267 - protein, 375 aa, Homo sapiens
MGCRRTREGPSKAMIFPWKCQSTQRDLWNIFKLWGWTMLCCDFLAHHGTDCWTYHYSEKPMNWQRARRFCRDNYTDLVAIQNKAEIEYLEKTLPFSRSYYWIGIRKIGGIWTWVGTNKSLTEEAENWGDGEPNNKKNKEDCVEIYIKRNKDAGKWNDDACHKLKAALCYTASCQPWSCSGHGECVEIINNYTCNCDVGYYGPQCQFVIQCEPLEAPELGTMDCTHPLGNFSFSSQCAFSCSEGTNLTGIEETTCGPFGNWSSPEPTCQVIQCEPLSAPDLGIMNCSHPLASFSFTSACTFICSEGTELIGKKKTICESSGIWSNPSPICQKLDKSFSMIKEGDYNPLFIPVAVMVTAFSGLAFIIWLARRLKKGM

SEQ ID NO: 2268 - protein, 315 aa, Homo sapiens
LSSQQQGPVLDTSASTGLRRSKTVCWGWPDSPAAMQQPFNYPYPQIYWVDSSASSPWAPPGTVLPCPTSVPRRPGQRRPPPPPPPPPLPPPPPPPPLPPLPLPPLKKRGNHSTGLCLLVMFFMVLVALVGLGLGMFQLFHLQKELAELRESTSQMHTASSLEKQIGHPSPPPEKKELRKVAHLTGKSNSRSMPLEWEDTYGIVLLSGVKYKKGGLVINETGLYFVYSKVYFRGQSCNNLPLSHKVYMRNSKYPQDLVMMEGKMMSYCTTGQMWARSSYLGAVFNLTSADHLYVNVSELSLVNFEESQTFFGLYKL

SEQ ID NO: 2269 - protein, 144 aa, Homo sapiens
LRRSKTVCWGWPDSPAAMQQPFNYPYPQIYWVDSSASSPWAPPGTVLPCPTSVPRRPGQRRPPPPPPPPPLPPPPPPPPLPPLPLPPLKKRGNHSTGLCLLVMFFMVLVALVGLGLGMFQLFHLQKELAELREATPVHPLKKRS

SEQ ID NO: 2270 - protein, 216 aa, Homo sapiens
LFCLYLLLSGENFSFIARSPFPYLHLPSTQIVKMERVQPLEENVGNAARPRFERNKLLLVASVIQGLGLLLCFTYICLHFSALQVSHRYPRIQSIKVQFTEYKKEKGFILTSQKEDEIMKVQNNSVIINCDGFYLISLKGYFSQEVNISLHYQKDEEPLFQLKKVRSVNSLMVASLTYKDKVYLNVTTDNTSLDDFHVNGGELILIHQNPGEFCVL

SEQ ID NO: 2271 - protein, 269 aa, Homo sapiens
VFNFIGYSFFLIVFVPMIENSSWSMTFEERENRRLQEASMRLEQENDDLAHELVTSKIALRNDLDQAEDKADVLNKELLLTKQRLVETEEEKRKQEEETAQLKEVFRKQLEKAEYEIKKTTAIIAEYKQICSQLSTRLEKQQAASKEELEVVKGKMMACKHCSDIFSKEGALKLAATGREDQGIETDDEKDSLKKQLREMELELAQTKLQLVEAKCKIQELEHQRGALMNEIQAAKNSWFSKTLNSIKTATGTQPLQPAPVTQPPKEST

SEQ ID NO: 2272 - protein, 49 aa, Homo sapiens
LESLPLAFCFLLTGFGHWFFIFCLLHASRPPHLLPHSLDPALWAFTSVL

SEQ ID NO: 2273 - protein, 427 aa, Homo sapiens
LDIYNMLQWRRRHCCFAKMTWNAKRSLFRTHLIGVLSLVFLFAMFLFFNHHDWLPGRAGFKENPVTYTFRGFRSTKSETNHSSLRNIWKETVPQTLRPQTATNSNNTDLSPQGVTGLENTLSANGSIYNEKGTGHPNSYHFKYIINEPEKCQEKSPFLILLIAAEPGQIEARRAIRQTWGNESLAPGIQITRIFLLGLSIKLNGYLQRAILEESRQYHDIIQQEYLDTYYNLTIKTLMGMNWVATYCPHIPYVMKTDSDMFVNTEYLINKLLKPDLPPRHNYFTGYLMRGYAPNRNKDSKWYMPPDLYPSERYPVFCSGTGYVFSGDLAEKIFKVSLGIRRLHLEDVYVGICLAKLRIDPVPPPNEFVFNHWRVSYSSCKYSHLITSHQFQPSELIKYWNHLQQNKHNACANAAKEKAGRYRHRKLH

SEQ ID NO: 2274 - protein, 382 aa, Homo sapiens
LLRAAAACAQGCTPRRPHSQAMAPTEPWSPSPGSAPWDYSGLDGLEELELCPAGDLPYGYVYIPALYLAAFAVGLLGNAFVVWLLAGRRGPRRLVDTFVLHLAAADLGFVLTLPLWAAAAALGGRWPFGDGLCKLSSFALAGTRCAGALLLAGMSVDRYLAVVKLLEARPLRTPRCALASCCGVWAVALLAGLPSLVYRGLQPLPGGQDSQCGEEPSHAFQGLSLLLLLLTFVLPLVVTLFCYCRISRRLRRPPHVGRARRNSLRIIFAIESTFVGSWLPFSALRAVFHLARLGALPLPCPLLLALRWGLTIATCLAFVNSCANPLIYLLLDRSFRARALDGACGRTGRLARRISSASSLSRDDSSVFRCRAQAANTASASW

SEQ ID NO: 2275 - protein, 983 aa, Homo sapiens
VRPRPAARCPSSPTAEMPSPPGLRALWLCAALCASRRAGGAPQPGPGPTACPAPCHCQEDGIMLSADCSELGLSAVPGDLDPLTAYLDLSMNNLTELQPGLFHHLRFLEELRLSGNHLSHIPGQAFSGLYSLKILMLQNNQLGGIPAEALWELPSLQSLRLDANLISLVPERSFEGLSSLRHLWLDDNALTEIPVRALNNLPALQAMTLALNRISHIPDYAFQNLTSLVVLHLHNNRIQHLGTHSFEGLHNLETLDLNYNKLQEFPVAIRTLGRLQELGFHNNNIKAIPEKAFMGNPLLQTIHFYDNPIQFVGRSAFQYLPKLHTLSLNGAMDIQEFPDLKGTTSLEILTLTRAGIRLLPSGMCQQLPRLRVLELSHNQIEELPSLHRCQKLEEIGLQHNRIWEIGADTFSQLSSLQALDLSWNAIRSIHPEAFSTLHSLVKLDLTDNQLTTLPLAGLGGLMHLKLKGNLALSQAFSKDSFPKLRILEVPYAYQCCPYGMCASFFKASGQWEAEDLHLDDEESSKRPLGLLARQAENHYDQDLDELQLEMEDSKPHPSVQCSPTPGPFKPCEYLFESWGIRLAVWAIVLLSVLCNGLVLLTVFAGGPVPLPPVKFVVGAIAGANTLTGISCGLLASVDALTFGQFSEYGARWETGLGCRATGFLAVLGSEASVLLLTLAAVQCSVSVSCVRAYGKSPSLGSVRAGVLGCLALAGLAAALPLASVGEYGASPLCLPYAPPEGQPAALGFTVALVMMNSFCFLVVAGAYIKLYCDLPRGDFEAVWDCAMVRHVAWLIFADGLLYCPVAFLSFASMLGLFPVTPEAVKSVLLVVLPLPACLNPLLYLLFNPHFRDDLRRLRPRAGDSGPLAYAAAGELEKSSCDSTQALVAFSDVDLILEASEAGRPPGLETYGFPSVTLISCQQPGAPRLEGSHCVEPEGNHFGNPQPSMDGELLLRAEGSTPAGGGLSGGGGFQPSGLAFASHV

SEQ ID NO: 2276 - protein, 941 aa, Homo sapiens
LCLTDAPNAEAPERRLWCKGKPTGQGMGRPRLTLVCQVSIIISARDLSMNNLTELQPGLFHHLRFLEELRLSGNHLSHIPGQAFSGLYSLKILMLQNNQLGGIPAEALWELPSLQSLRLDANLISLVPERSFEGLSSLRHLWLDDNALTEIPVRALNNLPALQAMTLALNRISHIPDYAFQNLTSLVVLHLHNNRIQHLGTHSFEGLHNLETLDLNYNKLQEFPVAIRTLGRLQELGFHNNNIKAIPEKAFMGNPLLQTIHFYDNPIQFVGRSAFQYLPKLHTLSLNGAMDIQEFPDLKGTTSLEILTLTRAGIRLLPSGMCQQLPRLRVLELSHNQIEELPSLHRCQKLEEIGLQHNRIWEIGADTFSQLSSLQALDLSWNAIRSIHPEAFSTLHSLVKLDLTDNQLTTLPLAGLGGLMHLKLKGNLALSQAFSKDSFPKLRILEVPYAYQCCPYGMCASFFKASGQWEAEDLHLDDEESSKRPLGLLARQAENHYDQDLDELQLEMEDSKPHPSVQCSPTPGPFKPCEYLFESWGIRLAVWAIVLLSVLCNGLVLLTVFAGGPVPLPPVKFVVGAIAGANTLTGISCGLLASVDALTFGQFSEYGARWETGLGCRATGFLAVLGSEASVLLLTLAAVQCSVSVSCVRAYGKSPSLGSVRAGVLGCLALAGLAAALPLASVGEYGASPLCLPYAPPEGQPAALGFTVALVMMNSFCFLVVAGAYIKLYCDLPRGDFEAVWDCAMVRHVAWLIFADGLLYCPVAFLSFASMLGLFPVTPEAVKSVLLVVLPLPACLNPLLYLLFNPHFRDDLRRLRPRAGDSGPLAYAAAGELEKSSCDSTQALVAFSDVDLILEASEAGRPPGLETYGFPSVTLISCQQPGAPRLEGSHCVEPEGNHFGNPQPSMDGELLLRAEGSTPAGGGLSGGGGFQPSGLAFASHV

SEQ ID NO: 2277 - protein, 621 aa, Homo sapiens
VGGSTFFLPVLGGHGAEPGSEPAGSSSLSCCPSGLQHNRIWEIGADTFSQLSSLQALDLSWNAIRSIHPEAFSTLHSLVKLDLTDNQLTTLPLAGLGGLMHLKLKGNLALSQAFSKDSFPKLRILEVPYAYQCCPYGMCASFFKASGQWEAEDLHLDDEESSKRPLGLLARQAENHYDQDLDELQLEMEDSKPHPSVQCSPTPGPFKPCEYLFESWGIRLAVWAIVLLSVLCNGLVLLTVFAGGPVPLPPVKFVVGAIAGANTLTGISCGLLASVDALTFGQFSEYGARWETGLGCRATGFLAVLGSEASVLLLTLAAVQCSVSVSCVRAYGKSPSLGSVRAGVLGCLALAGLAAALPLASVGEYGASPLCLPYAPPEGQPAALGFTVALVMMNSFCFLVVAGAYIKLYCDLPRGDFEAVWDCAMVRHVAWLIFADGLLYCPVAFLSFASMLGLFPVTPEAVKSVLLVVLPLPACLNPLLYLLFNPHFRDDLRRLRPRAGDSGPLAYAAAGELEKSSCDSTQALVAFSDVDLILEASEAGRPPGLETYGFPSVTLISCQQPGAPRLEGSHCVEPEGNHFGNPQPSMDGELLLRAEGSTPAGGGLSGGGGFQPSGLAFASHV

SEQ ID NO: 2278 - protein, 189 aa, Homo sapiens [sequence omitted]

SEQ ID NO: 2279 - protein, 174 aa, Homo sapiens
MVIDLPCPPFGLASRASSAFIQKLATSGPICLPRLIYLSIVCVLGISAIIVAQWDRFATPKHRQTRAGVFLGLGLSGVVPTMHFTIAEGFVKATTVGQMGWFFLMAVMYITGAGLYAARIPERFFPGKFDIWFQSHQIFHVLVVAAAFVHFYGVSNLQEFRYGLEGGCTDDTLL

SEQ ID NO: 2280 - protein, 105 aa, Homo sapiens
LSQWLWCLFIGIGELLWGQFISAIPTRSLKFLKEAGHGTTKEEITKDAEGLDEIDHAEMELRRGQILWFRGLNRIQTQHLLQDSDLLPDKEEAIISSSLFPSCNF

SEQ ID NO: 2281 - protein, 411 aa, Homo sapiens
LCPSRFHQKREGRGHRFSLSHLTWKHHVRMRSHFLQWALATSRNKDQITNIFSGFAGLLAILLVVAVFCILWNWNKRKKRQVPYLRVTVMPLLTLPQTRQRAKNIYDILPWRQEDLGRHESRSMRIFSTESLLSRNSESPEHVPSQAGNAFQEHTAHIHATEYAVGIYDNAMVPQMCGNLTPSAHCINVRASRDCASISSEDSHDYVNVPTAEEIAETLASTKSPSRNLFVLPSTQKLEFTEERDEGCGDAGDCTSLYSPGAEDSDSLSNGEGSSQISNDYVNMTGLDLSAIQERQLWVAFQCCRDYENVPAADPSGSQQQAEKDVPSSNIGHVEDKTDDPGTHVQCVKRTFLASGDYADFQPFTQSEDSQMKHREEMSNEDSSDYENVLTAKLGGRDSEQGPGTQLLPDE

SEQ ID NO: 2282 - protein, 410 aa, Homo sapiens
LKPESISKVPDTMDGVTPTLSTIRGRTLESSTLHVTPRSLDRNKDQITNIFSGFAGLLAILLVVAVFCILWNWNKRKKRQVPYLRVTVMPLLTLPQTRQRAKNIYDILPWRQEDLGRHESRSMRIFSTESLLSRNSESPEHVPSQAGNAFQEHTAHIHATEYAVGIYDNAMVPQMCGNLTPSAHCINVRASRDCASISSEDSHDYVNVPTAEEIAETLASTKSPSRNLFVLPSTQKLEFTEERDEGCGDAGDCTSLYSPGAEDSDSLSNGEGSSQISNDYVNMTGLDLSAIQERQLWVAFQCCRDYENVPAADPSGSQQQAEKDVPSSNIGHVEDKTDDPGTHVQCVKRTFLASGDYADFQPFTQSEDSQMKHREEMSNEDSSDYENVLTAKLGGRDSEQGPGTQLLPDE

SEQ ID NO: 2283 - protein, 167 aa, Homo sapiens
LSVSKPVCVSAGVGGNLVAVQASRISTFLHMNGMPGENSEQAPRRCPSPCTTFFSPDVNSRSARVLFLLVVPGHLVFLYTISCMQGGHTTLTLIFIIFYMTAALLQVLILLYIADWMVHWMWGRGLDPDNFSIPYLTALGDLLGTGLLALSFHVLWLIGDRDTDVGD

SEQ ID NO: 2284 - protein, 427 aa, Homo sapiens
LQFEGGLQRISGVSGSPGQLSCVGPHYPSPPTSRKTEKHWEVFQKVTEVFILVPALLGLKGNLEMTLASRLSTAANIGHMDTPKELWRMITGNMALIQVQATVVGFLASIAAVVFGWIPDGHFSIPHAFLLCASSVATAFIASLVLGMIMIGVIIGSRKIGINPDNVATPIAASLGDLITLALLSGISWGLYLELNHWRYIYPLVCAFFVALLPVWVVLARRSPATREVLYSGWEPVIIAMAISSVGGLILDKTVSDPNFAGMAVFTPVINGVGGNLVAVQASRISTFLHMNGMPGENSEQAPRRCPSPCTTFFSPDVNSRSARVLFLLVVPGHLVFLYTISCMQGGHTTLTLIFIIFYMTAALLQVLILLYIADWMVHWMWGRGLDPDNFSIPYLTALGDLLGTGLLALSFHVLWLIGDRDTDVGD

SEQ ID NO: 2285 - protein, 516 aa, Homo sapiens
VPVMSSKPEPKDVHQLNGTGPSASPCSSDGPGREPLAGTSEFLGPDGAGVEVVIESRANAKGVREEDALLENGSQSNESDDVSTDRGPAPPSPLKETSFSIGLQVLFPFLLAGFGTVAAGMVLDIVQHWEVFQKVTEVFILVPALLGLKGNLEMTLASRLSTAANIGHMDTPKELWRMITGNMALIQVQATVVGFLASIAAVVFGWIPDGHFSIPHAFLLCASSVATAFIASLVLGMIMIGVIIGSRKIGINPDNVATPIAASLGDLITLALLSGISWGLYLELNHWRYIYPLVCAFFVALLPVWVVLARRSPATREVLYSGWEPVIIAMAISSVGGLILDKTVSDPNFAGMAVFTPVINGVGGNLVAVQASRISTFLHMNGMPGENSEQAPRRCPSPCTTFFSPDVNSRSARVLFLLVVPGHLVFLYTISCMQGGHTTLTLIFIIFYMTAALLQVLILLYIADWMVHWMWGRGLDPDNFSIPYLTALGDLLGTGLLALSFHVLWLIGDRDTDVGD

SEQ ID NO: 2286 - protein, 299 aa, Homo sapiens
MWYRGIHHQLHQGRIQGPSYSEAIPTQESVPSGEYEPSWEEQPMPETPKWFHLPYLFQMPAYASSSKFVTRVTTPAQRGKVPPVHHSSPTTQITHRPRVSRASSVAGDKPRTFLPSTTASKISALEGLLKPQTPSYNHHTRLHRQRALDYGSQSGREGQGFHILIPTILGLFLLALLGLVVKRAVERRKALSRRARRLAVRMRALESSQRPRGSPRPRSQNNIYSACPRRARGADAAGTGEAPVPGPGAPLPPAPLQVSESPWLHAPSLKTSCEYVSLYHQPAAMMEDSDSDDYINVPA

SEQ ID NO: 2287 - protein, 400 aa, Homo sapiens
LDGPCTLEGTMDFWLWPLYFLPVSGALRILPEVKVEGELGGSVTIKCPLPEMHVRIYLCREMAGSGTCGTVVSTTNFIKAEYKGRVTLKQYPRKNLFLVEVTQLTESDSGVYACGAGMNTDRGKTQKVTLNVHSEYEPSWEEQPMPETPKWFHLPYLFQMPAYASSSKFVTRVTTPAQRGKVPPVHHSSPTTQITHRPRVSRASSVAGDKPRTFLPSTTASKISALEGLLKPQTPSYNHHTRLHRQRALDYGSQSGREGQGFHILIPTILGLFLLALLGLVVKRAVERRKALSRRARRLAVRMRALESSQRPRGSPRPRSQNNIYSACPRRARGADAAGTGEAPVPGPGAPLPPAPLQVSESPWLHAPSLKTSCEYVSLYHQPAAMMEDSDSDDYINVPA

SEQ ID NO: 2288 - protein, 288 aa, Homo sapiens
LDGPCTLEGTMDFWLWPLYFLPEYEPSWEEQPMPETPKWFHLPYLFQMPAYASSSKFVTRVTTPAQRGKVPPVHHSSPTTQITHRPRVSRASSVAGDKPRTFLPSTTASKISALEGLLKPQTPSYNHHTRLHRQRALDYGSQSGREGQGFHILIPTILGLFLLALLGLVVKRAVERRKALSRRARRLAVRMRALESSQRPRGSPRPRSQNNIYSACPRRARGADAAGTGEAPVPGPGAPLPPAPLQVSESPWLHAPSLKTSCEYVSLYHQPAAMMEDSDSDDYINVPA

SEQ ID NO: 2289 - protein, 1052 aa, Homo sapiens
LPDARGSRNASRRGGFGRGMGAAGLLGVFLALVAPGVLGISCGSPPPILNGRISYYSTPIAVGTVIRYSCSGTFRLIGEKSLLCITKDKVDGTWDKPAPKCEYFNKYSSCPEPIVPGGYKIRGSTPYRHGDSVTFACKTNFSMNGNKSVWCQANNMWGPTRLPTCVSVFPLECPALPMIHNGHHTSENVGSIAPGLSVTYSCESGYLLVGEKIINCLSSGKWSAVPPTCEEARCKSLGRFPNGKVKEPPILRVGVTANFFCDEGYRLQGPPSSRCVIAGQGVAWTKMPVCEEIFCPSPPPILNGRHIGNSLANVSYGSIVTYTCDPDPEEGVNFILIGESTLRCTVDSQKTGTWSGPAPRCELSTSAVQCPHPQILRGRMVSGQKDRYTYNDTVIFACMFGFTLKGSKQIRCNAQGTWEPSAPVCEKECQAPPNILNGQKEDRHMVRFDPGTSIKYSCNPGYVLVGEESIQCTSEGVWTPPVPQCKVAACEATGRQLLTKPQHQFVRPDVNSSCGEGYKLSGSVYQECQGTIPWFMEIRLCKEITCPPPPVIYNGAHTGSSLEDFPYGTTVTYTCNPGPERGVEFSLIGESTIRCTSNDQERGTWSGPAPLCKLSLLAVQCSHVHIANGYKISGKEAPYFYNDTVTFKCYSGFTLKGSSQIRCKADNTWDPEIPVCEKETCQHVRQSLQELPAGSRVELVNTSCQDGYQLTGHAYQMCQDAENGIWFKKIPLCKVIHCHPPPVIVNGKHTGMMAENFLYGNEVSYECDQGFYLLGEKKLQCRSDSKGHGSWSGPSPQCLRSPPVTRCPNPEVKHGYKLNKTHSAYSHNDIVYVDCNPGFIMNGSRVIRCHTDNTWVPGVPTCIKKAFIGCPPPPKTPNGNHTGGNIARFSPGMSILYSCDQGYLLVGEALLLCTHEGTWSQPAPHCKEVNCSSPADMDGIQKGLEPRKMYQYGAVVTLECEDGYMLEGSPQSQCQSDHQWNPPLAVCRSRSLAPVLCGIAAGLILLTFLIVITLYVISKHRARNYYTDTSQKEAFHLEAREVYSVDPYNPAS

SEQ ID NO: 2290 - protein, 990 aa, Homo sapiens
LPDARGSRNASRRGGFGRGMGAAGLLGVFLALVAPGVLGISCGSPPPILNGRISYYSTPIAVGTVIRYSCSGTFRLIGEKSLLCITKDKVDGTWDKPAPKCEYFNKYSSCPEPIVPGGYKIRGSTPYRHGDSVTFACKTNFSMNGNKSVWCQANNMWGPTRLPTCVSVFPLECPALPMIHNGHHTSENVGSIAPGLSVTYSCESGYLLVGEKIINCLSSGKWSAVPPTCEEARCKSLGRFPNGKVKEPPILRVGVTANFFCDEGYRLQGPPSSRCVIAGQGVAWTKMPVCEEIFCPSPPPILNGRHIGNSLANVSYGSIVTYTCDPDPEEGVNFILIGESTLRCTVDSQKTGTWSGPAPRCELSTSAVQCPHPQILRGRMVSGQKDRYTYNDTVIFACMFGFTLKGSKQIRCNAQGTWEPSAPVCEKECQAPPNILNGQKEDRHMVRFDPGTSIKYSCNPGYVLVGEESIQCTSEGVWTPPVPQCKVAACEATGRQLLTKPQHQFVRPDVNSSCGEGYKLSGSVYQECQGTIPWFMEIRLCKEITCPPPPVIYNGAHTGSSLEDFPYGTTVTYTCNPGPERGVEFSLIGESTIRCTSNDQERGTWSGPAPLCKLSLLAVQCSHVHIANGYKISGKEAPYFYNDTVTFKCYSGFTLKGSSQIRCKADNTWDPEIPVCEKETCQHVRQSLQELPAGSRVELVNTSCQDGYQLTGHAYQMCQDAENGIWFKKIPLCKVIHCHPPPVIVNGKHTGMMAENFLYGNEVSYECDQGFYLLGEKKLQCRSDSKGHGSWSGPSPQCLRSPPVTRCPNPEVKHGYKLNKTHSAYSHNDIVYVDCNPGFIMNGSRVIRCHTDNTWVPGVPTCIKKEVNCSSPADMDGIQKGLEPRKMYQYGAVVTLECEDGYMLEGSPQSQCQSDHQWNPPLAVCRSRSLAPVLCGIAAGLILLTFLIVITLYVISKHRARNYYTDTSQKEAFHLEAREVYSVDPYNPAS

SEQ ID NO: 2291 - protein, 2044 aa, Homo sapiens
MCLGRMGASSPRSPEPVGPPAPGLPFCCGGSLLAVVVLLALPVAWGQCNAPEWLPFARPTNLTDEFEFPIGTYLNYECRPGYSGRPFSIICLKNSVWTGAKDRCRRKSCRNPPDPVNGMVHVIKGIQFGSQIKYSCTKGYRLIGSSSATCIISGDTVIWDNETPICDRIPCGLPPTIANGDFISTNRENFHYGSVVTYRCNPGSGGRKVFELVGEPSIYCTSNDDQVGIWSGPAPQCIIPNKCTPPNVENGILVSDNRSLFSLNEVVEFRCQPGFVMKGPRRVKCQALNKWEPELPSCSRVCQPPPDVLHAERTQRDKDNFSPGQEVFYSCEPGYDLRGAASMRCTPQGDWSPAAPTCEVKSCDDFMGQLLNGRVLFPVNLQLGAKVDFVCDEGFQLKGSSASYCVLAGMESLWNSSVPVCEQIFCPSPPVIPNGRHTGKPLEVFPFGKTVNYTCDPHPDRGTSFDLIGESTIRCTSDPQGNGVWSSPAPRCGILGHCQAPDHFLFAKLKTQTNASDFPIGTSLKYECRPEYYGRPFSITCLDNLVWSSPKDVCKRKSCKTPPDPVNGMVHVITDIQVGSRINYSCTTGHRLIGHSSAECILSGNAAHWSTKPPICQRIPCGLPPTIANGDFISTNRENFHYGSVVTYRCNPGSGGRKVFELVGEPSIYCTSNDDQVGIWSGPAPQCIIPNKCTPPNVENGILVSDNRSLFSLNEVVEFRCQPGFVMKGPRRVKCQALNKWEPELPSCSRVCQPPPDVLHAERTQRDKDNFSPGQEVFYSCEPGYDLRGAASMRCTPQGDWSPAAPTCEVKSCDDFMGQLLNGRVLFPVNLQLGAKVDFVCDEGFQLKGSSASYCVLAGMESLWNSSVPVCEQIFCPSPPVIPNGRHTGKPLEVFPFGKAVNYTCDPHPDRGTSFDLIGESTIRCTSDPQGNGVWSSPAPRCGILGHCQAPDHFLFAKLKTQTNASDFPIGTSLKYECRPEYYGRPFSITCLDNLVWSSPKDVCKRKSCKTPPDPVNGMVHVITDIQVGSRINYSCTTGHRLIGHSSAECILSGNTAHWSTKPPICQRIPCGLPPTIANGDFISTNRENFHYGSVVTYRCNLGSRGRKVFELVGEPSIYCTSNDDQVGIWSGPAPQCIIPNKCTPPNVENGILVSDNRSLFSLNEVVEFRCQPGFVMKGPRRVKCQALNKWEPELPSCSRVCQPPPEILHGEHTPSHQDNFSPGQEVFYSCEPGYDLRGAASLHCTPQGDWSPEAPRCAVKSCDDFLGQLPHGRVLFPLNLQLGAKVSFVCDEGFRLKGSSVSHCVLVGMRSLWNNSVPVCEHIFCPNPPAILNGRHTGTPSGDIPYGKEISYTCDPHPDRGMTFNLIGESTIRCTSDPHGNGVWSSPAPRCELSVRAGHCKTPEQFPFASPTIPINDFEFPVGTSLNYECRPGYFGKMFSISCLENLVWSSVEDNCRRKSCGPPPEPFNGMVHINTDTQFGSTVNYSCNEGFRLIGSPSTTCLVSGNNVTWDKKAPICEIISCEPPPTISNGDFYSNNRTSFHNGTVVTYQCHTGPDGEQLFELVGERSIYCTSKDDQVGVWSSPPPRCISTNKCTAPEVENAIRVPGNRSFFTLTEIIRFRCQPGFVMVGSHTVQCQTNGRWGPKLPHCSRVCQPPPEILHGEHTLSHQDNFSPGQEVFYSCEPSYDLRGAASLHCTPQGDWSPEAPRCTVKSCDDFLGQLPHGRVLLPLNLQLGAKVSFVCDEGFRLKGRSASHCVLAGMKALWNSSVPVCEQIFCPNPPAILNGRHTGTPFGDIPYGKEISYACDTHPDRGMTFNLIGESSIRCTSDPQGNGVWSSPAPRCELSVPAACPHPPKIQNGHYIGGHVSLYLPGMTISYICDPGYLLVGKGFIFCTDQGIWSQLDHYCKEVNCSFPLFMNGISKELEMKKVYHYGDYVTLKCEDGYTLEGSPWSQCQADDRWDPPLAKCTSRTHDALIVGTLSGTIFFILLIIFLSWIILKHRKGNNAHENPKEVAIHLHSQGGSSVHPRTLQTNEENSRVLP

SEQ ID NO: 2292 - protein, 2044 aa, Homo sapiens
MCLGRMGASSPRSPEPVGPPAPGLPFCCGGSLLAVVVLLALPVAWGQCNAPEWLPFARPTNLTDEFEFPIGTYLNYECRPGYSGRPFSIICLKNSVWTGAKDRCRRKSCRNPPDPVNGMVHVIKGIQFGSQIKYSCTKGYRLIGSSSATCIISGDTVIWDNETPICDRIPCGLPPTITNGDFISTNRENFHYGSVVTYRCNPGSGGRKVFELVGEPSIYCTSNDDQVGIWSGPAPQCIIPNKCTPPNVENGILVSDNRSLFSLNEVVEFRCQPGFVMKGPRRVKCQALNKWEPELPSCSRVCQPPPDVLHAERTQRDKDNFSPGQEVFYSCEPGYDLRGAASMRCTPQGDWSPAAPTCEVKSCDDFMGQLLNGRVLFPVNLQLGAKVDFVCDEGFQLKGSSASYCVLAGMESLWNSSVPVCEQIFCPSPPVIPNGRHTGKPLEVFPFGKTVNYTCDPHPDRGTSFDLIGESTIRCTSDPQGNGVWSSPAPRCGILGHCQAPDHFLFAKLKTQTNASDFPIGTSLKYECRPEYYGRPFSITCLDNLVWSSPKDVCKRKSCKTPPDPVNGMVHVITDIQVGSRINYSCTTGHRLIGHSSAECILSGNAAHWSTKPPICQRIPCGLPPTIANGDFISTNRENFHYGSVVTYRCNPGSGGRKVFELVGEPSIYCTSNDDQVGIWSGPAPQCIIPNKCTPPNVENGILVSDNRSLFSLNEVVEFRCQPGFVMKGPRRVKCQALNKWEPELPSCSRVCQPPPDVLHAERTQRDKDNFSPGQEVFYSCEPGYDLRGAASMRCTPQGDWSPAAPTCEVKSCDDFMGQLLNGRVLFPVNLQLGAKVDFVCDEGFQLKGSSASYCVLAGMESLWNSSVPVCEQIFCPSPPVIPNGRHTGKPLEVFPFGKAVNYTCDPHPDRGTSFDLIGESTIRCTSDPQGNGVWSSPAPRCGILGHCQAPDHFLFAKLKTQTNASDFPIGTSLKYECRPEYYGRPFSITCLDNLVWSSPKDVCKRKSCKTPPDPVNGMVHVITDIQVGSRINYSCTTGHRLIGHSSAECILSGNTAHWSTKPPICQRIPCGLPPTIANGDFISTNRENFHYGSVVTYRCNLGSRGRKVFELVGEPSIYCTSNDDQVGIWSGPAPQCIIPNKCTPPNVENGILVSDNRSLFSLNEVVEFRCQPGFVMKGPRRVKCQALNKWEPELPSCSRVCQPPPEILHGEHTPSHQDNFSPGQEVFYSCEPGYDLRGAASLHCTPQGDWSPEAPRCAVKSCDDFLGQLPHGRVLFPLNLQLGAKVSFVCDEGFRLKGSSVSHCVLVGMRSLWNNSVPVCEHIFCPNPPAILNGRHTGTPSGDIPYGKEISYTCDPHPDRGMTFNLIGESTIRCTSDPHGNGVWSSPAPRCELSVRAGHCKTPEQFPFASPTIPINDFEFPVGTSLNYECRPGYFGKMFSISCLENLVWSSVEDNCRRKSCGPPPEPFNGMVHINTDTQFGSTVNYSCNEGFRLIGSPSTTCLVSGNNVTWDKKAPICEIISCEPPPTISNGDFYSNNRTSFHNGTVVTYQCHTGPDGEQLFELVGERSIYCTSKDDQVGVWSSPPPRCISTNKCTAPEVENAIRVPGNRSFFTLTEIIRFRCQPGFVMVGSHTVQCQTNGRWGPKLPHCSRVCQPPPEILHGEHTLSHQDNFSPGQEVFYSCEPSYDLRGAASLHCTPQGDWSPEAPRCTVKSCDDFLGQLPHGRVLLPLNLQLGAKVSFVCDEGFRLKGRSASHCVLAGMKALWNSSVPVCEQIFCPNPPAILNGRHTGTPFGDIPYGKEISYACDTHPDRGMTFNLIGESSIRCTSDPQGNGVWSSPAPRCELSVPAACPHPPKIQNGHYIGGHVSLYLPGMTISYICDPGYLLVGKGFIFCTDQGIWSQLDHYCKEVNCSFPLFMNGISKELEMKKVYHYGDYVTLKCEDGYTLEGSPWSQCQADDRWDPPLAKCTSRTHDALIVGTLSGTIFFILLIIFLSWIILKHRKGNNAHENPKEVAIHLHSQGGSSVHPRTLQTNEENSRVLP

SEQ ID NO: 2293 - protein, 2044 aa, Homo sapiens
MCLGRMGASSPRSPEPVGPPAPGLPFCCGGSLLAVVVLLALPVAWGQCNAPEWLPFARPTNLTDEFEFPIGTYLNYECRPGYSGRPFSIICLKNSVWTGAKDRCRRKSCRNPPDPVNGMVHVIKGIQFGSQIKYSCTKGYRLIGSSSATCIISGDTVIWDNETPICDRIPCGLPPTITNGDFISTNRENFHYGSVVTYRCNPGSGGRKVFELVGEPSIYCTSNDDQVGIWSGPAPQCIIPNKCTPPNVENGILVSDNRSLFSLNEVVEFRCQPGFVMKGPRRVKCQALNKWEPELPSCSRVCQPPPDVLHAERTQRDKDNFSPGQEVFYSCEPGYDLRGAASMRCTPQGDWSPAAPTCEVKSCDDFMGQLLNGRVLFPVNLQLGAKVDFVCDEGFQLKGSSASYCVLAGMESLWNSSVPVCEQIFCPSPPVIPNGRHTGKPLEVFPFGKTVNYTCDPHPDRGTSFDLIGESTIRCTSDPQGNGVWSSPAPRCGILGHCQAPDHFLFAKLKTQTNASDFPIGTSLKYECRPEYYGRPFSITCLDNLVWSSPKDVCKRKSCKTPPDPVNGMVHVITDIQVGSRINYSCTTGHRLIGHSSAECILSGNAAHWSTKPPICQRIPCGLPPTIANGDFISTNRENFHYGSVVTYRCNPGSGGRKVFELVGEPSIYCTSNDDQVGIWSGPAPQCIIPNKCTPPNVENGILVSDNRSLFSLNEVVEFRCQPGFVMKGPRRVKCQALNKWEPELPSCSRVCQPPPDVLHAERTQRDKDNFSPGQEVFYSCEPGYDLRGAASMRCTPQGDWSPAAPTCEVKSCDDFMGQLLNGRVLFPVNLQLGAKVDFVCDEGFQLKGSSASYCVLAGMESLWNSSVPVCEQIFCPSPPVIPNGRHTGKPLEVFPFGKTVNYTCDPHPDRGTSFDLIGESTIRCTSDPQGNGVWSSPAPRCGILGHCQAPDHFLFAKLKTQTNASDFPIGTSLKYECRPEYYGRPFSITCLDNLVWSSPKDVCKRKSCKTPPDPVNGMVHVITDIQVGSRINYSCTTGHRLIGHSSAECILSGNTAHWSTKPPICQRIPCGLPPTIANGDFISTNRENFHYGSVVTYRCNLGSRGRKVFELVGEPSIYCTSNDDQVGIWSGPAPQCIIPNKCTPPNVENGILVSDNRSLFSLNEVVEFRCQPGFVMKGPRRVKCQALNKWEPELPSCSRVCQPPPEILHGEHTPSHQDNFSPGQEVFYSCEPGYDLRGAASLHCTPQGDWSPEAPRCAVKSCDDFLGQLPHGRVLFPLNLQLGAKVSFVCDEGFRLKGSSVSHCVLVGMRSLWNNSVPVCEHIFCPNPPAILNGRHTGTPSGDIPYGKEISYTCDPHPDRGMTFNLIGESTIRCTSDPHGNGVWSSPAPRCELSVRAGHCKTPEQFPFASPTIPINDFEFPVGTSLNYECRPGYFGKMFSISCLENLVWSSVEDNCRRKSCGPPPEPFNGMVHINTDTQFGSTVNYSCNEGFRLIGSPSTTCLVSGNNVTWDKKAPICEIISCEPPPTISNGDFYSNNRTSFHNGTVVTYQCHTGPDGEQLFELVGERSIYCTSKDDQVGVWSSPPPRCISTNKCTAPEVENAIRVPGNRSFFTLTEIIRFRCQPGFVMVGSHTVQCQTNGRWGPKLPHCSRVCQPPPEILHGEHTLSHQDNFSPGQEVFYSCEPSYDLRGAASLHCTPQGDWSPEAPRCTVKSCDDFLGQLPHGRVLLPLNLQLGAKVSFVCDEGFRLKGRSASHCVLAGMKALWNSSVPVCEQIFCPNPPAILNGRHTGTPFGDIPYGKEISYACDTHPDRGMTFNLIGESSIRCTSDPQGNGVWSSPAPRCELSVPAACPHPPKIQNGHYIGGHVSLYLPGMTISYICDPGYLLVGKGFIFCTDQGIWSQLDHYCKEVNCSFPLFMNGISKELEMKKVYHYGDYVTLKCEDGYTLEGSPWSQCQADDRWDPPLAKCTSRTHDALIVGTLSGTIFFILLIIFLSWIILKHRKGNNAHENPKEVAIHLHSQGGSSVHPRTLQTNEENSRVLP

SEQ ID NO: 2294 - protein, 604 aa, Homo sapiens
LRFAARATGEGAVGRGVGGGAPGGPRAVGRESGVGEWGGGARWRRGAWDMARPDDEEGAAVAPGHPLAKGYLPLPRGAPVGKESVELQNGPKAGTFPVNGAPRDSLAAASGVLGGPQTPLAPEEETQARLLPAGAGAETPGAESSPLPLTALSPRRFVVLLIFSLYSLVNAFQWIQYSIISNVFEGFYGVTLLHIDWLSMVYMLAYVPLIFPATWLLDTRGLRLTALLGSGLNCLGAWIKCGSVQQHLFWVTMLGQCLCSVAQVFILGLPSRIASVWFGPKEVSTACATAVLGNQLGTAVGFLLPPVLVPNTQNDTNLLACNISTMFYGTSAVATLLFILTAIAFKEKPRYPPSQAQAALQDSPPEEYSYKKSIRNLFKNIPFVLLLITYGIMTGAFYSVSTLLNQMILTYYEGEEVNAGRIGLTLVVAGMVGSILCGLWLDYTKTYKQTTLIVYILSFIGMVIFTFTLDLRYIIIVFVTGGVLGFFMTGYLPLGFEFAVEITYPESEGTSSGLLNASAQIFGILFTLAQGKLTSDYGPKAGNIFLCVWMFIGIILTALIKSDLRRHNINIGITNVDVKAIPADSPTDQEPKTVMLSKQSESAI

SEQ ID NO: 2295 - protein, 56 aa, Homo sapiens
LVLLLTILVCLAHTCFGCFKHLSPLNYKTEEPASDKGSEAEAHMPPPFTITWQASL

SEQ ID NO: 2296 - protein, 76 aa, Homo sapiens
LPGIPALMAGGFPLSNDLLWLHTIFAVIYLFLTVGFMRHHTQSIKYKEENLSPAMQRRLIELLWKWILCTAWKKTL

SEQ ID NO: 2297 - protein, 2212 aa, Homo sapiens
LPGRSSRLRRRGSRVRAEEQLQLQTWGGRRRRGRRRRRRRGRGPRARVLDLREPGDPAGARRVQRGAHQPRGAAGMVSQVLQLLRQGVWAALTGGWYHDPEQSKFTNSCHLYLWLFLLLLPLALHLAFPPNAIIVFFYCSAVTIFFTIIKLVSYRLHLMFDKGEVIQQKPSRKEEKPNKDKEAKGEHITNHRNPSNNRQIHNGKKEEASRNLSTPPLRCSSRGQSITSHHSSGPLELSAQETVEDLKGVILLEDHPIAPVSSTSPGIKVESLPASQAHMLETTTKSVIPVKPVATETLINGKGKERGGKGQPPLRHRSEGGLVDKGPLKKLPHLSLSQYDLLETDVSFQPWGSENSVLIPEPVSCPRGSIRERVQSKSPQDSLSSSCPQCDTIVAKPVEEPADTSCQVDTSCQGDLPLHQEVDSSDSEVAVTLIDTSQPGDPLSLHEPIKIVITMSSTPNSMTDLESSLHLRVVGTEKTSVKSDAEPTNPGAAGSPNAEQISIPVITLDLPEGGGGGVPCPEGNGSERTPERLKTRVSTNQCSGYGSGEGGNAIKDHSSSSREPWESVSRLTPDTGSESKVGKEGQTNLDPSSCKSSHEKRHARVLSVDSGTDVFLSKSSAEIVNDTEKTMPTSKSDLEAKEGQMPNESNFLEFVSLLESINTSKMTASSQLNGSAEQNEESGLLRDNCSQEKKEEILENEKPSGHSSKQGKPDLQSQDHTSTGPACTQPAKTTAFFQGNRQRQIIYRVTSQQDSSVLQVISGPETSVQEEISVDAMHVFIDEHGEIRSCYLKSGNQKEGPLQPLPSNNDCLSQAREMQVSSSSTTTSESQDPSSGDPAVSALQQQLLLMVARRTQSETPRHVSQDLEASSCSSTQGKFNREQFYKFIIFPGKWIKVWYDRLTLLALLDRTEDIKENVLAILLIVLVSLLGFLTLSQGFCKDMWVLLFCLVMASCQYSLLKSVQPDPASPIHGHNQIITYSRPIYFCVLCGLILLLDTGAKARHPPSYVVYGLKLFSPVFLQSARDYLIVFLYCFPAISLLGLFPQINTFCTYLLEQIDMLFFGGSAVSGITSAVYSVARSVLAAALLHAVCFSAVKEPWSMQHIPALFSAFCGLLVALSYHLSRQSSDPSVLMSFIQCRLFPKFLHQNLAESAADPLPKKMKDSVTDVLKWDLIVCAVVAVLSFAVSASTVFLSLRPFLSIVLFALAGAVGFVTHYVLPQLRKHHPWMWISHPILKNKEYHQREVRDVAHLMWFERLYVWLQCFEKYILYPALILNALTIDAFLISNHRRLGTHWDIFLMIIAGMKLLRTSFCNPVYQFINLSFTVIFFHFDYKDISESFLLDFFMVSILFSKLGDLLHKLQFVLTYVAPWQMAWGSSFHVFAQLFAIPHSAMLFFQTIATSIFSTPLSPFLGSVIFITSYVRPVKFWEKNYNTRRVDNSNTRLAVQIERDPGNDDNNLNSIFYEHLTRTLQESLCGDLVLGRWGNYSSGDCFILASDDLNAFVHLIEIGNGLVTFQLRGLEFRGTYCQQREVEAIMEGDEEDRGCCCCKPGHLPHLLSCNAAFHLRWLTWEITQTQYILEGYSILDNNAATMLQVFDLRRILIRYYIKSIIYYMVTSPKLLSWIKNESLLKSLQPFAKWHYIERDLAMFNINIDDDYVPCLQGITRASFCNVYLEWIQHCARKRQEPSTTLDSDEDSPLVTLSFALCTLGRRALGTAAHNMAISLDSFLYGLHVLFKGDFRITARDEWVFADMDLLHKVVAPAIRMSLKLHQDQFTCPDEYEDPAVLYEAIQSFEKKVVICHEGDPAWRGAVLSNKEELLTLRHVVDEGADEYKVIMLHRSFLSFKVIKVNKECVRGLWAGQQQELIFLRNRNPERGSIQNNKQVLRNLINSSCDQPLGYPMYVSPLTTSYLGTHRQLKNIWGGPITLDRIRTWFWTKWVRMRKDCNARQHSGGNIEDVDGGGAPTTGGNNAPSGGSQESSAEQPRKGGAQHGVSSCEGTQRTGRRKGRSQSVQAHSALSQRPPMLSSSGPILESRQTFLQTSTSVHELAQRLSGSRLSLHASATSLHSQPPPVTTTGHLSVRERAEALIRSSLGSSTSSTLSFLFGKRSFSSALVISGLSAAEGGNTSDTQSSSSVNIVMGPSARAASQATRHLSEPCEPPDATEQGQLHDRCLAEAVADTLGVVCRRASQEDMGLDDTASQQSVSDEQ

SEQ ID NO: 2298 - protein, 345 aa, Homo sapiens
LALAAAVEKMLQSLAGSSCVRLVERHRSAWCFGFLVLGYLLYLVFGAVVFSSVELPYEDLLRQELRKLKRRFLEEHECLSEQQLEQFLGRVLEASNYGVSVLSNASGNWNWDFTSALFFASTVLSTTGYGHTVPLSDGGKAFCIIYSVIGIPFTLLFLTAVVQRITVHVTRRPVLYFHIRWGFSKQVVAIVHAVLLGFVTVSCFFFIPAAVFSVLEDDWNFLESFYFCFISLSTIGLGDYVPGEGYNQKFRELYKIGITCYLLLGLIAMLVVLETFCELHELKKFRKMFYVKKDKDEDQVHIIEHDQLSFSSITDQAAGMKEDQKQNEPFVATQSSACVDGPANH

SEQ ID NO: 2299 - protein, 254 aa, Homo sapiens
VDINGNSLVLGHGGKRETALDGRTKNFTTQTRLESLGYGHTVPLSDGGKAFCIIYSVIGIPFTLLFLTAVVQRITVHVTRRPVLYFHIRWGFSKQVVAIVHAVLLGFVTVSCFFFIPAAVFSVLEDDWNFLESFYFCFISLSTIGLGDYVPGEGYNQKFRELYKIGITCYLLLGLIAMLVVLETFCELHELKKFRKMFYVKKDKDEDQVHIIEHDQLSFSSITDQAAGMKEDQKQNEPFVATQSSACVDGPANH

SEQ ID NO: 2300 - protein, 97 aa, Homo sapiens [sequence omitted]

SEQ ID NO: 2301 - protein, 721 aa, Homo sapiens
LQMKMASTRCKLARYLEDLEDVDLKKFKMHLEDYPPQKGCIPLPRGQTEKADHVDLATLMIDFNGEEKAWAMAVWIFAAINRRDLYEKAKRDEPKWGSDNARVSNPTVICQEDSIEEEWMGLLEYLSRISICKMKKDYRKKYRKYVRSRFQCIEDRNARLGESVSLNKRYTRLRLIKEHRSQQEREQELLAIGKTKTCESPVSPIKMELLFDPDDEHSEPVHTVVFQGAAGIGKTILARKMMLDWASGTLYQDRFDYLFYIHCREVSLVTQRSLGDLIMSCCPDPNPPIHKIVRKPSRILFLMDGFDELQGAFDEHIGPLCTDWQKAERGDILLSSLIRKKLLPEASLLITTRPVALEKLQHLLDHPRHVEILGFSEAKRKEYFFKYFSDEAQARAAFSLIQENEVLFTMCFIPLVCWIVCTGLKQQMESGKSLAQTSKTTTAVYVFFLSSLLQPRGGSQEHGLCAHLWGLCSLAADGIWNQKILFEESDLRNHGLQKADVSAFLRMNLFQKEVDCEKFYSFIHMTFQEFFAAMYYLLEEEKEGRTNVPGSRLKLPSRDVTVLLENYGKFEKGYLIFVVRFLFGLVNQERTSYLEKKLSCKISQQIRLELLKWIEVKAKAKKLQIQPSQLELFYCLYEMQEEDFVQRAMDYFPKIEINLSTRMDHMVSSFCIENCHRVESLSLGFLHNMPKEEEEEEKEGRHLDMVQCVLPSSSHAACSHG

SEQ ID NO: 2302 - protein, 924 aa, Homo sapiens
LQMKMASTRCKLARYLEDLEDVDLKKFKMHLEDYPPQKGCIPLPRGQTEKADHVDLATLMIDFNGEEKAWAMAVWIFAAINRRDLYEKAKRDEPKWGSDNARVSNPTVICQEDSIEEEWMGLLEYLSRISICKMKKDYRKKYRKYVRSRFQCIEDRNARLGESVSLNKRYTRLRLIKEHRSQQEREQELLAIGKTKTCESPVSPIKMELLFDPDDEHSEPVHTVVFQGAAGIGKTILARKMMLDWASGTLYQDRFDYLFYIHCREVSLVTQRSLGDLIMSCCPDPNPPIHKIVRKPSRILFLMDGFDELQGAFDEHIGPLCTDWQKAERGDILLSSLIRKKLLPEASLLITTRPVALEKLQHLLDHPRHVEILGFSEAKRKEYFFKYFSDEAQARAAFSLIQENEVLFTMCFIPLVCWIVCTGLKQQMESGKSLAQTSKTTTAVYVFFLSSLLQPRGGSQEHGLCAHLWGLCSLAADGIWNQKILFEESDLRNHGLQKADVSAFLRMNLFQKEVDCEKFYSFIHMTFQEFFAAMYYLLEEEKEGRTNVPGSRLKLPSRDVTVLLENYGKFEKGYLIFVVRFLFGLVNQERTSYLEKKLSCKISQQIRLELLKWIEVKAKAKKLQIQPSQLELFYCLYEMQEEDFVQRAMDYFPKIEINLSTRMDHMVSSFCIENCHRVESLSLGFLHNMPKEEEEEEKEGRHLDMVQCVLPSSSHAACSHGLGRCGLSHECCFDISLVLSSNQKLVELDLSDNALGDFGIRLLCVGLKHLLCNLKKLWLVNSGLTSVCCSALSSVLSTNQNLTHLYLRGNTLGDKGIKLLCEGLLHPDCKLQVLELDNCNLTSHCCWDLSTLLTSSQSLRKLSLGNNDLGDLGVMMFCEVLKQQSCLLQNLGLSEMYFNYETKSALETLQEEKPELTVVFEPSW

SEQ ID NO: 2303 - protein, 293 aa, Homo sapiens
LGLLQRKTSASLPRLVPRVRKMDSYLLMWGLLTFIMVPGCQAELCDDDPPEIPHATFKAMAYKEGTMLNCECKRGFRRIKSGSLYMLCTGNSSHSSWDNQCQCTSSATRNTTKQVTPQPEEQKERKTTEMQSPMQPVDQASLPGHCREPPPWENEATERIYHFVVGQMVYYQCVQGYRALHRGPAESVCKMTHGKTRWTQPQLICTGEMETSQFPGEEKPQASPEGRPESETSCLVTTTDFQIQTEMAATMETSIFTTEYQVAVAGCVFLLISVLLLSGLTWQRRQRKSRRTI

SEQ ID NO: 2304 - protein, 221 aa, Homo sapiens
LGLLQRKTSASLPRLVPRVRKMDSYLLMWGLLTFIMVPGCQAELCDDDPPEIPHATFKAMAYKEGTMLNCECKRGFRRIKSGSLYMLCTGNSSHSSWDNQCQCTSSATRNTTKQVTPQPEEQKERKTTEMQSPMQPVDQASLPGEEKPQASPEGRPESETSCLVTTTDFQIQTEMAATMETSIFTTEYQVAVAGCVFLLISVLLLSGLTWQRRQRKSRRTI

SEQ ID NO: 2305 - protein, 284 aa, Homo sapiens
LGLLQRKTSASLPRLVPRVRKMDSYLLMWGLLTFIMVPGCQAELCDDDPPEIPHATFKAMAYKEGTMLNCECKRGFRRIKSGSLYMLCTGNSSHSSWDNQCQCTSSATRNTTKQVTPQPEEQKERKTTEMQSPMQPVDQASLPGHCREPPPWENEATERIYHFVVGQMVYYQCVQGYRALHRGPAESVCKMTHGKTRWTQPQLICTGEEKPQASPEGRPESETSCLVTTTDFQIQTEMAATMETSIFTTEYQVAVAGCVFLLISVLLLSGLTWQRRQRKSRRTI

SEQ ID NO: 2306 - protein, 34 aa, Homo sapiens
LCLEDGSALMFPGIMLRTAFRVAALFSSLHLGNT

SEQ ID NO: 2307 - protein, 52 aa, Homo sapiens
MLEDPYAAWRLLFLGTQVSSLYCYNFFSRTAVFFACTNVTFCIFLILQNYMC

SEQ ID NO: 2308 - protein, 835 aa, Homo sapiens
VRVAGLGAVTSGLPELRGTGPERPLTPAVSRRAGQAQMNLQPIFWIGLISSVCCVFAQTDENRCLKANAKSCGECIQAGPNCGWCTNSTFLQEGMPTSARCDDLEALKKKGCPPDDIENPRGSKDIKKNKNVTNRSKGTAEKLKPEDITQIQPQQLVLRLRSGEPQTFTLKFKRAEDYPIDLYYLMDLSYSMKDDLENVKSLGTDLMNEMRRITSDFRIGFGSFVEKTVMPYISTTPAKLRNPCTSEQNCTSPFSYKNVLSLTNKGEVFNELVGKQRISGNLDSPEGGFDAIMQVAVCGSLIGWRNVTRLLVFSTDAGFHFAGDGKLGGIVLPNDGQCHLENNMYTMSHYYDYPSIAHLVQKLSENNIQTIFAVTEEFQPVYKELKNLIPKSAVGTLSANSSNVIQLIIDAYNSLSSEVILENGKLSEGVTISYKSYCKNGVNGTGENGRKCSNISIGDEVQFEISITSNKCPKKDSDSFKIRPLGFTEEVEVILQYICECECQSEGIPESPKCHEGNGTFECGACRCNEGRVGRHCECSTDEVNSEDMDAYCRKENSSEICSNNGECVCGQCVCRKRDNTNEIYSGKFCECDNFNCDRSNGLICGGNGVCKCRVCECNPNYTGSACDCSLDTSTCEASNGQICNGRGICECGVCKCTDPKFQGQTCEMCQTCLGVCAEHKECVQCRAFNKGEKKDTCTQECSYFNITKVESRDKLPQPVQPDPVSHCKEKDVDDCWFYFTYSVNGNNEVMVHVVENPECPTGPDIIPIVAGVVAGIVLIGLALLLIWKLLMIIHDRREFAKFEKEKMNAKWDTGENPIYKSAVTTVVNPKYEGK

SEQ ID NO: 2309 - protein, 68 aa, Homo sapiens
VRGDGPRLCYSAERPRPDDAAWIAEPRAALGNGRGDHPGRPLSPLAGFPVAVRCAAGFLVNFWMKPLN

SEQ ID NO: 2310 - protein, 149 aa, Homo sapiens
VHTPCKRRRHESDFQFQRTSPLHAGNRQLSSEAEANQIMQNFLLSNIAWSWVEWIAAVTIAAGTAAIGYLAYKRFYVKDHRNKAMINLHIQKDNPKIVHAFDMEDLGDKAVYCRCWRSKKFPFCDGAHTKHNEETGDNVGPLIIKKKET

SEQ ID NO: 2311 - protein, 3434 aa, Homo sapiens
LGRAQSEPPARLKLRAASGERRAARGDPGAAGTPRMSLRAGGKTRRWPGPEQAARGGRSGGEQSPRRGEARRRCTHAHGAMGRHVATSCHVAWLLVLISGCWGQVNRLPFFTNHFFDTYLLISEDTPVGSSVTQLLAQDMDNDPLVFGVSGEEASRFFAVEPDTGVVWLRQPLDRETKSEFTVEFSVSDHQGVITRKVNIQVGDVNDNAPTFHNQPYSVRIPENTPVGTPIFIVNATDPDLGAGGSVLYSFQPPSQFFAIDSARGIVTVIRELDYETTQAYQLTVNATDQDKTRPLSTLANLAIIITDVQDMDPIFINLPYSTNIYEHSPPGTTVRIITAIDQDKGRPRGIGYTIVSGNTNSIFALDYISGVLTLNGLLDRENPLYSHGFILTVKGTELNDDRTPSDATVTTTFNILVIDINDNAPEFNSSEYSVAITELAQVGFALPLFIQVVDKDETQGLNSMFEVYLVGNNSHHFIISPTSVQGKADIRIRVAIPLDYETVDRYDFDLFANESVPDHVGYAKVKITLINENDNRPIFSQPLYNISLYENVTVGTSVLTVLATDNDAGTFGEVSYFFSDDPDRFSLDKDTGLIMLIARLDYELIQRFTLTIIARDGGGEETTGRVRINVLDVNDNVPTFQKDAYVGALRENEPSVTQLVRLRATDEDSPPNNQITYSIVSASAFGSYFDISLYEGYGVISVSRPLDYEQISNGLIYLTVMAMDAGNPPLNSTVPVTIEVFDENDNPPTFSKPAYFVSVVENIMAGATVLFLNATDLDRSREYGQESIIYSLEGSTQFRINARSGEITTTSLLDRETKSEYILIVRAVDGGVGHNQKTGIATVNITLLDINDNHPTWKDAPYYINLVEMTPPDSDVTTVVAVDPDLGENGTLVYSIQPPNKFYSLNSTTGKIRTTHAMLDRENPDPHEAELMRKIVVSVTDCGRPPLKATSSATVFVNLLDLNDNDPTFQNLPFVAEVLEGIPAGVSIYQVVAIDLDEGLNGLVSYRMPVGMPRMDFLINSSSGVVVTTTELDRERIAEYQLRVVASDAGTPTKSSTSTLTIHVLDVNDETPTFFPAVYNVSVSEDVPREFRVVWLNCTDNDVGLNAELSYFITGGNVDGKFSVGYRDAVVRTVVGLDRETTAAYMLILEAIDNGPVGKRHTGTATVFVTVLDVNDNRPIFLQSSYEASVPEDIPEGHSILQLKATDADEGEFGRVWYRILHGNHGNNFRIHVSNGLLMRGPRPLDRERNSSHVLIVEAYNHDLGPMRSSVRVIVYVEDINDEAPVFTQQQYSRLGLRETAGIGTSVIVVQATDRDSGDGGLVNYRILSGAEGKFEIDESTGLIITVNYLDYETKTSYMMNVSATDQAPPFNQGFCSVYITLLNELDEAVQFSNASYEAAILENLALGTEIVRVQAYSIDNLNQITYRFNAYTSTQAKALFKIDAITGVITVQGLVDREKGDFYTLTVVADDGGPKVDSTVQVYITVLDENDNSPRFDFTSDSAVSIPEDCPVGQRVATVKAWDPDAGSNGQVVFSLASGNIAGAFEIVTTNDSIGEVFVARPLDREELDHYILQVVASDRGTPPRKKDHILQVTILDINDNPPVIESPFGYNVSVNENVGGGTAVVQVRATDRDIGINSVLSYYITEGNKDMAFRMDRISGEIATRPAPPDRERQSFYHLVATVEDEGTPTLSATTHVYVTIVDENDNAPMFQQPHYEVLLDEGPDTLNTSLITIQALDLDEGPNGTVTYAIVAGNIVNTFRIDRHMGVITAAKELDYEISHGRYTLIVTATDQCPILSHRLTSTTTVLVNVNDINDNVPTFPRDYEGPFEVTEGQPGPRVWTFLAHDRDSGPNGQVEYSIMDGDPLGEFVISPVEGVLRVRKDVELDRETIAFYNLTICARDRGMPPLSSTMLVGIRVLDINDNDPVLLNLPMNITISENSPVSSFVAHVLASDADSGCNARLTFNITAGNRERAFFINATTGIVTVNRPLDRERIPEYKLTISVKDNPENPRIARRDYDLLLIFLSDENDNHPLFTKSTYQAEVMENSPAGTPLTVLNGPILALDADQDIYAVVTYQLLGAQSGLFDINSSTGVVTVRSGVIIDREAFSPPILELLLLAEDIGLLNSTAHLLITILDDNDNRPTFSPATLTVHLLENCPPGFSVLQVTATDEDSGLNGELVYRIEAGAQDRFLIHLVTGVIRVGNATIDREEQESYRLTVVATDRGTVPLSGTAIVTILIDDINDSRPEFLNPIQTVSVLESAEPGTVIANITAIDHDLNPKLEYHIVGIVAKDDTDRLVPNQEDAFAVNINTGSVMVKSPMNRELVATYEVTLSVIDNASDLPERSVSVPNAKLTVNVLDVNDNTPQFKPFGITYYMERILEGATPGTTLIAVAAVDPDKGLNGLVTYTLLDLVPPGYVQLEDSSAGKVIANRTVDYEEVHWLNFTVRASDNGSPPRAAEIPVYLEIVDINDNNPIFDQPSYQEAVFEDVPVGTIILTVTATDADSGNFALIEYSLGDGESKFAINPTTGDIYVLSSLDREKKDHYILTALAKDNPGDVASNRRENSVQVVIQVLDVNDCRPQFSKPQFSTSVYENEPAGTSVITMMATDQDEGPNGELTYSLEGPGVEAFHVDMDSGLVTTQRPLQSYEKFSLTVVATDGGEPPLWGTTMLLVEVIDVNDNRPVFVRPPNGTILHIREEIPLRSNVYEVYATDKDEGLNGAVRYSFLKTAGNRDWEFFIIDPISGLIQTAQRLDRESQAVYSLILVASDLGQPVPYETMQPLQVALEDIDDNEPLFVRPPKGSPQYQLLTVPEHSPRGTLVGNVTGAVDADEGPNAIVYYFIAAGNEEKNFHLQPDGCLLVLRDLDREREAIFSFIVKASSNRSWTPPRGPSPTLDLVADLTLQEVRVVLEDINDQPPRFTKAEYTAGVATDAKVGSELIQVLALDADIGNNSLVFYSILAIHYFRALANDSEDVGQVFTMGSMDGILRTFDLFMAYSPGYFVVDIVARDLAGHNDTAIIGIYILRDDQRVKIVINEIPDRVRGFEEEFIHLLSNITGAIVNTDNVQFHVDKKGRVNFAQTELLIHVVNRDTNRILDVDRVIQMIDENKEQLRNLFRNYNVLDVQPAISVRLPDDMSALQMAIIVLAILLFLAAMLFVLMNWYYRTVHKRKLKAIVAGSAGNRGFIDIMDMPNTNKYSFDGANPVWLDPFCRNLELAAQAEHEDDLPENLSEIADLWNSPTRTHGTFGREPAAVKPDDDRYLRAAIQEYDNIAKLGQIIREGPIKGSLLKVVLEDYLRLKKLFAQRMVQKASSCHSSISELIQTELDEEPGDHSPGQGSLRFRHKPPVELKGPDGIHVVHGSTGTLLATDLNSLPEEDQKGLGRSLETLTAAEATAFERNARTESAKSTPLHKLRDVIMETPLEITEL

SEQ ID NO: 2312 - protein, 3439 aa, Homo sapiens
LGRAQSEPPARLKLRAASGERRAARGDPGAAGTPRMSLRAGGKTRRWPGPEQAARGGRSGGEQSPRRGEARRRCTHAHGAMGRHVATSCHVAWLLVLISGCWGQVNRLPFFTNHFFDTYLLISEDTPVGSSVTQLLAQDMDNDPLVFGVSGEEASRFFAVEPDTGVVWLRQPLDRETKSEFTVEFSVSDHQGVITRKVNIQVGDVNDNAPTFHNQPYSVRIPEVGATGNTPVGTPIFIVNATDPDLGAGGSVLYSFQPPSQFFAIDSARGIVTVIRELDYETTQAYQLTVNATDQDKTRPLSTLANLAIIITDVQDMDPIFINLPYSTNIYEHSPPGTTVRIITAIDQDKGRPRGIGYTIVSGNTNSIFALDYISGVLTLNGLLDRENPLYSHGFILTVKGTELNDDRTPSDATVTTTFNILVIDINDNAPEFNSSEYSVAITELAQVGFALPLFIQVVDKDENLGLNSMFEVYLVGNNSHHFIISPTSVQGKADIRIRVAIPLDYETVDRYDFDLFANESVPDHVGYAKVKITLINENDNRPIFSQPLYNISLYENVTVGTSVLTVLATDNDAGTFGEVSYFFSDDPDRFSLDKDTGLIMLIARLDYELIQRFTLTIIARDGGGEETTGRVRINVLDVNDNVPTFQKDAYVGALRENEPSVTQLVRLRATDEDSPPNNQITYSIVSASAFGSYFDISLYEGYGVISVSRPLDYEQISNGLIYLTVMAMDAGNPPLNSTVPVTIEVFDENDNPPTFSKPAYFVSVVENIMAGATVLFLNATDLDRSREYGQESIIYSLEGSTQFRINARSGEITTTSLLDRETKSEYILIVRAVDGGVGHNQKTGIATVNITLLDINDNHPTWKDAPYYINLVEMTPPDSDVTTVVAVDPDLGENGTLVYSIQPPNKFYSLNSTTGKIRTTHAMLDRENPDPHEAELMRKIVVSVTDCGRPPLKATSSATVFVNLLDLNDNDPTFQNLPFVAEVLEGIPAGVSIYQVVAIDLDEGLNGLVSYRMPVGMPRMDFLINSSSGVVVTTTELDRERIAEYQLRVVASDAGTPTKSSTSTLTIHVLDVNDETPTFFPAVYNVSVSEDVPREFRVVWLNCTDNDVGLNAELSYFITGGNVDGKFSVGYRDAVVRTVVGLDRETTAAYMLILEAIDNGPVGKRHTGTATVFVTVLDVNDNRPIFLQSSYEASVPEDIPEGHSILQLKATDADEGEFGRVWYRILHGNHGNNFRIHVSNGLLMRGPRPLDRERNSSHVLIVEAYNHDLGPMRSSVRVIVYVEDINDEAPVFTQQQYSRLGLRETAGIGTSVIVVQATDRDSGDGGLVNYRILSGAEGKFEIDESTGLIITVNYLDYETKTSYMMNVSATDQAPPFNQGFCSVYITLLNELDEAVQFSNASYEAAILENLALGTEIVRVQAYSIDNLNQITYRFNAYTSTQAKALFKIDAITGVITVQGLVDREKGDFYTLTVVADDGGPKVDSTVKVYITVLDENDNSPRFDFTSDSAVSIPEDCPVGQRVATVKAWDPDAGSNGQVVFSLASGNIAGAFEIVTTNDSIGEVFVARPLDREELDHYILQVVASDRGTPPRKKDHILQVTILDINDNPPVIESPFGYNVSVNENVGGGTAVVQVRATDRDIGINSVLSYYITEGNKDMAFRMDRISGEIATRPAPPDRERQSFYHLVATVEDEGTPTLSATTHVYVTIVDENDNAPMFQQPHYEVLLDEGPDTLNTSLITIQALDLDEGPNGTVTYAIVAGNIVNTFRIDRHMGVITAAKELDYEISHGRYTLIVTATDQCPILSHRLTSTTTVLVNVNDINDNVPTFPRDYEGPFEVTEGQPGPRVWTFLAHDRDSGPNGQVEYSIMDGDPLGEFVISPVEGVLRVRKDVELDRETIAFYNLTICARDRGMPPLSSTMLVGIRVLDINDNDPVLLNLPMNITISENSPVSSFVAHVLASDADSGCNARLTFNITAGNRERAFFINATTGIVTVNRPLDRERIPEYKLTISVKDNPENPRIARRDYDLLLIFLSDENDNHPLFTKSTYQAEVMENSPAGTPLTVLNGPILALDADQDIYAVVTYQLLGAQSGLFDINSSTGVVTVRSGVIIDREAFSPPILELLLLAEDIGLLNSTAHLLITILDDNDNRPTFSPATLTVHLLENCPPGFSVLQVTATDEDSGLNGELVYRIEAGAQDRFLIHLVTGVIRVGNATIDREEQESYRLTVVATDRGTVPLSGTAIVTILIDDINDSRPEFLNPIQTVSVLESAEPGTVIANITAIDHDLNPKLEYHIVGIVAKDDTDRLVPNQEDAFAVNINTGSVMVKSPMNRELVATYEVTLSVIDNASDLPERSVSVPNAKLTVNVLDVNDNTPQFKPFGITYYMERILEGATPGTTLIAVAAVDPDKGLNGLVTYTLLDLVPPGYVQLEDSSAGKVIANRTVDYEEVHWLNFTVRASDNGSPPRAAEIPVYLEIVDINDNNPIFDQPSYQEAVFEDVPVGTIILTVTATDADSGNFALIEYSLGDGESKFAINPTTGDIYVLSSLDREKKDHYILTALAKDNPGDVASNRRENSVQVVIQVLDVNDCRPQFSKPQFSTSVYENEPAGTSVITMMATDQDEGPNGELTYSLEGPGVEAFHVDMDSGLVTTQRPLQSYEKFSLTVVATDGGEPPLWGTTMLLVEVIDVNDNRPVFVRPPNGTILHIREEIPLRSNVYEVYATDKDEGLNGAVRYSFLKTAGNRDWEFFIIDPISGLIQTAQRLDRESQAVYSLILVASDLGQPVPYETMQPLQVALEDIDDNEPLFVRPPKGSPQYQLLTVPEHSPRGTLVGNVTGAVDADEGPNAIVYYFIAAGNEEKNFHLQPDGCLLVLRDLDREREAIFSFIVKASSNRSWTPPRGPSPTLDLVADLTLQEVRVVLEDINDQPPRFTKAEYTAGVATDAKVGSELIQVLALDADIGNNSLVFYSILAIHYFRALANDSEDVGQVFTMGSMDGILRTFDLFMAYSPGYFVVDIVARDLAGHNDTAIIGIYILRDDQRVKIVINEIPDRVRGFEEEFIHLLSNITGAIVNTDNVQFHVDKKGRVNFAQTELLIHVVNRDTNRILDVDRVIQMIDENKEQLRNLFRNYNVLDVQPAISVRLPDDMSALQMAIIVLAILLFLAAMLFVLMNWYYRTVHKRKLKAIVAGSAGNRGFIDIMDMPNTNKYSFDGANPVWLDPFCRNLELAAQAEHEDDLPENLSEIADLWNSPTRTHGTFGREPAAVKPDDDRYLRAAIQEYDNIAKLGQIIREGPIKGSLLKVVLEDYLRLKKLFAQRMVQKASSCHSSISELIQTELDEEPGDHSPGQGSLRFRHKPPVELKGPDGIHVVHGSTGTLLATDLNSLPEEDQKGLGRSLETLTAAEATAFERNARTESAKSTPLHKLRDVIMETPLEITEL

SEQ ID NO: 2313 - protein, 1139 aa, Homo sapiens
VTQAYEEAVGPPQPQVPDSTGDRHPLWGLGGFGQEHPWEGQILGGSSQAEPGLVWSTGSVMVKSPMNRELVATYEVTLSVIDNASDLPERSVSVPNAKLTVNVLDVNDNTPQFKPFGITYYMERILEGATPGTTLIAVAAVDPDKGLNGLVTYTLLDLVPPGYVQLEDSSAGKVIANRTVDYEEVHWLNFTVRASDNGSPPRAAEIPVYLEIVDINDNNPIFDQPSYQEAVFEDVPVGTIILTVTATDADSGNFALIEYSLGDGESKFAINPTTGDIYVLSSLDREKKDHYILTALAKDNPGDVASNRRENSVQVVIQVLDVNDCRPQFSKPQFSTSVYENEPAGTSVITMMATDQDEGPNGELTYSLEGPGVEAFHVDMDSGLVTTQRPLQSYEKFSLTVVATDGGEPPLWGTTMLLVEVIDVNDNRPVFVRPPNGTILHIREEIPLRSNVYEVYATDKDEGLNGAVRYSFLKTAGNRDWEFFIIDPISGLIQTAQRLDRESQAVYSLILVASDLGQPVPYETMQPLQVALEDIDDNEPLFVRPPKGSPQYQLLTVPEHSPRGTLVGNVTGAVDADEGPNAIVYYFIAAGNEEKNFHLQPDGCLLVLRDLDREREAIFSFIVKASSNRSWTPPRGPSPTLDLVADLTLQEVRVVLEDINDQPPRFTKAEYTAGVATDAKVGSELIQVLALDADIGNNSLVFYSILAIHYFRALANDSEDVGQVFTMGSMDGILRTFDLFMAYSPGYFVVDIVARDLAGHNDTAIIGIYILRDDQRVKIVINEIPDRVRGFEEEFIHLLSNITGAIVNTDNVQFHVDKKGRVNFAQTELLIHVVNRDTNRILDVDRVIQMIDENKEQLRNLFRNYNVLDVQPAISVRLPDDMSALQMAIIVLAILLFLAAMLFVLMNWYYRTVHKRKLKAIVAGSAGNRGFIDIMDMPNTNKYSFDGANPVWLDPFCRNLELAAQAEHEDDLPENLSEIADLWNSPTRTHGTFGREPAAVKPDDDRYLRAAIQEYDNIAKLGQIIREGPIKLIQTELDEEPGDHSPGQGSLRFRHKPPVELKGPDGIHVVHGSTGTLLATDLNSLPEEDQKGLGRSLETLTAAEATAFERNARTESAKSTPLHKLRDVIMETPLEITEL

SEQ ID NO: 2314 - protein, 74 aa, Homo sapiens
LPPPRADSASQKMHYYRYSNAKVSCWYKYLLFSYNIIFWLAGVVFLGVGLWAWSEKCCPAFSVSFRVCCPTSPK

SEQ ID NO: 2315 - protein, 171 aa, Homo sapiens
LPPPRADSASQKMHYYRYSNAKVSCWYKYLLFSYNIIFWLAGVVFLGVGLWAWSEKGVLSDLTKVTRMHGIDPVVLVLMVGVVMFTLGFAGCVGALRENICLLNFFCGTIVLIFFLELAVAVLAFLFQDWVRDRFREFFESNIKSYRDDIDLQNLIDSLQKAVSTSPAGPR

SEQ ID NO: 2316 - protein, 282 aa, Homo sapiens
LPPPRADSASQKMHYYRYSNAKVSCWYKYLLFSYNIIFWLAGVVFLGVGLWAWSEKGVLSDLTKVTRMHGIDPVVLVLMVGVVMFTLGFAGCVGALRENICLLNFFCGTIVLIFFLELAVAVLAFLFQDWVRDRFREFFESNIKSYRDDIDLQNLIDSLQKANQCCGAYGPEDWDLNVYFNCSGASYSREKCGVPFSCCVPDPAQKVVNTQCGYDVRIQLKSKWDESIFTKGCIQALESWLPRNIYIVAGVFIAISLLQIFGIFLARTLISDIEAVKAGHHF

SEQ ID NO: 2317 - protein, 159 aa, Homo sapiens
LPPPRADSASQKMHYYRYSNAKVSCWYKYLLFSYNIIFWNQCCGAYGPEDWDLNVYFNCSGASYSREKCGVPFSCCVPDPAQKVVNTQCGYDVRIQLKSKWDESIFTKGCIQALESWLPRNIYIVAGVFIAISLLQIFGIFLARTLISDIEAVKAGHHF

SEQ ID NO: 2318 - protein, 265 aa, Homo sapiens
LPPPRADSASQKMHYYRYSNAKVSCWYKYLLFSYNIIFWGVLSDLTKVTRMHGIDPVVLVLMVGVVMFTLGFAGCVGALRENICLLNFFCGTIVLIFFLELAVAVLAFLFQDWVRDRFREFFESNIKSYRDDIDLQNLIDSLQKANQCCGAYGPEDWDLNVYFNCSGASYSREKCGVPFSCCVPDPAQKVVNTQCGYDVRIQLKSKWDESIFTKGCIQALESWLPRNIYIVAGVFIAISLLQIFGIFLARTLISDIEAVKAGHHF

SEQ ID NO: 2319 - protein, 105 aa, Homo sapiens
LPASWIPRSHPALPCSLPELTRGSGGDIVCAKGSDPCGVFLQLKSKWDESIFTKGCIQALESWLPRNIYIVAGVFIAISLLQIFGIFLARTLISDIEAVKAGHHF

SEQ ID NO: 2320 - protein, 464 aa, Homo sapiens
LPGAAGGGPWWFGLSRARPGRRVGGGGSERRQRLRGSVWLTGESAGGRKNDNSRHLFSVTTLAGVSLLVFVGQIDIWPGFPLLHPSRSFIQQIFIEYFHEPGTMRGQRSLLLGPARLCLRLLLLLGYRRRCPPLLRGLVQRWRYGKVCLRSLLYNSFGGSDTAVDAAFEPVYWLVDNVIRWFGVVFVVLVIVLTGSIVAIAYLCVLPLILRTYSVPRLCWHFFYSHWNLILIVFHYYQAITTPPGYPPQGRNDIATVSICKKCIYPKPARTHHCSICNRCVLKMDHHCPWLNNCVGHYNHRYFFSFCFFMTLGCVYCSYGSWDLFREAYAAIETYHQTPPPTFSFRERMTHKSLVYLWFLCSSVALALGALTVWHAVLISRGETSIERHINKKERRRLQAKGRVFRNPYNYGCLDNWKVFLGVDTGRHWLTRVLLPSSHLPHGNGMSWEPPPWVTAHSASVMAV

SEQ ID NO: 2321 - protein, 241 aa, Homo sapiens
LADWGVGRRQGRNDIATVSICKKCIYPKPARTHHCSICNRCVLKMDHHCPWLNNCVGHYNHRYFFSFCFFMTLGCVYCSYGSWDLFREAYAAIEKMKQLDKNKLQAVANQTYHQTPPPTFSFRERMTHKSLVYLWFLCSSVALALGALTVWHAVLISRGETSIERHINKKERRRLQAKGRVFRNPYNYGCLDNWKVFLGVDTGRHWLTRVLLPSSHLPHGNGMSWEPPPWVTAHSASVMAV

SEQ ID NO: 2322 - protein, 386 aa, Homo sapiens
LGSRQAAGTMRGQRSLLLGPARLCLRLLLLLGYRRRCPPLLRGLVQRWRYGKVCLRSLLYNSFGGSDTAVDAAFEPVYWLVDNVIRWFGVVFVVLVIVLTGSIVAIAYLCVLPLILRTYSVPRLCWHFFYSHWNLILIVFHYYQAITTPPGYPPQGRNDIATVSICKKCIYPKPARTHHCSICNRCVLKMDHHCPWLNNCVGHYNHRYFFSFCFFMTLGCVYCSYGSWDLFREAYAAIEKMKQLDKNKLQAVANQTYHQTPPPTFSFRERMTHKSLVYLWFLCSSVALALGALTVWHAVLISRGETSIERHINKKERRRLQAKGRVFRNPYNYGCLDNWKVFLGVDTGRHWLTRVLLPSSHLPHGNGMSWEPPPWVTAHSASVMAV

SEQ ID NO: 2323 - protein, 370 aa, Homo sapiens
LGSRQAAGTMRGQRSLLLGPARLCLRLLLLLGYRRRCPPLLRGLVQRWRYGKVCLRSLLYNSFGGSDTAVDAAFEPVYWLVDNVIRWFGVVFVVLVIVLTGSIVAIAYLCVLPLILRTYSVPRLCWHFFYSHWNLILIVFHYYQAITTPPGYPPQGRNDIATVSICKKCIYPKPARTHHCSICNRCVLKMDHHCPWLNNCVGHYNHRYFFSFCFFMTLGCVYCSYGSWDLFREAYAAIETYHQTPPPTFSFRERMTHKSLVYLWFLCSSVALALGALTVWHAVLISRGETSIERHINKKERRRLQAKGRVFRNPYNYGCLDNWKVFLGVDTGRHWLTRVLLPSSHLPHGNGMSWEPPPWVTAHSASVMAV

SEQ ID NO: 2324 - protein, 347 aa, Homo sapiens
LGSRQAAGTMRGQRSLLLGPARLCLRLLLLLGYRRRCPPLLRGLVQRWRYGKVCLRSLLYNSFGGSDTAVDAAFEPVYWLVDNVIRWFGVVFVVLVIVLTGSIVAIAYLCVLPLILRTYSVPRLCWHFFYSHWNLILIVFHYYQAITTPPGYPPQGRNDIATVSICKKCIYPKPARTHHCSICNSYGSWDLFREAYAAIEKMKQLDKNKLQAVANQTYHQTPPPTFSFRERMTHKSLVYLWFLCSSVALALGALTVWHAVLISRGETSIERHINKKERRRLQAKGRVFRNPYNYGCLDNWKVFLGVDTGRHWLTRVLLPSSHLPHGNGMSWEPPPWVTAHSASVMAV

SEQ ID NO: 2325 - protein, 305 aa, Homo sapiens
LGSRQAAGTMRGQRSLLLGPARLCLRLLLLLGYRRRCPPLLRGLVQRWRYGKVCLRSLLYNSFGGSDTAVDAAFEPVYWLVDNVIRWFGVGRNDIATVSICKKCIYPKPARTHHCSICNRCVLKMDHHCPWLNNCVGHYNHRYFFSFCFFMTLGCVYCSYGSWDLFREAYAAIETYHQTPPPTFSFRERMTHKSLVYLWFLCSSVALALGALTVWHAVLISRGETSIERHINKKERRRLQAKGRVFRNPYNYGCLDNWKVFLGVDTGRHWLTRVLLPSSHLPHGNGMSWEPPPWVTAHSASVMAV

SEQ ID NO: 2326 - protein, 214 aa, Homo sapiens
LATVTEPVSLPHRCVLKMDHHCPWLNNCVGHYNHRYFFSFCFFMTLGCVYCSYGSWDLFREAYAAIEKMKQLDKNKLQAVANQTYHQTPPPTFSFRERMTHKSLVYLWFLCSSVALALGALTVWHAVLISRGETSIERHINKKERRRLQAKGRVFRNPYNYGCLDNWKVFLGVDTGRHWLTRVLLPSSHLPHGNGMSWEPPPWVTAHSASVMAV

SEQ ID NO: 2327 - protein, 162 aa, Homo sapiens
MTLGCVYCSYGSWDLFREAYAAIETYHQTPPPTFSFRERMTHKSLVYLWFLCSLRPSFLSSVALALGALTVWHAVLISRGETSIERHINKKERRRLQAKGRVFRNPYNYGCLDNWKVFLGVDTGRHWLTRVLLPSSHLPHGNGMSWEPPPWVTAHSASVMAV

SEQ ID NO: 2328 - protein, 524 aa, Homo sapiens
LQYFLGGQNFLGVIFFGFSSSFIFLPKLLLVGEKKMPQLNGGGGDDLGANDELISFKDEGEQEEKSSENSSAERDLADVKSSLVNESETNQNSSSDSEAERRPPPRSESFRDKSRESLEEAAKRQDGGLFKGPPYPGYPFIMIPDLTSPYLPNGSLSPTARTYLQMKWPLLDVQAGSLQSRQALKDARSPSPAHIVSPLPCCTQGHDCQHFYPPSDFTVSTQVFRDMKRSHSLQKVGEPWCIESNKVPVVQHPHHVHPLTPLITYSNEHFTPGNPPPHLPADVDPKTGIPRPPHPPDISPYYPLSPGTVGQIPHPLGWLVPQQGQPVYPITTGGFRHPYPTALTVNASMSRFPPHMVPPHHTLHTTGIPHPAIVTPTVKQESSQSDVGSLHSSKHQDSKKEEEKKKPHIKKPLNAFMLYMKEMRAKVVAECTLKESAAINQILGRRWHALSREEQAKYYELARKERQLHMQLYPGWSARDNYGKKKKRKRDKQPGETNGEKKSAFATYKVKAAASAHPLQMEAY

SEQ ID NO: 2329 - protein, 507 aa, Homo sapiens
LGGQNFLGVIFFGFSSSFIFLPKLLLVGEKKMPQLNGGGGDDLGANDELISFKDEGEQEEKSSENSSAERDLADVKSSLVNESETNQNSSSDSEAERRPPPRSESFRDKSRESLEEAAKRQDGGLFKGPPYPGYPFIMIPDLTSPYLPNGSLSPTARTYLQMKWPLLDVQAGSLQSRQALKDARSPSPAHIVSNKVPVVQHPHHVHPLTPLITYSNEHFTPGNPPPHLPADVDPKTGIPRPPHPPDISPYYPLSPGTVGQIPHPLGWLVPQQGQPVYPITTGGFRHPYPTALTVNASMSSFLSSRFPPHMVPPHHTLHTTGIPHPAIVTPTVKQESSQSDVGSLHSSKHQDSKKEEEKKKPHIKKPLNAFMLYMKEMRAKVVAECTLKESAAINQILGRRWHALSREEQAKYYELARKERQLHMQLYPGWSARDNYGKKKKRKRDKQPGETNEHSECFLNPCLSLPPITDLSAPKKCRARFGLDQQNNWCGPCRCKYSKEVSGTVRA

SEQ ID NO: 2330 - protein, 490 aa, Homo sapiens
LGGQNFLGVIFFGFSSSFIFLPKLLLVGEKKMPQLNGGGGDDLGANDELISFKDEGEQEEKSSENSSAERDLADVKSSLVNESETNQNSSSDSEAERRPPPRSESFRDKSRESLEEAAKRQDGGLFKGPPYPGYPFIMIPDLTSPYLPNGSLSPTARTYLQMKWPLLDVQAGSLQSRQALKDARSPSPAHIVSNKVPVVQHPHHVHPLTPLITYSNEHFTPGNPPPHLPADVDPKTGIPRPPHPPDISPYYPLSPGTVGQIPHPLGWLVPQQGQPVYPITTGGFRHPYPTALTVNASMSRFPPHMVPPHHTLHTTGIPHPAIVTPTVKQESSQSDVGSLHSSKHQDSKKEEEKKKPHIKKPLNAFMLYMKEMRAKVVAECTLKESAAINQILGRRWHALSREEQAKYYELARKERQLHMQLYPGWSARDNYGKKKKRKRDKQPGETNEHSECFLNPCLSLPPITDLSAPKKCRARFGLDQQNNWCGPCSL

SEQ ID NO: 2331 - protein, 486 aa, Homo sapiens
LGGQNFLGVIFFGFSSSFIFLPKLLLVGEKKMPQLNGGGGDDLGANDELISFKDEGEQEEKSSENSSAERDLADVKSSLVNESETNQNSSSDSEAERRPPPRSESFRDKSRESLEEAAKRQDGGLFKGPPYPGYPFIMIPDLTSPYLPNGSLSPTARTYLQMKWPLLDVQAGSLQSRQALKDARSPSPAHIVSNKVPVVQHPHHVHPLTPLITYSNEHFTPGNPPPHLPADVDPKTGIPRPPHPPDISPYYPLSPGTVGQIPHPLGWQGQPVYPITTGGFRHPYPTALTVNASMSRFPPHMVPPHHTLHTTGIPHPAIVTPTVKQESSQSDVGSLHSSKHQDSKKEEEKKKPHIKKPLNAFMLYMKEMRAKVVAECTLKESAAINQILGRRWHALSREEQAKYYELARKERQLHMQLYPGWSARDNYGKKKKRKRDKQPGETNEHSECFLNPCLSLPPITDLSAPKKCRARFGLDQQNNWCGPCSL

SEQ ID NO: 2332 - protein, 538 aa, Homo sapiens
VRALARARRTRAGIASDPERSPGAMALSELALVRWLQESRRSRKLILFIVFLALLLDNMLLTVVVPIIPSYLYSIKHEKNATEIQTARPVHTASISDSFQSIFSYYDNSTMVTGNATRDLTLHQTATQHMVTNASAVPSDCPSEDKDLLNENVQVGLLFASKATVQLITNPFIGLLTNRIGYPIPIFAGFCIMFVSTIMFAFSSSYAFLLIARSLQGIGSSCSSVAGMGMLASVYTDDEERGNVMGIALGGLAMGVLVGPPFGSVLYEFVGKTAPFLVLAALVLLDGAIQLFVLQPSRVQPESQKGTPLTTLLKDPYILIAAGSICFANMGIAMLEPALPIWMMETMCSRKWQLGVAFLPASISYLIGTNIFGILAHKMGRWLCALLGMIIVGVSILCIPFAKNIYGLIAPNFGVGFAIGMVDSSMMPIMGYLVDLRHVSVYGSVYAIADVAFCMGYAIGPSAGGAIAKAIGFPWLMTIIGIIDILFAPLCFFLRSPPAKEEKMAILMDHNCPIKTKMYTQNNIQSYPIGEDEESESD

SEQ ID NO: 2333 - protein, 377 aa, Homo sapiens
LVVVGVLGILGEGTHFPLGFCLVLHFSESDRFGKITRLAGEGRRVTHYSFAVPRSWPVDYFFPCVGMGMLASVYTDDEERGNVMGIALGGLAMGVLVGPPFGSVLYEFVGKTAPFLVLAALVLLDGAIQLFVLQPSRVQPESQKGTPLTTLLKDPYILIAAGSICFANMGIAMLEPALPIWMMETMCSRKWQLGVAFLPASISYLIGTNIFGILAHKMGRWLCALLGMIIVGVSILCIPFAKNIYGLIAPNFGVGFAIGMVDSSMMPIMGYLVDLRHVSVYGSVYAIADVAFCMGYAIGPSAGGAIAKAIGFPWLMTIIGIIDILFAPLCFFLRSPPAKEEKMAILMDHNCPIKTKMYTQNNIQSYPIGEDEESESD

SEQ ID NO: 2334 - protein, 741 aa, Homo sapiens
LKALRVVHARRGSVQMGLTSTWRYGRGPGIGTVTMVSWGRFICLVVVTMATLSLARPSFSLVEDTTLEPEDAISSGDDEDDTDGAEDFVSENSNNKRAPYWTNTEKMEKRLHAVPAANTVKFRCPAGGNPMPTMRWLKNGKEFKQEHRIGGYKVRNQHWSLIMESVVPSDKGNYTCVVENEYGSINHTYHLDVVERSPHRPILQAGLPANASTVVGGDVEFVCKVYSDAQPHIQWIKHVEKNGSKYGPDGLPYLKVLKAAGVNTTDKEIEVLYIRNVTFEDAGEYTCLAGNSIGISFHSAWLTVLPAPGREKEITASPDYLEIAIYCIGVFLIACMVVTVILCRMKNTTKKPDFSSQPAVHKLTKRIPLRRQVTVSAESSSSMNSNTPLVRITTRLSSTADTPMLAGVSEYELPEDPKWEFPRDKLTLGKPLGEGCFGQVVMAEAVGIDKDKPKEAVTVAVKMLKDDATEKDLSDLVSEMEMMKMIGKHKNIINLLGACTQDGPLYVIVEYASKGNLREYLRARRPPGMEYSYDINRVPEEQMTFKDLVSCTYQLARGMEYLASQKCIHRDLAARNVLVTENNVMKIADFGLARDINNIDYYKKTTNGRLPVKWMAPEALFDRVYTHQSDVWSFGVLMWEIFTLGGSPYPGIPVEELFKLLKEGHRMDKPANCTNELYMMMRDCWHAVPSQRPTFKQLVEDLDRILTLTTNEEEKKVSGAVDCHKPPCNPSHLPCVLAVDQ

SEQ ID NO: 2335 - protein, 766 aa, Homo sapiens
LKALRVVHARRGSVQMGLTSTWRYGRGPGIGTVTMVSWGRFICLVVVTMATLSLARPSFSLVEDTTLEPEDAISSGDDEDDTDGAEDFVSENSNNKRAPYWTNTEKMEKRLHAVPAANTVKFRCPAGGNPMPTMRWLKNGKEFKQEHRIGGYKVRNQHWSLIMESVVPSDKGNYTCVVENEYGSINHTYHLDVVERSPHRPILQAGLPANASTVVGGDVEFVCKVYSDAQPHIQWIKHVEKNGSKYGPDGLPYLKVLKAAGVNTTDKEIEVLYIRNVTFEDAGEYTCLAGNSIGISFHSAWLTVLPAPGREKEITASPDYLEIAIYCIGVFLIACMVVTVILCRMKNTTKKPDFSSQPAVHKLTKRIPLRRQVTVSAESSSSMNSNTPLVRITTRLSSTADTPMLAGVSEYELPEDPKWEFPRDKLTLGKPLGEGCFGQVVMAEAVGIDKDKPKEAVTVAVKMLKDDATEKDLSDLVSEMEMMKMIGKHKNIINLLGACTQDGPLYVIVEYASKGNLREYLRARRPPGMEYSYDINRVPEEQMTFKDLVSCTYQLARGMEYLASQKCIHRDLAARNVLVTENNVMKIADFGLARDINNIDYYKKTTNGRLPVKWMAPEALFDRVYTHQSDVWSFGVLMWEIFTLGGSPYPGIPVEELFKLLKEGHRMDKPANCTNELYMMMRDCWHAVPSQRPTFKQLVEDLDRILTLTTNEEYLDLSQPLEQYSPSYPDTRSSCSSGDDSVFSPDPMPYEPCLPQYPHINGSVKT

SEQ ID NO: 2336 - protein, 855 aa, Homo sapiens
LKALRVVHARRGSVQMGLTSTWRYGRGPGIGTVTMVSWGRFICLVVVTMATLSLARPSFSLVEDTTLEPEEPPTKYQISQPEVYVAAPGESLEVRCLLKDAAVISWTKDGVHLGPNNRTVLIGEYLQIKGATPRDSGLYACTASRTVDSETWYFMVNVTDAISSGDDEDDTDGAEDFVSENSNNKRAPYWTNTEKMEKRLHAVPAANTVKFRCPAGGNPMPTMRWLKNGKEFKQEHRIGGYKVRNQHWSLIMESVVPSDKGNYTCVVENEYGSINHTYHLDVVERSPHRPILQAGLPANASTVVGGDVEFVCKVYSDAQPHIQWIKHVEKNGSKYGPDGLPYLKVLKAAGVNTTDKEIEVLYIRNVTFEDAGEYTCLAGNSIGISFHSAWLTVLPAPGREKEITASPDYLEIAIYCIGVFLIACMVVTVILCRMKNTTKKPDFSSQPAVHKLTKRIPLRRQVTVSAESSSSMNSNTPLVRITTRLSSTADTPMLAGVSEYELPEDPKWEFPRDKLTLGKPLGEGCFGQVVMAEAVGIDKDKPKEAVTVAVKMLKDDATEKDLSDLVSEMEMMKMIGKHKNIINLLGACTQDGPLYVIVEYASKGNLREYLRARRPPGMEYSYDINRVPEEQMTFKDLVSCTYQLARGMEYLASQKCIHRDLAARNVLVTENNVMKIADFGLARDINNIDYYKKTTNGRLPVKWMAPEALFDRVYTHQSDVWSFGVLMWEIFTLGGSPYPGIPVEELFKLLKEGHRMDKPANCTNELYMMMRDCWHAVPSQRPTFKQLVEDLDRILTLTTNEEYLDLSQPLEQYSPSYPDTRSSCSSGDDSVFSPDPMPYEPCLPQYPHINGSVKT

SEQ ID NO: 2337 - protein, 738 aa, Homo sapiens
LKALRVVHARRGSVQMGLTSTWRYGRGPGIGTVTMVSWGRFICLVVVTMATLSLARPSFSLVEDTTLEPEGAPYWTNTEKMEKRLHAVPAANTVKFRCPAGGNPMPTMRWLKNGKEFKQEHRIGGYKVRNQHWSLIMESVVPSDKGNYTCVVENEYGSINHTYHLDVVERSPHRPILQAGLPANASTVVGGDVEFVCKVYSDAQPHIQWIKHVEKNGSKYGPDGLPYLKVLKAAGVNTTDKEIEVLYIRNVTFEDAGEYTCLAGNSIGISFHSAWLTVLPAPGREKEITASPDYLEIAIYCIGVFLIACMVVTVILCRMKNTTKKPDFSSQPAVHKLTKRIPLRRQVSAESSSSMNSNTPLVRITTRLSSTADTPMLAGVSEYELPEDPKWEFPRDKLTLGKPLGEGCFGQVVMAEAVGIDKDKPKEAVTVAVKMLKDDATEKDLSDLVSEMEMMKMIGKHKNIINLLGACTQDGPLYVIVEYASKGNLREYLRARRPPGMEYSYDINRVPEEQMTFKDLVSCTYQLARGMEYLASQKCIHRDLAARNVLVTENNVMKIADFGLARDINNIDYYKKTTNGRLPVKWMAPEALFDRVYTHQSDVWSFGVLMWEIFTLGGSPYPGIPVEELFKLLKEGHRMDKPANCTNELYMMMRDCWHAVPSQRPTFKQLVEDLDRILTLTTNEEYLDLSQPLEQYSPSYPDTRSSCSSGDDSVFSPDPMPYEPCLPQYPHINGSVKT

SEQ ID NO: 2338 - protein, 741 aa, Homo sapiens
LKALRVVHARRGSVQMGLTSTWRYGRGPGIGTVTMVSWGRFICLVVVTMATLSLARPSFSLVEDTTLEPEGAPYWTNTEKMEKRLHAVPAANTVKFRCPAGGNPMPTMRWLKNGKEFKQEHRIGGYKVRNQHWSLIMESVVPSDKGNYTCVVENEYGSINHTYHLDVVERSPHRPILQAGLPANASTVVGGDVEFVCKVYSDAQPHIQWIKHVEKNGSKYGPDGLPYLKVLKHSGINSSNAEVLALFNVTEADAGEYICKVSNYIGQANQSAWLTVLPKQQAPGREKEITASPDYLEIAIYCIGVFLIACMVVTVILCRMKNTTKKPDFSSQPAVHKLTKRIPLRRQVTVSAESSSSMNSNTPLVRITTRLSSTADTPMLAGVSEYELPEDPKWEFPRDKLTLGKPLGEGCFGQVVMAEAVGIDKDKPKEAVTVAVKMLKDDATEKDLSDLVSEMEMMKMIGKHKNIINLLGACTQDGPLYVIVEYASKGNLREYLRARRPPGMEYSYDINRVPEEQMTFKDLVSCTYQLARGMEYLASQKCIHRDLAARNVLVTENNVMKIADFGLARDINNIDYYKKTTNGRLPVKWMAPEALFDRVYTHQSDVWSFGVLMWEIFTLGGSPYPGIPVEELFKLLKEGHRMDKPANCTNELYMMMRDCWHAVPSQRPTFKQLVEDLDRILTLTTNEEYLDLSQPLEQYSPSYPDTRSSCSSGDDSVFSPDPMPYEPCLPQYPHINGSVKT

SEQ ID NO: 2339 - protein, 856 aa, Homo sapiens
LKALRVVHARRGSVQMGLTSTWRYGRGPGIGTVTMVSWGRFICLVVVTMATLSLARPSFSLVEDTTLEPEEPPTKYQISQPEVYVAAPGESLEVRCLLKDAAVISWTKDGVHLGPNNRTVLIGEYLQIKGATPRDSGLYACTASRTVDSETWYFMVNVTDAISSGDDEDDTDGAEDFVSENSNNKRAPYWTNTEKMEKRLHAVPAANTVKFRCPAGGNPMPTMRWLKNGKEFKQEHRIGGYKVRNQHWSLIMESVVPSDKGNYTCVVENEYGSINHTYHLDVVERSPHRPILQAGLPANASTVVGGDVEFVCKVYSDAQPHIQWIKHVEKNGSKYGPDGLPYLKVLKHSGINSSNAEVLALFNVTEADAGEYICKVSNYIGQANQSAWLTVLPKQQAPGREKEITASPDYLEIAIYCIGVFLIACMVVTVILCRMKNTTKKPDFSSQPAVHKLTKRIPLRRQVTVSAESSSSMNSNTPLVRITTRLSSTADTPMLAGVSEYELPEDPKWEFPRDKLTLGKPLGEGCFGQVVMAEAVGIDKDKPKEAVTVAVKMLKDDATEKDLSDLVSEMEMMKMIGKHKNIINLLGACTQDGPLYVIVEYASKGNLREYLRARRPPGMEYSYDINRVPEEQMTFKDLVSCTYQLARGMEYLASQKCIHRDLAARNVLVTENNVMKIADFGLARDINNIDYYKKTTNGRLPVKWMAPEALFDRVYTHQSDVWSFGVLMWEIFTLGGSPYPGIPVEELFKLLKEGHRMDKPANCTNELYMMMRDCWHAVPSQRPTFKQLVEDLDRILTLTTNEEYLDLSQPLEQYSPSYPDTRSSCSSGDDSVFSPDPMPYEPCLPQYPHINGSVKT

SEQ ID NO: 2340 - protein, 714 aa, Homo sapiens
LKALRVVHARRGSVQMGLTSTWRYGRGPGIGTVTMVSWGRFICLVVVTMATLSLARPSFSLVEDTTLEPEDAISSGDDEDDTDGAEDFVSENSNNKRAPYWTNTEKMEKRLHAVPAANTVKFRCPAGGNPMPTMRWLKNGKEFKQEHRIGGYKVRNQHWSLIMESVVPSDKGNYTCVVENEYGSINHTYHLDVVERSPHRPILQAGLPANASTVVGGDVEFVCKVYSDAQPHIQWIKHVEKNGSKYGPDGLPYLKVLKHSGINSSNAEVLALFNVTEADAGEYICKVSNYIGQANQSAWLTVLPKQQAPGREKEITASPDYLEIAIYCIGVFLIACMVVTVILCRMKNTTKKPDFSSQPAVHKLTKRIPLRRQVTVSAESSSSMNSNTPLVRITTRLSSTADTPMLAGVSEYELPEDPKWEFPRDKLTLGKPLGEGCFGQVVMAEAVGIDKDKPKEAVTVAVKMLKDDATEKDLSDLVSEMEMMKMIGKHKNIINLLGACTQDGPLYVIVEYASKGNLREYLRARRPPGMEYSYDINRVPEEQMTFKDLVSCTYQLARGMEYLASQKCIHRDLAARNVLVTENNVMKIADFGLARDINNIDYYKKTTNGRLPVKWMAPEALFDRVYTHQSDVWSFGVLMWEIFTLGGSPYPGIPVEELFKLLKEGHRMDKPANCTNELYMMMRDCWHAVPSQRPTFKQLVEDLDRILTLTTNEI

SEQ ID NO: 2341 - protein, 798 aa, Homo sapiens
LRTPVSCLRGRLPPGHTEARLVGGEHPCAGRLEVTWGTVCDAALDLATAHVVCRELQCGAVVSTPEGARFGRGSGPVWTEAFRCAGNESLLFHCPRGRGSQCGHGHDAGLRCSEFRMVNGSSSCEGRVEFQVQGSWAPLCATHWDIADATVLCHQLNCGNAVAAPGGGHFGDGDAAIWPDAFHCEGTESYLWNCPVSTLGAPACAPGNTASAVCSGLAHALRLREGQSRCDGRVEVSLDGVWGRVLDDAWDLRGAGVVCRQLGCRGAQQAYDAPAPSRGSVQVALSRVRCLGTETRLTQCNVSATLQEPAGTSRDAGVVCSGEVGTASPMARRHGIPGALTLSLHREPQGAAGRGAGALHGGAWGTVCDDAWDLRDAHVVCRQLGCGRALSALGAAHFGAGAGRIWLDELGCQGHESALWQCPSAGWGRHDWRHKEDAGVFCSESVALRLRGGTCCCAGWLDVFYNGTWGAMCSNALKDLSLSIICKQLGCGVWGVGLAGEQALPLCGHRDRLGGQHRVPQAAQLHSVAMPFPPMAPALLRPSRAGLDYLCRIVRGQATGCWGAPQLLLLARLPRGGRTARARGRGPLLRARGALARGLLGHRVRRWLGPGGRGGRVPPAGLWSGRRRPGGRRLWPWLRARVAGRGGVPGQRGVPVGLPCGAVGTRRPRARGGRGRALLGKQTVNHSDDLSKSSSSEPGPGPPLPAAPFRTFWVVSVVLGSLLGLLLLGLMAFLILPRVTQAMQRGLGRSEVSPGEAIYDVIGEMPPAGLYEEIMEAEAVLQDEEDGSVVKVDTEAAG

SEQ ID NO: 2342 - protein, 143 aa, Homo sapiens
LRKEQGFQERGLRQVSQKMHKEEHEVAVLGPPPSTILPRSTVINIHSETSVPDHVVWSLFNTLFLNWCCLGFIAFAYSVKSRDRKMVGDVTGAQAYASTAKCLNIWALILGILMTIGFILLLVFGSVTVYHIMLQIIQEKRGY

SEQ ID NO: 2343 - protein, 160 aa, Homo sapiens
LSTVPASGHHSGPSLHAENHTSQTFTQHFLPQSQKMHKEEHEVAVLGPPPSTILPRSTVINIHSETSVPDHVVWSLFNTLFLNWCCLGFIAFAYSVKSRDRKMVGDVTGAQAYASTAKCLNIWALILGILMTIGFILLLVFGSVTVYHIMLQIIQEKRGY

SEQ ID NO: 2344 - protein, 450 aa, Homo sapiens
LQGQRGVLPSSWISLLAEEPGGARGDPGAQPAPRRPRLRAMPGVCDRAPDFLSPSEDQVLRPALGSSVALNCTAWVVSGPHCSLPSVQWLKDGLPLGIGGHYSLHEYSWVKANLSEVLVSSVLGVNVTSTEVYGAFTCSIQNISFSSFTLQRAGPTSHVAAVLASLLVLLALLLAALLYVKCRLNVLLWYQDAYGEVEINDGKLYDAYVSYSDCPEDRKFVNFILKPQLERRRGYKLFLDDRDLLPRAEPSADLLVNLSRCRRLIVVLSDAFLSRAWCSHSFREGLCRLLELTRRPIFITFEGQRRDPAHPALRLLRQHRHLVTLLLWRPGSVTPSSDFWKEVQLALPRKVQYRPVEGDPQTQLQDDKDPMLILRGRVPEGRALDSEVDPDPEGDLGVRGPVFGEPSAPPHTSGVSLGESRSSEVDVSDLGSRNYSARTDFYCLVSKDDM

SEQ ID NO: 2345 - protein, 537 aa, Homo sapiens
LPSSWISLLAEEPGGARGDPGAQPAPRRPRLRAMPGVCDRAPDFLSPSEDQVLRPALGSSVALNCTAWVVSGPHCSLPSVQWLKDGLPLGIGGHYSLHEYSWVKANLSEVLVSSVLGVNVTSTEVYGAFTCSIQNISFSSFTLQRAGPTSHVAAVLASLLVLLALLLAALLYVKCRLNVLLWYQDAYGEVEINDGKLYDAYVSYSDCPEDRKFVNFILKPQLERRRGYKLFLDDRDLLPRAEPSADLLVNLSRCRRLIVVLSDAFLSRAWCSHSFREGLCRLLELTRRPIFITFEGQRRDPAHPALRLLRQHRHLVTLLLWRPGSVTPSSDFWKEVQLALPRKVQYRPVEGDPQTQLQDDKDPMLILRGRVPEGRALDSEVDPDPEGDLGMPAQPHSPTGEAQHRAEWGQAQGTGPGGAPGVEDSSRHREPLHGLCPGGARPSVCLGTSWASQAITAGGEQGQPLAVGLGQGCGWPPQASRSPHPRCPGACLWRAISSTAHQWGLAGREPEQRSGRLGSRLAKLQCPHRLLLPGVQG

SEQ ID NO: 2346 - protein, 67 aa, Homo sapiens
LGATTASTSTPGPTSHVAAVLASLLVLLALLLAALLYVKCRLNVLLWYQDAYGEVEINATAPRTASS

SEQ ID NO: 2347 - protein, 134 aa, Homo sapiens
VLWTLPGAQRRGEFAPKGAPMTNICPPEERTGTRVKANLSEVLVSSVLGVNVTSTEVYGAFTCSIQNISFSSFTLQRAGPTSHVAAVLASLLVLLALLLAALLYVKCRLNVLLWYQDAYGEVEINATAPRTASS

SEQ ID NO: 2348 - protein, 188 aa, Homo sapiens
LQGQRGVLPSSWISLLAEEPGGARGDPGAQPAPRRPRLRAMPGVCDRAPDFLSPSEDQVLRPALGSSVALNCTAWVVSGPHCSLPSVQWLKDGLPLGIGGHYSLHEYSWVKANLSEVLVSSVLGVNVTSTEVYGAFTCSIQNISFSSFTLQRAGPTSHVAAVLASLLVLLALLLAALLYVKCRLNVLL

SEQ ID NO: 2349 - protein, 190 aa, Homo sapiens
MLFYLSGTYYALYFLATLLMITYKSQVFSYPHRYLVLDLALLFLMGILEAVRLYLGTRGNLTEAERPLAASLALTAGTALLSAHFLLWQALVLWADWALSATLLALHGLEAVLQVVAIAAFTSHTSPFRGFGGEVRAKAGDETAGERAAEGHIRSLRPLQFYQLLPFARSAKQILALCFFPIPRFTISSP

SEQ ID NO: 2350 - protein, 133 aa, Homo sapiens
LWPWSLGGCGVLGVGIWLAATQGSFATLSSSFPSLSAANLLIITGAFVMAIGFVGCLGAIKENKCLLLTVSAGAQAMLRVGPRRVGLRWPPGLGCRSDPPDVGTTSGAGPPGWQCGPGPWPLLGLPGHTGAGG

SEQ ID NO: 2351 - protein, 118 aa, Homo sapiens
VGRWAGSAGAPSPPASARPELAPQFRCCGVSNYTDWFEVYNATRVPDSCCLEFSESCGLHAPGTWWKAPCYETVKVWLQENLLAVGIFGLCTALVQILGLTFAMTMYCQVVKADTYCA

SEQ ID NO: 2352 - protein, 213 aa, Homo sapiens
MQPTSWAVSCGLRPLPSWKPQGGEGRGGEERRGTVMGPWSRVRVAKCQMLVTCFFILLLGLSVATMVTLTYFGAHFAVIRRASLEKNPYQAVHQWGTQQRLIQHPESGSEGQSLLGPLRAFSAGLSLVGLLTLGAVLSAAATVREAQGLMAGGFLCFSLAFCAQVQVVFWRLHSPTQVEDAMLDTYDLVYEQAMKVSVLWEEVSFQPSGEHRG

SEQ ID NO: 2353 - protein, 293 aa, Homo sapiens
MQPTSWAVSCGLRPLPSWKPQGGEGRGGEERRGTVMGPWSRVRVAKCQMLVTCFFILLLGLSVATMVTLTYFGAHFAVIRRASLEKNPYQAVHQWAFSAGLSLVGLLTLGAVLSAAATVREAQGLMAGGFLCFSLAFCAQVQVVFWRLHSPTQVEDAMLDTYDLVYEQAMKGTSHVRRQELAAIQDVFLCCGKKSPFSRLGSTEADLCQGEEAAREDCLQGIRSFLRTHQQVASSLTSIGLALTLGPQGQIHPDPTSMWPPAPGAQPLEMLPGWTHTLSPLRSSCYWSKRMLG

SEQ ID NO: 2354 - protein, 355 aa, Homo sapiens
MQPTSWAVSCGLRPLPSWKPQGGEGRGGEERRGTVMGPWSRVRVAKCQMLVTCFFILLLGLSVATMVTLTYFGAHFAVIRRASLEKNPYQAVHQWAFSAGLSLVGLLTLGAVLSAAATVREAQGLMAGGFLCFSLAFCAQVQVVFWRLHSPTQVEDAMLDTYDLVYEQAMKGTSHVRRQELAAIQDVFLCCGKKSPFSRLGSTEADLCQGEEAAREDCLQGIRSFLRTHQQVASSLTSIGLALTVSALLFSSFLWFAIRCGCSLDRKGKYTLTPRACGRQPQEPSLLRCSQGGPTHCLHSEAVAIGPRGCSGSLRWLQESDAAPLPLSCHLAAHRALQGRSRGGLSGCPERGLSD

SEQ ID NO: 2355 - protein, 330 aa, Homo sapiens
MQPTSWAVSCGLRPLPSWKPQGGEGRGGEERRGTVMGPWSRVRVAKCQMLVTCFFILLLGLSVATMVTLTYFGAHFAVIRRASLEKNPYQAVHQWAFSAGLSLVGLLTLGAVLSAAATVREAQGLMAGVEDAMLDTYDLVYEQAMKGTSHVRRQELAAIQDVFLCCGKKSPFSRLGSTEADLCQGEEAAREDCLQGIRSFLRTHQQVASSLTSIGLALTVSALLFSSFLWFAIRCGCSLDRKGKYTLTPRACGRQPQEPSLLRCSQGGPTHCLHSEAVAIGPRGCSGSLRWLQESDAAPLPLSCHLAAHRALQGRSRGGLSGCPERGLSD

SEQ ID NO: 2356 - protein, 177 aa, Homo sapiens
MGPWSRVRVAKCQMLVTCFFILLLGLSVATMVTLTYFGAHFAVIRRASLEKNPYQAVHQWAFSAGLSLVGLLTLGAVLSAAATVREAQGLMAGVEDAMLDTYDLVYEQAMKGTSHVRRQELAAIQDVFLCCGKKSPFSRLGSTEADLCQGEEAAREWEAPGDPPRNRGEESKWLEAW

SEQ ID NO: 2357 - protein, 235 aa, Homo sapiens [sequence omitted]

SEQ ID NO: 2358 - protein, 104 aa, Homo sapiens
LLGLSVATMVTLTYFGAHFAVIRRASLEKNPYQAVHQWAFSAGLSLVGLLTLGAVLSAAATVREAQGLMAGGFLCFSLAFCAQVQVVFWRLHSPTQHPSFRPGC

SEQ ID NO: 2359 - protein, 123 aa, Homo sapiens
LCCGKKSPFSRLGSTEADLCQGEEAAREDCLQGIRSFLRTHQQVASSLTSIGLALTVSALLFSSFLWFAIRCGCSLDRKGKYTLTPRMWPPAPGAQPLEMLPGWTHTLSPLRSSCYWSKRMLG

SEQ ID NO: 2360 - protein, 709 aa, Homo sapiens
LAAVAARTAPGRSPSLQLPVPPLGPAPRQALLVMAAASSPPRAERKRWGWGRLPGARRGSAGLAKKCPFSLELAEGGPAGGALYAPIAPGAPGPAPPASPAAPAAPPVASDLGPRPPVSLDPRVSIYSTRRPVLARTHVQGRVYNFLERPTGWKCFVYHFAVFLIVLVCLIFSVLSTIEQYAALATGTLFWMEIVLVVFFGTEYVVRLWSAGCRSKYVGLWGRLRFARKPISIIDLIVVVASMVVLCVGSKGQVFATSAIRGIRFLQILRMLHVDRQGGTWRLLGSVVFIHRQELITTLYIGFLGLIFSSYFVYLAEKDAVNESGRVEFGSYADALWWGVVTVTTIGYGDKVPQTWVGKTIASCFSVFAISFFALPAGILGSGFALKVQQKQRQKHFNRQIPAAASLIQTAWRCYAAENPDSSTWKIYIRKAPRSHTLLSPSPKPKKSVVVKKKKFKLDKDNGVTPGEKMLTVPHITCDPPEERRLDHFSVDGYDSSVRKSPTLLEVSMPHFMRTNSFAEDLDLEGETLLTPITHISQLREHHRATIKVIRRMQYFVAKKKFQQARKPYDVRDVIEQYSQGHLNLMVRIKELQRRLDQSIGKPSLFISVSEKSKDRGSNTIGARLNRVEDKVTQLDQRLALITDMLHQLLSLHGGSTPGSGGPPREGGAHITQPCGSGGSVDPELFLPSNTLPTYEQLTVPRRGPDEGS

SEQ ID NO: 2361 - protein, 366 aa, Homo sapiens
VLLGRYSAGPGAQQGWGRLAPDTGCISGILYGTMTLELGGKVTIECAKNNFQAQLEFKLKPFFGGSTSINQISGKITSGEEVLASLSGHWDRDVFIKEEGSGSSALFWTPSGEVRRQRLRQHTVPLEEQTELESERLWQHVTRAISKGDQHRATQEKFALEEAQRQRARERQESLMPWKPQLFHLDPITQEWHYRYEDHSPWDPLKDIAQFEQDGILRTLQQEAVARQTTFLGSPGPRHERSGPDQRLRKASDQPSGHSQATESSGSTPESCPELSDEEQDGDFVPGGESPCPRCRKEARRLQALHEAILSIREAQQELHRHLSAMLSSTARAAQAPTPGLLQSPRSWFLLCVFLACQLFINHILK

SEQ ID NO: 2362 - protein, 510 aa, Homo sapiens
MCVPHRQGHQEGDSQGAEGELPAGEEPRSFLNKLSDYYYHADLLSRAAVEEDAYSRMKLVLRWYLSGFYKKPKGIKKPYNPILGETFRCCWFHPQTDSRTFYIAEQVSHHPPVSAFHVSNRKDGFCISGSITAKSRFYGNSLSALLDGKATLTFLNRAEDYTLTMPYAHCKGILYGTMTLELGGKVTIECAKNNFQAQLEFKLKPFFGGSTSINQISGKITSGEEVLASLSGHWDRDVFIKEEGSGSSALFWTPSGEVRRQRLRQHTVPLEEQTELESERLWQHVTRAISKGDQHRATQEKFALEEAQRQRARERQESLMPWKPQLFHLDPITQEWHYRYEDHSPWDPLKDIAQFEQDGILRTLQQEAVARQTTFLGSPGPRHERSGPDQRLRKASDQPSGHSQATESSGSTPESCPELSDEEQDGDFVPGGESPCPRCRKEARRLQALHEAILSIREAQQELHRHLSAMLSSTARAAQAPTPGLLQSPRSWFLLCVFLACQLFINHILK

SEQ ID NO: 2363 - protein, 809 aa, Homo sapiens
LATPPCLGPHSHCSLAGKDMEPNGPSLPRDEGPPTPSSATKVPPAEYRLCNGSDKECVSPTARVTKKETLKAQKENYRQEKKRATRQLLSALTDPSVVIMADSLKIRGTLKSWTKLWCVLKPGVLLIYKTPKGPKGESVGSITQPLPSSYLIFRAASESDGRCWLDALELALRCSSLLRLGTCKPGRDGEPGTSPDASPSSLCGLPASATVHPDQDLFPLNGSSLENDAFSDKSERENPEESDTETQDHSRKTESGSDQSETPGAPVRRGTTYVEQVQEELGELGEASQVETVSEENKSLMWTLLKQLRPGMDLSRVVLPTFVLEPRSFLNKLSDYYYHADLLSRAAVEEDAYSRMKLVLRWYLSGFYKKPKGIKKPYNPILGETFRCCWFHPQTDSRTFYIAEQVSHHPPVSAFHVSNRKDGFCISGSITAKSRFYGNSLSALLDGKATLTFLNRAEDYTLTMPYAHCKGILYGTMTLELGGKVTIECAKNNFQAQLEFKLKPFFGGSTSINQISGKITSGEEVLASLSGHWDRDVFIKEEGSGSSALFWTPSGEVRRQRLRQHTVPLEEQTELESERLWQHVTRAISKGDQHRATQEKFALEEAQRQRARERQESLMPWKPQLFHLDPITQEWHYRYEDHSPWDPLKDIAQFEQDGILRTLQQEAVARQTTFLGSPGPRHERSGPDQRLRKASDQPSGHSQATESSGSTPESCPELSDEEQDGDFVPGGESPCPRCRKEARRLQALHEAILSIREAQQELHRHLSAMLSSTARAAQAPTPGLLQSPRSWFLLCVFLACQLFINHILK

SEQ ID NO: 2364 - protein, 3411 aa, Homo sapiens
LCRRRRPGVSGRTDRRPRARGPTAAARRGSRASETATADDARPQAPRERALPGGLTAAGRRPSTGRGSPRRAEVREPELEPGPQWDLTQSLRSSWAQSLAWSWSPRHSWTTLVMQKELGIVPSCPGMKSPRPHLLLPLLLLLLLLLGAGVPGAWGQAGSLDLQIDEEQPAGTLIGDISAGLPAGTAAPLMYFISAQEGSGVGTDLAIDEHSGVVRTARVLDREQRDRYRFTAVTPDGATVEVTVRVADINDHAPAFPQARAALQVPEHTAFGTRYPLEPARDADAGRLGTQGYALSGDGAGETFRLETRPGPDGTPVPELVVTGELDRENRSHYMLQLEAYDGGSPPRRAQALLDVTLLDINDHAPAFNQSRYHAVVSESLAPGSPVLQVFASDADAGVNGAVTYEINRRQSEGDGPFSIDAHTGLLQLERPLDFEQRRVHELVVQARDGGAHPELGSAFVTVHVRDANDNQPSMTVIFLSADGSPQVSEAAPPGQLVARISVSDPDDGDFAHVNVSLEGGEGHFALSTQDSVIYLVCVARRLDREERDAYNLRVTATDSGSPPLRAEAAFVLHVTDVNDNAPAFDRQLYRPEPLPEVALPGSFVVRVTARDPDQGTNGQVTYSLAPGAHTHWFSIDPTSGIITTAASLDYELEPQPQLIVVATDGGLPPLASSATVSVALQDVNDNEPQFQRTFYNASLPEGTQPGTCFLQVTATDADSGPFGLLSYSLGAGLGSSGSPPFRIDAHSGDVCTTRTLDRDQGPSSFDFTVTAVDGGGLKSMVYVKVFLSDENDNPPQFYPREYAASISAQSPPGTAVLRLRAHDPDQGSHGRLSYHILAGNSPPLFTLDEQSGLLTVAWPLARRANSVVQLEIGAEDGGGLQAEPSARVDISIVPGTPTPPIFEQLQYVFSVPEDVAPGTSVGIVQAHNPPGRLAPVTLSLSGGDPRGLFSLDAVSGLLQTLRPLDRELLGPVLELEVRAGSGVPPAFAVARVRVLLDDVNDNSPAFPAPEDTVLLPPNTAPGTPIYTLRALDPDSGVNSRVTFTLLAGGGGAFTVDPTTGHVRLMRPLGPSGGPAHELELEARDGGSPPRTSHFRLRVVVQDVGTRGLAPRFNSPTYRVDLPSGTTAGTQVLQVQAQAPDGGPITYHLAAEGASSPFGLEPQSGWLWVRAALDREAQELYILKVMAVSGSKAELGQQTGTATVRVSILNQNEHSPRLSEDPTFLAVAENQPPGTSVGRVFATDRDSGPNGRLTYSLQQLSEDSKAFRIHPQTGEVTTLQTLDREQQSSYQLLVQVQDGGSPPRSTTGTVHVAVLDLNDNSPTFLQASGAAGGGLPIQVPDRVPPGTLVTTLQAKDPDEGENGTILYTLTGPGSELFSLHPHSGELLTAAPLIRAERPHYVLTLSAHDQGSPPRSASLQLLVQVLPSARLAEPPPDLAERDPAAPVPVVLTVTAAEGLRPGSLLGSVAAPEPAGVGALTYTLVGGADPEGTFALDAASGRLYLARPLDFEAGPPWRALTVRAEGPGGAGARLLRVQVQVQDENEHAPAFARDPLALALPENPEPGAALYTFRASDADGPGPNSDVRYRLLRQEPPVPALRLDARTGALSAPRGLDRETTPALLLLVEATDRPANASRRRAARVSARVFVTDENDNAPVFASPSRVRLPEDQPPGPAALHVVARDPDLGEAARVSYRLASGGDGHFRLHSSTGALSVVRPLDREQRAEHVLTVVASDHGSPPRSATQVLTVSVADVNDEAPTFQQQEYSVLLRENNPPGTSLLTLRATDPDVGANGQVTYGGVSSESFSLDPDTGVLTTLRALDREEQEEINLTVYAQDRGSPPQLTHVTVRVAVEDENDHAPTFGSAHLSLEVPEGQDPQTLTMLRASDPDVGANGQLQYRILDGDPSGAFVLDLASGEFGTMRPLDREVEPAFQLRIEARDGGQPALSATLLLTVTVLDANDHAPAFPVPAYSVEVPEDVPAGTLLLQLQAHDPDAGANGHVTYYLGAGTAGAFLLEPSSGELRTAAALDREQCPSYTFSVSAVDGAAAGPLSTTVSVTITVRDVNDHAPTFPTSPLRLRLPRPGPSFSTPTLALATLRAEDRDAGANASILYRLAGTPPPGTTVDSYTGEIRVARSPVALGPRDRVLFIVATDLGRPARSATGVIIVGLQGEAERGPRFPRASSEATIRENAPPGTPIVSPRAVHAGGTNGPITYSILSGNEKGTFSIQPSTGAITVRSAEGLDFEVSPRLRLVLQAESGGAFAFTVLTLTLQDANDNAPRFLRPHYVAFLPESRPLEGPLLQVEADDLDQGSGGQISYSLAASQPARGLFHVDPTTGTITTTAILDREIWAETRLVLMATDRGSPALVGSATLTVMVIDTNDNRPTIPQPWELRVSEDALLGSEIAQVTGNDVDSGPVLWYVLSPSGPQDPFSVGRYGGRVSLTGPLDFEQCDRYQLQLLAHDGPHEGRANLTVLVEDVNDNAPAFSQSLYQVMLLEHTPPGSAILSVSATDRDSGANGHISYHLASPADGFSVDPNNGTLFTIVGTVALGHDGSGAVDVVLEARDHGAPGRAARATVHVQLQDQNDHAPSFTLSHYRVAVTEDLPPGSTLLTLEATDADGSRSHAAVDYSIISGNWGRVFQLEPRLAEAGESAGPGPRALGCLVLLEPLDFESLTQYNLTVAAADRGQPPQSSVVPVTVTVLDVNDNPPVFTRASYRVTVPEDTPVGAELLHVEASDADPGPHGLVRFTVSSGDPSGLFELDESSGTLRLAHALDCETQARHQLVVQAADPAGAHFALAPVTIEVQDVNDHGPAFPLNLLSTSVAENQPPGTLVTTLHAIDGDAGAFGRLRYSLLEAGPGPEGREAFALNSSTGELRARVPFDYEHTESFRLLVGAADAGNLSASVTVSVLVTGEDEYDPVFLAPAFHFQVPEGARRGHSLGHVQATDEDGGADGLVLYSLATSSPYFGINQTTGALYLRVDSRAPGSGTATSGGGGRTRREAPRELRLEVIARGPLPGSRSATVPVTVDITHTALGLAPDLNLLLVGAVAASLGVVVVLALAALVLGLVRARSRKAEAAPGPMSQAAPLASDSLQKLGREPPSPPPSEHLYHQTLPSYGGPGAGGPYPRGGSLDPSHSSGRGSAEAAEDDEIRMINEFPRVASVASSLAARGPDSGIQQDADGLSDTSCEPPAPDTWYKGRKAGLLLPGAGATLYREEGPPATATAFLGGCGLSPAPTGDYGFPADGKPCVAGALTAIVAGEEELRGSYNWDYLLSWCPQFQPLASVFTEIARLKDEARPCPPAPRIDPPPLITAVAHPGAKSVPPKPANTAAARAIFPPASHRSPISHEGSLSSAAMSPSFSPSLSPLAARSPVVSPFGVAQGPSASALSAESGLEPPDDTELHI

SEQ ID NO: 2365 - protein, 968 aa, Homo sapiens
MVLGCELSGSTRVVVGVEALLTGASSPLPGVGPANKHKPWIEAEYQGIVMENDNTVLLNPPLFALDKDAPLRYAGEICGFRLHGSGVPFEAVILDKATGEGLIRAKEPVDCEAQKEHTFTIQAYDCGEGPDGANTKKSHKATVHVRVNDVNEFAPVFVERLYRAAVTEGKLYDRILRVEAIDGDCSPQYSQICYYEILTPNTPFLIDNDGNIENTEKLQYSGERLYKFTVTAYDCGKKRAADDAEVEIQVKPTCKPSWQGWNKRIEYAPGAGSLALFPGIRLETCDEPLWNIQATIELQTSHVAKGCDRDNYSERALRKLCGAATGEVDLLPMPGPNANWTAGLSVHYSQDSSLIYWFNGTQAVQVPLGGPSGLGSGPQDSLSDHFTLSFWMKHGVTPNKGKKEEETIVCNTVQNEDGFSHYSLTVHGCRIAFLYWPLLESARPVKFLWKLEQVCDDEWHHYALNLEFPTVTLYTDGISFDPALIHDNGLIHPPRREPALMIGACWTEEKNKEKEKGDNSTDTTQGDPLSIHHYFHGYLAGFSVRSGRLESREVIECLYACREGLDYRDFESLGKGMKVHVNPSQSLLTLEGDDVETFNHALQHVAYMNTLRFATPGVRPLRLTTAVKCFSEESCVSIPEVEGYVVVLQPDAPQILLSGTAHFARPAVDFEGTNGVPLFPDLQITCSISHQVEAKKDESWQGTVTDTRMSDEIVHNLDGCEISLVGDDLDPERESLLLDTTSLQQRGLELTNTSAYLTIAGVESITVYEEILRQARYRLRHGAALYTRKFRLSCSEMNGRYSSNEFIVEVNVLHSMNRVAHPSHVLSSQQFLHRGHQPPPEMAGHSLASSHRNSMIPSAATLIIVVCVGFLVLMVVLGLVRIHSLHRRVSGAGGPPGASSDPKDPDLFWDDSALTIIVNPMESYQNRQSCVTGAVGGQQEDEDSSDSEVADSPSSDERRIIETPPHRY

SEQ ID NO: 2366 - protein, 385 aa, Homo sapiens
LHPQPGGLPAGASRSSPARSATRSSRGGGCGRRAEMQRLGATLLCLLLAAAVPTAPAPAPTATSAPVKPGPALSYPQEEATLNEMFREVEELMEDTQHKLRSAVEEMEAEEAAAKASSEVNLANLPPSYHNETNTDTKVGNNTIHVHREIHKITNNQTGQMVFSETVITSVGDEEGRRSHECIIDEDCGPSMYCQFASFQYTCQPCRGQRMLCTRDSECCGDQLCVWGHCTKMATRGSNGTICDNQRDCQPGLCCAFQRGLLFPVCTPLPVEGELCHDPASRLLDLITWELEPDGALDRCPCASGLLCQPHSHSLVYVCKPTFVGSRDQDGEILLPREVPDEYEVGSFMEEVRQELEDLERSLTEEMALREPAAAAAALLGGEEI

SEQ ID NO: 2367 - protein, 414 aa, Homo sapiens
LAGARCQSRQTKASGDGLNARLGAGIFPEDFTGQRLAWKDQGGGCGRRAEMQRLGATLLCLLLAAAVPTAPAPAPTATSAPVKPGPALSYPQEEATLNEMFREVEELMEDTQHKLRSAVEEMEAEEAAAKASSEVNLANLPPSYHNETNTDTKVGNNTIHVHREIHKITNNQTGQMVFSETVITSVGDEEGRRSHECIIDEDCGPSMYCQFASFQYTCQPCRGQRMLCTRDSECCGDQLCVWGHCTKMATRGSNGTICDNQRDCQPGLCCAFQRGLLFPVCTPLPVEGELCHDPASRLLDLITWELEPDGALDRCPCASGLLCQPHRLPRLEPGFVPSLPSHSLVYVCKPTFVGSRDQDGEILLPREVPDEYEVGSFMEEVRQELEDLERSLTEEMALREPAAAAAALLGGEEI

SEQ ID NO: 2368 - protein, 250 aa, Homo sapiens
LNARLGAGIFPEDFTGQRLAWKDQGGGCGRRAEMQRLGATLLCLLLAAAVPTAPAPAPTATSAPVKPGPALSYPQEEATLNEMFREVEELMEDTQHKLRSAVEEMEAEEAAAKASSEVNLANLPPSYHNETNTDTKVGNNTIHVHREIHKITNNQTGQMVFSETVITSVGDEEGRRSHADNWSCRKESGGEGGRLVAGRWPPCCHIVHRMSCSCYRGILSLAIFLDPGPHLLPDLAGEPAAASHPSSSTH

SEQ ID NO: 2369 - protein, 170 aa, Homo sapiens
LNARLGAGIFPEDFTGQRLAWKDQGGGCGRRAEMQRLGATLLCLLLAAAVPTAPAPAPTATSAPVKPGPALSYPQEEATLNEMFREVEELMEDTQHKLRSAVEEMEAEEAAAKASSEVNLANLPPSYHNETNTDTKVGNNTIHVHREIHKEECKYDIPHFQKRNPLLLQN

SEQ ID NO: 2370 - protein, 201 aa, Homo sapiens
LHPQPGGLPAGASRSSPARSATRSSRGGGCGRRAEMQRLGATLLCLLLAAAVPTAPAPAPTATSAPVKPGPALSYPQEEATLNEMFREVEELMEDTQHKLRSAVEEMEAEEAAAKASSEVNLANLPPSYHNETNTDTKVGNNTIHVHREIHKVSHGQHFLLSIASSPIRELRFFCFCFFICDIQAQTTIENHKIRIENQKE

SEQ ID NO: 2371 - protein, 800 aa, Homo sapiens
LTGIRQLQLILFKVALMLGVEIHVNVEFVKVLEPPEDQENQKIGWRAEFLPTDHSLSEFEFDVIIGADGRRNTLEGFRRKEFRGKLAIAITANFINRNSTAEAKVEEISGVAFIFNQKFFQDLKEETGIDLENIVYYKDCTHYFVMTAKKQSLLDKGVIINDYIDTEMLLCAENVNQDNLLSYAREAADFATNYQLPSLDFAMNHYGQPDVAMFDFTCMYASENAALVRERQAHQLLVALVGDSLLEPFWPMGTGCARGFLAAFDTAWMVKSWNQGTPPLELLAERESLYRLLPQTTPENINKNFEQYTLDPGTRYPNLNSHCVRPHQVKHLYITKELEHYPLERLGSVRRSVNLSRKESDIRPSKLLTWCQQQTEGYQHVNVTDLTTSWRSGLALCAIIHRFRPELINFDSLNEDDAVENNQLAFDVAEREFGIPPVTTGKEMASAQEPDKLSMVMYLSKFYELFRGTPLRPVDSWRKNYGENADLSLAKSSISNNYLNLTFPRKRTPRVDGQTGENDMNKRRRKGFTNLDEPSNFSSRSLGSNQECGSSKEGGNQNKVKSMANQLLAKFEESTRNPSLMKQESMRKSFPLNLGGSDTCYFCKKRVYVMERLSAEGHFFHRECFRCSICATTLRLAAYTFDCDEGKFYCKPHFIHCKTNSKQRKRRAELKQQREEEATWQEQEAPRRDTPTESSCAVAAIGTLEGSPPGISTSFFRKVLGWPLRLPRDLCNWMQGLLQAAGLHIRDNAYNYCYMYELLSLGLPLLWAFSEVLAAMYRESEGSLESICNWVLRCFPVKLR

SEQ ID NO: 2372 - protein, 279 aa, Homo sapiens
LGALAAFVLALLLGAEPESWAAGAAWLRTLLSVCSHSLSPLFSIACAFFFLTCFLTRTKRGPGPGRSCGSWWLLALPACCYLGDFLVWQWWSWPWGDGDAGSAAPHTPPEAAAGRLLLVLSCVGLLLTLAHPLRLRHCVLVLLLASFVWWVSFTSLGSLPSALRPLLSGLVGGAGCLLALGLDHFFQIREAPLHPRLSSAAEEKVPVIRPRRRSSCVSLGETAASYYGSCKIFRRPSLPCISREQMILWDWDLKQWYKPHYQVSIINICDEYLNNICDH

SEQ ID NO: 2373 - protein, 522 aa, Homo sapiens
LQCEPGKSRRLRSCRRDLKKWDVQKRRLEIPAVSPSTLYATEVSPCPWFLPGRLLPLGEKNYTTAAAAMTWRAAASTCAALLILLWALTTEGDLKVEMMAGGTQITPLNDNVTIFCNIFYSQPLNITSMGITWFWKSLTFDKEVKVFEFFGDHQEAFRPGAIVSPWRLKSGDASLRLPGIQLEEAGEYRCEVVVTPLKAQGTVQLEVVASPASRLLLDQVGMKENEDKYMCESSGFYPEAINITWEKQTQKFPHPIEISEDVITGPTIKNMDGTFNVTSCLKLNSSQEDPGTVYQCVVRHASLHTPLRSNFTLTAARHSLSETEKTDNFSIHWWPISFIGVGLVLLIVLIPWKKICNKSSSAYTPLKCILKHWNSFDTQTLKKEHLIFFCTRAWPSYQLQDGEAWPPEGSVNINTIQQLDVFCRQEGKWSEVPYVQAFFALRDNPDLCQCCRIDPALLTVTSGKSIDDNSTKSEKQTPREHSDAVPDAPILPVSPIWEPPPATTSTTPVLSSQPPTLLLPLQ

SEQ ID NO: 2374 - protein, 54 aa, Homo sapiens [sequence omitted]

SEQ ID NO: 2375 - protein, 151 aa, Homo sapiens
LLPGDPQGPGTAAPRALGLPPRCEPVGAPLAALALARERRERGRFPRPCKCLFFNSSQCELCCECVRGGAPALSRRRVATPCPCPMVCNSDFAHRSTVPPSAHPFTLTPTLSLNTFIIVRRGRWDFGRSAAATASGGLIFIFALRWLKAFI

SEQ ID NO: 2376 - protein, 331 aa, Homo sapiens
LSPGLCSPTPTEARAGDAGPAARSRKQNPQSPPCCCVDDTWAQAEVGPVTSCTGFVEGSSRTGGMGSACIKVTKYFLFLFNLIFFILGAVILGFGVWILADKSSFISVLQTSSSSLRMGAYVFIGVGAVTMLMGFLGCIGAVNEVRCLLGLYFAFLLLILIAQVTAGALFYFNMGKLKQEMGGIVTELIRDYNSSREDSLQDAWDYVQAQVKCCGWVSFYNWTDNAELMNRPEVTYPCSCEVKGEEDNSLSVRKGFCEAPGNRTQSGNHPEDWPVYQEGCMEKVQAWLQENLGIILGVGVGVAIIELLGMVLSICLCRHVHSEDYSKVPKY

SEQ ID NO: 2377 - protein, 306 aa, Homo sapiens
LSPGLCSPTPTEARAGDAGPAARSRKQNPQSPPCCCVDDTWAQAEVGPVTSCTGFVEGSSRTGGMGSACIKVTKYFLFLFNLIFFILGAVILGFGVWILADKSSFISVLQTSSSSLRMGAYVFIGVGAVTMLMGFLGCIGAVNEVRCLLGLLKQEMGGIVTELIRDYNSSREDSLQDAWDYVQAQVKCCGWVSFYNWTDNAELMNRPEVTYPCSCEVKGEEDNSLSVRKGFCEAPGNRTQSGNHPEDWPVYQEGCMEKVQAWLQENLGIILGVGVGVAIIELLGMVLSICLCRHVHSEDYSKVPKY

SEQ ID NO: 2378 - protein, 122 aa, Homo sapiens
LSPGLCSPTPTEARAGDAGPAARSRKQNPQSPPCCCVDDTLSVRKGFCEAPGNRTQSGNHPEDWPVYQEGCMEKVQAWLQENLGIILGVGVGVAIIELLGMVLSICLCRHVHSEDYSKVPKY

SEQ ID NO: 2379 - protein, 99 aa, Homo sapiens
LGRVFQSPPCCCVDDTWAQAEVGPVTSCTGFVEGSSRTGGMGSACIKVTKYFLFLFNLIFFVSMSHAVLTTSEKILLPGASQPEPFQSRPGRGLGGFGG

SEQ ID NO: 2380 - protein, 135 aa, Homo sapiens
VDDTWAQAEVGPVTSCTGFVEGSSRTGGMGSACIKVTKYFLFLFNLIFFILGAVILGFGVWILADKSSFISVLQTSSSSLRMGAYVFIGVGAVTMLMGFLGCIGAVNEVRCLLGLVSTDPSAAACPFPLIQPSAA

SEQ ID NO: 2381 - protein, 241 aa, Homo sapiens
LPGRVMSELETACGKPMRHKTSSSSLRMGAYVFIGVGAVTMLMGFLGCIGAVNEVRCLLGLYFAFLLLILIAQVTAGALFYFNMGKLKQEMGGIVTELIRDYNSSREDSLQDAWDYVQAQVKCCGWVSFYNWTDNAELMNRPEVTYPCSCEVKGEEDNSLSVRKGFCEAPGNRTQSGNHPEDWPVYQEGCMEKVQAWLQENLGIILGVGVGVAIIELLGMVLSICLCRHVHSEDYSKVPKY

SEQ ID NO: 2382 - protein, 230 aa, Homo sapiens
LPAHFLSSSRVQPDRGAGRNIGWRASLGARRLGAPGRGPSADFVPALCPQYFAFLLLILIAQVTAGALFYFNMGKLKQEMGGIVTELIRDYNSSREDSLQDAWDYVQAQVKCCGWVSFYNWTDNAELMNRPEVTYPCSCEVKGEEDNSLSVRKGFCEAPGNRTQSGNHPEDWPVYQEGCMEKVQAWLQENLGIILGVGVGVAIIELLGMVLSICLCRHVHSEDYSKVPKY

SEQ ID NO: 2383 - protein, 273 aa, Homo sapiens
LNLISGDASIILLQTSQRWLSRWSTMEGDCLSCMKYLMFVFNFFIFLGGACLLAIGIWVMVDPTGFREIVAANPLLLTGAYILLAMGGLLFLLGFLGCCGAVRENKCLLLFFFLFILIIFLAELSAAILAFIFRENLTREFFTKELTKHYQGNNDTDVFSATWNSVMITFGCCGVNGPEDFKFASVFRLLTLDSEEVPEACCRREPQSRDGVLLSREECLLGRSLFLNKQGCYTVILNTFETYVYLAGALAIGVLAIELFAMIFAMCLFRGIQ

SEQ ID NO: 2384 - protein, 198 aa, Homo sapiens
MSILRHWCDRWTDALASGRPIPCLPSGLTRLFLSLQFFLFILIIFLAELSAAILAFIFRENLTREFFTKELTKHYQGNNDTDVFSATWNSVMITFGCCGVNGPEDFKFASVFRLLTLDSEEVPEACCRREPQSRDGVLLSREECLLGRSLFLNKQGCYTVILNTFETYVYLAGALAIGVLAIELFAMIFAMCLFRGIQ

SEQ ID NO: 2385 - protein, 136 aa, Homo sapiens
MTTGRCIAPRVWQFVSAVLFSGIAIMALAFPDQLYDAVFDGAQVTSKTPIRLYGGALLSISLIMWNALYTAEKVIIRWTLLTEACYFGVQFLVVTATLAETGLMSLGILLLLVSRLLFVVISIYYYYQVGRRPKKA

SEQ ID NO: 2386 - protein, 248 aa, Homo sapiens
LIHTVTWRNLKGILLNDRSQPQKIWLTEDATGTQLLSASQLPSTGAGTHPSAEAGLEEKMAAKQPPPLMKKHSQTDLVSRLKTRKILGVGGEDDDGEVHRSKISQVLGNEIKFTIREPLGLRVWQFVSAVLFSGIAIMALAFPDQLYDAVFDGAQVTSKTPIRLYGGALLSISLIMWNALYTAEKVIIRWTLLTEACYFGVQFLVVTATLAETGLMSLGILLLLVSRLLFVVISIYYYYQVGRRPKKA

SEQ ID NO: 2387 - protein, 248 aa, Homo sapiens
LPCPVLPCPALPCPALPGPARAARCEASEPGASAWHQLHVAQRRHARGPPSAEAGLEEKMAAKQPPPLMKKHSQTDLVSRLKTRKILGVGGEDDDGEVHRSKISQVLGNEIKFTIREPLGLRVWQFVSAVLFSGIAIMALAFPDQLYDAVFDGAQVTSKTPIRLYGGALLSISLIMWNALYTAEKVIIRWTLLTEACYFGVQFLVVTATLAETGLMSLGILLLLVSRLLFVVISIYYYYQVGRRPKKA

SEQ ID NO: 2388 - protein, 309 aa, Homo sapiens
LPIYVDRPKKGAPSAELARKVILGGAGHARVSPRGFLPRRLLSGARAPPAGGPRESLAGEPGAWFPRQPPSRPPRRPPWGRGSPARGRGRRAIGLCAEPRGGTSAGRQTRPSAEAGLEEKMAAKQPPPLMKKHSQTDLVSRLKTRKILGVGGEDDDGEVHRSKISQVLGNEIKFTIREPLGLRVWQFVSAVLFSGIAIMALAFPDQLYDAVFDGAQVTSKTPIRLYGGALLSISLIMWNALYTAEKVIIRWTLLTEACYFGVQFLVVTATLAETGLMSLGILLLLVSRLLFVVISIYYYYQVGRRPKKA

SEQ ID NO: 2389 - protein, 87 aa, Homo sapiens [sequence omitted]

SEQ ID NO: 2390 - protein, 123 aa, Homo sapiens
LGAGFAICTQSPKGVGTGVAGGCGGWHQQRGTSQRVWLPHCWSPGPGGGEHTQCLGYPVGCSPAAEETAAWVLPFTSGGFLYIALVNVLPDLLEEEDPWRSLQQLLLLCAGIVVMVLFSLFVD

SEQ ID NO: 2391 - protein, 594 aa, Homo sapiens
MSPGKPGAGGAGTRRTGWRRRRRRRRQEAATTVPGLGRTAGPDSRVRGTFQGARGMKPAAREARLPPRSPGLRWALPLLLLLLRLGQILCAGGTPSPIPDPSVATVATGENGITQISSTAESFHKQNGTGTPQVETNTSEDGESSGANDSLRTPEQGSNGTDGASQKTPSSTGPSPVFDIKAVSISPTNVILTWKSNDTAASEYKYVVKHKMENEKTITVVHQPWCNITGLRPATSYVFSITPGIGNETWGDPRVIKVITEPIPVSDLRVALTGVRKAALSWSNGNGTASCRVLLESIGSHEELTQDSRLQVNISGLKPGVQYNINPYLLQSNKTKGDPLGTEGGLDASNTERSRAGSPTAPVHDESLVGPVDPSSGQQSRDTEVLLVGLEPGTRYNATVYSQAANGTEGQPQAIEFRTNAIQVFDVTAVNISATSLTLIWKVSDNESSSNYTYKIHVAGETDSSNLNVSEPRAVIPGLRSSTFYNITVCPVLGDIEGTPGFLQVHTPPVPVSDFRVTVVSTTEIGLAWSSHDAESFQMHITQEGAGNSRVEITTNQSIIIGGLFPGTKYCFEIVPKGPNGTEGASRTVCNRTG

SEQ ID NO: 2392 - protein, 49 aa, Homo sapiens
LPQDPGVICGAVFGCIFGALVIVTVGGFIFWRKKRKDAKNNEVSFSQIK

SEQ ID NO: 2393 - protein, 502 aa, Homo sapiens
MCFRFFYTTATLIIAFTSAGSAVLLFLAMPMLTIGGILFLITNLQIGNLFGQHRSTIITLYNGAFDSSSAVFLIIKLLYEKGISLRASFIFISVCSTWHVARTFLLMPRGHIPYPLPPNYSYGLCPGNGTTKEEKETAEHENRELQSKEFLSAKEETPGAGQKQELRSFWSYAFSRRFAWHLVWLSVIQLWHYLFIGTLNSLLTNMAGGDMARVSTYTNAFAFTQFGVLCAPWNGLLMDRLKQKYQKEARKTGSFNIRGPHSLCFPNHHLPHATYRDKAKMKLPLLLALLFGAVSALHLRSETSTFETPLGAKTLPEDEETPEQEMEETPCRELEEEEEWGSGSEDASKKDGAVESISVPDMVDKNLTCPEEEDTVKVVGIPGCQTCRYLLVRSLQTFSQAWFTCRRCYRGNLVSIHNFNINYRIQCSVSALNQGQVWIGGRITGSGRCRRFQWVDGSRWNFAYWAAHQPWSRGGHCVALCTRGGHWRRAHCLRRLPFICSY

SEQ ID NO: 2394 - protein, 69 aa, Homo sapiens
LVPSLVMEWTSACFIEQQFCCSEFLDFTSLLLSLQVNVMFMLAILLTFFHPFLVYRECRTWKESPSAIA

SEQ ID NO: 2395 - protein, 493 aa, Homo sapiens
LLMAGQGLPLHVATLLTGLLECLGFAGVLFGWPSLVFVFKNEDYFKDLCGPDAGPIGNATGQADCKAQDERFSLIFTLGSFMNNFMTFPTGYIFDRFKTTVARLIAIFFYTTATLIIAFTSAGSAVLLFLAMPMLTIGGILFLITNLQIGNLFGQHRSTIITLYNGAFDSSSAVFLIIKLLYEKGISLRASFIFISVCSTWHVARTFLLMPRGHIPYPLPPNYSYGLCPGNGTTKEEKETAEHENRELQSKEFLSAKEETPGAGQKQELRSFWSYAFSRRFAWHLVWLSVIQLWHYLFIGTLNSLLTNMAGGDMARVSTYTNAFAFTQFGVLCAPWNGLLMDRLKQKYQKEARKTGSSTLAVALCSTVPSLALTSLLCLGFALCASVPILPLQYLTFILQVISRSFLYGSNAAFLTLAFPSEHFGKLFGLVMALSAVVSLLQFPIFTLIKGSLQNDPFYVNVMFMLAILLTFFHPFLVYRECRTWKESPSAIA

SEQ ID NO: 2396 - protein, 506 aa, Homo sapiens
LLMAGQGLPLHVATLLTGLLECLGFAGVLFGWPSLVFVFKNEDYFKDLCGPDAGPIGNATGQAGRLGCMGDLFSTPDCKAQDERFSLIFTLGSFMNNFMTFPTGYIFDRFKTTVARLIAIFFYTTATLIIAFTSAGSAVLLFLAMPMLTIGGILFLITNLQIGNLFGQHRSTIITLYNGAFDSSSAVFLIIKLLYEKGISLRASFIFISVCSTWHVARTFLLMPRGHIPYPLPPNYSYGLCPGNGTTKEEKETAEHENRELQSKEFLSAKEETPGAGQKQELRSFWSYAFSRRFAWHLVWLSVIQLWHYLFIGTLNSLLTNMAGGDMARVSTYTNAFAFTQFGVLCAPWNGLLMDRLKQKYQKEARKTGSSTLAVALCSTVPSLALTSLLCLGFALCASVPILPLQYLTFILQVISRSFLYGSNAAFLTLAFPSEHFGKLFGLVMALSAVVSLLQFPIFTLIKGSLQNDPFYVNVMFMLAILLTFFHPFLVYRECRTWKESPSAIA

SEQ ID NO: 2397 - protein, 294 aa, Homo sapiens
LLMAGQGLPLHVATLLTGLLECLGFAGVLFGWPSLVFVFKNEDYFKDLCGPDAGPIGNATGQADCKAQDERFSLIFTLGSFMNNFMTFPTGYIFDRFKTTVARLIAIFFYTTATLIIAFTSAGSAVLLFLAMPMLTIGGILFLITNLQIGNLFGQHRSTIITLYNGAFDSSSAVFLIIKLLYEKGISLRASFIFISVCSTWHVARTFLLMPRGHIPYPLPPNYSYGLCPGNGTTKEEKETAEHENRELQSKEFLSAKEDQEGITARSVIDQAVRDRSDFNREEHRGSSKVVGPA

SEQ ID NO: 2398 - protein, 73 aa, Homo sapiens
LLMAGQGLPLHVATLLTGLLECLGFAGVLFGWPSLVFVFKNEDYFKDLCGPDAGPIGNATGQADFSTPPPHSS

SEQ ID NO: 2399 - protein, 77 aa, Homo sapiens
LALFGRGKGDKVFCFPGFLLYSSLLLPSSHFLVCSAAVWAWAMRQGRFPIRAPTCPQSLERDSNPASMSRSLQPPSS

SEQ ID NO: 2400 - protein, 329 aa, Homo sapiens
LRLQLLRPGGPGRRFRQLTWEALTWDALTWDALPASGRLGFRMKDRLEQLKAKQLTQDDDTDAVEIAIDNTAFMDEFFSEIEETRLNIDKISEHVEEAKKLYSIILSAPIPEPKTKDDLEQLTTEIKKRANNVRNKLKSMEKHIEEDEVRSSADLRIRKSQHSVLSRKFVEVMTKYNEAQVDFRERSKGRIQRQLEITGKKTTDEELEEMLESGNPAIFTSGIIDSQISKQALSEIEGRHKDIVRLESSIKELHDMFMDIAMLVENQGSMIDRIENNMDQSVGFVERAVADTKKAVKYQSEARRKKIMIMICCIILAIILASTIGSIFA

SEQ ID NO: 2401 - protein, 203 aa, Homo sapiens
LDSSVNEKMDTESNRRANLALPQEPSSVPAFEVLEISPQEVSSGRLLKSASSPPLHTWLTVLKKEQEFLGVTQILTAMICLCFGTVVCSVLDISHIEGDIFSSFKAGYPFWGAIFFSISGMLSIISERRNATYLVRGSLGANTASSIAGGTGITILIINLKKSLAYIHIHSCQKFFETKCFMASFSTVCIFFCVGRLRFWVLM

SEQ ID NO: 2402 - protein, 252 aa, Homo sapiens
LDSSVNEKMDTESNRRANLALPQEPSSVPAFEVLEISPQEVSSGRLLKSASSPPLHTWLTVLKKEQEFLGVTQILTAMICLCFGTVVCSVLDISHIEGDIFSSFKAGYPFWGAIFFSISGMLSIISERRNATYLVRGSLGANTASSIAGGTGITILIINLKKSLAYIHIHSCQKFFETKCFMASFSTEIVVMMLFLTILGLGSAVSLTICGAGEELKGNKVPEDRVYEELNIYSATYSELEDPGEMSPPIDL

SEQ ID NO: 2403 - protein, 309 aa, Homo sapiens
LRPWRLRSFESKMTTPRNSVNGTFPAEPMKGPIAMQSGPKPLFRRMSSLVGPTQSFFMRESKTLGAVQIMNGLFHIALGGLLMIPAGIYAPICVTVWYPLWGGIMYIISGSLLAATEKNSRKCLVKGKMIMNSLSLFAAISGMILSIMDILNIKISHFLKMESLNFIRAHTPYINIYNCEPANPSEKNSPSTQYCYSIQSLFLGILSVMLIFAFFQELVIAGIVENEWKRTCSRPKSNIVLLSAEEKKEQTIEIKEEVVGLTETSSQPKNEEDIEIIPIQEEEEEETETNFPEPPQDQESSPIENDSSP

SEQ ID NO: 2404 - protein, 296 aa, Homo sapiens
LRPWRLRSFESKMTTPRNSVNGTFPAEPMKGPIAMQSGPKPLFRRMSSLVGPTQSFFMRESKTLGAVQIMNGLFHIALGGLLMIPAGIYAPICVTVWYPLWGGIMYIISGSLLAATEKNSRKCLVKGKMIMNSLSLFAAISGMILSIMDILNIKISHFLKMESLNFIRAHTPYINIYNCEPANPSEKNSPSTQYCYSIQSLFLELVIAGIVENEWKRTCSRPKSNIVLLSAEEKKEQTIEIKEEVVGLTETSSQPKNEEDIEIIPIQEEEEEETETNFPEPPQDQESSPIENDSSP

SEQ ID NO: 2405 - protein, 426 aa, Homo sapiens
LSARCLLSSCCQELTASRAGILCSLCAQSPTMSANATLKPLCPILEQMSRLQSHSNTSIRYIDHAAVLLHGLASLLGLVENGVILFVVGCRMRQTVVTTWVLHLALSDLLASASLPFFTYFLAVGHSWELGTTFCKLHSSIFFLNMFASGFLLSAISLDRCLQVVRPVWAQNHRTVAAAHKVCLVLWALAVLNTVPYFVFRDTISRLDGRIMCYYNVLLLNPGPDRDATCNSRQVALAVSKFLLAFLVPLAIIASSHAAVSLRLQHRGRRRPGRFVRLVAAVVAAFALCWGPYHVFSLLEARAHANPGLRPLVWRGLPFVTSLAFFNSVANPVLYVLTCPDMLRKLRRSLRTVLESVLVDDSELGGAGSSRRRRTSSTARSASPLALCSRPEEPRGPARLLGWLLGSCAASPQTGPLNRALSSTSS

SEQ ID NO: 2406 - protein, 1057 aa, Homo sapiens
LIFAPAPGSAPLGEASAGGRRCLCVFRFEVPETLPTIVRRVPSRPSAPPLGVPSPPAQLCVPFRGSLVRSPRRQEEGRGPAAPSPARGAGAEPSPGDPPPPVMWAGLLLRAACVALLLPGAPARGYTGRKPPGHFAAERRRLGPHVCLSGFGSGCCPGWAPSMGGGHCTLPLCSFGCGSGICIAPNVCSCQDGEQGATCPETHGPCGEYGCDLTCNHGGCQEVARVCPVGFSMTETAVGIRCTDIDECVTSSCEGHCVNTEGGFVCECGPGMQLSADRHSCQDTDECLGTPCQQRCKNSIGSYKCSCRTGFHLHGNRHSCVDVNECRRPLERRVCHHSCHNTVGSFLCTCRPGFRLRADRVSCEAFPKAVLAPSAILQPRQHPSKMLLLLPEAGRPALSPGHSPPSGAPGPPAGVRTTRLPSPTPRLPTSSPSAPVWLLSTLLATPVPTASLLGNLRPPSLLQGEVMGTPSSPRGPESPRLAAGPSPCWHLGAMHESRSRWTEPGCSQCWCEDGKVTCEKVRCEAACSHPIPSRDGGCCPSCTGCFHSGVVRAEGDVFSPPNENCTVCVCLAGNVSCISPECPSGPCQTPPQTDCCTCVPVRCYFHGRWYADGAVFSGGGDECTTCVCQNGEVECSFMPCPELACPREEWRLGPGQCCFTCQEPTPSTGCSLDDNGVEFPIGQIWSPGDPCELCICQADGSVSCKRTDCVDSCPHPIRIPGQCCPDCSAGCTYTGRIFYNNETFPSVLDPCLSCICLLGSVACSPVDCPITCTYPFHPDGECCPVCRDCNYEGRKVANGQVFTLDDEPCTRCTCQLGEVSCEKVPCQRACADPALLPGDCCSSCPDSLSPLEEKQGLSPHGNVAFSKAGRSLHGDTEAPVNCSSCPGPPTASPSRPVLHLLQLLLRTNLMKTQTLPTSPAGAHGPHSLALGLTATFPGEPGASPRLSPGPSTPPGAPTLPLASPGAPQPPPVTPERSFSASGAQIVSRWPPLPGTLLTEASALSMMDPSPSKTPITLLGPRVLSPTTSRLSTALAATTHPGPQQPPVGASRGEESTM

SEQ ID NO: 2407 - protein, 61 aa, Homo sapiens
VMWEAQGETTLGTWTPPVLYIGLGLREGNNQMASLKPAFVNYFFLLLLEVSHLLLIINADV

SEQ ID NO: 2408 - protein, 380 aa, Homo sapiens
LYLEDPFVAFHINKGLVKKYMNSLLIGELSPEQPSFEPTKNKELTDEFRELRATVERMGLMKANHVFFLLYLLHILLLDGAAWLTLWVFGTSFLPFLLCAVLLSAVQAQAGWLQHDFGHLSVFSTSKWNHLLHHFVIGHLKGAPASWWNHMHFQHHAKPNCFRKDPDINMHPFFFALGKILSVELGKQKKKYMPYNHQHKYFFLIGPPALLPLYFQWYIFYFVIQRKKWVDLAWMITFYVRFFLTYVPLLGLKAFLGLFFIVRFLESNWFVWVTQMNHIPMHIDHDRNMDWVSTQLQATCNVHKSAFNDWFSGHLNFQIEHHLFPTMPRHNYHKVAPLVQSLCAKHGIEYQSKPLLSAFADIIHSLKESGQLWLDAYLHQ

SEQ ID NO: 2409 - protein, 397 aa, Homo sapiens
LGTPASCEDWRTRKGQRWPGRDPFVAFHINKGLVKKYMNSLLIGELSPEQPSFEPTKNKELTDEFRELRATVERMGLMKANHVFFLLYLLHILLLDGAAWLTLWVFGTSFLPFLLCAVLLSAVQAQAGWLQHDFGHLSVFSTSKWNHLLHHFVIGHLKGAPASWWNHMHFQHHAKPNCFRKDPDINMHPFFFALGKILSVELGKQKKKYMPYNHQHKYFFLIGPPALLPLYFQWYIFYFVIQRKKWVDLAWMITFYVRFFLTYVPLLGLKAFLGLFFIVRFLESNWFVWVTQMNHIPMHIDHDRNMDWVSTQLQATCNVHKSAFNDWFSGHLNFQIEHHLFPTMPRHNYHKVAPLVQSLCAKHGIEYQSKPLLSAFADIIHSLKESGQLWLDAYLHQ

SEQ ID NO: 2410 - protein, 520 aa, Homo sapiens
LPKTHRGTGSRSPRHEARPMGTRAARPAGLPCGAENPARRRLALGARQQIHSWSPRTPSTRLTAPAGPARGVARPAMAPDPVAAETAAQGPTPRYFTWDEVAQRSGCEERWLVIDRKVYNISEFTRRHPGGSRVISHYAGQDATDPFVAFHINKGLVKKYMNSLLIGELSPEQPSFEPTKNKELTDEFRELRATVERMGLMKANHVFFLLYLLHILLLDGAAWLTLWVFGTSFLPFLLCAVLLSAVQAQAGWLQHDFGHLSVFSTSKWNHLLHHFVIGHLKGAPASWWNHMHFQHHAKPNCFRKDPDINMHPFFFALGKILSVELGKQKKKYMPYNHQHKYFFLIGPPALLPLYFQWYIFYFVIQRKKWVDLAWMITFYVRFFLTYVPLLGLKAFLGLFFIVRFLESNWFVWVTQMNHIPMHIDHDRNMDWVSTQLQATCNVHKSAFNDWFSGHLNFQIEHHLFPTMPRHNYHKVAPLVQSLCAKHGIEYQSKPLLSAFADIIHSLKESGQLWLDAYLHQ

SEQ ID NO: 2411 - protein, 430 aa, Homo sapiens
LRLGAADGMHGREAGPFVCVCVLLASIPTPQTPLLQASLPPFHPASAGHPITGQQDAFRAFHPDLEFVGKFLKPLLIGELAPEEPSQDHGKNSKITEDFRALRKTAEDMNLFKTNHVFFLLLLAHIIALESIAWFTVFYFGNGWIPTLITAFVLATSQAQAGWLQHDYGHLSVYRKPKWNHLVHKFVIGHLKGASANWWNHRHFQHHAKPNIFHKDPDVNMLHVFVLGEWQPIEYGKKKLKYLPYNHQHEYFFLIGPPLLIPMYFQYQIIMTMIVHKNWVDLAWAVSYYIRFFITYIPFYGILGALLFLNFIRFLESHWFVWVTQMNHIVMEIDQEAYRDWFSSQLTATCNVEQSFFNDWFSGHLNFQIEHHLFPTMPRHNLHKIAPLVKSLCAKHGIEYQEKPLLRALLDIIRSLKKSGKLWLDAYLHK

SEQ ID NO: 2412 - protein, 414 aa, Homo sapiens
LMTREPPGCRRVNSLMLYTLRSITSHRSSHPERWATSSQDAFRAFHPDLEFVGKFLKPLLIGELAPEEPSQDHGKNSKITEDFRALRKTAEDMNLFKTNHVFFLLLLAHIIALESIAWFTVFYFGNGWIPTLITAFVLATSQAQAGWLQHDYGHLSVYRKPKWNHLVHKFVIGHLKGASANWWNHRHFQHHAKPNIFHKDPDVNMLHVFVLGEWQPIEYGKKKLKYLPYNHQHEYFFLIGPPLLIPMYFQYQIIMTMIVHKNWVDLAWAVSYYIRFFITYIPFYGILGALLFLNFIRFLESHWFVWVTQMNHIVMEIDQEAYRDWFSSQLTATCNVEQSFFNDWFSGHLNFQIEHHLFPTMPRHNLHKIAPLVKSLCAKHGIEYQEKPLLRALLDIIRSLKKSGKLWLDAYLHK

SEQ ID NO: 2413 - protein, 396 aa, Homo sapiens
VHGASQSAGSMGKGGNQGEGAAEREVSVPTFSWEEIQKHNLRTDRWLVIDRKVYNITKWSIQHPGGQRVIGHYAGEDATDAFRAFHPDLEFVGKFLKPLLIGELAPEEPSQDHGKNSKITEDFRALRKTAEDMNLFKTNHVFFLLLLAHIIALESIAWFTVFYFGNGWIPTLITAFVLATSQAQAGWLQHDYGHLSVYRKPKWNHLVHKFVIGHLKGASANWWNHRHFQHHAKPNIFHKDPDVNMLHVFVLGEWQPIEYGKKKLKYLPYNHQHEYFFLIGPPLLIPMYFQYQIIMTMIVHKNWVDLAWAVSYYIRFFITYIPFYGILGALLFLNFIRFLESHWFVWVTQMNHIVMEIDQEAYRDWFSSQLTATCNVEQSFFNDWFSGHLNFQIEHQ

SEQ ID NO: 2414 - protein, 88 aa, Homo sapiens
VADSFPCALGQQSKITEDFRALRKTAEDMNLFKTNHVFFLLLLAHIIALESIAWFTVFYFGNGWIPTLITAFVLATSQVRRDTLTSPS

SEQ ID NO: 2415 - protein, 52 aa, Homo sapiens
LAWAVSYYIRFFITYIPFYGILGALLFLNFIRCLGFADSSLGPPLALMMALA

SEQ ID NO: 2416 - protein, 425 aa, Homo sapiens
LGALDLTLQDARLEAPQAPLLTDRDSASGSRGRGEALRDAQQDAFRAFHQDLNFVRKFLQPLLIGELAPEEPSQDGPLNAQLVEDFRALHQAAEDMKLFDASPTFFAFLLGHILAMEVLAWLLIYLLGPGWVPSALAAFILAISQAQSWCLQHDLGHASIFKKSWWNHVAQKFVMGQLKGFSAHWWNFRHFQHHAKPNIFHKDPDVTVAPVFLLGESSVEYGKKKRRYLPYNQQHLYFFLIGPPLLTLVNFEVENLAYMLVCMQWADLLWAASFYARFFLSYLPFYGVPGVLLFFVAVRVLESHWFVWITQMNHIPKEIGHEKHRDWVSSQLAATCNVEPSLFTNWFSGHLNFQIEHQCQHTLPTPSLFPRMPRHNYSRVAPLVKSLCAKHGLSYEVKPFLTALVDIVRSLKKSGDIWLDAYLHQ

SEQ ID NO: 2417 - protein, 320 aa, Homo sapiens
LSALLQDAFRAFHQDLNFVRKFLQPLLIGELAPEEPSQDGPLNAQLVEDFRALHQAAEDMKLFDASPTFFAFLLGHILAMEVLAWLLIYLLGPGWVPSALAAFILAISQAQSWCLQHDLGHASIFKKSWWNHVAQKFVMGQLKGFSAHWWNFRHFQHHAKPNIFHKDPDVTVAPVFLLGESSVEYGKKKRRYLPYNQQHLYFFLIGPPLLTLVNFEVENLAYMLVCMQWADLLWAASFYARFFLSYLPFYGVPGVLLFFVAVRYGREWRGHTQATGDPHCSPPPELPFSRLQNGASGTASLACWWNHINTSVAGAQGRWV

SEQ ID NO: 2418 - protein, 87 aa, Homo sapiens
LTAESSCLLSKLLCLLSSFLLNIVSFGVMETHFFIVMTLGAFVSKGGWGDGLQTEVRSSSFLRLDLFKQQTPTDGPEVVVVRVCGCF

SEQ ID NO: 2419 - protein, 143 aa, Homo sapiens
LIHKQEEHQTSSWLRDGFGEYPGAGSSSVFSVLSNSAEVKRERLEDVVGGCCYRVNNSLDHEYQPRPVEVIISSAKEMVGQKMKYSIVSRNCEHFVTQLRYGKSRCKQVEKAKVEVGVATALGILVVAGCSFAIRRYQKKATA

SEQ ID NO: 2420 - protein, 132 aa, Homo sapiens
VRVPLIAGEYPGAGSSSVFSVLSNSAEVKRERLEDVVGGCCYRVNNSLDHEYQPRPVEVIISSAKEMVGQKMKYSIVSRNCEHFVTQLRYGKSRCKQVEKAKVEVGVATALGILVVAGCSFAIRRYQKKATA

SEQ ID NO: 2421 - protein, 392 aa, Homo sapiens
LRAKALGTATTEAQPSDVIIVAIVTAPPGLGARSESPAPRSSSQARKLRAARLGGHLPRHLGGTGDKASLPDMESNLSGLVPAAGLVPALPPAVTLGLTAAYTTLYALLFFSVYAQLWLVLLYGHKRLSYQTVFLALCLLWAALRTTLFSFYFRDTPRANRLGPLPFWLLYCCPVCLQFFTLTLMNLYFAQVVFKAKVKRRPEMSRGLLAVRGAFVGASLLFLLVNVLCAVLSHRRRAQPWALLLVRVLVSDSLFVICALSLAACLCLVARRAPSTSIYLEAKGTSVCQAAAMGGAMVLLYASRACYNLTALALAPQSRLDTFDYDWYNVSDQADLVNDLGNKGYLVFGLILFVWELLPTTLLVGFFRVHRPPQDLYVGQSRLWELVWCHRA

SEQ ID NO: 2422 - protein, 246 aa, Homo sapiens
LQFPPLRIYFPGPADSPSLSVSGIQASLPDMESNLSGLVPAAGLVPALPPAVTLGLTAAYTTLYALLFFSVYAQLWLVLLYGHKRLSYQTVFLALCLLWAALRTTLFSFYFRDTPRANRLGPLPFWLLYCCPVCLQFFTLTLMNLYFAQVVFKAKVKRRPEMSRGLLAVRGAFVGASLLFLLVNVLCAVLSHRRRAQPWALLLVRVLVSDSLFVICALSLAACLCLVARRAPSTSIYLEAKVGLQH

SEQ ID NO: 2423 - protein, 426 aa, Homo sapiens
LQFPPLRIYFPGPADSPSLSVSGIQASLPDMESNLSGLVPAAGLVPALPPAVTLGLTAAYTTLYALLFFSVYAQLWLVLLYGHKRLSYQTVFLALCLLWAALRTTLFSFYFRDTPRANRLGPLPFWLLYCCPVCLQFFTLTLMNLYFAQVVFKAKVKRRPEMSRGLLAVRGAFVGASLLFLLVNVLCAVLSHRRRAQPWALLLVRVLVSDSLFVICALSLAACLCLVARRAPSTSIYLEAKGTSVCQAAAMGGAMVLLYASRACYNLTALALAPQSRLDTFDYDWYNVSDQADLVNDLGNKGYLVFGLILFVWELLPTTLLVGFFRVHRPPQDLSTSHILNGQVFASRSYFFDRAGHCEDEGCSWEHSRGESTSMSGSLGSGSWYGAIGREPGWYGGSQTKTTPLLFSQVPGPGGHHHSLYSTPQT

SEQ ID NO: 2424 - protein, 447 aa, Homo sapiens
LQFPPLRIYFPGPADSPSLSVSGIQASLPDMESNLSGLVPAAGLVPALPPAVTLGLTAAYTTLYALLFFSVYAQLWLVLLYGHKRLSYQTVFLALCLLWAALRTTLFSFYFRDTPRANRLGPLPFWLLYCCPVCLQFFTLTLMNLYFAQVVFKAKVKRRPEMSRGLLAVRGAFVGASLLFLLVNVLCAVLSHRRRAQPWALLLVRVLVSDSLFVICALSLAACLCLVARRAPSTSIYLEAKGTSVCQAAAMGGAMVLLYASRACYNLTALALAPQSRLDTFDYDWYNVSDQADLVNDLGNKGYLVFGLILFVWELLPTTLLVGFFRVHRPPQDLSTSHILNGQVFASRSYFFDRAGHCEDEGCSWEHSRGESTRCQDQAATTTVSTPPHRRDPPPSPTEYPGPSPPHPRPLCQVCLPLLAQDPGGRGYPLLWPAPCCSCHSELVPSP

SEQ ID NO: 2425 - protein, 414 aa, Homo sapiens
LTIVSALSLRRSGDHGPHSGPPGPAGIRRAPGRRGSATAAARHHVPPAPGGPFGPRAPAGSTRVPAGAGGAVEPTGAAAVARLARPAGGALPTAGAQGFQALVLTALLVGLGMSAGLPLGALPEMLLPLAFVATLTAFIFSLFLYMKAQVAPVSALAPGGNSGNPIYDFFLGRELNPRICFFDFKYFCELRPGLIGWVLINLALLMKEAELRGSPSLAMWLVNGFQLLYVGDALWHEEAVLTTMDITHDGFGFMLAFGDMAWVPFTYSLQAQFLLHHPQPLGLPMASVICLINATGYYIFRGANSQKNTFRKNPSDPRVAGLETISTATGRKLLVSGWWGMVRHPNYLGDLIMALAWSLPCGVSHLLPYFYLLYFTALLVHREARDERQCLQKYGLAWQEYCRRVPYRIMPYIY

SEQ ID NO: 2426 - protein, 440 aa, Homo sapiens
VMALPAGAAALLLLLPATMFHLLLAARSGPARLLGPPASLPGLEVLWSPRALLLWLAWLGLQAALYLLPARKVRAPLADARGREANGLGEGKDAPGLIRAPLDPQVAEGQELKDKSRLRYPINGFQALVLTALLVGLGMSAGLPLGALPEMLLPLAFVATLTAFIFSLFLYMKAQVAPVSALAPGGNSGNPIYDFFLGRELNPRICFFDFKYFCELRPGLIGWVLINLALLMKEAELRGSPSLAMWLVNGFQLLYVGDALWHEEAVLTTMDITHDGFGFMLAFGDMAWVPFTYSLQAQFLLHHPQPLGLPMASVICLINATGYYIFRGANSQKNTFRKNPSDPRVAGLETISTATGRKLLVSGWWGMVRHPNYLGDLIMALAWSLPCGVSHLLPYFYLLYFTALLVHREARDERQCLQKYGLAWQEYCRRVPYRIMPYIY

SEQ ID NO: 2427 - protein, 138 aa, Homo sapiens
LLLWLAWLGLQAALYLLPARKVAEGQELKDKSRLRYPINGFQALVLTALLVGLGMSAGLPLGALPEMLLPLAFVATLTAFIFSLFLYMKAQVAPVSALAPGGNSGPHQPGPVDEGGRASRQSLTGHVAGQWLPVALRG

SEQ ID NO: 2428 - protein, 141 aa, Homo sapiens
LGSACVCGVGMWRRAAPGLTVRCGSGFQALVLTALLVGLGMSAGLPLGALPEMLLPLAFVATLTAFIFSLFLYMKAQVAPVSALAPGGNSGERGPGVETEADWGVCLYIHSPIFSRQSDLRLFSGTRAQPSYLFLRLQIFL

SEQ ID NO: 2429 - protein, 175 aa, Homo sapiens
LGSACVCGVGMWRRAAPGLTVRCGSGFQALVLTALLVGLGMSAGLPLGALPEMLLPLAFVATLTAFIFSLFLYMKAQVAPVSALAPGGNSGNPIYDFFLGRELNPRICFFDFKYFCELRPGLIGWVLINLALLMKEAELRGSPSLAMWLVNGFQLLYVGDALWHEVRLDWTRVGV

SEQ ID NO: 2430 - protein, 100 aa, Homo sapiens
LVLTALLVGLGMSAGLPLGALPEMLLPLAFVATLTAFIFSLFLYMKAQVAPVSALAPGGNSGNPIYDFFLGRELNPRICFFDFKYFCELRPGLIGWVCWA

SEQ ID NO: 2431 - protein, 170 aa, Homo sapiens
LAPGGNSGNPIYDFFLGRELNPRICFFDFKYFCELRPGLIGWVLINLALLMKEAELRGSPSLAMWLVNGFQLLYVGDALWHEEAVLTTMDITHDGFGFMLAFGDMAWVPFTYSLQAQFLLHHPQPLGLPMASVICLINATGYYIFRGANSQKNTFRKNPSDPRVAGELVL

SEQ ID NO: 2432 - protein, 1380 aa, Homo sapiens
LVWASSWGWEVSALPAVQSASPRLPPGPRGPLPPASPAALPRCPLPSPGAPGPLLPSGAGPSPRPGAPPLPRVLRPRMPGPRGAAGGLAPEMRGAGAAGLLALLLLLLLLLLGLGGRVEGGPAGERGAGGGGALARERFKVVFAPVICKRTCLKGQCRDSCQQGSNMTLIGENGHSTDTLTGSGFRVVVCPLPCMNGGQCSSRNQCLCPPDFTGRFCQVPAGGAGGGTGGSGPGLSRTGALSTGALPPLAPEGDSVASKHAIYAVQVIADPPGPGEGPPAQHAAFLVPLGPGQISAEVQAPPPVVNVRVHHPPEASVQVHRIESSNAESAAPSQHLLPHPKPSHPRPPTQKPLGRCFQDTLPKQPCGSNPLPGLTKQEDCCGSIGTAWGQSKCHKCPQLQYTGVQKPGPVRGEVGADCPQGYKRLNSTHCQDINECAMPGVCRHGDCLNNPGSYRCVCPPGHSLGPSRTQCIADKPEEKSLCFRLVSPEHQCQHPLTTRLTRQLCCCSVGKAWGARCQRCPTDGTAAFKEICPAGKGYHILTSHQTLTIQGESDFSLFLHPDGPPKPQQLPESPSQAPPPEDTEEERGVTTDSPVSEERSVQQSHPTATTTPARPYPELISRPSPPTMRWFLPDLPPSRSAVEIAPTQVTETDECRLNQNICGHGECVPGPPDYSCHCNPGYRSHPQHRYCVDVNECEAEPCGPGRGICMNTGGSYNCHCNRGYRLHVGAGGRSCVDLNECAKPHLCGDGGFCINFPGHYKCNCYPGYRLKASRPPVCEDIDECRDPSSCPDGKCENKPGSFKCIACQPGYRSQGGGACRDVNECAEGSPCSPGWCENLPGSFRCTCAQGYAPAPDGRSCLDVDECEAGDVCDNGICSNTPGSFQCQCLSGYHLSRDRSHCEDIDECDFPAACIGGDCINTNGSYRCLCPQGHRLVGGRKCQDIDECSQDPSLCLPHGACKNLQGSYVCVCDEGFTPTQDQHGCEEVEQPHHKKECYLNFDDTVFCDSVLATNVTQQECCCSLGAGWGDHCEIYPCPVYSSAEFHSLCPDGKGYTQDNNIVNYGIPAHRDIDECMLFGSEICKEGKCVNTQPGYECYCKQGFYYDGNLLECVDVDECLDESNCRNGVCENTRGGYRCACTPPAEYSPAQRQCLSPEEMDVDECQDPAACRPGRCVNLPGSYRCECRPPWVPGPSGRDCQLPESPAERAPERRDVCWSQRGEDGMCAGPLAGPALTFDDCCCRQGRGWGAQCRPCPPRGAGSHCPTSQSESNSFWDTSPLLLGKPPRDEDSSEEDSDECRCVSGRCVPRPGGAVCECPGGFQLDASRARCVDIDECRELNQRGLLCKSERCVNTSGSFRCVCKAGFARSRPHGACVPQRRR

SEQ ID NO: 2433 - protein, 120 aa, Homo sapiens
LRPRMPGPRGAAGGLAPEMRGAGAAGLLALLLLLLLLLLGLGGRVEGGPAGERGAGGGGALARERFKVVFAPVICKRTCLKGQCRDSCQQGSNMTLIGENGHSTDTLTGSGFRWCALSPA

SEQ ID NO: 2434 - protein, 516 aa, Homo sapiens
LEGGLRPRWPRARYPVGRWSVCWVRAAGFALAMAPWLQLLSLLGLLPGAVAAPAQPRAASFQAWGPPSPELLAPTRFALEMFNRGRAAGTRAVLGLVRGRVRRAGQGSLYSLEATLEEPPCNDPMVCRLPVSKKTLLCSFQVLDELGRHVLLRKDCGPVDTKVPGAGEPKSAFTQGSAMISSLSQNHPDNRNETFSSVISLLNEDPLSQDLPVKMASIFKNFVITYNRTYESKEEARWRLSVFVNNMVRAQKIQALDRGTAQYGVTKFSDLTEEEFRTIYLNTLLRKEPGNKMKQAKSVGDLAPPEWDWRSKGAVTKVKDQGMCGSCWAFSVTGNVEGQWFLNQGTLLSLSEQELLDCDKMDKACMGGLPSNAYSAIKNLGGLETEDDYSYQGHMQSCNFSAEKAKVYINDSVELSQNEQKLAAWLAKRGPISVAINAFGMQFYRHGISRPLRPLCSPWLIDHAVLLVGYGNRSDVPFWAIKNSWGTDWGEKGYYYLHRGSGACGVNTMASSAVVD

SEQ ID NO: 2435 - protein, 1068 aa, Homo sapiens
VRQGQAWGSRAGTLCPAGVPHCTCLSEALSQSLLMKDERTEDVMLAAALPAVLGTNPCADRNGGCSHLCFFTPHATRCGCPIGLELLSDMKTCIVPEAFLVFTSRAAIHRISLETNNNDVAIPLTGVKEASALDFDVSNNHIYWTDVSLKTISRAFMNGSSVEHVVEFGLDYPEGMAVDWMGKNLYWADTGTNRIEVARLDGQFRQVLVWRDLDNPRSLALDPTKGYIYWTEWGGKPRIVRAFMDGTNCMTLVDKVGRANDLTIDYADQRLYWTDLDTNMIESSNMLGQERVVIADDLPHPFGLTQYSDYIYWTDWNLHSIERADKTSGRNRTLIQGHLDFVMDILVFHSSRQDGLNDCMHNNGQCGQLCLAIPGGHRCGCASHYTLDPSSRNCSPPTTFLLFSQKSAISRMIPDDQHSPDLILPLHGLRNVKAIDYDPLDKFIYWVDGRQNIKRAKDDGTQPFVLTSLSQGQNPDRQPHDLSIDIYSRTLFWTCEATNTINVHRLSGEAMGVVLRGDRDKPRAIVVNAERGYLYFTNMQDRAAKIERAALDGTEREVLFTTGLIRPVALVVDNTLGKLFWVDADLKRIESCDLSGANRLTLEDANIVQPLGLTILGKHLYWIDRQQQMIERVEKTTGDKRTRIQGRVAHLTGIHAVEEVSLEEFSAHPCARDNGGCSHICIAKGDGTPRCSCPVHLVLLQNLLTCGEPPTCSPDQFACATGEIDCIPGAWRCDGFPECDDQSDEEGCPVCSAAQFPCARGQCVDLRLRCDGEADCQDRSDEADCDAICLPNQFRCASGQCVLIKQQCDSFPDCIDGSDELMCEITKPPSDDSPAHSSAIGPVIGIILSLFVMGGVYFVCQRVVCQRYAGANGPFPHEYVSGTPHVPLNFIAPGGSQHGPFTGIACGKSMMSSVSLMGGRGGVPLYDRNHVTGASSSSSSSTKATLYPPILNPPPSPATDPSLYNMDMFYSSNIPATARPYRPYIIRGMAPPTTPCSTDVCDSDYSASRWKASKYYLDLNSDSDPYPPPPTPHSQYLSAEDSCPPSPATERSYFHLFPPPPSPCTDSS

SEQ ID NO: 2436 - protein, 208 aa, Homo sapiens
VTRLRAAPGCAAYIAAAAVAAATPGGGHVEGPGPRLLPLLPAAPCGERPRPPEPTRPGPTPGPAAQTRHRTRTPTLRTRAQPQLKMARGSALLLASLLLAAALSASAGLWSPAKEKRGWTLNSAGYLLGPHAVGNHRSFSDKNGLTSKRELRPEDDMKPGSFDRSIPENNIMRTIIEFLSFLHLKEAGALDRLLDLPAAASSEDIERS

SEQ ID NO: 2437 - protein, 763 aa, Homo sapiens
LTRYSLKMAEAHQAVAFQFTVTPDGIDLRLSHEALRQIYLSGLHSWKKKFIRFKNGIITGVYPASPSSWLIVVVGVMTTMYAKIDPSLGIIAKINRTLETANCMSSQTKNVVSGVLFGTGLWVALIVTMRYSLKVLLSYHGWMFTEHGKMSRATKIWMGMVKIFSGRKPMLYSFQTSLPRLPVPAVKDTVNRYLQSVRPLMKEEDFKRMTALAQDFAVGLGPRLQWYLKLKSWWATNYVSDWWEEYIYLRGRGPLMVNSNYYAMDLLYILPTHIQAARAGNAIHAILLYRRKLDREEIKPIRLLGSTIPLCSAQWERMFNTSRIPGEETDTIQHMRDSKHIVVYHRGRYFKVWLYHDGRLLKPREMEQQMQRILDNTSEPQPGEARLAALTAGDRVPWARCRQAYFGRGKNKQSLDAVEKAAFFVTLDETEEGYRSEDPDTSMDSYAKSLLHGRCYDRWFDKSFTFVVFKNGKMGLNAEHSWADAPIVAHLWEYVMSIDSLQLGYAEDGHCKGDINPNIPYPTRLQWDIPGECQEVIETSLNTANLLANDVDFHSFPFVAFGKGIIKKCRTSPDAFVQLALQLAHYKDMGKFCLTYEASMTRLFREGRTETVRSCTTESCDFVRAMVDPAQTVEQRLKLFKLASEKHQHMYRLAMTGSGIDRHLFCLYVVSKYLAVESPFLKEVLSEPWRLSTSQTPQQQVELFDLENNPEYVSSGGGFGPVADDGYGVSYILVGENLINFHISSKFSCPETGIISQGPSSDT

SEQ ID NO: 2438 - protein, 780 aa, Homo sapiens
LTRYSLKMAEAHQAVAFQFTVTPDGIDLRLSHEALRQIYLSGLHSWKKKFIRFKNGIITGVYPASPSSWLIVVVGVMTTMYAKIDPSLGIIAKINRTLETANCMSSQTKNVVSGVLFGTGLWVALIVTMRYSLKVLLSYHGWMFTEHGKMSRATKIWMGMVKIFSGRKPMLYSFQTSLPRLPVPAVKDTVNRYLQSVRPLMKEEDFKRMTALAQDFAVGLGPRLQWYLKLKSWWATNYVSDWWEEYIYLRGRGPLMVNSNYYAMDLLYILPTHIQAARAGNAIHAILLYRRKLDREEIKPIRLLGSTIPLCSAQWERMFNTSRIPGEETDTIQHMRDSKHIVVYHRGRYFKVWLYHDGRLLKPREMEQQMQRILDNTSEPQPGEARLAALTAGDRVPWARCRQAYFGRGKNKQSLDAVEKAAFFVTLDETEEGYRSEDPDTSMDSYAKSLLHGRCYDRWFDKSFTFVVFKNGKMGLNAEHSWADAPIVAHLWEYVMSIDSLQLGYAEDGHCKGDINPNIPYPTRLQWDIPGECQEVIETSLNTANLLANDVDFHSFPFVAFGKGIIKKCRTSPDAFVQLALQLAHYKDMGKFCLTYEASMTRLFREGRTETVRSCTTESCDFVRAMVDPAQTVEQRLKLFKLASEKHQHMYRLAMTGSGIDRHLFCLYVVSKYLAVESPFLKEVLSEPWRLSTSQTPQQQVELFDLENNPEYVSSGGGFGPVADDGYGVSYILVGENLINFHISSKFSCPETDSHRFGRHLKEAMTDIITLFGLSSNSKK

SEQ ID NO: 2439 - protein, 84 aa, Homo sapiens
VARVWRLTCEGGQAGGGVRRRLPRGRGGAHTGDRPQLHFLIALLPLTSRHGLEIFTSLLCISFTLFAAIGGSVFCFTMSYTAMY

SEQ ID NO: 2440 - protein, 55 aa, Homo sapiens
LVLGWFWVFSVFFFFFFFLKVGRGIYTLLLYLILLLMLLKMFMPQNLLIYCNHIP

SEQ ID NO: 2441 - protein, 217 aa, Homo sapiens
VVPGLGRLCLAALSLHAAEENTEARRVSEAELGFDPRPLGPRAHTPVLSLGKAPLDPFPLAPQGLYLVYHPVQLSTPHAVGVLLLGLVGYYIFRVANHQKDLFRRTDGRCLIWGRKPKVIECSYTSADGQRHHSKLLVSGFWGVARHFNYVGDLMGSLAYCLACGGGHLLPYFYIIYMAILLTHRCLRDEHRCASKYGRDWERYTAAVPYRLLPGIF

SEQ ID NO: 2442 - protein, 509 aa, Homo sapiens
VPGWAALQAPAADPVPQPPSPEAWAWPGQIGLVVILASTVVAMSAVAQLWEDEWEVLLISLQGTAPFLHVGAVAAVTMLSWIVAGQFARAERTSSQVTILCTFFTVVFALYLAPLTISSPCIMEKKDLGPKPALIGHRGAPMLAPEHTLMSFRKALEQKLYGLQADITISLDGVPFLMHDTTLRRTTNVEEEFPELARRPASMLNWTTLQRLNAGQWFLKTDPFWTASSLSPSDHREAQNQSICSLAELLELAKGNATLLLNLRDPPREHPYRSSFINVTLEAVLHSGFPQHQVMWLPSRQRPLVRKVAPGFQQTSGSKEAVASLRRGHIQRLNLRYTQVSRQELRDYASWNLSVNLYTVNAPWLFSLLWCAGVPSVTSDNSHALSQVPSPLWIMPPDEYCLMWVTADLVSFTLIVGIFVLQKWRLGGIRSYNPEQIMLSAAVRRTSRDVSIMKEKLIFSEISDGVEVSDVLSVCSDNSYDTYANSTATPVGPRGGGSHTKTLIERSGR

SEQ ID NO: 2443 - protein, 565 aa, Homo sapiens
LQSWHLKELHQLAPRVGLAHAVVTFWGHAWLSAGCPEHTALLFCPRLTPLPQWQQPPAQDLHRGGVCQRPNLSPREEHWVPHSPKIGLVVILASTVVAMSAVAQLWEDEWEVLLISLQGTAPFLHVGAVAAVTMLSWIVAGQFARAERTSSQVTILCTFFTVVFALYLAPLTISSPCIMEKKDLGPKPALIGHRGAPMLAPEHTLMSFRKALEQKLYGLQADITISLDGVPFLMHDTTLRRTTNVEEEFPELARRPASMLNWTTLQRLNAGQWFLKTDPFWTASSLSPSDHREAQNQSICSLAELLELAKGNATLLLNLRDPPREHPYRSSFINVTLEAVLHSGFPQHQVMWLPSRQRPLVRKVAPGFQQTSGSKEAVASLRRGHIQRLNLRYTQVSRQELRDYASWNLSVNLYTVNAPWLFSLLWCAGVPSVTSDNSHALSQVPSPLWIMPPDEYCLMWVTADLVSFTLIVGIFVLQKWRLGGIRSYNPEQIMLSAAVRRTSRDVSIMKEKLIFSEISDGVEVSDVLSVCSDNSYDTYANSTATPVGPRGGGSHTKTLIERSGR

SEQ ID NO: 2444 - protein, 490 aa, Homo sapiens
VGTSMVRHQPLQYYEPQLCLSCLTGIYGCRWKRYQRSHDDTTPGTAPFLHVGAVAAVTMLSWIVAGQFARAERTSSQVTILCTFFTVVFALYLAPLTISSPCIMEKKDLGPKPALIGHRGAPMLAPEHTLMSFRKALEQKLYGLQADITISLDGVPFLMHDTTLRRTTNVEEEFPELARRPASMLNWTTLQRLNAGQWFLKTDPFWTASSLSPSDHREAQNQSICSLAELLELAKGNATLLLNLRDPPREHPYRSSFINVTLEAVLHSGFPQHQVMWLPSRQRPLVRKVAPGFQQTSGSKEAVASLRRGHIQRLNLRYTQVSRQELRDYASWNLSVNLYTVNAPWLFSLLWCAGVPSVTSDNSHALSQVPSPLWIMPPDEYCLMWVTADLVSFTLIVGIFVLQKWRLGGIRSYNPEQIMLSAAVRRTSRDVSIMKEKLIFSEISDGVEVSDVLSVCSDNSYDTYANSTATPVGPRGGGSHTKTLIERSGR

SEQ ID NO: 2445 - protein, 195 aa, Homo sapiens
VAQLWEDEWEVLLISLQGTAPFLHVGAVAAVTMLSWIVAGQFARAERTSSQVTILCTFFTVVFALYLAPLTISSPCIMEKKDLGPKPALIGHRGAPMLAPEHTLMSFRKALEQKLYGLQADITISLDGVPFLMHDTTLRRTTNVEEEFPELARRPASMLNWTTLQRLNAGQWFLKVWLHLIPILGMENTSRDCKE

SEQ ID NO: 2446 - protein, 224 aa, Homo sapiens
MGYWSDWPVPILVTTAAAFAYIAGLLVLALCHIAVGQQMNLHWLHKGTAPFLHVGAVAAVTMLSWIVAGQFARAERTSSQVTILCTFFTVVFALYLAPLTISSPCIMEKKDLGPKPALIGHRGAPMLAPEHTLMSFRKALEQKLYGLQADITISLDGVPFLMHDTTLRRTTNVEEEFPELARRPASMLNWTTLQRLNAGQWFLKVWLHLIPILGMENTSRDCKE

SEQ ID NO: 2447 - protein, 467 aa, Homo sapiens
VLRSGTPAPRLPPLLGSRLFLSRHHWPPAAAPGVLAAQPRRRPGTPVLCAKPWPRGPGHGPGARGEAASRGAVTGRASAMKTLIAAYSGVLRGERQAEADRSQRSHGGPALSREGSGRWGTGSSILSALQDLFSVTWLNRSKVEKQLQVISVLQWVLSFLVLGVACSAILMYIFCTDCWLIAVLYFTWLVFDWNTPKKGGRRSQWVRNWAVWRYFRDYFPIQLVKTHNLLTTRNYIFGYHPHGIMGLGAFCNFSTEATEVSKKFPGIRPYLATLAGNFRMPVLREYLMSGGICPVSRDTIDYLLSKNGSGNAIIIVVGGAAESLSSMPGKNAVTLRNRKGFVKLALRHGADLVPIYSFGENEVYKQVIFEEGSWGRWVQKKFQKYIGFAPCIFHGRGLFSSDTWGLVPYSKPITTVVGEPITIPKLEHPTQQDIDLYHTMYMEALVKLFDKHKTKFGLPETEVLEVN

SEQ ID NO: 2448 - protein, 424 aa, Homo sapiens
VLRSGTPAPRLPPLLGSRLFLSRHHWPPAAAPGVLAAQPRRRPGTPVLCAKPWPRGPGHGPGARGEAASRGAVTGRASAMKTLIAAYSGVLRGERQAEADRSQRSHGGPALSREGSGRWGVACSAILMYIFCTDCWLIAVLYFTWLVFDWNTPKKGGRRSQWVRNWAVWRYFRDYFPIQLVKTHNLLTTRNYIFGYHPHGIMGLGAFCNFSTEATEVSKKFPGIRPYLATLAGNFRMPVLREYLMSGGICPVSRDTIDYLLSKNGSGNAIIIVVGGAAESLSSMPGKNAVTLRNRKGFVKLALRHGADLVPIYSFGENEVYKQVIFEEGSWGRWVQKKFQKYIGFAPCIFHGRGLFSSDTWGLVPYSKPITTVVGEPITIPKLEHPTQQDIDLYHTMYMEALVKLFDKHKTKFGLPETEVLEVN

SEQ ID NO: 2449 - protein, 511 aa, Homo sapiens
LAPRGPDWRLLPRHRGPPAQGRSASGPLGCSTLLRPQASGEGRGARFMCSGAGGVRAASPRPEAGRAGLGWRGGRTRQLPALLASLLALGCAAGQAWEPRALSRRPHLSERRSEPRPGRAARRGTVLGMAGIPGLLFLLFFLLCAVGQVSPYSAPWKPTWPAYRLPVVLPQSTLNLAKPDFGAEAKLEVSSSCGPQCHKGTPLPTYEEAKQYLSYETLYANGSRTETQVGIYILSSSGDGAQHRDSGSSGKSRRKRQIYGYDSRFSIFGKDFLLNYPFSTSVKLSTGCTGTLVAEKHVLTAAHCIHDGKTYVKGTQKLRVGFLKPKFKDGGRGANDSTSAMPEQMKFQWIRVKRTHVPKGWIKGNANDIGMDYDYALLELKKPHKRKFMKIGVSPPAKQLPGGRIHFSGYDNDRPGNLVYRFCDVKDETYDLLYQQCDAQPGASGSGVYVRMWKRQQQKWERKIIGIFSGHQWVDMNGSPQDFNVAVRITPLKYAQICYWIKGNYLDCREG

SEQ ID NO: 2450 - protein, 82 aa, Homo sapiens
MALLCYNRGCGQRFDPETNSDDACTYHPGVPVFHDALKVGTIFSFFSYLCSKLRDVILNLYFLIFFSQLVTFFLMTFAGEVL

SEQ ID NO: 2451 - protein, 46 aa, Homo sapiens
LGGNYRDFSNNILCQMLPSLWSMGFHFCHISFLGKGLLPPVPAEPS

SEQ ID NO: 2452 - protein, 874 aa, Homo sapiens
LFFLGTAVSLQVDIVPSQGEISVGESKFFLCQVAGDAKDKDISWFSPNGEKLTPNQQRISVVWNDDSSSTLTIYNANIDDAGIYKCVVTGEDGSESEATVNVKIFQKLMFKNAPTPQEFREGEDAVIVCDVVSSLPPTIIWKHKGRDVILKKDVRFIVLSNNYLQIRGIKKTDEGTYRCEGRILARGEINFKDIQVIVNVPPTIQARQNIVNATANLGQSVTLVCDAEGFPEPTMSWTKDGEQIEQEEDDEKYIFSDDSSQLTIKKVDKNDEAEYICIAENKAGEQDATIHLKVFAKPKITYVENQTAMELEEQVTLTCEASGDPIPSITWRTSTRNISSEEKASWTRPEKQEVHAPWNWQVGRQKGQAGSAGFPGSHETLDGHMVVRSHARVSSLTLKSIQYTDAGEYICTASNTIGQDSQSMYLEVQYAPKLQGPVAVYTWEGNQVNITCEVFAYPSATISWFRDGQLLPSSNYSNIKIYNTPSASYLEVTPDSENDFGNYNCTAVNRIGQESLEFILVQADTPSSPSIDQVEPYSSTAQVQFDEPEATGGVPILKYKAEWRAVGEEVWHSKWYDAKEASMEGIVTIVGLKPETTYAVRLAALNGKGLGEISAASEFKTQPVQGEPSAPKLEGQMGEDGNSIKVNLIKQDDGGSPIRHYLVRYRALSSEWKPEIRLPSGSDHVMLKSLDWNAEYEVYVVAENQQGKSKAAHFVFRTSAQPTAIPANGSPTSGLSTGAIVGILIVIFVLLLVVVDITCYFLNKCGLFMCIAVNLCGKAGPGAKGKDMEEGKAAFSKDESKEPIVEVRTEEERTPNHDGGKHTEPNETTPLTEPEKGPVEAKPECQETETKPAPAEVKTVPNDATQTKENESKA

SEQ ID NO: 2453 - protein, 832 aa, Homo sapiens
LQVDIVPSQGEISVGESKFFLCQVAGDAKDKDISWFSPNGEKLTPNQQRISVVWNDDSSSTLTIYNANIDDAGIYKCVVTGEDGSESEATVNVKIFQKLMFKNAPTPQEFREGEDAVIVCDVVSSLPPTIIWKHKGRDVILKKDVRFIVLSNNYLQIRGIKKTDEGTYRCEGRILARGEINFKDIQVIVNVPPTIQARQNIVNATANLGQSVTLVCDAEGFPEPTMSWTKDGEQIEQEEDDEKYIFSDDSSQLTIKKVDKNDEAEYICIAENKAGEQDATIHLKVFAKPKITYVENQTAMELEEQVTLTCEASGDPIPSITWRTSTRNISSEEKTLDGHMVVRSHARVSSLTLKSIQYTDAGEYICTASNTIGQDSQSMYLEVQYAPKLQGPVAVYTWEGNQVNITCEVFAYPSATISWFRDGQLLPSSNYSNIKIYNTPSASYLEVTPDSENDFGNYNCTAVNRIGQESLEFILVQADTPSSPSIDQVEPYSSTAQVQFDEPEATGGVPILKYKAEWRAVGEEVWHSKWYDAKEASMEGIVTIVGLKPETTYAVRLAALNGKGLGEISAASEFKTQPVQGEPSAPKLEGQMGEDGNSIKVNLIKQDDGGSPIRHYLVRYRALSSEWKPEIRLPSGSDHVMLKSLDWNAEYEVYVVAENQQGKSKAAHFVFRTSAQPTAIPANGSPTSGLSTGAIVGILIVIFVLLLVVVDITCYFLNKCGLFMCIAVNLCGKAGPGAKGKDMEEGKAAFSKDESKEPIVEVRTEEERTPNHDGGKHTEPNETTPLTEPELPADTTATVEDMLPSVTTVTTNSDTITETFATAQNSPTRRAP

SEQ ID NO: 2454 - protein, 90 aa, Homo sapiens
VRARQVQVTLSKGFLSQELTQAWKPRGALADRGGSPKGDVDPFYYDYETVRNGGLIFAGLAFIVGLLILLSRRFRCGGNKKRRQINEDEP

SEQ ID NO: 2455 - protein, 75 aa, Homo sapiens
VEAAHSPGEMTGLSMDGGGSPKGDVDPFYYDYETVRNGGLIFAGLAFIVGLLILLSRRFRCGGNKKRRQINEDEP

SEQ ID NO: 2456 - protein, 91 aa, Homo sapiens
VPLSIQAPGKQHLPALLHSWTQPAAPAMDRWYLGGSPKGDVDPFYYDYETVRNGGLIFAGLAFIVGLLILLSRRFRCGGNKKRRQINEDEP

SEQ ID NO: 2457 - protein, 156 aa, Homo sapiens
LGVSEGTGCADAMELVLVFLCSLLAPMVLASAAEKEKEMDPFHYDYQTLRIGGLVFAVVLFSVGILLILSRRCKCSFNQKPRNRAPESRELKCSHQVEGGSPKGDVDPFYYDYETVRNGGLIFAGLAFIVGLLILLSRRFRCGGNKKRRQINEDEP

SEQ ID NO: 2458 - protein, 154 aa, Homo sapiens
VEAAHSPGEMTGLSMDGGGSPKGDVDPFYYGKPGPLRTLPEPSGPLPPSSGLSQPQVHALCPLSPLVTTGCCGQAAERDSCWERPPIPLLLPSLSGDYETVRNGGLIFAGLAFIVGLLILLSKWGGLQGRGADQGTSLLKAAEQAGFRELPREG

SEQ ID NO: 2459 - protein, 588 aa, Homo sapiens
LRSQGPRWIFSSTSAKPGGLFPSETMERDSHGNASPARTPSAGASPAQASPAGTPPGRASPAQASPAQASPAGTPPGRASPAQASPAGTPPGRASPGRASPAQASPAQASPARASPALASLSRSSSGRSSSARSASVTTSPTRVYLVRATPVGAVPIRSSPARSAPATRATRESPGTSLPKFTWREGQKQLPLIGCVLLLIALVVSLIILFQFWQGHTGIRYKEQRESCPKHAVRCDGVVDCKLKSDELGCVRFDWDKSLLKIYSGSSHQWLPICSSNWNDSYSEKTCQQLGFESAHRTTEVAHRDFANSFSILRYNSTIQESLHRSECPSQRYISLQCSHCGLRAMTGRIVGGALASDSKWPWQVSLHFGTTHICGGTLIDAQWVLTAAHCFFVTREKVLEGWKVYAGTSNLHQLPEAASIAEIIINSNYTDEEDDYDIALMRLSKPLTLSAHIHPACLPMHGQTFSLNETCWITGFGKTRETDDKTSPFLREVQVNLIDFKKCNDYLVYDSYLTPRMMCAGDLRGGRDSCQGDSGGPLVCEQNNRWYLAGVTSWGTGCGQRNKPGVYTKVTEVLPWIYSKMESSAG

SEQ ID NO: 2460 - protein, 526 aa, Homo sapiens
LALQLLYPTCLRSQGPRWIFSSTSAKPGGLFPSETMERDSHGNASPARTPSAGASPAQASPAGTPPGRASPAQASPAQASPAGTPPGRASPAQASPAGTPPGRASPGRASPAQASPAQASPARASPALASLSRSSSGRSSSARSASVTTSPTRVYLVRATPVGAVPIRSSPARSAPATRATRESPGTSLPKFTWREGQKQLPLIGCVLLLIALVVSLIILFQFWQGHTGIRYKEQRESCPKHAVRCDGVVDCKLKSDELGCVRFDWDKSLLKIYSGSSHQWLPICSSNWNDSYSEKTCQQLGFESAHRTTEVAHRDFANSFSILRYNSTIQESLHRSECPSQRYISLQCSHCGLRAMTGRIVGGALASDSKWPWQVSLHFGTTHICGGTLIDAQWVLTAAHCFFVTREKVLEGWKVYAGTSNLHQLPEAASIAEIIINSNYTDEEDDYDIALMRLSKPLTLSGEGICTPRSPAPQPQHPLQPSHLSASVNSYPGPKASAGQKSKTLKDPYMEHFCFIIRETEAQGL

SEQ ID NO: 2461 - protein, 558 aa, Homo sapiens
MSRTELPSPPSVWFEAEFFHHILHWTPIPNQSESTCYEVALLRYGIESWNSISNCSQTLSYDLTAVTLDLYHSNGYRARVRAVDGSRHSNWTVTNTRFSVDEVTLTVGSVNLEIHNGFILGKIQLPRPKMAPANDTYESIFSHFREYEIAIRKVPGNFTFTHKKVKHENFSLLTSGEVGEFCVQVKPSVASRSNKGMWSKEECISLTRQYFTVTNVIIFFAFVLLLSGALAYCLALQLYVRRRKKLPSVLLFKKPSPFIFISQRPSPETQDTIHPLDEEAFLKVSPELKNLDLHGSTDSGFGSTKPSLQTEEPQFLLPDPHPQADRTLGNREPPVLGDSCSSGSSNSTDSGICLQEPSLSPSTGPTWEQQVGSNSRGQDDSGIDLVQNSEGRAGDTQGGSALGHHSPPEPEVPGEEDPAAVAFQGYLRQTRCAEEKATKTGCLEEESPLTDGLGPKFGRCLVDEAGLHPPALAKGYLKQDPLEMTLASSGAPTGQWNQPTEEWSLLALSSCSDLGISDWSFAHDLAPLGCVAAPGGLLGSFNSDLVTLPLISSLQSSE

SEQ ID NO: 2462 - protein, 570 aa, Homo sapiens
LPPLPAVVLTLFSPGTELPSPPSVWFEAEFFHHILHWTPIPNQSESTCYEVALLRYGIESWNSISNCSQTLSYDLTAVTLDLYHSNGYRARVRAVDGSRHSNWTVTNTRFSVDEVTLTVGSVNLEIHNGFILGKIQLPRPKMAPANDTYESIFSHFREYEIAIRKVPGNFTFTHKKVKHENFSLLTSGEVGEFCVQVKPSVASRSNKGMWSKEECISLTRQYFTVTNVIIFFAFVLLLSGALAYCLALQLYVRRRKKLPSVLLFKKPSPFIFISQRPSPETQDTIHPLDEEAFLKVSPELKNLDLHGSTDSGFGSTKPSLQTEEPQFLLPDPHPQADRTLGNREPPVLGDSCSSGSSNSTDSGICLQEPSLSPSTGPTWEQQVGSNSRGQDDSGIDLVQNSEGRAGDTQGGSALGHHSPPEPEVPGEEDPAAVAFQGYLRQTRCAEEKATKTGCLEEESPLTDGLGPKFGRCLVDEAGLHPPALAKGYLKQDPLEMTLASSGAPTGQWNQPTEEWSLLALSSCSDLGISDWSFAHDLAPLGCVAAPGGLLGSFNSDLVTLPLISSLQSSE

SEQ ID NO: 2463 - protein, 245 aa, Homo sapiens
VLAPPGVALAGCWSPRSAPSGLWGQGWVSLMYGKSSTRAVLLLLGIQLTALWPIAAVEIYTSRVLEAVNGTDARLKCTFSSFAPVGDALTVTWNFRPLDGGPEQFVFYYHIDPFQPMSGRFKDRVSWDGNPERYDASILLWKLQFDDNGTYTCQVKNPPDVDGVIGEIRLSVVHTVRFSEIHFLALAIGSACALMIIIVIVVVLFQHYRKKRWAERAHKVVEIKSKEEERLNQEKKVSVYLEDTD

SEQ ID NO: 2464 - protein, 225 aa, Homo sapiens
VLAPPGVALAGCWSPRSAPSGLWGQGWVSLMYGKSSTRAVLLLLGIQLTALWPIAAVEIYTSRVLEAVNGTDARLKCTFSSFAPVGDALTVTWNFRPLDGGPEQFVFYYHIDPFQPMSGRFKDRVSWDGNPERYDASILLWKLQFDDNGTYTCQVKNPPDVDGVIGEIRLSVVHTVRFSEIHFLALAIGSACALMIIIVIVVVLFQHYRKKRWAERAHKVVEIKS

SEQ ID NO: 2465 - protein, 151 aa, Homo sapiens
VLAPPGVALAGCWSPRSAPSGLWGQGWVSLMYGKSSTRAVLLLLGIQLTALWPIAAVEIYTSRVLEAVNGTDARLKCTFSSFAPVGDALTVTWNFRPLDGGPEQFVSRLSSFSRVLLFREIISQSISPFPSSIFLSSKHKVKLGNNSWDRD

SEQ ID NO: 2466 - protein, 108 aa, Homo sapiens
VLAPPGVALAGCWSPRSAPSGLWGQGWVSLMYGKSSTRAVLLLLGIQLTALWPIAAVEIYTSRVLEAVNGTDARLKCTFSSFAPVGDALTVTWNFRPLDGGPEQFYFS

SEQ ID NO: 2467 - protein, 205 aa, Homo sapiens
LAGWLLRAAPRFCRRTETDMEQGKGLAVLILAIILLQGTLAQSIKGNHLVKVYDYQEDGSVLLTCDAEAKNITWFKDGKMIGFLTEDKKKWNLGSNAKDPRGMYQCKGSQNKSKPLQVYYRMCQNCIELNAATISGFLFAEIVSIFVLAVGVYFIAGQDGVRQSRGKRMLLDERWDHLRPSAFLLPLCTQWKRLSWCFLLVCIVG

SEQ ID NO: 2468 - protein, 201 aa, Homo sapiens
LAGWLLRAAPRFCRRTETDMEQGKGLAVLILAIILLQGTLAQSIKGNHLVKVYDYQEDGSVLLTCDAEAKNITWFKDGKMIGFLTEDKKKWNLGSNAKDPRGMYQCKGSQNKSKPLQVYYRMCQNCIELNAATISGFLFAEIVSIFVLAVGVYFIAGQDGVRQSRASDKQTLLPNDQLYQPLKDREDDQYSHLQGNQLRRN

SEQ ID NO: 2469 - protein, 184 aa, Homo sapiens
MNEMTGIERRSRTLVARDTSQTVTHEPVGNHLVKVYDYQEDGSVLLTCDAEAKNITWFKDGKMIGFLTEDKKKWNLGSNAKDPRGMYQCKGSQNKSKPLQVYYRMCQNCIELNAATISGFLFAEIVSIFVLAVGVYFIAGQDGVRQSRASDKQTLLPNDQLYQPLKDREDDQYSHLQGNQLRRN

SEQ ID NO: 2470 - protein, 538 aa, Homo sapiens
LVSAARGALPSPPLSPDPRPPMARMGLAGAAGRWWGLALGLTAFFLPGVHSQVVQVNDSMYGFIGTDVVLHCSFANPLPSVKITQVTWQKSTNGSKQNVAIYNPSMGVSVLAPYRERVEFLRPSFTDGTIRLSRLELEDEGVYICEFATFPTGNRESQLNLTVMAKPTNWIEGTQAVLRAKKGQDDKVLVATCTSANGKPPSVVSWETRLKGEAEYQEIRNPNGTVTVISRYRLVPSREAHQQSLACIVNYHMDRFKESLTLNVQYEPEVTIEGFDGNWYLQRMDVKLTCKADANPPATEYHWTTLNGSLPKGVEAQNRTLFFKGPINYSLAGTYICEATNPIGTRSGQVEVNITEFPYTPSPPEHGRRAGPVPTAIIGGVAGSILLVLIVVGGIVVALRRRRHTFKGDYSTKKHVYGNGYSKAGIPQHHPPMAQNLQYPDDSDDEKKAGPLGGSSYEEEEEEEEGGGGGERKVGGPHPKYDEDAKRPYFTVDEAEARQDGYGDRTLGYQYDPEQLDLAENMVSQNDGSFISKKEWYV

SEQ ID NO: 2471 - protein, 2235 aa, Homo sapiens
LASRCTFSPGGGATCSSVRPNMATRSSRRESRLPFLFTLVALLPPGALCEVWTQRLHGGSAPLPQDRGFLVVQGDPRELRLWARGDARGASRADEKPLRRKRSAALQPEPIKVYGQVSLNDSHNQMVVHWAGEKSNVIVALARDSLALARPKSSDVYVSYDYGKSFKKISDKLNFGLGNRSEAVIAQFYHSPADNKRYIFADAYAQYLWITFDFCNTLQGFSIPFRAADLLLHSKASNLLLGFDRSHPNKQLWKSDDFGQTWIMIQEHVKSFSWGIDPYDKPNTIYIERHEPSGYSTVFRSTDFFQSRENQEVILEEVRDFQLRDKYMFATKVVHLLGSEQQSSVQLWVSFGRKPMRAAQFVTRHPINEYYIADASEDQVFVCVSHSNNRTNLYISEAEGLKFSLSLENVLYYSPGGAGSDTLVRYFANEPFADFHRVEGLQGVYIATLINGSMNEENMRSVITFDKGGTWEFLQAPAFTGYGEKINCELSQGCSLHLAQRLSQLLNLQLRRMPILSKESAPGLIIATGSVGKNLASKTNVYISSSAGARWREALPGPHYYTWGDHGGIITAIAQGMETNELKYSTNEGETWKTFIFSEKPVFVYGLLTEPGEKSTVFTIFGSNKENVHSWLILQVNATDALGVPCTENDYKLWSPSDERGNECLLGHKTVFKRRTPHATCFNGEDFDRPVVVSNCSCTREDYECDFGFKMSEDLSLEVCVPDPEFSGKSYSPPVPCPVGSTYRRTRGYRKISGDTCSGGDVEARLEGELVPCPLAEENEFILYAVRKSIYRYDLASGATEQLPLTGLRAAVALDFDYEHNCLYWSDLALDVIQRLCLNGSTGQEVIINSGLETVEALAFEPLSQLLYWVDAGFKKIEVANPDGDFRLTIVNSSVLDRPRALVLVPQEGVMFWTDWGDLKPGIYRSNMDGSAAYHLVSEDVKWPNGISVDDQWIYWTDAYLECIERITFSGQQRSVILDNLPHPYAIAVFKNEIYWDDWSQLSIFRASKYSGSQMEILANQLTGLMDMKIFYKGKNTGSNACVPRPCSLLCLPKANNSRSCRCPEDVSSSVLPSGDLMCDCPQGYQLKNNTCVKQENTCLRNQYRCSNGNCINSIWWCDFDNDCGDMSDERNCPTTICDLDTQFRCQESGTCIPLSYKCDLEDDCGDNSDESHCEMHQCRSDEYNCSSGMCIRSSWVCDGDNDCRDWSDEANCTAIYHTCEASNFQCRNGHCIPQRWACDGDTDCQDGSDEDPVNCEKKCNGFRCPNGTCIPSSKHCDGLRDCSDGSDEQHCEPLCTHFMDFVCKNRQQCLFHSMVCDGIIQCRDGSDEDAAFAGCSQDPEFHKVCDEFGFQCQNGVCISLIWKCDGMDDCGDYSDEANCENPTEAPNCSRYFQFRCENGHCIPNRWKCDRENDCGDWSDEKDCGDSHILPFSTPGPSTCLPNYYRCSSGTCVMDTWVCDGYRDCADGSDEEACPLLANVTAASTPTQLGRCDRFEFECHQPKTCIPNWKRCDGHQDCQDGRDEANCPTHSTLTCMSREFQCEDGEACIVLSERCDGFLDCSDESDEKACSDELTVYKVQNLQWTADFSGDVTLTWMRPKKMPSASCVYNVYYRVVGESIWKTLETHSNKTNTVLKVLKPDTTYQVKVQVQCLSKAHNTNDFVTLRTPEGLPDAPRNLQLSLPREAEGVIVGHWAPPIHTHGLIREYIVEYSRSGSKMWASQRAASNFTEIKNLLVNTLYTVRVAAVTSRGIGNWSDSKSITTIKGKVIPPPDIHIDSYGENYLSFTLTMESDIKVNGYVVNLFWAFDTHKQERRTLNFRGSILSHKVGNLTAHTSYEISAWAKTDLGDSPLAFEHVMTRGVRPPAPSLKAKAINQTAVECTWTGPRNVVYGIFYATSFLDLYRNPKSLTTSLHNKTVIVSKDEQYLFLVRVVVPYQGPSSDYVVVKMIPDSRLPPRHLHVVHTGKTSVVIKWESPYDSPDQDLLYAVAVKDLIRKTDRSYKVKSRNSTVEYTLNKLEPGGKYHIIVQLGNMSKDSSIKITTVSLSAPDALKIITENDHVLLFWKSLALKEKHFNESRGYEIHMFDSAMNITAYLGNTTDNFFKISNLKMGHNYTFTVQARCLFGNQICGEPAILLYDELGSGADASATQAARSTDVAAVVVPILFLILLSLGVGFAILYTKHRRLQSSFTAFANSHYSSRLGSAIFSSGDDLGEDDEDAPMITGFSDDVPMVIA

SEQ ID NO: 2472 - protein, 1206 aa, Homo sapiens
LRASRCPFRSNACVPRPCSLLCLPKANNSRSCRCPEDVSSSVLPSGDLMCDCPQGYQLKNNTCVKQENTCLRNQYRCSNGNCINSIWWCDFDNDCGDMSDERNCPTTICDLDTQFRCQESGTCIPLSYKCDLEDDCGDNSDESHCEMHQCRSDEYNCSSGMCIRSSWVCDGDNDCRDWSDEANCTAIYHTCEASNFQCRNGHCIPQRWACDGDTDCQDGSDEDPVNCEKKCNGFRCPNGTCIPSSKHCDGLRDCSDGSDEQHCEPLCTHFMDFVCKNRQQCLFHSMVCDGIIQCRDGSDEDAAFAGCSQDPEFHKVCDEFGFQCQNGVCISLIWKCDGMDDCGDYSDEANCENPTEAPNCSRYFQFRCENGHCIPNRWKCDRENDCGDWSDEKDCGDSHILPFSTPGPSTCLPNYYRCSSGTCVMDTWVCDGYRDCADGSDEEACPLLANVTAASTPTQLGRCDRFEFECHQPKTCIPNWKRCDGHQDCQDGRDEANCPTHSTLTCMSREFQCEDGEACIVLSERCDGFLDCSDESDEKACSDELTVYKVQNLQWTADFSGDVTLTWMRPKKMPSASCVYNVYYRVVGESIWKTLETHSNKTNTVLKVLKPDTTYQVKVQVQCLSKAHNTNDFVTLRTPEGLPDAPRNLQLSLPREAEGVIVGHWAPPIHTHGLIREYIVEYSRSGSKMWASQRAASNFTEIKNLLVNTLYTVRVAAVTSRGIGNWSDSKSITTIKGKVIPPPDIHIDSYGENYLSFTLTMESDIKVNGYVVNLFWAFDTHKQERRTLNFRGSILSHKVGNLTAHTSYEISAWAKTDLGDSPLAFEHVMTRGVRPPAPSLKAKAINQTAVECTWTGPRNVVYGIFYATSFLDLYRNPKSLTTSLHNKTVIVSKDEQYLFLVRVVVPYQGPSSDYVVVKMIPDSRLPPRHLHVVHTGKTSVVIKWESPYDSPDQDLLYAVAVKDLIRKTDRSYKVKSRNSTVEYTLNKLEPGGKYHIIVQLGNMSKDSSIKITTVSLSAPDALKIITENDHVLLFWKSLALKEKHFNESRGYEIHMFDSAMNITAYLGNTTDNFFKISNLKMGHNYTFTVQARCLFGNQICGEPAILLYDELGSGADASATQAARSTDVAAVVVPILFLILLSLGVGFAILYTKHRRLQSSFTAFANSHYSSRLGSAIFSSGDDLGEDDEDAPMITGFSDDVPMVIA

SEQ ID NO: 2473 - protein, 218 aa, Homo sapiens
LGFLHNLYKQVAAKYILQSLLLSTMWVKLLSIVAEFCFSPFLVTDEETASDALERNSLSSQDPQQPTSTVSVTEDSSTSEIDKEEKEQTTQDPDLTTEANPQYLGLARKKSGILLLTLVSFLIFILFIIVQLFIMKLRKAHVIWKKENEVSEHTLESYRSRSNNEETSSEEKNGQSSHPMRCMNYITKLYSEAKTKRKENVQHSKLEEKHIQVPESIV

SEQ ID NO: 2474 - protein, 304 aa, Homo sapiens
LELHLLLGGRTWRAARAADGCEALGTGVLMANFKGHALPGSFFLIIGLCWSVKYPLKYFSHTRKNSPLHYYQRLEIVEAAIRTLFSVTGILAEQFVPDGPHLHLYHENHWIKLMNWQHSTMYLFFAVSGIVDMLTYLVSHVPLGVDRLVMAVAVFMEGFLFYYHVHNRPPLDQHIHSLLLYALFGGCVSISLEVIFRDHIVLELFRTSLIILQGTWFWQIGFVLFPPFGTPEWDQKDDANLMFITMCFCWHYLAALSIVAVNYSLVYCLLTRMKRHGRGEIIGIQKLNSDDTYQTALLSGSDEE

SEQ ID NO: 2475 - protein, 253 aa, Homo sapiens
LLRNQNELGGVLMANFKGHALPGSFFLIIGLCWSVKYPLKYFSHTRKNSPLHYYQRLEIVEAAIRTLFSVTGILAEQFVPDGPHLHLYHENHWIKLMNWQHSTMYLFFAVSGIVDMLTYLVSHVPLGVDRLVMAVAVFMEGFLFYYHVHNRPPLDQHIHSLLLYALFGGCVSISLEVIFRDHIVLELFRTSLIILQGTWFWQIGFVLFPPFGTPEWDQKDDANLMFITMCFCWHYLAALSIVAVNYSLVYWYV

SEQ ID NO: 2476 - protein, 652 aa, Homo sapiens
VRTGVGTRVPALREHAMTTWSLRRRPARTLGLLLLVVLGFLVLRRLDWSTLVPLRLRHRQLGLQAKGWNFMLEDSTFWIFGGSIHYFRVPREYWRDRLLKMKACGLNTLTTYVPWNLHEPERGKFDFSGNLDLEAFVLMAAEIGLWVILRPGPYICSEMDLGGLPSWLLQDPGMRLRTTYKGFTEAVDLYFDHLMSRVVPLQYKRGGPIIAVQVENEYGSYNKDPAYMPYVKKALEDRGIVELLLTSDNKDGLSKGIVQGVLATINLQSTHELQLLTTFLFNVQGTQPKMVMEYWTGWFDSWGGPHNILDSSEVLKTVSAIVDAGSSINLYMFHGGTNFGFMNGAMHFHDYKSDVTSYDYDAVLTEAGDYTAKYMKLRDFFGSISGIPLPPPPDLLPKMPYEPLTPVLYLSLWDALKYLGEPIKSEKPINMENLPVNGGNGQSFGYILYETSITSSGILSGHVHDRGQVFVNTVSIGFLDYKTTKIAVPLIQGYTVLRILVENRGRVNYGENIDDQRKGLIGNLYLNDSPLKNFRIYSLDMKKSFFQRFGLDKWSSLPETPTLPAFFLGSLSISSTPCDTFLKLEGWEKGVVFINGQNLGRYWNIGPQKTLYLPGPWLSSGINQVIVFEETMAGPALQFTETPHLGRNQYIK

SEQ ID NO: 2477 - protein, 136 aa, Homo sapiens
VRGHEPGSSDPRSQPINLNHYATKKSVAESMLDVALFMSNAMRLKAVLEQGPSSHYYTTLVTLISLSLLLQVVIGVLLVVIARLNLNEVEKQWRLNQLNNAATILVFFTVVINVFITAFGAHKTGFLAARASRNPL

SEQ ID NO: 2478 - protein, 117 aa, Homo sapiens
LAKGPLALTTRGRVSQSRTPGPAPRPNAGEPEGRGLHLAGIAVLAIGLWLRFDSQTKSIFEQETNNNNSSFYTGVYILIGAGALMMLVGFLGCCGAVQESQCMLGLVSIPSASPQPP

SEQ ID NO: 2479 - protein, 291 aa, Homo sapiens
LAKGPLALTTRGRVSQSRTPGPAPRPNAGEPEGRGLHRQVPPVPAARAPQSRTRSAQAKLALTMPVKGGTKCIKYLLFGFNFIFWLAGIAVLAIGLWLRFDSQTKSIFEQETNNNNSSFYTGVYILIGAGALMMLVGFLGCCGAVQESQCMLGLFFGFLLVIFAIEIAAAIWGYSHKDEVIKEVQEFYKDTYNKLKTKDEPQRETLKAIHYALNCCGLAGGVEQFISDICPKKDVLETFTVKSCPDAIKEVFDNKFHIIGAVGIGIAVVMIFGMIFSMILCCAIRRNREMV

SEQ ID NO: 2480 - protein, 228 aa, Homo sapiens
VALFKSAAGDQPTAACICIQRQVPPVPAARAPQSRTRSAQAKLALTMPVKGGTKCIKYLLFGFNFIFWLAGIAVLAIGLWLRFDSQTKSIFEQETNNNNSSFYTGVYILIGAGALMMLVGFLGCCGAVQESQCMLGLFFGFLLVIFAIEIAAAIWGYSHKDEVIKEVQEFYKDTYNKLKTKDEPQRETLKAIHYAVELLWFGWGRGTVYLRHLPQEGRTRNLHREVLS

SEQ ID NO: 2481 - protein, 121 aa, Homo sapiens
MPVKGGTKCIKYLLFGFNFIFWLAGIAVLAIGLWLRFDSQTKSIFEQETNNNNSSFYTGEGRGRLSEFRPWLQQSSCNFGGPMLTQGLGLGKDFCSSHAGQSCPFQVVQFLCVSLCLGICV

SEQ ID NO: 2482 - protein, 102 aa, Homo sapiens
MPVKGGTKCIKYLLFGFNFIFWLAGIAVLAIGLWLRFDSQTKSIFEQETNNNNSSFYTGVYILIGAGALMMLVGFLGCCGAVQESQCMLGLVSIPSASPQPP

SEQ ID NO: 2483 - protein, 239 aa, Homo sapiens
VCVCSQLKSLRVPERKAGRSGAPLFGPRPRRTVLAGIAVLAIGLWLRFDSQTKSIFEQETNNNNSSFYTGVYILIGAGALMMLVGFLGCCGAVQESQCMLGLFFGFLLVIFAIEIAAAIWGYSHKDEVIKEVQEFYKDTYNKLKTKDEPQRETLKAIHYALNCCGLAGGVEQFISDICPKKDVLETFTVKSCPDAIKEVFDNKFHIIGAVGIGIAVVMIFGMIFSMILCCAIRRNREMV

SEQ ID NO: 2484 - protein, 81 aa, Homo sapiens
MRLNCCGLAGGVEQFISDICPKKDVLETFTVKSCPDAIKEVFDNKFHIIGAVGIGIAVVMIFGMIFSMILCCAIRRNREMV

SEQ ID NO: 2485 - protein, 304 aa, Homo sapiens
LACHLKQPLPRGCKEETAAPSLEVLTPEASISNWAQKGAAWAGTMARPHPWWLCVLGTLVGLSATPAPKSCPERHYWAQGKLCCQMCEPGTFLVKDCDQHRKAAQCDPCIPGVSFSPDHHTRPHCESCRHCNSGLLVRNCTITANAECACRNGWQCRDKECTECDPLPNPSLTARSSQALSPHPQPTHLPYVSEMLEARTAGHMQTLADFRQLPARTLSTHWPPQRSLCSSDFIRILVIFSGMFLVFTLAGALFLHQRRKYRSNKGESPVEPAEPCHYSCPREEEGSTIPIQEDYRKPEPACSP

SEQ ID NO: 2486 - protein, 223 aa, Homo sapiens
LIPYPLLPGTFLVKDCDQHRKAAQCDPCIPGVSFSPDHHTRPHCESCRHCNSGLLVRNCTITANAECACRNGWQCRDKECTECDPLPNPSLTARSSQALSPHPQPTHLPYVSEMLEARTAGHMQTLADFRQLPARTLSTHWPPQRSLCSSDFIRILVIFSGMFLVFTLAGALFLHQRRKYRSNKGESPVEPAEPCHYSCPREEEGSTIPIQEDYRKPEPACSP

SEQ ID NO: 2487 - protein, 92 aa, Homo sapiens
VSRRSLRRGTDPHSLCQKNVVDIIRVNVDKVLERDQKLSELDDRADALQAGASQFESSAAKLKRKYWWKNCKMMIMLGAICAIIVVVIVRRD

SEQ ID NO: 2488 - protein, 148 aa, Homo sapiens
LAVPSTSAAASLTGCLAAASGEEQTLTLSVRKMSAPAQPPAEGTEGTAPGGGPPGPPPNMTSNRRLQQTQAQVEEVVDIIRVNVDKVLERDQKLSELDDRADALQAGASQFESSAAKLKRKYWWKNCKMMIMLGAICAIIVVVIVRRD

SEQ ID NO: 2489 - protein, 148 aa, Homo sapiens
LAVPSTSAAASLTGCLAAASGEEQTLTLSVRKMSAPAQPPAEGTEGTAPGGGPPGPPPNMTSNRRLQQTQAQVEEVVDIIRVNVDKVLERDQKLSELDDRADALQAGASQFESSAAKLKRKYWWKNCKMMIMLGAICAIIVVVIVRRG

SEQ ID NO: 2490 - protein, 150 aa, Homo sapiens
LAVPSTSAAASLTGCLAAASGEEQTLTLSVRKMSAPAQPPAEGTEGTAPGGGPPGPPPNMTSNRRLQQTQAQVEEVVDIIRVNVDKVLERDQKLSELDDRADALQAGASQFESSAAKLKRKYWWKNCKMMIMLGAICAIIVVVIVIYFFT

SEQ ID NO: 2491 - protein, 93 aa, Homo sapiens
VSRRSLRRGTDPHSLCQKNVVDIIRVNVDKVLERDQKLSELDDRADALQAGASQFESSAAKLKRKYWWKNCKMMIMLGAICAIIVVVIVSKYR

SEQ ID NO: 2492 - protein, 149 aa, Homo sapiens
LAVPSTSAAASLTGCLAAASGEEQTLTLSVRKMSAPAQPPAEGTEGTAPGGGPPGPPPNMTSNRRLQQTQAQVEEVVDIIRVNVDKVLERDQKLSELDDRADALQAGASQFESSAAKLKRKYWWKNCKMMIMLGAICAIIVVVIVSKYR

SEQ ID NO: 2493 - protein, 554 aa, Homo sapiens
LRSLALWILLIPFLGSPSTPKASLGREETETQVLPAPCFSLGKHPGSFSTPASRLTPPPLGLSFAHLVKPLQPGAEVPVVWAQEGAPAQLPCSPTIPLQDLSLLRRAGVTWQHQPDSGPPAAAPGHPLAPGPHPAAPSSWGPRPRRYTVLSVGPGGLRSGRLPLQPRVQLDERGRQRGDFSLWLRPARRADAGEYRAAVHLRDRALSCRLRLRLGQASMTASPPGSLRASDWVILNCSFSRPDRPASVHWFRNRGQGRVPVRESPHHHLAESFLFLPQVSPMDSGPWGCILTYRDGFNVSIMYNLTVLGLEPPTPLTVYAGAGSRVGLPCRLPAGVGTRSFLTAKWTPPGGGPDLLVTGDNGDFTLRLEDVSQAQAGTYTCHIHLQEQQLNATVTLAIITVTPKSFGSPGSLGKLLCEVTPVSGQERFVWSSLDTPSQRSFSGPWLEAQEAQLLSQPWQCQLYQGERLLGAAVYFTELSSPGAQRSGRAPGALPAGHLLLFLILGVLSLLLLVTGAFGFHLWRRQVSQGHGNPAPQQLPLFHPQSADGTPSSGR

SEQ ID NO: 2494 - protein, 536 aa, Homo sapiens
VWRSLAIGLPVSLHLSTTLQKEQSTLPTGLLVAELQVLTQIRLFEKQRARKTQAQRPCHFCGLRSLLAQAPASLGKATMNRGVPFRHLLLVLQLALLPAATQGKKVVLGKKGDTVELTCTASQKKSIQFHWKNSNQIKILGNQGSFLTKGPSKLNDRADSRRSLWDQGNFPLIIKNLKIEDSDTYICEVEDQKEEVQLLVFGLTANSDTHLLQGQSLTLTLESPPGSSPSVQCRSPRGKNIQGGKTLSVSQLELQDSGTWTCTVLQNQKKVEFKIDIVVLAFQKASSIVYKKEGEQVEFSFPLAFTVEKLTGSGELWWQAERASSSKSWITFDLKNKEVSVKRVTQDPKLQMGKKLPLHLTLPQALPQYAGSGNLTLALEAKTGKLHQEVNLVVMRATQLQKNLTCEVWGPTSPKLMLSLKLENKEAKVSKREKAVWVLNPEAGMWQCLLSDSGQVLLESNIKVLPTWSTPVQPMALIVLGGVAGLLLFIGLGIFFCVRCRHRRRQAERMSQIKRLLSEKKTCQCPHRFQKTCSPI

SEQ ID NO: 2495 - protein, 293 aa, Homo sapiens
LDSSGPLPSPCCLHMPTPLVHPHLPISSPRVSPFPPPAFQKASSIVYKKEGEQVEFSFPLAFTVEKLTGSGELWWQAERASSSKSWITFDLKNKEVSVKRVTQDPKLQMGKKLPLHLTLPQALPQYAGSGNLTLALEAKTGKLHQEVNLVVMRATQLQKNLTCEVWGPTSPKLMLSLKLENKEAKVSKREKAVWVLNPEAGMWQCLLSDSGQVLLESNIKVLPTWSTPVQPMALIVLGGVAGLLLFIGLGIFFCVRCRHRRRQAERMSQIKRLLSEKKTCQCPHRFQKTCSPI

SEQ ID NO: 2496 - protein, 1032 aa, Homo sapiens
LGETGSRCKSTASATQIGICPGPLYGLVWAAGSFPSLPCCTPLLGDPLYPSRKVESAGWRLPGEANAWPCPAPRRTMTLLLLPLLLASLLASCSCNKANKHKPWIEAEYQGIVMENDNTVLLNPPLFALDKDAPLRYAGEICGFRLHGSGVPFEAVILDKATGEGLIRAKEPVDCEAQKEHTFTIQAYDCGEGPDGANTKKSHKATVHVRVNDVNEFAPVFVERLYRAAVTEGKLYDRILRVEAIDGDCSPQYSQICYYEILTPNTPFLIDNDGNIENTEKLQYSGERLYKFTVTAYDCGKKRAADDAEVEIQVKPTCKPSWQGWNKRIEYAPGAGSLALFPGIRLETCDEPLWNIQATIELQTSHVAKGCDRDNYSERALRKLCGAATGEVDLLPMPGPNANWTAGLSVHYSQDSSLIYWFNGTQAVQVPLGGPSGLGSGPQDSLSDHFTLSFWMKHGVTPNKGKKEEETIVCNTVQNEDGFSHYSLTVHGCRIAFLYWPLLESARPVKFLWKLEQVCDDEWHHYALNLEFPTVTLYTDGISFDPALIHDNGLIHPPRREPALMIGACWTEEKNKEKEKGDNSTDTTQGDPLSIHHYFHGYLAGFSVRSGRLESREVIECLYACREGLDYRDFESLGKGMKVHVNPSQSLLTLEGDDVETFNHALQHVAYMNTLRFATPGVRPLRLTTAVKCFSEESCVSIPEVEGYVVVLQPDAPQILLSGTAHFARPAVDFEGTNGVPLFPDLQITCSISHQVEAKKDESWQGTVTDTRMSDEIVHNLDGCEISLVGDDLDPERESLLLDTTSLQQRGLELTNTSAYLTIAGVESITVYEEILRQARYRLRHGAALYTRKFRLSCSEMNGRYSSNEFIVEVNVLHSMNRVAHPSHVLSSQQFLHRGHQPPPEMAGHSLASSHRNSMIPSAATLIIVVCVGFLVLMVVLGLVRIHSLHRRVSGAGGPPGASSDPKDPDLFWDDSALTIIVNPMESYQNRQSCVTGAVGGQQEDEDSSDSEVADSPSSDERRIIETPPHRY

SEQ ID NO: 2497 - protein, 972 aa, Homo sapiens
VEKVMVLGCELSGSTRVVVGVEALLTGASSPLPGVGPANKHKPWIEAEYQGIVMENDNTVLLNPPLFALDKDAPLRYAGEICGFRLHGSGVPFEAVILDKATGEGLIRAKEPVDCEAQKEHTFTIQAYDCGEGPDGANTKKSHKATVHVRVNDVNEFAPVFVERLYRAAVTEGKLYDRILRVEAIDGDCSPQYSQICYYEILTPNTPFLIDNDGNIENTEKLQYSGERLYKFTVTAYDCGKKRAADDAEVEIQVKPTCKPSWQGWNKRIEYAPGAGSLALFPGIRLETCDEPLWNIQATIELQTSHVAKGCDRDNYSERALRKLCGAATGEVDLLPMPGPNANWTAGLSVHYSQDSSLIYWFNGTQAVQVPLGGPSGLGSGPQDSLSDHFTLSFWMKHGVTPNKGKKEEETIVCNTVQNEDGFSHYSLTVHGCRIAFLYWPLLESARPVKFLWKLEQVCDDEWHHYALNLEFPTVTLYTDGISFDPALIHDNGLIHPPRREPALMIGACWTEEKNKEKEKGDNSTDTTQGDPLSIHHYFHGYLAGFSVRSGRLESREVIECLYACREGLDYRDFESLGKGMKVHVNPSQSLLTLEGDDVETFNHALQHVAYMNTLRFATPGVRPLRLTTAVKCFSEESCVSIPEVEGYVVVLQPDAPQILLSGTAHFARPAVDFEGTNGVPLFPDLQITCSISHQVEAKKDESWQGTVTDTRMSDEIVHNLDGCEISLVGDDLDPERESLLLDTTSLQQRGLELTNTSAYLTIAGVESITVYEEILRQARYRLRHGAALYTRKFRLSCSEMNGRYSSNEFIVEVNVLHSMNRVAHPSHVLSSQQFLHRGHQPPPEMAGHSLASSHRNSMIPSAATLIIVVCVGFLVLMVVLGLVRIHSLHRRVSGAGGPPGASSDPKDPDLFWDDSALTIIVNPMESYQNRQSCVTGAVGGQQEDEDSSDSEVADSPSSDERRIIETPPHRY

SEQ ID NO: 2498 - protein, 383 aa, Homo sapiens
LLVSVCVWGTHTWNSPSATGPPREELLCMHGGQGCAPMWGVVTQLPVRALGLEVRVWGLCLHLLSLGLRAFLLFFLVLLRELCVCVQEAGRAVLMAARSVALTAHVCSVYVFLQGVAWSAQLVGSWVMLHIWLYRALLETPRRVPLLPQCEQAARWLVWASMQAGKGLARVWGVATFVQLCAHTVFLSMYLCMHICFAAISSKVRVRVNAPFCVSVPLKVHAPLSLGIKVGLQGQKHGRATGEAGMPQGEMLGKQEPQTSRSPKPTRRREVSRSELSPVIPSAATLIIVVCVGFLVLMVVLGLVRIHSLHRRVSGAGGPPGASSDPKDPDLFWDDSALTIIVNPMEVRGLGKRGSVGSRLWSTHVLPESAVLCDGGCWGPAGG

SEQ ID NO: 2499 - protein, 233 aa, Homo sapiens [sequence omitted]

SEQ ID NO: 2500 - protein, 191 aa, Homo sapiens
LKMTDSVIYSMLELPTATQAQNDYGPQQKSSSSRPSCSCLVAIALGLLTAVLLSVLLYQWILCQGSNYSTCASCPSCPDRWMKYGNHCYYFSVEEKDWNSSLEFCLARDSHLLVITDNQEMSLLQVFLSEAFCWIGLRNNSGWRWEDGSPLNFSRISSNSFVQTCGAINKNGLQASSCEVPLHWVCKKVRL

SEQ ID NO: 2501 - protein, 197 aa, Homo sapiens
LKMTDSVIYSMLELPTATQAQNDYGPQQKSSSSRPSCSCLVAIALGLLTAVLLSVLLYQWILCQGSNYSTCASCPSCPDRWMKYGNHCYYFSVEEKDWNSSLEFCLARDSHLLVITDNQEMSLLQVFLSEAFCWIGLRNNSGWRWEDGSPLNFSRISSNSFVQTCGAINKNGLQASSCEVPLHWVCKKCPFADQALF

SEQ ID NO: 2502 - protein, 228 aa, Homo sapiens
LSAMDQQAIYAELNLPTDSGPESSSPSSLPRDVCQGSPWHQFALKLSCAGIILLVLVVTGLSVSVTSLIQKSSIEKCSVDIQQSRNKTTERPGLLNCPIYWQQLREKCLLFSHTVNPWNNSLADCSTKESSLLLIRDKDELIHTQNLIRDKAILFWIGLNFSLSEKNWKWINGSFLNSNDLEIRGDAKENSCISISQTSVYSEYCSTEIRWICQKELTPVRNKVYPDS

SEQ ID NO: 2503 - protein, 168 aa, Homo sapiens
LRIKMSSENCFVAENSSLHPESGQENDATSPHFSTRHEGSFQVPVLCAVMNVVFITILIIALIALSVGQYNCPGQYTFSMPSDSHVSSCSEDWVGYQRKCYFISTVKRSWTSAQNACSEHGATLAVIDSEKDMNFLKRYAGREEHWVGLKKEPGHPWKWSNGKEFNNW

SEQ ID NO: 2504 - protein, 139 aa, Homo sapiens
LRIKMSSENCFVAENSSLHPESGQENDATSPHFSTRHEGSFQVPVLCAVMNVVFITILIIALIALSVGQYNCPGQYTFSMPSDSHVSSCSEDWVGYQRKCYFISTVKRSWTSAQNACSEHGATLAVIDSEKDMVRIKKR

SEQ ID NO: 2505 - protein, 92 aa, Homo sapiens
LRIKMSSENCFVAENSSLHPESGQENDATSPHFSTRHEGSFQVPVLCAVMNVVFITILIIALIALSGGSTLHQFFQSLLAVSIHAQLKSILV

SEQ ID NO: 2506 - protein, 126 aa, Homo sapiens
LKMQDEERYMTLNVQSKKRSSAQTSQLTFKDYSVTLHWYKILLGISGTVNGILTLTLISLILLVSQGVLLKCQKGSCSNATQYEDTGDLKVNNGTRRNISNKDLCASRSADQTVPRPHFRLLYRKT

SEQ ID NO: 2507 - protein, 130 aa, Homo sapiens
LKMQDEERYMTLNVQSKKRSSAQTSQLTFKDYSVTLHWYKILLGISGTVNGILTLTLISLILLVSQGVLLKCQKGSCSNATQYEDTGDLKVNNGTRRNISNKDLCASRSADQTGFYTEKPKTIKLRMDWA

SEQ ID NO: 2508 - protein, 80 aa, Homo sapiens
LKMQDEERYMTLNVQSKKRSSAQTSQLTFKDYSVTLHWYKILLGISGTVNGILTLTLISLILLGFYTEKPKTIKLRMDWA

SEQ ID NO: 2509 - protein, 66 aa, Homo sapiens
LKMQDEERYMTLNVQSKKRSSAQTSQLTFKDYSVTLHWYKILLGISGTVNGILTLTLISLILLDSS

SEQ ID NO: 2510 - protein, 116 aa, Homo sapiens
LKMQDEERYMTLNVQSKKRSSAQTSQLTFKDYSVTLHWYKILLGISGTVNGILTLTLISLILLVSQGVLLKCQKGSCSNATQYEDTGDLKVNNGTRRNISNKDLCASRSADQTDSS

SEQ ID NO: 2511 - protein, 234 aa, Homo sapiens
LLTHSSFCVFTLCQDFFTYSSMSEEVTYADLQFQNSSEMEKIPEIGKFGEKAPPAPSHVWRPAALFLTLLCLLLLIGLGVLASMFHVTLKIEMKKMNKLQNISEELQRNISLQLMSNMNISNKIRNLSTTLQTIATKLCRELYSKEQEHKCKPCPRRWIWHKDSCYFLSDDVQTWQESKMACAAQNASLLKINNKNALEFIKSQSRSYDYWLGLSPEEDSTRGMRVDNIINSSA

SEQ ID NO: 2512 - protein, 286 aa, Homo sapiens
LLTHSSFCVFTLCQDFFTYSSMSEEVTYADLQFQNSSEMEKIPEIGKFGEKAPPAPSHVWRPAALFLTLLCLLLLIGLGVLASMFHVTLKIEMKKMNKLQNISEELQRNISLQLMSNMNISNKIRNLSTTLQTIATKLCRELYSKEQEHKCKPCPRRWIWHKDSCYFLSDDVQTWQESKMACAAQNASLLKINNKNALEFIKSQSRSYDYWLGLSPEEDSTRGMRVDNIINSSAWVIRNAPDLNNMYCGYINRLYVQYYHCTYKKRMICEKMANPVQLGSTYFREA

SEQ ID NO: 2513 - protein, 57 aa, Homo sapiens
LLLRTQLLSLLFKSLLCLSFSTVFKTTLWRLISGTLGIICLSLMSTLGILLKNCKFF

SEQ ID NO: 2514 - protein, 90 aa, Homo sapiens
LVWNQGPWGLCLLLCSNVVGPGLSSDTKSHTLISISQAGSFSLSTALSGFGREAFRQASPFFFCCFIAVAMGIRFIIMVTIWSAVFLNCK

SEQ ID NO: 2515 - protein, 81 aa, Homo sapiens
LMGWIRGRRSRHSWEMSEFHNYNLDLKKSDFSTRWQKQRCPVVKSKCRENASPFFFCCFIAVAMGIRFIIMVTIWSAVFLN

SEQ ID NO: 2516 - protein, 107 aa, Homo sapiens
LPRPHALLVNECLLPPPEKLTAEVLGIICIVLMATVLKTIVLIPCIGVLEQNNFSLNRRMQKARHCGHCPEEWITYSNSCYYIGKERRTWEERVCWPVLRRTLICFL

SEQ ID NO: 2517 - protein, 240 aa, Homo sapiens
LTSHTAEMDNQGVIYSDLNLPPNPKRQQRKPKGNKNSILATEQEITYAELNLQKASQDFQGNDKTYHCKDLPSAPEKLIVGILGIICLILMASVVTIVVIPSTLIQRHNNSSLNTRTQKARHCGHCPEEWITYSNSCYYIGKERRTWEESLLACTSKNSSLLSIDNEEEMKFLSIISPSSWIGVFRNSSHHPWVTMNGLAFKHEIKDSDNAELNCAVLQVNRLKSAQCGSSIIYHCKHKL

SEQ ID NO: 2518 - protein, 222 aa, Homo sapiens
LTSHTAEMDNQGVIYSDLNLPPNPKRQQRKPKGNKNSILATEQEITYAELNLQKASQDFQGNDKTYHCKDLPSAPEKLIVGILGIICLILMASVVTIVVIPSRHCGHCPEEWITYSNSCYYIGKERRTWEESLLACTSKNSSLLSIDNEEEMKFLSIISPSSWIGVFRNSSHHPWVTMNGLAFKHEIKDSDNAELNCAVLQVNRLKSAQCGSSIIYHCKHKL

SEQ ID NO: 2519 - protein, 215 aa, Homo sapiens
MNDQGEIYSTLRFLQSPSESQNRLRPDDTQRPGKTDDKEFSVPWHLIAVTLGILCLLLLMIVTVLVTNIFQCIQEKHQRQEILRNCSEKYIMQNDNYLKEQILTNKTLKFDVLKNSFQQKKELDSRLIQKNRCHRENEIVFKVLQNTGKFSEDHGSCCGVNCYYFTMQKKDWKGCKQTCQHCRSSLLKIDDKDELVFYIHFYSLGLCFSMLDLRY

SEQ ID NO: 2520 - protein, 82 aa, Homo sapiens
LLPAPATQSASVAGTLQNSLCSQVTKKKRANMLVLLAGIFVVHIATVIMLFVSTIANVSNVLLFIHSLRNHSNIYIKCTKEV

SEQ ID NO: 2521 - protein, 152 aa, Homo sapiens
LLPAPATQSASVAGTLQVWLVSNTVDASVGLWKNCTNISCSDSLSYASEDALKTVQAFMILSIIFCVIALLVFVFQLFTMEKGNRFFLSGATTLVCCEYLMGRLQFTLLSPSYHGCFWQLEQISTWFSETSLCNFLLWLFVLLWRTLDCCLG

SEQ ID NO: 2522 - protein, 172 aa, Homo sapiens
LLPAPATQSASVAGTLQNSLCSQVTKKKRANMLVLLAGIFVVHIATVIMLFVSTIANVWLVSNTVDASVGLWKNCTNISCSDSLSYASEDALKTVQAFMILSIIFCVIALLVFVFQLFTMEKGNRFFLSGATTLVCFIMRIVMERSITTAIPTSWAGSASASASSSAFSIWS

SEQ ID NO: 2523 - protein, 188 aa, Homo sapiens
LLPAPATQSASVAGTLQNSLCSQVTKKKRANMLVLLAGIFVVHIATVIMLFVSTIANVWLVSNTVDASVGLWKNCTNISCSDSLSYASEDALKTVQAFMILSIIFCVIALLVFVFQLFTMEKGNRFFLSGATTLVCWLCILVGVSIYTSHYANRDGTQYHHGYSYILGWICFCFSFIIGVLYLVLRKK

SEQ ID NO: 2524 - protein, 49 aa, Homo sapiens
LLPAPATQSASVAGTLQNSLCSQVTKKKRANMLVLLAGIFVVHRPTALS

SEQ ID NO: 2525 - protein, 71 aa, Homo sapiens
LCHCPPGLRVPALHHGEGKPVLPLRGHHTGVLHYANRDGTQYHHGYSYILGWICFCFSFIIGVLYLVLRKK

SEQ ID NO: 2526 - protein, 100 aa, Homo sapiens
LVLFVAGLAFVIGLERTFRFFFQKHKMKATGFFLGGVFVVLIGWPLIGMIFEIYGFFLLFRGFFPVVVGFIRRVPVLGSLLNLPGIRSFVDKVGESNNMV

SEQ ID NO: 2527 - protein, 460 aa, Homo sapiens
LFLLLTDPGLEILNMASCDLDRNSLCKKEEDTRSASPTIEAQGTSPAHDNIAFQDSTSKDKTILNLEAKEEPETIEEHKKEHASGDSVVSPLPVTTVKSVNLRQSENTSANEKEVEAEFLRLSLGFKCDWFTLEKRVKLEERSRDLAEENLKKEITNCLKLLESLTPLCEDDNQAQEIIKKLEKSIKFLSQCAARVASRAEMLGAINQESRVSKAVEVMIQHVENLKRMYAKEHAELEELKQVLLQNERSFNPLEDDDDCQIKKRSASLNSKPSSLRRVTIASLPRNIGNAGMVAGMENNDRFSRRSSSWRILGSKQSEHRPSLPRFISTYSWADAEEEKCELKTKDDSEPSGEETVERTRKPSLSEKKNNPSKWDVSSVYDTIASWATNLKSSIRKANKALWLSIAFIVLFAALMSFLTGQLFQKSVDAAPTQQEDSWTSLEHILWPFTRLRHNGPPPV

SEQ ID NO: 2528 - protein, 847 aa, Homo sapiens
VLALETARRITPLVQGRRAEGELCREKGLKEVMETGLGAPLFKAWLLISVWGLGVDPSLQIDVLTELELGESTTGVRQVPGLHNGTKAFLFQDTPRSIKASTATAEQFFQKLRNKHEFTILVTLKQTHLNSGVILSIHHLDHRYLELESSGHRNEVRLHYRSGSHRPHTEVFPYILADDKWHKLSLAISASHLILHIDCNKIYERVVEKPSTDLPLGTTFWLGQRNNAHGYFKGIMQDVQLLVMPQGFIAQCPDLNRTCPTCNDFHGLVQKIMELQDILAKTSAKLSRAEQRMNRLDQCYCERTCTMKGTTYREFESWIDGCKNCTCLNGTIQCETLICPNPDCPLKSALAYVDGKCCKECKSICQFQGRTYFEGERNTVYSSSGVCVLYECKDQTMKLVESSGCPALDCPESHQITLSHSCCKVCKGYDFCSERHNCMENSICRNLNDRAVCSCRDGFRALREDNAYCEDIDECAEGRHYCRENTMCVNTPGSFMCICKTGYIRIDDYSCTEHDECITNQHNCDENALCFNTVGGHNCVCKPGYTGNGTTCKAFCKDGCRNGGACIAANVCACPQGFTGPSCETDIDECSDGFVQCDSRANCINLPGWYHCECRDGYHDNGMFSPSGESCEDIDECGTGRHSCANDTICFNLDGGYDCRCPHGKNCTGDCIHDGKVKHNGQIWVLENDRCSVCSCQNGFVMCRRMVCDCENPTVDLFCCPECDPRLSSQCLHQNGETLYNSGDTWVQNCQQCRCLQGEVDCWPLPCPDVECEFSILPENECCPRCVTDPCQADTIRNDITKTCLDEMNVVRFTGSSWIKHGTECTLCQCKNGHICCSVDPQCLQEL

SEQ ID NO: 2529 - protein, 986 aa, Homo sapiens
LPSAVCWSQRARVRVSTLYLAGGARVPELSSTSWPSSLRSPRPGSSPRRGSSPAPRPRQGTSPPGHPGLPRLAIRPHQSLPTLPSSTSAVQRVLVAFLRTPWRGSALHPGAAPEPSARVHMGFPPLLKGQASATRSSLASCSWVVFFLSCLSRHAPEIEGGRRWTELIRTMESRVLLRTFCLIFGLGAVWGLGVDPSLQIDVLTELELGESTTGVRQVPGLHNGTKAFLFQDTPRSIKASTATAEQFFQKLRNKHEFTILVTLKQTHLNSGVILSIHHLDHRYLELESSGHRNEVRLHYRSGSHRPHTEVFPYILADDKWHKLSLAISASHLILHIDCNKIYERVVEKPSTDLPLGTTFWLGQRNNAHGYFKGIMQDVQLLVMPQGFIAQCPDLNRTCPTCNDFHGLVQKIMELQDILAKTSAKLSRAEQRMNRLDQCYCERTCTMKGTTYREFESWIDGCKNCTCLNGTIQCETLICPNPDCPLKSALAYVDGKCCKECKSICQFQGRTYFEGERNTVYSSSGVCVLYECKDQTMKLVESSGCPALDCPESHQITLSHSCCKVCKGYDFCSERHNCMENSICRNLNDRAVCSCRDGFRALREDNAYCEDIDECAEGRHYCRENTMCVNTPGSFMCICKTGYIRIDDYSCTEHDECITNQHNCDENALCFNTVGGHNCVCKPGYTGNGTTCKAFCKDGCRNGGACIAANVCACPQGFTGPSCETDIDECSDGFVQCDSRANCINLPGWYHCECRDGYHDNGMFSPSGESCEDIDECGTGRHSCANDTICFNLDGGYDCRCPHGKNCTGDCIHDGKVKHNGQIWVLENDRCSVCSCQNGFVMCRRMVCDCENPTVDLFCCPECDPRLSSQCLHQNGETLYNSGDTWVQNCQQCRCLQGEVDCWPLPCPDVECEFSILPENECCPRCVTDPCQADTIRNDITKTCLDEMNVVRFTGSSWIKHGTECTLCQCKNGHICCSVDPQCLQEL

SEQ ID NO: 2530 - protein, 851 aa, Homo sapiens
VKKEPFRHYYYKMSIRRLLILILKIGRRWTELIRTMESRVLLRTFCLIFGLGAVWGLGVDPSLQIDVLTELELGESTTGVRQVPGLHNGTKAFLFQDTPRSIKASTATAEQFFQKLRNKHEFTILVTLKQTHLNSGVILSIHHLDHRYLELESSGHRNEVRLHYRSGSHRPHTEVFPYILADDKWHKLSLAISASHLILHIDCNKIYERVVEKPSTDLPLGTTFWLGQRNNAHGYFKGIMQDVQLLVMPQGFIAQCPDLNRTCPTCNDFHGLVQKIMELQDILAKTSAKLSRAEQRMNRLDQCYCERTCTMKGTTYREFESWIDGCKNCTCLNGTIQCETLICPNPDCPLKSALAYVDGKCCKECKSICQFQGRTYFEGERNTVYSSSGVCVLYECKDQTMKLVESSGCPALDCPESHQITLSHSCCKVCKGYDFCSERHNCMENSICRNLNDRAVCSCRDGFRALREDNAYCEDIDECAEGRHYCRENTMCVNTPGSFMCICKTGYIRIDDYSCTEHDECITNQHNCDENALCFNTVGGHNCVCKPGYTGNGTTCKAFCKDGCRNGGACIAANVCACPQGFTGPSCETDIDECSDGFVQCDSRANCINLPGWYHCECRDGYHDNGMFSPSGESCEDIDECGTGRHSCANDTICFNLDGGYDCRCPHGKNCTGDCIHDGKVKHNGQIWVLENDRCSVCSCQNGFVMCRRMVCDCENPTVDLFCCPECDPRLSSQCLHQNGETLYNSGDTWVQNCQQCRCLQGEVDCWPLPCPDVECEFSILPENECCPRCVTDPCQADTIRNDITKTCLDEMNVVRFTGSSWIKHGTECTLCQCKNGHICCSVDPQCLQEL

SEQ ID NO: 2531 - protein, 116 aa, Homo sapiens
LIRTMESRVLLRTFCLIFGLGAVWGLGVDPSLQIDVLTELELGESTTGVRQVPGLHNGTKAFLFQDTPRSIKASTATAEQFFQKLRNKHEFTILVTLKQTHLNSGVILSIHHLDHR

SEQ ID NO: 2532 - protein, 91 aa, Homo sapiens
LIRTMESRVLLRTFCLIFGLGAVWGLGVDPSLQIDVLTELELGESTTGVRQVPGLHNGTKAFLFQGMPGVLHPHCDFSSDNPGRSCSCRLS

SEQ ID NO: 2533 - protein, 832 aa, Homo sapiens
LLVEVGKPLLLPPPSLPPPGSSPCSSITPPPFPKDNLQESSGGGELRLKEWIMTHEEHHAAKTLGIGKAIAVLTSGGDAQGMNAAVRAVVRVGIFTGARVFFVHEGYQGLVDGGDHIKEATWESVSMMLQLGGTVIGSARCKDFREREGRLRAAYNLVKRGITNLCVIGGDGSLTGADTFRSEWSDLLSDLQKAGKITDEEATKSSYLNIVGLVGSIDNDFCGTDMTIGTDSALHRIMEIVDAITTTAQSHQRTFVLEVMGRHCGYLALVTSLSCGADWVFIPECPPDDDWEEHLCRRLSETRTRGSRLNIIIVAEGAIDKNGKPITSEDIKNLVVKRLGYDTRVTVLGHVQRGGTPSAFDRILGSRMGVEAVMALLEGTPDTPACVVSLSGNQAVRLPLMECVQVTKDVTKAMDEKKFDEALKLRGRSFMNNWEVYKLLAHVRPPVSKSGSHTVAVMNVGAPAAGMNAAVRSTVRIGLIQGNRVLVVHDGFEGLAKGQIEEAGWSYVGGWTGQGGSKLGTKRTLPKKSFEQISANITKFNIQGLVIIGGFEAYTGGLELMEGRKQFDELCIPFVVIPATVSNNVPGSDFSVGADTALNTICTTCDRIKQSAAGTKRRVFIIETMGGYCGYLATMAGLAAGADAAYIFEEPFTIRDLQANVEHLVQKMKTTVKRGLVLRNEKCNENYTTDFIFNLYSEEGKGIFDSRKNVLGHMQQGGSPTPFDRNFATKMGAKAMNWMSGKIKESYRNGRIFANTPDSGCVLGMRKRALVFQPVAELKDQTDFEHRIPKEQWWLKLRPILKILAKYEIDLDTSDHAHLEHITRKRSGEAAV

SEQ ID NO: 2534 - protein, 107 aa, Homo sapiens
LPLAVTDIPSLREKRRAIIPSHLAYGKRGFPPSVPADAVVQYDVELIALIRANYWLKLVKGILPLVGMAMVPALLGLIGYHLYRKANRPKVSKKKLKEEKRNKSKKK

SEQ ID NO: 2535 - protein, 565 aa, Homo sapiens
LEKMPIQIFCSMSFSSGEEAPGPLGDIWGPHHHQQQQDISESEEEEEEKEKEAVRKEASEGHSPMDLVAFANSCTLHGTNHIFVEGGPGPRQVLWAVAFVLALGAFLCQVGDRVAYYLSYPHVTLLNEVATTELAFPAVTLCNTNAVRLSQLSYPDLLYLAPMLGLDESDDPGVPLAPPGPEAFSGEPFNLHRFYNRSCHRLEDMLLYCSYQGGPCGPHNFSVVFTRYGKCYTFNSGRDGRPRLKTMKGGTGNGLEIMLDIQQDEYLPVWGETDETSFEAGIKVQIHSQDEPPFIDQLGFGVAPGFQTFVACQEQRLIYLPPPWGTCKAVTMDSDLDFFDSYSITACRIDCETRYLVENCNCRMVHMPGDAPYCTPEQYKECADPALDFLVEKDQEYCVCEMPCNLTRYGKELSMVKIPSKASAKYLAKKFNKSEQYIGENILVLDIFFEVLNYETIEQKKAYEIAGLLGDIGGQMGLFIGASILTVLELFDYAYEVIKHKLCRRGKCQKEAKRSSADKGVALSLDDVKRHNPCESLRGHPAGMTYAANILPHHPARGTFEDFTC

SEQ ID NO: 2536 - protein, 693 aa, Homo sapiens
LSGVVRRKRKRRRLAEEERPDEEAVVDQGGTSTILNIHYEKEELEGHRTLYVGVRMPLGRQSHRHHRTHGQKHRRRGRGKGASQGEEGLEALAHDTPSQRVQFILGTEEDEEHVPHELFTELDEICMKEGEDAEWKETARWLKFEEDVEDGGERWSKPYVATLSLHSLFELRSCLINGTVLLDMHANSIEEISDLILDQQELSSDLNDSMRVKVREALLKKHHHQNEKKRNNLIPIVRSFAEVGKKQSDPHLMDKHGQTVSPQSVPTTNLEVKNGVNCEHSPVDLSKVDLHFMKKIPTGAEASNVLVGEVDILDRPIVAFVRLSPAVLLSGLTEVPIPTRFLFILLGPVGKGQQYHEIGRSMATIMTDEIFHDVAYKAKERDDLLAGIDEFLDQVTVLPPGEWDPSIRIEPPKNVPSQEKRKMPGVPNGNVCHIEQEPHGGHSGPELQRTGRLFGGLVLDIKRKAPWYWSDYRDALSLQCLASFLFLYCACMSPVITFGGLLGEATEGRISAIESLFGASMTGIAYSLFAGQALTILGSTGPVLVFEKILFKFCKDYALSYLSLRACIGLWTAFLCIVLVATDASSLVCYITRFTEEAFASLICIIFIYEAIEKLIHLAETYPIHMHSQLDHLSLYYCRCTLPENPNNHTLQYWKDHNIVTAEVHWANLTVSVSLGAARCPSIVTTGLGGTSK

SEQ ID NO: 2537 - protein, 1095 aa, Homo sapiens
LSGVVRRKRKRRRLAEEERPDEEAVVDQGGTSTILNIHYEKEELEGHRTLYVGVRMPLGRQSHRHHRTHGQKHRRRGRGKGASQGEEGLEALAHDTPSQRVQFILGTEEDEEHVPHELFTELDEICMKEGEDAEWKETARWLKFEEDVEDGGERWSKPYVATLSLHSLFELRSCLINGTVLLDMHANSIEEISDLILDQQELSSDLNDSMRVKVREALLKKHHHQNEKKRNNLIPIVRSFAEVGKKQSDPHLMDKHGQTVSPQSVPTTNLEVKNGVNCEHSPVDLSKVDLHFMKKIPTGAEASNVLVGEVDILDRPIVAFVRLSPAVLLSGLTEVPIPTRFLFILLGPVGKGQQYHEIGRSMATIMTDEIFHDVAYKAKERDDLLAGIDEFLDQVTVLPPGEWDPSIRIEPPKNVPSQEKRKMPGVPNGNVCHIEQEPHGGHSGPELQRTGRLFGGLVLDIKRKAPWYWSDYRDALSLQCLASFLFLYCACMSPVITFGGLLGEATEGRISAIESLFGASMTGIAYSLFAGQALTILGSTGPVLVFEKILFKFCKDYALSYLSLRACIGLWTAFLCIVLVATDASSLVCYITRFTEEAFASLICIIFIYEAIEKLIHLAETYPIHMHSQLDHLSLYYCRCTLPENPNNHTLQYWKDHNIVTAEVHWANLTVSECQEMHGEFMGSACGHHGPYTPDVLFWSCILFFTTFILSSTLKTFKTSRYFPTRVRSMVSDFAVFLTIFTMVIIDFLIGVPSPKLQVPSVFKPTRDDRGWIINPIGPNPWWTVIAAIIPALLCTILIFMDQQITAVIINRKEHKLKKGCGYHLDLLMVAIMLGVCSIMGLPWFVAATVLSITHVNSLKLESECSAPGEQPKFLGIREQRVTGLMIFVLMGCSVFMTAILKFIPMPVLYGVFLYMGVSSLQGIQFFDRLKLFGMPAKHQPDFIYLRHVPLRKVHLFTLIQLTCLVLLWVIKASPAAIVFPMMVLALVFVRKVMDLCFSKRELSWLDDLMPESKKKKLDDAKKKAKEEEEAEKMLEIGGDKFPLESRKLLSSPGKNISCRCDPSEINISDEMPKTTVWKALSMNSGNAKEKSLFN

SEQ ID NO: 2538 - protein, 874 aa, Homo sapiens
LRARGGQPGTPGGAPGGWGPGQGCERVTLGRTWDLAHLCRIPCAARPGALTAGGRRPLVLLASFCWKGPASGLALSCQNVGRKGSRDLALRPDEEAVVDQGGTSTILNIHYEKEELEGHRTLYVGVRMPLGRQSHRHHRTHGQKHRRRGRGKGASQGEEGLEALAHDTPSQRVQFILGTEEDEEHVPHELFTELDEICMKEGEDAEWKETARWLKFEEDVEDGGERWSKPYVATLSLHSLFELRSCLINGTVLLDMHANSIEEISDLILDQQELSSDLNDSMRVKVREALLKKHHHQNEKKRNNLIPIVRSFAEVGKKQSDPHLMDKHGQTVSPQSVPTTNLEVKNGVNCEHSPVDLSKVDLHFMKKIPTGAEASNVLVGEVDILDRPIVAFVRLSPAVLLSGLTEVPIPTRFLFILLGPVGKGQQYHEIGRSMATIMTDEIFHDVAYKAKERDDLLAGIDEFLDQVTVLPPGEWDPSIRIEPPKNVPSQEKRKMPGVPNGNVCHIEQEPHGGHSGPELQRTGRLFGGLVLDIKRKAPWYWSDYRDALSLQCLASFLFLYCACMSPVITFGGLLGEATEGRISAIESLFGASMTGIAYSLFAGQALTILGSTGPVLVFEKILFKFCKDYALSYLSLRACIGLWTAFLCIVLVATDASSLVCYITRFTEEAFASLICIIFIYEAIEKLIHLAETYPIHMHSQLDHLSLYYCRCTLPENPNNHTLQYWKDHNIVTAEVHWANLTVSECQEMHGEFMGSACGHHGPYTPDVLFWSCILFFTTFILSSTLKTFKTSRYFPTRMESCSVAWLECGGVILAHCNLRLLPSSWDYRHAPPQPANFCIFSRDGVSPCWPGWSQSLDLVICLPRPPKMLGLQA

SEQ ID NO: 2539 - protein, 642 aa, Homo sapiens
LVGGLHHGQRPGPAPPRQPGSFCWALKADGIMWLAKACWSIQSEMPCIQAQYGTPAPSPGPRDHLASDPLTPEFIKPTMDLASPEAAPAAPTALPSFSTFMDGYTGEFDTFLYQLPGTVQPCSSASSSASSTSSSSATSPASASFKFEDFQVYGCYPGPLSGPVDEALSSSGSDYYGSPCSAPSPSTPSFQPPQLSPWDGSFGHFSPSQTYEGLRAWTEQLPKASGPPQPPAFFSFSPPTGPSPSLAQSPLKLFPSQATHQLGEGESYSMPTAFPGLAPTSPHLEGSGILDTPVTSTKARSGAPGGSEGRCAVCGDNASCQHYGVRTCEGCKGFFKRTVQKNAKYICLANKDCPVDKRRRNRCQFCRFQKCLAVGMVKEVVRTDSLKGRRGRLPSKPKQPPDASPANLLTSLVRAHLDSGPSTAKLDYSKFQELVLPHFGKEDAGDVQQFYDLLSGSLEVIRKWAEKIPGFAELSPADQDLLLESAFLELFILRLAYRSKPGEGKLIFCSGLVLHRLQCARGFGDWIDSILAFSRSLHSLLVDVPAFACLSALVLITDRHGLQEPRRVEELQNRIASCLKEHVAAVAGEPQPASCLSRLLGKLPELRTLCTQGLQRIFYLKLEDLVPPPPIIDKIFMDTLPF

SEQ ID NO: 2540 - protein, 1098 aa, Homo sapiens
MPPRQPPRQAGGGLSREFGKLLPALSHSPLGGLGSGSGSVAPGQGRAGAMGSRTPESPLHAVQLRWGPRRRPPLLPLLLLLLPPPPRVGGFNLDAEAPAVLSGPPGSFFGFSVEFYRPGTDGVSVLVGAPKANTSQPGVLQGGAVYLCPWGASPTQCTPIEFDSKGSRLLESSLSSSEGEEPVEYKSLQWFGATVRAHGSSILACAPLYSWRTEKEPLSDPVGTCYLSTDNFTRILEYAPCRSDFSWAAGQGYCQGGFSAEFTKTGRVVLGGPGSYFWQGQILSATQEQIAESYYPEYLINLVQGQLQTRQASSIYDDSYLGYSVAVGEFSGDDTEDFVAGVPKGNLTYGYVTILNGSDIRSLYNFSGEQMASYFGYAVAATDVNGDGLDDLLVGAPLLMDRTPDGRPQEVGRVYVYLQHPAGIEPTPTLTLTGHDEFGRFGSSLTPLGDLDQDGYNDVAIGAPFGGETQQGVVFVFPGGPGGLGSKPSQVLQPLWAASHTPDFFGSALRGGRDLDGNGYPDLIVGSFGVDKAVVYRGRPIVSASASLTIFPAMFNPEERSCSLEGNPVACINLSFCLNASGKHVADSIGFTVELQLDWQKQKGGVRRALFLASRQATLTQTLLIQNGAREDCREMKIYLRNESEFRDKLSPIHIALNFSLDPQAPVDSHGLRPALHYQSKSRIEDKAQILLDCGEDNICVPDLQLEVFGEQNHVYLGDKNALNLTFHAQNVGEGGAYEAELRVTAPPEAEYSGLVRHPGNFSSLSCDYFAVNQSRLLVCDLGNPMKAGASLWGGLRFTVPHLRDTKKTIQFDFQILSKNLNNSQSDVVSFRLSVEAQAQVTLNGVSKPEAVLFPVSDWHPRDQPQKEEDLGPAVHHVYELINQGPSSISQGVLELSCPQALEGQQLLYVTRVTGLNCTTNHPINPKGLELDPEGSLHHQQKREAPSRSSASSGPQILKCPEAECFRLRCELGPLHQQESQSLQLHFRVWAKTFLQREHQPFSLQCEAVYKALKMPYRILPRQLPQKERQVATAVQWTKAEGSYGVPLWIIILAILFGLLLLGLLIYILYKLGFFKRSLPYGTAMEKAQLKPPATSDA

SEQ ID NO: 2541 - protein, 1328 aa, Homo sapiens
LKKEIFSPSHSWNVCPGTLNGLSVTGDAENQYQTLYKLYERCEVVMGNLEIVLTGHNADLSFLQWIREVTGYVLVAMNEFSTLPLPNLRVVRGTQVYDGKFAIFVMLNYNTNSSHALRQLRLTQLTEILSGGVYIEKNDKLCHMDTIDWRDIVRDRDAEIVVKDNGRSCPPCHEVCKGRCWGPGSEDCQTLTKTICAPQCNGHCFGPNPNQCCHDECAGGCSGPQDTDCFACRHFNDSGACVPRCPQPLVYNKLTFQLEPNPHTKYQYGGVCVASCPHNFVVDQTSCVRACPPDKMEVDKNGLKMCEPCGGLCPKACEGTGSGSRFQTVDSSNIDGFVNCTKILGNLDFLITGLNGDPWHKIPALDPEKLNVFRTVREITGYLNIQSWPPHMHNFSVFSNLTTIGGRSLYNRGFSLLIMKNLNVTSLGFRSLKEISAGRIYISANRQLCYHHSLNWTKVLRGPTEERLDIKHNRPRRDCVAEGKVCDPLCSSGGCWGPGPGQCLSCRNYSRGGVCVTHCNFLNGEPREFAHEAECFSCHPECQPMEGTATCNGSGSDTCAQCAHFRDGPHCVSSCPHGVLGAKGPIYKYPDVQNECRPCHENCTQGCKGPELQDCLGQTLVLIGKTHLTMALTVIAGLVVIFMMLGGTFLYWRGRRIQNKRAMRRYLERGESIEPLDPSEKANKVLARIFKETELRKLKVLGSGVFGTVHKGVWIPEGESIKIPVCIKVIEDKSGRQSFQAVTDHMLAIGSLDHAHIVRLLGLCPGSSLQLVTQYLPLGSLLDHVRQHRGALGPQLLLNWGVQIAKGMYYLEEHGMVHRNLAARNVLLKSPSQVQVADFGVADLLPPDDKQLLYSEAKTPIKWMALESIHFGKYTHQSDVWSYGVTVWELMTFGAEPYAGLRLAEVPDLLEKGERLAQPQICTIDVYMVMVKCWMIDENIRPTFKELANEFTRMARDPPRYLVIKRESGPGIAPGPEPHGLTNKKLEEVELEPELDLDLDLEAEEDNLATTTLGSALSLPVGTLNRPRGSQSLLSPSSGYMPMNQGNLGESCQESAVSGSSERCPRPVSLHPMPRGCLASESSEGHVTGSEAELQEKVSMCRSRSRSRSPRPRGDSAYHSQRHSLLTPVTPLSPPGLEEEDVNGYVMPDTHLKGTPSSREGTLSSVGLSSVLGTEEEDEDEEYEYMNRRRRHSPPHPPRPSSLEELGYEYMDVGSDLSASLGSTQSCPLHPVPIMPTAGTTPDEDYEYMNRQRDGGGPGGDYAAMGACPASEQGYEEMRAFQGPGHQAPHVHYARLKTLRSLEATDSAFDNPDYWHSRLFPKANAQRT

SEQ ID NO: 2542 - protein, 60 aa, Homo sapiens
MGNYRSPTLSLPLFYPCQVPKDQVLDTVYLFHMPRKRMISLRFLAWYFLDAAVFSSVLAL

SEQ ID NO: 2543 - protein, 4552 aa, Homo sapiens
LLLASAHTMLTPPLLLLLPLLSALVAAAIDAPKTCSPKQFACRDQITCISKGWRCDGERDCPDGSDEAPEICPQSKAQRCQPNEHNCLGTELCVPMSRLCNGVQDCMDGSDEGPHCRELQGNCSRLGCQHHCVPTLDGPTCYCNSSFQLQADGKTCKDFDECSVYGTCSQLCTNTDGSFICGCVEGYLLQPDNRSCKAKNEPVDRPPVLLIANSQNILATYLSGAQVSTITPTSTRQTTAMDFSYANETVCWVHVGDSAAQTQLKCARMPGLKGFVDEHTINISLSLHHVEQMAIDWLTGNFYFVDDIDDRIFVCNRNGDTCVTLLDLELYNPKGIALDPAMGKVFFTDYGQIPKVERCDMDGQNRTKLVDSKIVFPHGITLDLVSRLVYWADAYLDYIEVVDYEGKGRQTIIQGILIEHLYGLTVFENYLYATNSDNANAQQKTSVIRVNRFNSTEYQVVTRVDKGGALHIYHQRRQPRVRSHACENDQYGKPGGCSDICLLANSHKARTCRCRSGFSLGSDGKSCKKPEHELFLVYGKGRPGIIRGMDMGAKVPDEHMIPIENLMNPRALDFHAETGFIYFADTTSYLIGRQKIDGTERETILKDGIHNVEGVAVDWMGDNLYWTDDGPKKTISVARLEKAAQTRKTLIEGKMTHPRAIVVDPLNGWMYWTDWEEDPKDSRRGRLERAWMDGSHRDIFVTSKTVLWPNGLSLDIPAGRLYWVDAFYDRIETILLNGTDRKIVYEGPELNHAFGLCHHGNYLFWTEYRSGSVYRLERGVGGAPPTVTLLRSERPPIFEIRMYDAQQQQVGTNKCRVNNGGCSSLCLATPGSRQCACAEDQVLDADGVTCLANPSYVPPPQCQPGEFACANSRCIQERWKCDGDNDCLDNSDEAPALCHQHTCPSDRFKCENNRCIPNRWLCDGDNDCGNSEDESNATCSARTCPPNQFSCASGRCIPISWTCDLDDDCGDRSDESASCAYPTCFPLTQFTCNNGRCININWRCDNDNDCGDNSDEAGCSHSCSSTQFKCNSGRCIPEHWTCDGDNDCGDYSDETHANCTNQATRPPGGCHTDEFQCRLDGLCIPLRWRCDGDTDCMDSSDEKSCEGVTHVCDPSVKFGCKDSARCISKAWVCDGDNDCEDNSDEENCESLACRPPSHPCANNTSVCLPPDKLCDGNDDCGDGSDEGELCDQCSLNNGGCSHNCSVAPGEGIVCSCPLGMELGPDNHTCQIQSYCAKHLKCSQKCDQNKFSVKCSCYEGWVLEPDGESCRSLDPFKPFIIFSNRHEIRRIDLHKGDYSVLVPGLRNTIALDFHLSQSALYWTDVVEDKIYRGKLLDNGALTSFEVVIQYGLATPEGLAVDWIAGNIYWVESNLDQIEVAKLDGTLRTTLLAGDIEHPRAIALDPRDGILFWTDWDASLPRIEAASMSGAGRRTVHRETGSGGWPNGLTVDYLEKRILWIDARSDAIYSARYDGSGHMEVLRGHEFLSHPFAVTLYGGEVYWTDWRTNTLAKANKWTGHNVTVVQRTNTQPFDLQVYHPSRQPMAPNPCEANGGQGPCSHLCLINYNRTVSCACPHLMKLHKDNTTCYEFKKFLLYARQMEIRGVDLDAPYYNYIISFTVPDIDNVTVLDYDAREQRVYWSDVRTQAIKRAFINGTGVETVVSADLPNAHGLAVDWVSRNLFWTSYDTNKKQINVARLDGSFKNAVVQGLEQPHGLVVHPLRGKLYWTDGDNISMANMDGSNRTLLFSGQKGPVGLAIDFPESKLYWISSGNHTINRCNLDGSGLEVIDAMRSQLGKATALAIMGDKLWWADQVSEKMGTCSKADGSGSVVLRNSTTLVMHMKVYDESIQLDHKGTNPCSVNNGDCSQLCLPTSETTRSCMCTAGYSLRSGQQACEGVGSFLLYSVHEGIRGIPLDPNDKSDALVPVSGTSLAVGIDFHAENDTIYWVDMGLSTISRAKRDQTWREDVVTNGIGRVEGIAVDWIAGNIYWTDQGFDVIEVARLNGSFRYVVISQGLDKPRAITVHPEKGYLFWTEWGQYPRIERSRLDGTERVVLVNVSISWPNGISVDYQDGKLYWCDARTDKIERIDLETGENREVVLSSNNMDMFSVSVFEDFIYWSDRTHANGSIKRGSKDNATDSVPLRTGIGVQLKDIKVFNRDRQKGTNVCAVANGGCQQLCLYRGRGQRACACAHGMLAEDGASCREYAGYLLYSERTILKSIHLSDERNLNAPVQPFEDPEHMKNVIALAFDYRAGTSPGTPNRIFFSDIHFGNIQQINDDGSRRITIVENVGSVEGLAYHRGWDTLYWTSYTTSTITRHTVDQTRPGAFERETVITMSGDDHPRAFVLDECQNLMFWTNWNEQHPSIMRAALSGANVLTLIEKDIRTPNGLAIDHRAEKLYFSDATLDKIERCEYDGSHRYVILKSEPVHPFGLAVYGEHIFWTDWVRRAVQRANKHVGSNMKLLRVDIPQQPMGIIAVANDTNSCELSPCRINNGGCQDLCLLTHQGHVNCSCRGGRILQDDLTCRAVNSSCRAQDEFECANGECINFSLTCDGVPHCKDKSDEKPSYCNSRRCKKTFRQCSNGRCVSNMLWCNGADDCGDGSDEIPCNKTACGVGEFRCRDGTCIGNSSRCNQFVDCEDASDEMNCSATDCSSYFRLGVKGVLFQPCERTSLCYAPSWVCDGANDCGDYSDERDCPGVKRPRCPLNYFACPSGRCIPMSWTCDKEDDCEHGEDETHCNKFCSEAQFECQNHRCISKQWLCDGSDDCGDGSDEAAHCEGKTCGPSSFSCPGTHVCVPERWLCDGDKDCADGADESIAAGCLYNSTCDDREFMCQNRQCIPKHFVCDHDRDCADGSDESPECEYPTCGPSEFRCANGRCLSSRQWECDGENDCHDQSDEAPKNPHCTSQEHKCNASSQFLCSSGRCVAEALLCNGQDDCGDSSDERGCHINECLSRKLSGCSQDCEDLKIGFKCRCRPGFRLKDDGRTCADVDECSTTFPCSQRCINTHGSYKCLCVEGYAPRGGDPHSCKAVTDEEPFLIFANRYYLRKLNLDGSNYTLLKQGLNNAVALDFDYREQMIYWTDVTTQGSMIRRMHLNGSNVQVLHRTGLSNPDGLAVDWVGGNLYWCDKGRDTIEVSKLNGAYRTVLVSSGLREPRALVVDVQNGYLYWTDWGDHSLIGRIGMDGSSRSVIVDTKITWPNGLTLDYVTERIYWADAREDYIEFASLDGSNRHVVLSQDIPHIFALTLFEDYVYWTDWETKSINRAHKTTGTNKTLLISTLHRPMDLHVFHALRQPDVPNHPCKVNNGGCSNLCLLSPGGGHKCACPTNFYLGSDGRTCVSNCTASQFVCKNDKCIPFWWKCDTEDDCGDHSDEPPDCPEFKCRPGQFQCSTGICTNPAFICDGDNDCQDNSDEANCDIHVCLPSQFKCTNTNRCIPGIFRCNGQDNCGDGEDERDCPEVTCAPNQFQCSITKRCIPRVWVCDRDNDCVDGSDEPANCTQMTCGVDEFRCKDSGRCIPARWKCDGEDDCGDGSDEPKEECDERTCEPYQFRCKNNRCVPGRWQCDYDNDCGDNSDEESCTPRPCSESEFSCANGRCIAGRWKCDGDHDCADGSDEKDCTPRCDMDQFQCKSGHCIPLRWRCDADADCMDGSDEEACGTGVRTCPLDEFQCNNTLCKPLAWKCDGEDDCGDNSDENPEECARFVCPPNRPFRCKNDRVCLWIGRQCDGTDNCGDGTDEEDCEPPTAHTTHCKDKKEFLCRNQRCLSSSLRCNMFDDCGDGSDEEDCSIDPKLTSCATNASICGDEARCVRTEKAAYCACRSGFHTVPGQPGCQDINECLRFGTCSQLCNNTKGGHLCSCARNFMKTHNTCKAEGSEYQVLYIADDNEIRSLFPGHPHSAYEQAFQGDESVRIDAMDVHVKAGRVYWTNWHTGTISYRSLPPAAPPTTSNRHRRQIDRGVTHLNISGLKMPRGIAIDWVAGNVYWTDSGRDVIEVAQMKGENRKTLISGMIDEPHAIVVDPLRGTMYWSDWGNHPKIETAAMDGTLRETLVQDNIQWPTGLAVDYHNERLYWADAKLSVIGSIRLNGTDPIVAADSKRGLSHPFSIDVFEDYIYGVTYINNRVFKIHKFGHSPLVNLTGGLSHASDVVLYHQHKQPEVTNPCDRKKCEWLCLLSPSGPVCTCPNGKRLDNGTCVPVPSPTPPPDAPRPGTCNLQCFNGGSCFLNARRQPKCRCQPRYTGDKCELDQCWEHCRNGGTCAASPSGMPTCRCPTGFTGPKCTQQVCAGYCANNSTCTVNQGNQPQCRCLPGFLGDRCQYRQCSGYCENFGTCQMAADGSRQCRCTAYFEGSRCEVNKCSRCLEGACVVNKQSGDVTCNCTDGRVAPSCLTCVGHCSNGGSCTMNSKMMPECQCPPHMTGPRCEEHVFSQQQPGHIASILIPLLLLLLLVLVAGVVFWYKRRVQGAKGFQHQRMTNGAMNVEIGNPTYKMYEGGEPDDVGGLLDADFALDPDKPTNFTNPVYATLYMGGHGSRHSLASTDEKRELLGRGPEDEIGDPLA

SEQ ID NO: 2544 - protein, 335 aa, Homo sapiens
MTEEGDLGLTGGPQTYWLKGSSQLKCHMWVLLCSSSMLSVASHSGTLLVLAMAIRSDFHETFRRIARLFYWFPKSLTCSKNRKSKLLWSQGGEGKYICHAHCRDLVHLDYPQNGNVSSCMPTSEVRYSIKKNSQDVEKEKETHSYLSKEEIKEKVHKYNLAVTDKLKMTLNSNGIYTGFIKVQMELCKPPQTSPNSGKLSPSSNGCMNTLHISSTNTVGEVIEALLKKFLVTESPAKFALYKRCHREDQVYACKLSDREHPLYLRLVAGPRTDTLSFVLREHEIGEWEAFSLPELQNFLRILDKEEDEQLQNLKRRYTAYRQKLEEALREVWKPD

SEQ ID NO: 2545 - protein, 450 aa, Homo sapiens
VRAWDLNMDFPCLWLGLLLPLVAALDFNYHRQEGMEAFLKTVAQNYSSVTHLHSIGKSVKGRNLWVLVVGRFPKEHRIGIPEFKYVANMHGDETVGRELLLHLIDYLVTSDGKDPEITNLINSTRIHIMPSMNPDGFEAVKKPDCYYSIGRENYNQYDLNRNFPDAFEYNNVSRQPETVAVMKWLKTETFVLSANLHGGALVASYPFDNGVQATGALYSRSLTPDDDVFQYLAHTYASRNPNMKKGDECKNKMNFPNGVTNGYSWYPLQGGMQDYNYIWAQCFEITLELSCCKYPREEKLPSFWNNNKASLIEYIKQVHLGVKGQVFDQNGNPLPNVIVEVQDRKHICPYRTNKYGEYYLLLLPGSYIINVTVPGHDPHITKVIIPEKSQNFSALKKDILLPFQGQLDSIPVSNPSCPMIPLYRNLPDHSAATKPSLFLFLVSLLHIFFK

SEQ ID NO: 2546 - protein, 456 aa, Homo sapiens
LEWGSYDLQSNKNMDFPCLWLGLLLPLVAALDFNYHRQEGMEAFLKTVAQNYSSVTHLHSIGKSVKGRNLWVLVVGRFPKEHRIGIPEFKYVANMHGDETVGRELLLHLIDYLVTSDGKDPEITNLINSTRIHIMPSMNPDGFEAVKKPDCYYSIGRENYNQYDLNRNFPDAFEYNNVSRQPETVAVMKWLKTETFVLSANLHGGALVASYPFDNGVQATGALYSRSLTPDDDVFQYLAHTYASRNPNMKKGDECKNKMNFPNGVTNGYSWYPLQGGMQDYNYIWAQCFEITLELSCCKYPREEKLPSFWNNNKASLIEYIKQVHLGVKGQVFDQNGNPLPNVIVEVQDRKHICPYRTNKYGEYYLLLLPGSYIINVTVPGHDPHITKVIIPEKSQNFSALKKDILLPFQGQLDSIPVSNPSCPMIPLYRNLPDHSAATKPSLFLFLVSLLHIFFK

SEQ ID NO: 2547 - protein, 180 aa, Homo sapiens
LQSCGLSTQAITLSETAAALDCSLPRLHARQSMRVTLATIAWMVSFVSNYSHTANILPDIENEDFIKDCVRIHNKFRSEVKPTASDMLYMTWDPALAQIAKAWASNCQFSHNTRLKPPHKLHPNFTSLGENIWTGSVPIFSVSSAITNWYDEIQDYDFKTRICKKVCGHYTQRELPNLAI

SEQ ID NO: 2548 - protein, 298 aa, Homo sapiens
LQSCGLSTQAITLSETAAALDCSLPRLHARQSMRVTLATIAWMVSFVSNYSHTANILPDIENEDFIKDCVRIHNKFRSEVKPTASDMLYMTWDPALAQIAKAWASNCQFSHNTRLKPPHKLHPNFTSLGENIWTGSVPIFSVSSAITNWYDEIQDYDFKTRICKKVCGHYTQVVWADSYKVGCAVQFCPKVSGFDALSNGAHFICNYGPGGNYPTWPYKRGATCSACPNNDKCLDNLCVNRQRDQVKRYYSVVYPGWPIYPRNRYTSLFLIVNSVILILSVIITILVQHKYPNLVLLD

SEQ ID NO: 2549 - protein, 62 aa, Homo sapiens [sequence omitted]

SEQ ID NO: 2550 - protein, 452 aa, Homo sapiens
LVERHDMNTLSLPLNIRRGGSDTNLNFDVPDGILDFHKVKLTADSLKQKILKVTEQIKIEQTSRDGNVAEYLKLVNNADKQQAGRIKQVFEKKNQKSAHSIAQLQKKLEQYHRKLREIEQNGASRSSKDISKDHLKDIHRSLKDAHVKSRTAPHCMESSKSGMPGVSLTPPVFVFNKSREFANLIRNKFGSADNIAHLKNSLEEFRPEASARAYGGSATIVNKPKYGSDDECSSGTSGSADSNGNQSFGAGGASTLDSQGKLAVILEELREIKDTQAQLAEDIEALKVQFKREYGFISQTLQEERYRYERLEDQLHDLTDLHQHETANLKQELASIEEKVAYQAYERSRDIQEALESCQTRISKLELHQQEQQALQTDTVNAKVLLGRCINVILAFMTVILVCVSTIAKFVSPMMKSRCHILGTFFAVTLLAIFCKNWDHILCAIERMIIPR

SEQ ID NO: 2551 - protein, 496 aa, Homo sapiens
VARGAAAPEDGKVRGRSAEMPGSDTALTVDRTYSYPGRHHRCKSRVERHDMNTLSLPLNIRRGGSDTNLNFDVPDGILDFHKVKLTADSLKQKILKVTEQIKIEQTSRDGNVAEYLKLVNNADKQQAGRIKQVFEKKNQKSAHSIAQLQKKLEQYHRKLREIEQNGASRSSKDISKDHLKDIHRSLKDAHVKSRTAPHCMESSKSGMPGVSLTPPVFVFNKSREFANLIRNKFGSADNIAHLKNSLEEFRPEASARAYGGSATIVNKPKYGSDDECSSGTSGSADSNGNQSFGAGGASTLDSQGKLAVILEELREIKDTQAQLAEDIEALKVQFKREYGFISQTLQEERYRYERLEDQLHDLTDLHQHETANLKQELASIEEKVAYQAYERSRDIQEALESCQTRISKLELHQQEQQALQTDTVNAKVLLGRCINVILAFMTVILVCVSTIAKFVSPMMKSRCHILGTFFAVTLLAIFCKNWDHILCAIERMIIPR

SEQ ID NO: 2552 - protein, 101 aa, Homo sapiens
LALYGILYLFSAGVFCAIVSHPADSVVSVLNKEKGSSASLVLKRLGFKGVWKGLFARIIMIGTLTALQWFIYDSVKVYFRLPRPPPPEMPESLKKKLGLTQ

SEQ ID NO: 2553 - protein, 586 aa, Homo sapiens
LRSKEYRVFCDDNMTNSKGRSITDKTSGGPSSGGGFVDWTLRLNTIQSDKFLNLLLSMVPVIYQKNQEDRHKKANGIWQDGLSTAVQTFSNRSEQHMEYHSFSEQSFHANNGHASSSCSQKYDDYANYNYCDGRETSETTAMLQDEDISSDGDEDAIVEVTPKLPKESSGIMALQILVPFLLAGFGTVSAGMVLDIVQHWEVFRKVTEVFILVPALLGLKGNLEMTLASRLSTAVNIGKMDSPIEKWNLIIGNLALKQVQATVVGFLAAVAAIILGWIPEGKYYLDHSILLCSSSVATAFIASLLQGIIMVGVIVGSKKTGINPDNVATPIAASFGDLITLAILAWISQGLYSCLETYYYISPLVGVFFLALTPIWIIIAAKHPATRTVLHSGWEPVITAMVISSIGGLILDTTVSDPNLVGIVVYTPVINGIGGNLVAIQASRISTYLHLHSIPGELPDEPKGCYYPFRTFFGPGVNNKSAQVLLLLVIPGHLIFLYTIHLMKSGHTSLTIIFIVVYLFGAVLQVFTLLWIADWMVHHFWRKGKDPDSFSIPYLTALGDLLGTALLALSFHFLWLIGDRDGDVGD

SEQ ID NO: 2554 - protein, 467 aa, Homo sapiens
LKGRSSCLWRHGFWLQDAHGVRGDPRPVSRLPLLNLNRKMAVGASGLEGDKMAGAMPLQLLLLLILLGPGNSLQLWDTWADEAEKALGPLLARDRRQATEYEYLDYDFLPETEPPEMLRNSTDTTPLTGPGTPESTTVEPAARRSTGLDAGGAVTELTTELANMGNLSTDSAAMEIQTTQPAATEAQTTQPVPTEAQTTPLAATEAQTTRLTATEAQTTPLAATEAQTTPPAATEAQTTQPTGLEAQTTAPAAMEAQTTAPAAMEAQTTPPAAMEAQTTQTTAMEAQTTAPEATEAQTTQPTATEAQTTPLAAMEALSTEPSATEALSMEPTTKRGLFIPFSVSSVTHKGIPMAASNLSVNYPVGAPDHISVKQCLLAILILALVATIFFVCTVVLAVRLSRKGHMYPVRNYSPTEMVCISSLLPDGGEGPSATANGGLSKAKSPGLTPEPREDREGDDLTLHSFLP

SEQ ID NO: 2555 - protein, 147 aa, Homo sapiens
VEKLKEVAGLPDDCAVTERLAVLAFLYLYLSICRKQRALPSLDIVVWSELPPGAGLGSSAAYSVCLAAALLTVCEEIPNPLKDGDCVNRWTKEDLELINKWAFQGERMIHGNPSGVDNAVSTWGGALRYHQGKISSLKSSQRSWPPS

SEQ ID NO: 2556 - protein, 123 aa, Homo sapiens
LIPVQLLWVNLVTDGLPATALGFNPPDLDIMNKPPRNPKEPLISGWLFFRYLAIGCYVGAATVGAAAWWFIAADGGPRVSFYQLVLSHLSFCTLHEKCCEALTFLWFRYLSNHLKTQTINSYI

SEQ ID NO: 2557 - protein, 144 aa, Homo sapiens
VPCLGGAFPHLSLLCSLSENQSLLRMPPWENIWLVGSICLSMSLHFLILYVEPLPLIFQITPLNVTQWLMVLKISLPVILMDETLKFVARNYLEPGKECVQPATKSCSFSACTDGISWPFVLLIMPLVIWVYSTDTNFSDMFWS

SEQ ID NO: 2558 - protein, 304 aa, Homo sapiens
VIHRLGLPKCWDYRCEPLHLASLNVSLWPNFHLCTQLIFYISSFLYTVNYIWYLYTELRMKHTQSGQSTSPLVIDYTCRVCQMAFVFSSLIPLLLMTPVFCLGNTSECFQNFSQSHKCILMHSPPSAMAELPPSANTSVCSTLYFYGIAIFLGSFVLSLLTIMVLLIRAQTLYKKFVKSTGFLGSEQWAVIHIVDQRVRFYPVAFFCCWGPAVILMIIKLTKPQDTKLHMALYVLQALTATSQGLLNCGVYGWTQHKFHQLKQEARRDADTQTPLLCSQKRFYSRGLNSLESTLTFPASTSTIF

SEQ ID NO: 2559 - protein, 334 aa, Homo sapiens
LGPAPTLGSSCNTVDTICHGYSEIRPLFYLSFCDLLLGLCWLTETLLYGASVANKDIICYNLQAVGQIFYISSFLYTVNYIWYLYTELRMKHTQSGQSTSPLVIDYTCRVCQMAFVFSSLIPLLLMTPVFCLGNTSECFQNFSQSHKCILMHSPPSAMAELPPSANTSVCSTLYFYGIAIFLGSFVLSLLTIMVLLIRAQTLYKKFVKSTGFLGSEQWAVIHIVDQRVRFYPVAFFCCWGPAVILMIIKLTKPQDTKLHMALYVLQALTATSQGLLNCGVYGWTQHKFHQLKQEARRDADTQTPLLCSQKRFYSRGLNSLESTLTFPASTSTIF

SEQ ID NO: 2560 - protein, 186 aa, Homo sapiens
LGPAPTLGSSCNTVDTICHGYSEIRPLFYLSFCDLLLGLCWLTETLLYGASVANKDIICYNLQAVGQIFYISSFLYTVNYIWYLYTELRMKHTQSGQSTSPLVIDYTCRVCQMAFVFSSLIPLLLMTPVFCLGNTSECFQNFSQSHKCILMHSPPSAMAELPPSANTSVCSTLYFYGLTYPSPDIV

SEQ ID NO: 2561 - protein, 308 aa, Homo sapiens
LSCFSPQSCPTRPLPRRHFPVGEPTRGMALQSAPRVRGGRGCRGAVPSCRPRVTLPLSPHSLGLTLLIFYYSFAIVGMEFFCGIVFPNCCNTSTVADAYRWRNHTVGNRTVVEEGYYYLNNFDNILNSFVTLFELTVVNNWYIIMEGVTSQTSHWSRLYFMTFYIVTMVVMTIIVAFILEAFVFRMNYSRKNQDSEVDGGITLEKEISKEELVAVLELYREARGASSDVTRLLETLSQMERYQQHSMVFLGRRSRTKSDLSLKMYQEEIQEWYEEHAREQEQQRQLSSSAAPAAQQPPGSRQRSQTVT

SEQ ID NO: 2562 - protein, 561 aa, Homo sapiens
LATCRAAPACAAVPDPPCLCGLRARSPRLCRLCRRPRLLPGAEPCEPRVGPRRADMGCSAKARWAAGALGVAGLLCAVLGAVMIVMVPSLIKQQVLKNVRIDPSSLSFNMWKEIPIPFYLSVYFFDVMNPSEILKGEKPQVRERGPYVYREFRHKSNITFNNNDTVSFLEYRTFQFQPSKSHGSESDYIVMPNILVLGAAVMMENKPMTLKLIMTLAFTTLGERAFMNRTVGEIMWGYKDPLVNLINKYFPGMFPFKDKFGLFAELNNSDSGLFTVFTGVQNISRIHLVDKWNGLSKVDFWHSDQCNMINGTSGQMWPPFMTPESSLEFYSPEACRSMKLMYKESGVFEGIPTYRFVAPKTLFANGSIYPPNEGFCPCLESGIQNVSTCRFSAPLFLSHPHFLNADPVLAEAVTGLHPNQEAHSLFLDIHPVTGIPMNCSVKLQLSLYMKSVAGIGQTGKIEPVVLPLLWFAESGAMEGETLHTFYTQLVLMPKVMHYAQYVLLALGCVLLLVPVICQIRSQGPEDTVSQPGLAAGPDRPPSPYTPLLPDSPSGQPPSPTA

SEQ ID NO: 2563 - protein, 586 aa, Homo sapiens
LRARSPRLCRLCRRPRLLPGAEPCEPRVGPRRADMGCSAKARWAAGALGVAGLLCAVLGAVMIVMVPSLIKQQVLKNVRIDPSSLSFNMWKEIPIPFYLSVYFFDVMNPSEILKGEKPQVRERGPYVYREFRHKSNITFNNNDTVSFLEYRTFQFQPSKSHGSESDYIVMPNILVLGAAVMMENKPMTLKLIMTLAFTTLGERAFMNRTVGEIMWGYKDPLVNLINKYFPGMFPFKDKFGLFAELNNSDSGLFTVFTGVQNISRIHLVDKWNGLSKVDFWHSDQCNMINGTSGQMWPPFMTPESSLEFYSPEACRSMKLMYKESGVFEGIPTYRFVAPKTLFANGSIYPPNEGFCPCLESGIQNVSTCRFSAPLFLSHPHFLNADPVLAEAVTGLHPNQEAHSLFLDIHPVTGIPMNCSVKLQLSLYMKSVAGIGQTGKIEPVVLPLLWFAESGAMEGETLHTFYTQLVLMPKVMHYAQYVLLALGCVLLLVPVICQIRSQVGAGQRAARADSHSLACWGKGASDRTLWPTAAWSPPPAAVLRLCRSGSGHCWGLRSTLASFACRVATTLPVLEGLGPSLGGGTGS

SEQ ID NO: 2564 - protein, 498 aa, Homo sapiens
LPGAEPCEPRVGPRRADMGCSAKARWAAGALGVAGLLCAVLGAVMIVMVPSLIKQQVLKNVRIDPSSLSFNMWKEIPIPFYLSVYFFDVMNPSEILKGEKPQVRERGPYVYREFRHKSNITFNNNDTVSFLEYRTFQFQPSKSHGSESDYIVMPNILVLGAAVMMENKPMTLKLIMTLAFTTLGERAFMNRTVGEIMWGYKDPLVNLINKYFPGMFPFKDKFGLFAELNNSDSGLFTVFTGVQNISRIHLVDKWNGLSKVDFWHSDQCNMINGTSGQMWPPFMTPESSLEFYSPEACRSMKLMYKESGVFEGIPTYRFVAPKTLFANGSIYPPNEGFCPCLESGIQNVSTCRFSAPLFLSHPHFLNADPVLAEAVTGLHPNQEAHSLFLDIHPVTGIPMNCSVKLQLSLYMKSVAGIGQTGKIEPVVLPLLWFAESGAMEGETLHTFYTQLVLMPKEKCYLFWSSSKKGSKDKEAIQAYSESLMTSAPKGSVLQEAKL

SEQ ID NO: 2565 - protein, 543 aa, Homo sapiens
LRARSPRLCRLCRRPRLLPGAEPCEPRVGPRRADMGCSAKARWAAGALGVAGLLCAVLGAVMIVMVPSLIKQQVLKNVRIDPSSLSFNMWKEIPIPFYLSVYFFDVMNPSEILKGEKPQVRERGPYVYREFRHKSNITFNNNDTVSFLEYRTFQFQPSKSHGSESDYIVMPNILVLGAAVMMENKPMTLKLIMTLAFTTLGERAFMNRTVGEIMWGYKDPLVNLINKYFPGMFPFKDKFGLFAELNNSDSGLFTVFTGVQNISRIHLVDKWNGLSKVDFWHSDQCNMINGTSGQMWPPFMTPESSLEFYSPEACRSMKLMYKESGVFEGIPTYRFVAPKTLFANGSIYPPNEGFCPCLESGIQNVSTCRFSAPLFLSHPHFLNADPVLAEAVTGLHPNQEAHSLFLDIHPVTGIPMNCSVKLQLSLYMKSVAGIGQTGKIEPVVLPLLWFAESGAMEGETLHTFYTQLVLMPKVMHYAQYVLLALGCVLLLVPVICQIRSQEKCYLFWSSSKKGSKDKEAIQAYSESLMTSAPKGSVLQEAKL

SEQ ID NO: 2566 - protein, 474 aa, Homo sapiens
MALQPSWNVRIDPSSLSFNMWKEIPIPFYLSVYFFDVMNPSEILKGEKPQVRERGPYVYREFRHKSNITFNNNDTVSFLEYRTFQFQPSKSHGSESDYIVMPNILVLGAAVMMENKPMTLKLIMTLAFTTLGERAFMNRTVGEIMWGYKDPLVNLINKYFPGMFPFKDKFGLFAELNNSDSGLFTVFTGVQNISRIHLVDKWNGLSKVDFWHSDQCNMINGTSGQMWPPFMTPESSLEFYSPEACRSMKLMYKESGVFEGIPTYRFVAPKTLFANGSIYPPNEGFCPCLESGIQNVSTCRFSAPLFLSHPHFLNADPVLAEAVTGLHPNQEAHSLFLDIHPVTGIPMNCSVKLQLSLYMKSVAGIGQTGKIEPVVLPLLWFAESGAMEGETLHTFYTQLVLMPKVMHYAQYVLLALGCVLLLVPVICQIRSQEKCYLFWSSSKKGSKDKEAIQAYSESLMTSAPKGSVLQEAKL

SEQ ID NO: 2567 - protein, 587 aa, Homo sapiens
LRARSPRLCRLCRRPRLLPGAEPCEPRVGPRRADMGCSAKARWAAGALGVAGLLCAVLGAVMIVMVPSLIKQQVLKNVRIDPSSLSFNMWKEIPIPFYLSVYFFDVMNPSEILKGEKPQVRERGPYVYREFRHKSNITFNNNDTVSFLEYRTFQFQPSKSHGSESDYIVMPNILVLGAAVMMENKPMTLKLIMTLAFTTLGERAFMNRTVGEIMWGYKDPLVNLINKYFPGMFPFKDKFGLFAELNNSDSGLFTVFTGVQNISRIHLVDKWNGLSKVDFWHSDQCNMINGTSGQMWPPFMTPESSLEFYSPEACRSMKLMYKESGVFEGIPTYRFVAPKTLFANGSIYPPNEGFCPCLESGIQNVSTCRFSAPLFLSHPHFLNADPVLAEAVTGLHPNQEAHSLFLDIHPVTGIPMNCSVKLQLSLYMKSVAGIGQTGKIEPVVLPLLWFAESGAMEGETLHTFYTQLVLMPKVMHYAQYVLLALGCVLLLVPVICQIRSQVGAGQRAARADSHSLACWGKGASDRTLWPTAAWSPPPAAVLRLCRSGSGHCWGLRSTLASFACRVATTLPVLEGLGPSLGGGTGGL

SEQ ID NO: 2568 - protein, 735 aa, Homo sapiens
LGQAARRRRRRPFSPLFPAAAVADPARQALLTVASSGPRSPALASAPAPGPQPSSQPRPPAAAMSKEERPGREEILECQVMWEPDSKKNTQMDRFRAAVGAACGLALESYDDLYHWSVESYSDFWAEFWKFSGIVFSRVYDEVVDTSKGIADVPEWFKGSRLNYAENLLRHKENDRVALYIAREGKEEIVKVTFEELRQEVALFAAAMRKMGVKKGDRVVGYLPNSEHAVEAMLAAASIGAIWSSTSPDFGVNGVLDRFSQIQPKLIFSVEAVVYNGKEHNHMEKLQQVVKGLPDLKKVVVIPYVSSRENIDLSKIPNSVFLDDFLATGTSEQAPQLEFEQLPFSHPLFIMFSSGTTGAPKCMVHSAGGTLIQHLKEHLLHGNMTSSDILLCYTTVGWMMWNWMVSLLATGAAMVLYDGSPLVPTPNVLWDLVDRIGITVLVTGAKWLSVLEEKAMKPVETHSLQMLHTILSTGSPLKAQSYEYVYRCIKSSILLGSISGGTDIISCFMGHNFSLPVYKGEIQARNLGMAVEAWNEEGKAVWGESGELVCTKPIPCQPTHFWNDENGNKYRKAYFSKFPGIWAHGDYCRINPKTGGIVMLGRSDGTLNPNGVRFGSSEIYNIVESFEEVEDSLCVPQYNKYREERVILFLKMASGHAFQPDLVKRIRDAIRMGLSARHVPSLILETKGIPYTLNGKKVEVAVKQIIAGKAVEQGGAFSNPETLDLYRDIPELQGF

SEQ ID NO: 2569 - protein, 154 aa, Homo sapiens
LDDFLATGTSEQAPQLEFEQLPFSHPLFIMFSSGTTGAPKCMVHSAGGTLIQHLKEHLLHGNMTSSDILLCYTTVGWMMWNWMVSLLATGAAMVLYDGSPLVPTPNVLWDLVDRIGITVLVTGAKWLSVLEEKAMKPGECASSVLIPCTANQGN

SEQ ID NO: 2570 - protein, 210 aa, Homo sapiens
LRWGRCPRRHGAGEAMAPAASRLRAEAGLGALPRRALAQYLLFLRLYPVLTKAATSGILSALGNFLAQMIEKKRKKENSRSLDVGGPLRYAVYGFFFTGPLSHFFYFFMEHWIPPEVPLAGLRRLLLDRLVFAPAFLMLFFLIMNFLEGKDASAFAAKMRGGFWPALRMNWRVWTPLQFININYVPLKFRVLFANLAALFWYAYLASLGK

SEQ ID NO: 2571 - protein, 1394 aa, Homo sapiens
LAARITRGSGCLLAGAARRALRARGRRRRTRGRTLAAGSLAAGSAGTGRAGRVALTMVSYWDTGVLLCALLSCLLLTGSSSGSKLKDPELSLKGTQHIMQAGQTLHLQCRGEAAHKWSLPEMVSKESERLSITKSACGRNGKQFCSTLTLNTAQANHTGFYSCKYLAVPTSKKKETESAIYIFISDTGRPFVEMYSEIPEIIHMTEGRELVIPCRVTSPNITVTLKKFPLDTLIPDGKRIIWDSRKGFIISNATYKEIGLLTCEATVNGHLYKTNYLTHRQTNTIIDVQISTPRPVKLLRGHTLVLNCTATTPLNTRVQMTWSYPDEKNKRASVRRRIDQSNSHANIFYSVLTIDKMQNKDKGLYTCRVRSGPSFKSVNTSVHIYDKAFITVKHRKQQVLETVAGKRSYRLSMKVKAFPSPEVVWLKDGLPATEKSARYLTRGYSLIIKDVTEEDAGNYTILLSIKQSNVFKNLTATLIVNVKPQIYEKAVSSFPDPALYPLGSRQILTCTAYGIPQPTIKWFWHPCNHNHSEARCDFCSNNEESFILDADSNMGNRIESITQRMAIIEGKNKMASTLVVADSRISGIYICIASNKVGTVGRNISFYITDVPNGFHVNLEKMPTEGEDLKLSCTVNKFLYRDVTWILLRTVNNRTMHYSISKQKMAITKEHSITLNLTIMNVSLQDSGTYACRARNVYTGEEILQKKEITIRDQEAPYLLRNLSDHTVAISSSTTLDCHANGVPEPQITWFKNNHKIQQEPGIILGPGSSTLFIERVTEEDEGVYHCKATNQKGSVESSAYLTVQGTSDKSNLELITLTCTCVAATLFWLLLTLFIRKMKRSSSEIKTDYLSIIMDPDEVPLDEQCERLPYDASKWEFARERLKLGKSLGRGAFGKVVQASAFGIKKSPTCRTVAVKMLKEGATASEYKALMTELKILTHIGHHLNVVNLLGACTKQGGPLMVIVEYCKYGNLSNYLKSKRDLFFLNKDAALHMEPKKEKMEPGLEQGKKPRLDSVTSSESFASSGFQEDKSLSDVEEEEDSDGFYKEPITMEDLISYSFQVARGMEFLSSRKCIHRDLAARNILLSENNVVKICDFGLARDIYKNPDYVRKGDTRLPLKWMAPESIFDKIYSTKSDVWSYGVLLWEIFSLGGSPYPGVQMDEDFCSRLREGMRMRAPEYSTPEIYQIMLDCWHRDPKERPRFAELVEKLGDLLQANVQQDGKDYIPINAILTGNSGFTYSTPAFSEDFFKESISAPKFNSGSSDDVRYVNAFKFMSLERIKTFEELLPNATSMFDDYQGDSSTLLASPMLKRFTWTDSKPKASLKIDLRVTSKSKESGLSDVSRPSFCHSSCGHVSEGKRRFTYDHAELERKIACCSPPPDYNSVVLYSTPPI

SEQ ID NO: 2572 - protein, 789 aa, Homo sapiens
LAARITRGSGCLLAGAARRALRARGRRRRTRGRTLAAGSLAAGSAGTGRAGRVALTMVSYWDTGVLLCALLSCLLLTGSSSGSKLKDPELSLKGTQHIMQAGQTLHLQCRGEAAHKWSLPEMVSKESERLSITKSACGRNGKQFCSTLTLNTAQANHTGFYSCKYLAVPTSKKKETESAIYIFISDTGRPFVEMYSEIPEIIHMTEGRELVIPCRVTSPNITVTLKKFPLDTLIPDGKRIIWDSRKGFIISNATYKEIGLLTCEATVNGHLYKTNYLTHRQTNTIIDVQISTPRPVKLLRGHTLVLNCTATTPLNTRVQMTWSYPDEKNKRASVRRRIDQSNSHANIFYSVLTIDKMQNKDKGLYTCRVRSGPSFKSVNTSVHIYDKAFITVKHRKQQVLETVAGKRSYRLSMKVKAFPSPEVVWLKDGLPATEKSARYLTRGYSLIIKDVTEEDAGNYTILLSIKQSNVFKNLTATLIVNVKPQIYEKAVSSFPDPALYPLGSRQILTCTAYGIPQPTIKWFWHPCNHNHSEARCDFCSNNEESFILDADSNMGNRIESITQRMAIIEGKNKMASTLVVADSRISGIYICIASNKVGTVGRNISFYITDVPNGFHVNLEKMPTEGEDLKLSCTVNKFLYRDVTWILLRTVNNRTMHYSISKQKMAITKEHSITLNLTIMNVSLQDSGTYACRARNVYTGEEILQKKEITIRDQEAPYLLRNLSDHTVAISSSTTLDCHANGVPEPQITWFKNNHKIQQEPELYTSTSPSSSSSSPLSSSSSSSSSSSS

SEQ ID NO: 2573 - protein, 763 aa, Homo sapiens
LLFIEVRGRLGARQADTPLGSSPAAAAARSGLRGSGAAASGRLAARITRGSGCLLAGAARRALRARGRRRRTRGRTLAAGSLAAGSAGTGRAGRVALTMVSYWDTGVLLCALLSCLLLTGSSSGSKLKDPELSLKGTQHIMQAGQTLHLQCRGEAAHKWSLPEMVSKESERLSITKSACGRNGKQFCSTLTLNTAQANHTGFYSCKYLAVPTSKKKETESAIYIFISDTGRPFVEMYSEIPEIIHMTEGRELVIPCRVTSPNITVTLKKFPLDTLIPDGKRIIWDSRKGFIISNATYKEIGLLTCEATVNGHLYKTNYLTHRQTNTIIDVQISTPRPVKLLRGHTLVLNCTATTPLNTRVQMTWSYPDEKNKRASVRRRIDQSNSHANIFYSVLTIDKMQNKDKGLYTCRVRSGPSFKSVNTSVHIYDKAFITVKHRKQQVLETVAGKRSYRLSMKVKAFPSPEVVWLKDGLPATEKSARYLTRGYSLIIKDVTEEDAGNYTILLSIKQSNVFKNLTATLIVNVKPQIYEKAVSSFPDPALYPLGSRQILTCTAYGIPQPTIKWFWHPCNHNHSEARCDFCSNNEESFILDADSNMGNRIESITQRMAIIEGKNKMASTLVVADSRISGIYICIASNKVGTVGRNISFYITDVPNGFHVNLEKMPTEGEDLKLSCTVNKFLYRDVTWILLRTVNNRTMHYSISKQKMAITKEHSITLNLTIMNVSLQDSGTYACRARNVYTGEEILQKKEITIRGSEEMLLPK

SEQ ID NO: 2574 - protein, 743 aa, Homo sapiens
LAARITRGSGCLLAGAARRALRARGRRRRTRGRTLAAGSLAAGSAGTGRAGRVALTMVSYWDTGVLLCALLSCLLLTGSSSGSKLKDPELSLKGTQHIMQAGQTLHLQCRGEAAHKWSLPEMVSKESERLSITKSACGRNGKQFCSTLTLNTAQANHTGFYSCKYLAVPTSKKKETESAIYIFISDTGRPFVEMYSEIPEIIHMTEGRELVIPCRVTSPNITVTLKKFPLDTLIPDGKRIIWDSRKGFIISNATYKEIGLLTCEATVNGHLYKTNYLTHRQTNTIIDVQISTPRPVKLLRGHTLVLNCTATTPLNTRVQMTWSYPDEKNKRASVRRRIDQSNSHANIFYSVLTIDKMQNKDKGLYTCRVRSGPSFKSVNTSVHIYDKAFITVKHRKQQVLETVAGKRSYRLSMKVKAFPSPEVVWLKDGLPATEKSARYLTRGYSLIIKDVTEEDAGNYTILLSIKQSNVFKNLTATLIVNVKPQIYEKAVSSFPDPALYPLGSRQILTCTAYGIPQPTIKWFWHPCNHNHSEARCDFCSNNEESFILDADSNMGNRIESITQRMAIIEGKNKMASTLVVADSRISGIYICIASNKVGTVGRNISFYITDVPNGFHVNLEKMPTEGEDLKLSCTVNKFLYRDVTWILLRTVNNRTMHYSISKQKMAITKEHSITLNLTIMNVSLQDSGTYACRARNVYTGEEILQKKEITIRGEHCNKKAVFSRISKFKSTRNDCTTQSNVKH

SEQ ID NO: 2575 - protein, 597 aa, Homo sapiens
LAARITRGSGCLLAGAARRALRARGRRRRTRGRTLAAGSLAAGSAGTGRAGRVALTMVSYWDTGVLLCALLSCLLLTGSSSGSKLKDPELSLKGTQHIMQAGQTLHLQCRGEAAHKWSLPEMVSKESERLSITKSACGRNGKQFCSTLTLNTAQANHTGFYSCKYLAVPTSKKKETESAIYIFISDTGRPFVEMYSEIPEIIHMTEGRELVIPCRVTSPNITVTLKKFPLDTLIPDGKRIIWDSRKGFIISNATYKEIGLLTCEATVNGHLYKTNYLTHRQTNTIIDVQISTPRPVKLLRGHTLVLNCTATTPLNTRVQMTWSYPDEKNKRASVRRRIDQSNSHANIFYSVLTIDKMQNKDKGLYTCRVRSGPSFKSVNTSVHIYDKAFITVKHRKQQVLETVAGKRSYRLSMKVKAFPSPEVVWLKDGLPATEKSARYLTRGYSLIIKDVTEEDAGNYTILLSIKQSNVFKNLTATLIVNVKPQIYEKAVSSFPDPALYPLGSRQILTCTAYGIPQPTIKWFWHPCNHNHSEARCDFCSNNEESFILDADSNMGNRIESITQRMAIIEGKNKLPPANSSFMLPPTSFSSNYFHFLP

SEQ ID NO: 2576 - protein, 182 aa, Homo sapiens
LYRAGCAAGGRAVLSGEPEANMDQETVGNVVLLAIVTLISVVQNGFFAHKVEHESRTQNGRSFQRTGTLAFERVYTANQNCVDAYPTFLAVLWSAGLLCSQVPAAFAGLMYLFVRQKYFVGYLGERTQSTPGYIFGKRIILFLFLMSVAGIFNYYLIFFFGSDFENYIKTISTTISPLLLIP

SEQ ID NO: 2577 - protein, 110 aa, Homo sapiens
VSNFKRFHGRAFNDPFIQKEKENLSYDLVPLKNGGVGIKVMYMGEEHLFSVEQITAMLLTKLKETAENSLKKPVTDCVISVSIIQQGSVFYFIFAFFVLLLSMKCGKAVL

SEQ ID NO: 2578 - protein, 3024 aa, Homo sapiens
LPVLPASLYAADMASQQDSGFFEISIKYLLKSWSNTSPVGNGYIKPPVPPASGTHREKGPPTMLPINVDPDSKPGEYVLKSLFVNFTTQAERKIRIIMAEPLEKPLTKSLQRGEDPQFDQVISSMSSLSEYCLPSILRTLFDWYKRQNGIEDESHEYRPRTSNKSKSDEQQRDYLMERRDLAIDFIFSLVLIEVLKQIPLHPVIDSLIHDVINLAFKHFKYKEGYLGPNTGNMHIVADLYAEVIGVLAQAKFPAVKKKFMAELKELRHKEQNPYVVQSIISLIMGMKFFRIKMYPVEDFEASLQFMQECAHYFLEVKDKDIKHALAGLFVEILVPVAAAVKNEVNVPCLRNFVESLYDTTLELSSRKKHSLALYPLVTCLLCVSQKQLFLNRWHIFLNNCLSNLKNKDPKMARVALESLYRLLWVYMIRIKCESNTATQSRLITIITTLFPKGSRGVVPRDMPLNIFVKIIQFIAQERLDFAMKEIIFDFLCVGKPAKAFSLNPERMNIGLRAFLVIADSLQQKDGEPPMPVTGAVLPSGNTLRVKKTYLSKTLTEEEAKMIGMSLYYSQVRKAVDNILRHLDKEVGRCMMLTNVQMLNKEPEDMITGERKPKIDLFRTCVAAIPRLLPDGMSKLELIDLLARLSIHMDDELRHIAQNSLQGLLVDFSDWREDVLFGFTNFLLREVNDMHHTLLDSSLKLLLQLLTQWKLVIQTQGKVYEQANKIRNSELIANGSSHRIQSERGPHCSVLHAVEGFALVLLCSFQVATRKLSVLILKEIRALFIALGQPEDDDRPMIDVMDQLSSSILESFIHVAVSDSATLPLTHNVDLQWLVEWNAVLVNSHYDVKSPSHVWIFAQSVKDPWVLCLFSFLRQENLPKHCPTALSYAWPYAFTRLQSVMPLVDPNSPINAKKTSTAGSGDNYVTLWRNYLILCFGVAKPSIMSPGHLRASTPEIMATTPDGTVSYDNKAIGTPSVGVLLKQLVPLMRLESIEITESLVLGFGRTNSLVFRELVEELHPLMKEALERRPENKKRRERRDLLRLQLLRIFELLADAGVISDSTNGALERDTLALGALFLEYVDLTRMLLEAENDKEVEILKDIRAHFSAMVANLIQCVPVHHRRFLFPQQSLRHHLFILFSQWAGPFSIMFTPLDRYSDRNHQITRYQYCALKAMSAVLCCGPVFDNVGLSPDGYLYKWLDNILACQDLRVHQLGCEVVVLLLELNPDQINLFNWAIDRCYTGSYQLASGCFKAIATVCGSRNYPFDIVTLLNLVLFKASDTNREIYEISMQLMQILEAKLFVYSKKVAEQRPGSILYGTHGPLPPLYSVSLALLSCELARMYPELTLPLFSGKPAIPHNTPQRAPDHAYLPAALAAQHRAGGQQAPPPGSSPSSPEDEVKDREGDVTASHGLRGNGWGSPEATSLVLNNLMYMTAKYGDEVPGPEMENAWNALANNEKWSNNLRITLQFLISLCGVSSDTVLLPYIKKVAIYLCRNNTIQTMEELLFELQQTEPVNPIVQHCDNPPFYRFTASSKASAAASGTTSSSNTVVAGQENFPDAEENKILKESDERFSNVIRAHTRLESRYSNSSGGSYDEDKNDPISPYTGWLLTITETKQPQPLPMPCTGGCWAPLVDYLPETITPRGPLHRCNIAVIFMTEMVVDHSVREDWALHLPLLLHAVFLGLDHYRPEVFEHSKKLLLHLLIALSCNSNFHSIASVLLQTREMGEAKTLTVQPAYQPEYLYTGGFDFLREDQSSPVPDSGLSSSSTSSSISLGGSSGNLPQMTQEVEDVDTAAETDEKANKLIEFLTTRAFGPLWCHEDITPKNQNSKSAEQLTNFLRHVVSVFKDSKSGFHLEHQLSEVALQTALASSSRHYAGRSFQIFRALKQPLSAHALSDLLSRLVEVIGEHGDEIQGYVMEALLTLEAAVDNLSDCLKNSDLLTVLSRSSSPDLSSSSKLTASRKSTGQLNMNPGTTSGNTATAERSRHQRSFSVPKKFGVIDRSSDPPRSATLDRIQACTQQGLSSKTRSSSSLKDSLTDPSHINHPTNLLATIFWVTVALMESDFEFEYLMALRLLSRLLAHMPLDKAENREKLEKLQAQLKWADFSGLQQLLLKGFTSLTTTDLTLQLFSLLTPVSKISMVDASHAIGFPLNVLCLLPQLIQHFENPNQFCKDIAERIAQVCLEEKNPKLSNLAHVMTLYKTHSYTRDCATWVNVVCRYLHEAYADITLNMVTYLAELLEKGLPSVQQPLLQVIYSLLSYMDLSVVPVKQFNVEVLKTIEKYVQSVHWREALNILKLVVSRSASLVLPSYQHSDLSKIEIHRVWTSASKELPGKTLDFHFDISETPIIGRRYDELQNSSGRDGKPRAMAVTRSTSSTSSGSNSNVLVPVSWKRPQYSQKRTKEKLVHVLSLCGQEVGLSKNPSVIFSSCGDLDLLEHQTSLVSSEDGAREQENMDDTNSEQQFRVFRDFDFLDVELEDGEGESMDNFNWGVRRRSLDSLDKCDMQILEERQLSGSTPSLNKMHHEDSDESSEEEDLTASQILEHSDLIMTLSPSEETNPMELLTTACDSTPAEPHSFNTRMSSFDASLPDMNNLQISEGSKAEAVREEEDTTVHEDDLSSSINELPAAFECSDSFSLDMTEGEEKGNRALDQFTLASFGEGDRGVSPPPSPFFSAILAAFQPAACDDAEEAWRSHINQLMCDSDGSCAVYTFHVFSSLFKNIQKRFCFLTCDAASYLGDNLRGIGSKFVSSSQMLTSCSECPTLFVDAETLLSCGLLDKLKFSVLELQEYLDTYNNRKEATLSWLANCKATFAGGSRDGVITCQPGDSEEKQLELCQRLYKLHFQLLLLFQSYCKLIGQVHEVSSMPELLNMSRELSDLKKHLKEASAVIAADPLYSDGAWSEPTFTSTEAAIQSMLECLKNNELGKALRQIRECRSLWPNDIFGSSSDDEVQTLLNIYFRHQTLGQTGTYALVGSNQSLTEICTKLMELNMEIRDMIRRAQSYRVLTTFLPDSSVSGTSL

SEQ ID NO: 2579 - protein, 3025 aa, Homo sapiens
LPVLPASLYAADMASQQDSGFFEISIKYLLKSWSNTSPVGNGYIKPPVPPASGTHREKGPPTMLPINVDPDSKPGEYVLKSLFVNFTTQAERKIRIIMAEPLEKPLTKSLQRGEDPQFDQVISSMSSLSEYCLPSILRTLFDWYKRQNGIEDESHEYRPRTSNKSKSDEQQRDYLMERRDLAIDFIFSLVLIEVLKQIPLHPVIDSLIHDVINLAFKHFKYKEGYLGPNTGNMHIVADLYAEVIGVLAQAKFPAVKKKFMAELKELRHKEQNPYVVQSIISLIMGMKFFRIKMYPVEDFEASLQFMQECAHYFLEVKDKDIKHALAGLFVEILVPVAAAVKNEVNVPCLRNFVESLYDTTLELSSRKKHSLALYPLVTCLLCVSQKQLFLNRWHIFLNNCLSNLKNKDPKMARVALESLYRLLWVYMIRIKCESNTATQSRLITIITTLFPKGSRGVVPRDMPLNIFVKIIQFIAQERLDFAMKEIIFDFLCVGKPAKAFSLNPERMNIGLRAFLVIADSLQQKDGEPPMPVTGAVLPSGNTLRVKKTYLSKTLTEEEAKMIGMSLYYSQVRKAVDNILRHLDKEVGRCMMLTNVQMLNKEPEDMITGERKPKIDLFRTCVAAIPRLLPDGMSKLELIDLLARLSIHMDDELRHIAQNSLQGLLVDFSDWREDVLFGFTNFLLREVNDMHHTLLDSSLKLLLQLLTQWKLVIQTQGKVYEQANKIRNSELIANGSSHRIQSERGPHCSVLHAVEGFALVLLCSFQVATRKLSVLILKEIRALFIALGQPEDDDRPMIDVMDQLSSSILESFIHVAVSDSATLPLTHNVDLQWLVEWNAVLVNSHYDVKSPSHVWIFAQSVKDPWVLCLFSFLRQENLPKHCPTALSYAWPYAFTRLQSVMPLVDPNSPINAKKTSTAGSGDNYVTLWRNYLILCFGVAKPSIMSPGHLRASTPEIMATTPDGTVSYDNKAIGTPSVGVLLKQLVPLMRLESIEITESLVLGFGRTNSLVFRELVEELHPLMKEALERRPENKKRRERRDLLRLQLLRIFELLADAGVISDSTNGALERDTLALGALFLEYVDLTRMLLEAENDKEVEILKDIRAHFSAMVANLIQCVPVHHRRFLFPQQSLRHHLFILFSQWAGPFSIMFTPLDRYSDRNHQITRYQYCALKAMSAVLCCGPVFDNVGLSPDGYLYKWLDNILACQDLRVHQLGCEVVVLLLELNPDQINLFNWAIDRCYTGSYQLASGCFKAIATVCGSRNYPFDIVTLLNLVLFKASDTNREIYEISMQLMQILEAKLFVYSKKVAEQRPGSILYGTHGPLPPLYSVSLALLSCELARMYPELTLPLFSEVSQRFPTTHPNGRQIMLTYLLPWLHNIELVDSRLLLPGSSPSSPEDEVKDREGDVTASHGLRGNGWGSPEATSLVLNNLMYMTAKYGDEVPGPEMENAWNALANNEKWSNNLRITLQFLISLCGVSSDTVLLPYIKKVAIYLCRNNTIQTMEELLFELQQTEPVNPIVQHCDNPPFYRFTASSKASAAASGTTSSSNTVVAGQENFPDAEENKILKESDERFSNVIRAHTRLESRYSNSSGGSYDEDKNDPISPYTGWLLTITETKQPQPLPMPCTGGCWAPLVDYLPETITPRGPLHRCNIAVIFMTEMVVDHSVREDWALHLPLLLHAVFLGLDHYRPEVFEHSKKLLLHLLIALSCNSNFHSIASVLLQTREMGEAKTLTVQPAYQPEYLYTGGFDFLREDQSSPVPDSGLSSSSTSSSISLGGSSGNLPQMTQEVEDVDTAAETDEKANKLIEFLTTRAFGPLWCHEDITPKNQNSKSAEQLTNFLRHVVSVFKDSKSGFHLEHQLSEVALQTALASSSRHYAGRSFQIFRALKQPLSAHALSDLLSRLVEVIGEHGDEIQGYVMEALLTLEAAVDNLSDCLKNSDLLTVLSRSSSPDLSSSSKLTASRKSTGQLNMNPGTTSGNTATAERSRHQRSFSVPKKFGVIDRSSDPPRSATLDRIQACTQQGLSSKTRSSSSLKDSLTDPSHINHPTNLLATIFWVTVALMESDFEFEYLMALRLLSRLLAHMPLDKAENREKLEKLQAQLKWADFSGLQQLLLKGFTSLTTTDLTLQLFSLLTPVSKISMVDASHAIGFPLNVLCLLPQLIQHFENPNQFCKDIAERIAQVCLEEKNPKLSNLAHVMTLYKTHSYTRDCATWVNVVCRYLHEAYADITLNMVTYLAELLEKGLPSVQQPLLQVIYSLLSYMDLSVVPVKQFNVEVLKTIEKYVQSVHWREALNILKLVVSRSASLVLPSYQHSDLSKIEIHRVWTSASKELPGKTLDFHFDISETPIIGRRYDELQNSSGRDGKPRAMAVTRSTSSTSSGSNSNVLVPVSWKRPQYSQKRTKEKLVHVLSLCGQEVGLSKNPSVIFSSCGDLDLLEHQTSLVSSEDGAREQENMDDTNSEQQFRVFRDFDFLDVELEDGEGESMDNFNWGVRRRSLDSLDKCDMQILEERQLSGSTPSLNKMHHEDSDESSEEEDLTASQILEHSDLIMTLSPSEETNPMELLTTACDSTPAEPHSFNTRMSSFDASLPDMNNLQISEGSKAEAVREEEDTTVHEDDLSSSINELPAAFECSDSFSLDMTEGEEKGNRALDQFTLASFGEGDRGVSPPPSPFFSAILAAFQPAACDDAEEAWRSHINQLMCDSDGSCAVYTFHVFSSLFKNIQKRFCFLTCDAASYLGDNLRGIGSKFVSSSQMLTSCSECPTLFVDAETLLSCGLLDKLKFSVLELQEYLDTYNNRKEATLSWLANCKATFAGGSRDGVITCQPGDSEEKQLELCQRLYKLHFQLLLLFQSYCKLIGQVHEVSSMPELLNMSRELSDLKKHLKEASAVIAADPLYSDGAWSEPTFTSTEAAIQSMLECLKNNELGKALRQIRECRSLWPNDIFGSSSDDEVQTLLNIYFRHQTLGQTGTYALVGSNQSLTEICTKLMELNMEIRDMIRRAQSYRVLTTFLPDSSVSGTSL

SEQ ID NO: 2580 - protein, 340 aa, Homo sapiens
LAARMARRRSQRVCASGPSMLNSARGAPELLRGTATNAEVSAAAAGATGSEELPPGDRGCRNGGGRGPAATTSSTGVAVGAEHGEDSLSRKPDPEPGRMDHHQPGTGRYQVLLNEEDNSESSAIEQPPTSNPAPQIVQAASSAPALETDSSPPPYSSITVEVPTTSDTEVYGEFYPVPPPYSVATSLPTYDEAEKAKAAAMAAAAAETSQRIQEEECPPRDDFSDADQLRVGNDGIFMLAFFMAFIFNWLGFCLSFCITNTIAGRYGAICGFGLSLIKWILIVRFSDYFTGYFNGQYWLWWIFLVLGLLLFFRGFVNYLKVRNMSESMAAAHRTRYFFLL

SEQ ID NO: 2581 - protein, 857 aa, Homo sapiens
LLGLSCPGSARAWGEARRARTRSMAVEDEGLRVFQSVKIKIGEAKNLPSYPGPSKMRDCYCTVNLDQEEVFRTKIVEKSLCPFYGEDFYCEIPRSFRHLSFYIFDRDVFRRDSIIGKVAIQKEDLQKYHNRDTWFQLQHVDADSEVQGKVHLELRLSEVITDTGVVCHKLATRIVECQGLPIVNGQCDPYATVTLAGPFRSEAKKTKVKRKTNNPQFDEVFYFEVTRPCSYSKKSHFDFEEEDVDKLEIRVDLWNASNLKFGDEFLGELRIPLKVLRQSSSYEAWYFLQPRDNGSKSLKPDDLGSLRLNVVYTEDHVFSSDYYSPLRDLLLKSADVEPVSASAAHILGEVCREKQEAAVPLVRLFLHYGRVVPFISAIASAEVKRTQDPNTIFRGNSLASKCIDETMKLAGMHYLHVTLKPAIEEICQSHKPCEIDPVKLKDGENLENNMENLRQYVDRVFHAITESGVSCPTVMCDIFFSLREAAAKRFQDDPDVRYTAVSSFIFLRFFAPAILSPNLFQLTPHHTDPQTSRTLTLISKTVQTLGSLSKSKSASFKESYMATFYEFFNEQKYADAVKNFLDLISSSGRRDPKSVEQPIVLKEGFMIKRAQGRKRFGMKNFKKRWFRLTNHEFTYHKSKGDQPLYSIPIENILAVEKLEEESFKMKNMFQVIQPERALYIQANNCVEAKDWIDILTKVSQCNQKRLTVYHPSAYLSGHWLCCRAPSDSAPGCSPCTGGLPANIQLDIDGDRETERIYSLFNLYMSKLEKMQEACGSKSVYDGPEQEEYSTFVIDDPQETYKTLKQVIAGVGALEQEHAQYKRDKFKKTKYGSQEHPIGDKSFQNYIRQQSETSTHSI

SEQ ID NO: 2582 - protein, 305 aa, Homo sapiens
LGAEASFPPSALRGGSALAAAARWGPAEEGARIPGSFFAWAAPAAPGAGAAAAPAPRADPGGRGLLGEAGRGPNYAEAGTPTLHTSPRPHLRPCTHTHTRTPTPPRCKAGFKRTSLRFLPAPHHRTREEEAGEKQNFFPLSCPFLRTCSEAEEPVLEEMVMGLGVLLLVFVLGLGLTPPTLAQDNSRYTHFLTQHYDAKPQGRDDRYCESIMRRRGLTSPCKDINTFIHGNKRSIKAICENKNGNPHRENLRISKSSFQVTTCKLHGGSPWPPCQYRATAGFRNVVVACENGLPVHLDQSIFRRP

SEQ ID NO: 2583 - protein, 393 aa, Homo sapiens
LLQLEGRESVGAGQSVAEGREVNAPAKVLLTWVNCSSVRWATRVQDIFTAGKLLALALIIIMGIVQICKGEYFWLEPKNAFENFQEPDIGLVALAFLQGSFAYGGWNFLNYVTEELVDPYKNLPRAIFISIPLVTFVYVFANVAYVTAMSPQELLASNAVAVTFGEKLLGVMAWIMPISVALSTFGGVNGSLFTSSRLFFAGAREGHLPSVLAMIHVKRCTPIPALLFTCISTLLMLVTSDMYTLINYVGFINYLFYGVTVAGQIVLRWKKPDIPRPIKINLLFPIIYLLFWAFLLVFSLWSEPVVCGIGLAIMLTGVPVYFLGVYWQHKPKCFSDFIELLTLVSQKMCVVVYPEVERGSGTEEANEDMEEQQQPMYQPTPTKDKDVAGQPQP

SEQ ID NO: 2584 - protein, 292 aa, Homo sapiens
LRRMEEGARHRNNTEKKHPGGGESDASPEAGSGGGGVALKKEIGLVSACGIIVGNIIGSGIFVSPKGVLENAGSVGLALIVWIVTGFITVVGALCYAELGVTIPKSGGDYSYVKDIFGGLAGFLRLWIAVLVIYPTNQAVIALTFSNYVLQPLFPTCFPPESGLRLLAAICLLLLTWVNCSSVRWATRVQDIFTAGKLLALALIIIMGIVQICKGEYFWLEPKNAFENFQEPDIGLVALAFLQGSFAYGGWNFLNYVTEELVDPYKAANPGEPEDVCGRVPRGGAGLRDRGG

SEQ ID NO: 2585 - protein, 297 aa, Homo sapiens
LAGFLRLWIAVLVIYPTNQAVIALTFSNYVLQPLFPTCFPPESGLRLLAAICLLLLTWVNCSSVRWATRVQDIFTAGKLLALALIIIMGIVQICKGEYFWLEPKNAFENFQEPDIGLVALAFLQGSFAYGGWNFLNYVTEELVDPYKNLPRAIFISIPLVTFVYVFANVAYVTAMSPQELLASNAVAVTFGEKLLGVMAWIMPISVALSTFGGVNGSLFLLSAVLRWSPRGPPSQCVGHDPREALHPNPSPALHMHLHPADAGHQRHVHTHQLCGLHQLPLLWGHGCWTDSPSLEEA

SEQ ID NO: 2586 - protein, 436 aa, Homo sapiens
VSPPVPTPRAAASPRRTSTIASRIGTIMAFLCSPPTPSARFGRRGIVLLTLGLVGPCGVGGAAAGSSTGVMALRFLLGFLLAGVDLGVYLMRLELCDPTQRLRVALAGELVGVGGHFLFLGLALVSKDWRFLQRMITAPCILFLFYGWPGLFLESARWLIVKRQIEEAQSVLRILAERNRPHGQMLGEEAQEALQDLENTCPLPATSSFSFASLLNYRNIWKNLLILGFTNFIAHAIRHCYQPVGGGGSPSDFYLCSLLASGTAALACVFLGVTVDRFGRRGILLLSMTLTGIASLVLLGLWDYLNEAAITTFSVLGLFSSQAAAILSTLLAAEVIPTTVRGRGLGLIMALGALGGLSGPAQRLHMGHGAFLQHVVLAACALLCILSIMLLPETKRKLLPEVLRDGELCRRPSLLRQPPPTRCDHVPLLATPNPAL

SEQ ID NO: 2587 - protein, 266 aa, Homo sapiens [sequence omitted]

SEQ ID NO: 2588 - protein, 1264 aa, Homo sapiens
LTELCDGIVAFPFALWAFLPQRGPGNYKSLSHKDYIFELFKLPLVLVLIFLFTITKIKFIKKKAHAVGGFGLDIGTRALLLRARSFIKPSWPLNARSSSSPTQLGNSRRGEPTLPESGFRDSAGAQPNGSGGAGPLCGKRIESPWQPAGRAATPFPPEVGVRTSTCCPSPSPFRPSSGGSVAAMESAGLEQLLRELLLPDTERIRRATEQLQIVLRAPAALPALCDLLASAADPQIRQFAAVLTRRRLNTRWRRLAAEQRESLKSLILTALQRETEHCVSLSLAQLSATIFRKEGLEAWPQLLQLLQHSTHSPHSPEREMGLLLLSVVVTSRPEAFQPHHRELLRLLNETLGEVGSPGLLFYSLRTLTTMAPYLSTEDVPLARMLVPKLIMAMQTLIPIDEAKACEALEALDELLESEVPVITPYLSEVLTFCLEVARNVALGNAIRIRILCCLTFLVKVKSKALLKNRLLPPLLHTLFPIVAAEPPPGQLDPEDQDSEEEELEIELMGETPKHFAVQVVDMLALHLPPEKLCPQLMPMLEEALRSESPYQRKAGLLVLAVLSDGAGDHIRQRLLPPLLQIVCKGLEDPSQVVRNAALFALGQFSENLQPHISSYSREVMPLLLAYLKSVPLGHTHHLAKACYALENFVENLGPKVQPYLPELMECMLQLLRNPSSPRAKELAVSALGAIATAAQASLLPYFPAIMEHLREFLLTGREDLQPVQIQSLETLGVLARAVGEPMRPLAEECCQLGLGLCDQVDDPDLRRCTYSLFAALSGLMGEGLAPHLEQITTLMLLSLRSTEGIVPQYDGSSSFLLFDDESDGEEEEELMDEDVEEEDDSEISGYSVENAFFDEKEDTCAAVGEISVNTSVAFLPYMESVFEEVFKLLECPHLNVRKAAHEALGQFCCALHKACQSCPSEPNTAALQAALARVVPSYMQAVNRERERQVVMAVLEALTGVLRSCGTLTLKPPGRLAELCGVLKAVLQRKTACQDTDEEEEEEDDDQAEYDAMLLEHAGEAIPALAAAAGGDSFAPFFAGFLPLLVCKTKQGCTVAEKSFAVGTLAETIQGLGAASAQFVSRLLPVLLSTAQEADPEVRSNAIFGMGVLAEHGGHPAQEHFPKLLGLLFPLLARERHDRVRDNICGALARLLMASPTRKPEPQVLAALLHALPLKEDLEEWVTIGRLFSFLYQSSPDQVIDVAPELLRICSLILADNKIPPDTKAALLLLLTFLAKQHTDSFQAALGSLPVDKAQELQAVLGLS

SEQ ID NO: 2589 - protein, 364 aa, Homo sapiens
LLPHAMKSPFYRCQNTTSVEKGNSAVMGGVLFSTGLLGNLLALGLLARSGLGWCSRRPLRPLPSVFYMLVCGLTVTDLLGKCLLSPVVLAAYAQNRSLRVLAPALDNSLCQAFAFFMSFFGLSSTLQLLAMALECWLSLGHPFFYRRHITLRLGALVAPVVSAFSLAFCALPFMGFGKFVQYCPGTWCFIQMVHEEGSLSVLGYSVLYSSLMALLVLATVLCNLGAMRNLYAMHRRLQRHPRSCTRDCAEPRADGREASPQPLEELDHLLLLALMTVLFTMCSLPVIYRAYYGAFKDVKEKNRTSEEAEDLRALRFLSVISIVDPWIFIIFRSPVFRIFFHKIFIRPLRYRSRCSNSTNMESSL

SEQ ID NO: 2590 - protein, 840 aa, Homo sapiens
VKKQTKSAQIQLQLIMFSGFNVFRVGISFVIMCIFYMPTVNSLPELSPQKYFSTLQPGKASLAYFCQADSPRTSVFLEELNEAVRPLQDYGISVAKVNCVKEEISRYCGKEKDLMKAYLFKGNILLREFPTDTLFDVNAIVAHVLFALLFSEVKYITNLEDLQNIENALKGKANIIFSYVRAIGIPEHRAVMEAAFVYGTTYQFVLTTEIALLESIGSEDVEYAHLYFFHCKLVLDLTQQCRRTLMEQPLTTLNIHLFIKTMKAPLLTEVAEDPQQVSTVHLQLGLPLVFIVSQQATYEADRRTAEWVAWRLLGKAGVLLLLRDSLEVNIPQDANVVFKRAEEGVPVEFLVLHDVDLIISHVENNMHIEEIQEDEDNDMEGPDIDVQDDEVAETVFRDRKRKLPLELTVELTEETFNATVMASDSIVLFYAGWQAVSMAFLQSYIDVAVKLKGTSTMLLTRINCADWSDVCTKQNVTEFPIIKMYKKGENPVSYAGMLGTEDLLKFIQLNRISYPVNITSIQEAEEYLSGELYKDLILYSSVSVLGLFSPTMKTAKEDFSEAGNYLKGYVITGIYSEEDVLLLSTKYAASLPALLLARHTEGKIESIPLASTHAQDIVQIITDALLEMFPEITVENLPSYFRLQKPLLILFSDGTVNPQYKKAILTLVKQKYLDSFTPCWLNLKNTPVGRGILRAYFDPLPPLPLLVLVNLHSGGQVFAFPSDQAIIEENLVLWLKKLEAGLENHITILPAQEWKPPLPAYDFLSMIDAATSQRGTRKVPKCMKETDVQENDKEQHEDKSAVRKEPIETLRIKHWNRSNWFKEAEKSFRRDKELGCSKVN

SEQ ID NO: 2591 - protein, 99 aa, Homo sapiens
LGHHASSRAKAQGAGGGLVNFLFGWAASKPNSIYFIIFKGVMLHCGPFGFVAPMSPSPPPAKTAQRDKPYVPLRWGRERSNNKLKVPPPSTSLPSFLPK

SEQ ID NO: 2592 - protein, 895 aa, Homo sapiens
LQAPATEAELGPGRGRRRRRRRRRRRRVGMGSQTLQILRQGVWAALSGGWYYDPHQATFVNALHLYLWLFLLGLPFTLYMALPSTMIIVAVYCPVIAAVFIVLKMVNYRLHRALDAGEVVDRTANEFTDQRTKAEQGNCSTRRKDSNGPSDPGGGIEMSEFIREATPPVGCSSRNSYAGLDPSNQIGSGSSRLGTAATIKGDTDTAKTSDDISLSLGQSSSLCKEGSEEQDLAADRKLFRLVSNDSFISIQPSLSSCGQDLPRDFSDKVNLPSHNHHHHVDQSLSSACDTEVASLVPLHSHSYRKDHRPRGVPRTSSSAVAFPDTSLNDFPLYQQRRGLDPVSELESSKPLSGSKESLVENSGLSGEFQLAGDLKINTSQPPTKSGKSKPLKAEKSMDSLRSLSTRSSGSTESYCSGTDRDTNSTVSSYKSEQTSSTHIESILSEHEESPKAGTKSGRKKECCAGPEEKNSCASDKRTSSEKIAMEASTNSGVHEAKDPTPSDEMHNQRGLSTSASEEANKNPHANEFTSQGDRPPGNTAENKEEKSDKSAVSVDSKVRKDVGGKQKEGDVRPKSSSVIHRTASAHKSGRRRTGKKRASSFDSSRHRDYVCFRGVSGTKPHSAIFCHDEDSSDQSDLSRASSVQSAHQFSSDSSSSTTSHSCQSPEGRYSALKTKHTHKERGTDSEHTHKAHLVPEGTSKKRATRRTSSTNSAKTRARVLSLDSGTVACLNDSNRLMAPESIKPLTTSKSDLEAKEGEVLDELSLLGRASQLETVTRSRNSLPNQVAFPEGEEQDAVSGAAQASEEAVSFRRERSTFRRQAVRRRHNAGSNPTPPTLLIGSPLSLQDGQQGQQSTAQVKVQSRPPSQAAVLSASASLLVSSLLRCMRLVAVICHL

SEQ ID NO: 2593 - protein, 177 aa, Homo sapiens
MYFLIFFLLKALPSTMIIVAVYCPVIAAVFIVLKMVNYRLHRALDAGEVVDRTANEFTDQRTKAEQGNCSTRRKDSNGPSDPGGGIEMSEFIREATPPVGCSSRNSYAGLDPSNQIGSGSSRLGTAATIKGDTDTAKTSDDISLSLGQSSSLCKEGSEEQGKNVILYHDVIYCGDQS

SEQ ID NO: 2594 - protein, 375 aa, Homo sapiens
MRSVAPSGPKMGNITADNSSMSCTIDHTIHQTLAPVVYVTVLVVGFPANCLSLYFGYLQIKARNELGVYLCNLTVADLFYICSLPFWLQYVLQHDNWSHGDLSCQVCGILLYENIYISVGFLCCISVDRYLAVAHPFRFHQFRTLKAAVGVSVVIWAKELLTSIYFLMHEEVIEDENQHRVCFEHYPIQAWQRAINYYRFLVGFLFPICLLLASYQGILRAVRRSHGTQKSRKDQIQRLVLSTVVIFLACFLPYHVLLLVRSVWEASCDFAKGVFNAYHFSLLLTSFNCVADPVLYCFVSETTHRDLARLRGACLAFLTCSRTGRAREAYPLGAPEASGKSGAQGEEPELLTKLHPAFQTPNSPGSGGFPTGRLA

SEQ ID NO: 2595 - protein, 56 aa, Homo sapiens
VEVQESEWRLTEAKGPTMGKESGWDSGAAGLSVTSKVIGGFAGTALGAWLGSPPSS

SEQ ID NO: 2596 - protein, 46 aa, Homo sapiens
VTIGALQGRSCHCLQLWGPRNHTREMHSLIWPALPLWVLYLFKVIH

SEQ ID NO: 2597 - protein, 116 aa, Homo sapiens
LLIKTSRAQTLQLWEKSPSPRIPRSFHSVISTEHRGLTMEFGLSWVFLVAIIKGVQCQVQLVESGGGLVKPGGSLRLSCAASGFTFSDYYMSWIRQAPGKGLEWVSYISSSTTQTL

SEQ ID NO: 2598 - protein, 334 aa, Homo sapiens
LDAEALPLPDGADMSEQSKDLSDPNFAAEAPNSEVHSSPGVSEGVPPSATLAEPQSPPLGPTAAPQAAPPPQAPNDEGDPKALQQAAEEGRAHQAPSAAQPGPAPPAPAQLVQKAHELMWYVLVKDQKKMIIWFPDMVKDVIGSYKKWCRSILRRTSLILARVFGLHLRLTSLHTMEFALVKALEPEELDRVALSNRMPMTGLLLMILSLIYVKGRGARESAVWNVLRILGLRPWKKHSTFGDVRKLITEEFVQMNYLKYQRVPYVEPPEYEFFWGSRASREITKMQIMEFLARVFKKDPQAWPSRYREALEEARALREANPTAHYPRSSVSED

SEQ ID NO: 2599 - protein, 176 aa, Homo sapiens
VHELHLSRLQRVKFCLLGALLAPIRVLLAFIVLFLLWPFAWLQVAGLSEEQLQEPITGWRKTVCHNGVLGLSRLLFFLLGFLRIRVRGQRASRLQAPVLVAAPHSTFFDPIVLLPCDLPKVVSRAENLSVPVIGALLRFNQAILVSRHDPASRRRVVEEVRSGPPQEASGRSAILS

SEQ ID NO: 2600 - protein, 237 aa, Homo sapiens
LQQQLLCRVVAGARAGVPSLPPSPAMSQGSPGDWAPLDPTPGPPASPNPFVHELHLSRLQRVKFCLLGALLAPIRVLLAFIVLFLLWPFAWLQVAGLSEEQLQEPITGWRKTVCHNGVLGLSRLLFFLLGFLRIRVRGQRASRLQAPVLVAAPHSTFFDPIVLLPCDLPKVVSRAENLSVPVIGALLRFNQAILVSRHDPASRRRVVEEVRRRATSGGKWPQVGKGLKTIFSLSMCS

SEQ ID NO: 2601 - protein, 1872 aa, Homo sapiens
LLEAAVCFRSKETQSVWTPNKSAQNLSRRFAAAEKFSSKMDGVSSEANEENDNIERPVRRRHSSILKPPRSPLQDLRGGNERVQESNALRNKKNSRRVSFADTIKVFQTESHMKIVRKSEMEETETGENLLLIQNKKLEDNYCEITGMNTLLSAPIHTQMQQKEFSIIEHTRERKHANDQTVIFSDENQMDLTSSHTVMITKGLLDNPISEKSTKIDTTSFLANLKLHTEDSRMKKEVNFSVDQNTSSENKIDFNDFIKRLKTGKCSAFPDVPDKENFEIPIYSKEPNSASSTHQMHVSLKEDENNSNITRLFREKDDGMNFTQCHTANIQTLIPTSSETNSRESKGNDITIYGNDFMDLTFNHTLQILPATGNFSEIENQTQNAMDVTTGYGTKASGNKTVFKSKQNTAFQDLSINSADKIHITRSHIMGAETHIVSQTCNQDARILAMTPESIYSNPSIQGCKTVFYSSCNDAMEMTKCLSNMREEKNLLKHDSNYAKMYCNPDAMSSLTEKTIYSGEENMDITKSHTVAIDNQIFKQDQSNVQIAAAPTPEKEMMLQNLMTTSEDGKMNVNCNSVPHVSKERIQQSLSNPLSISLTDRKTELLSGENMDLTESHTSNLGSQVPLAAYNLAPESTSESHSQSKSSSDECEEITKSRNEPFQRSDIIAKNSLTDTWNKDKDWVLKILPYLDKDSPQSADCNQEIATSHNIVYCGGVLDKQITNRNTVSWEQSLFSTTKPLFSSGQFSMKNHDTAISSHTVKSVLGQNSKLAEPLRKSLSNPTPDYCHDKMIICSEEEQNMDLTKSHTVVIGFGPSELQELGKTNLEHTTGQLTTMNRQIAVKVEKCGKSPIEKSGVLKSNCIMDVLEDESVQKPKFPKEKQNVKIWGRKSVGGPKIDKTIVFSEDDKNDMDITKSYTIEINHRPLLEKRDCHLVPLAGTSETILYTCRQDDMEITRSHTTALECKTVSPDEITTRPMDKTVVFVDNHVELEMTESHTVFIDYQEKERTDRPNFELSQRKSLGTPTVICTPTEESVFFPGNGESDRLVANDSQLTPLEEWSNNRGPVEVADNMELSKSATCKNIKDVQSPGFLNEPLSSKSQRRKSLKLKNDKTIVFSENHKNDMDITQSCMVEIDNESALEDKEDFHLAGASKTILYSCGQDDMEITRSHTTALECKTLLPNEIAIRPMDKTVLFTDNYSDLEVTDSHTVFIDCQATEKILEENPKFGIGKGKNLGVSFPKDNSCVQEIAEKQALAVGNKIVLHTEQKQQLFAATNRTTNEIIKFHSAAMDEKVIGKVVDQACTLEKAQVESCQLNNRDRRNVDFTSSHATAVCGSSDNYSCLPNVISCTDNLEGSAMLLCDKDEEKANYCPVQNDLAYANDFASEYYLESEGQPLSAPCPLLEKEEVIQTSTKGQLDCVITLHKDQDLIKDPRNLLANQTLVYSQDLGEMTKLNSKRVSFKLPKDQMKVYVDDIYVIPQPHFSTDQPPLPKKGQSSINKEEVILSKAGNKSLNIIENSSAPICENKPKILNSEEWFAAACKKELKENIQTTNYNTALDFHSNSDVTKQVIQTHVNAGEAPDPVITSNVPCFHSIKPNLNNLNGKTGEFLAFQTVHLPPLPEQLLELGNKAHNDMHIVQATEIHNINIISSNAKDSRDEENKKSHNGAETTSLPPKTVFKDKVRRCSLGIFLPRLPNKRNCSVTGIDDLEQIPADTTDINHLETQPVSSKDSGIGSVAGKLNLSPSQYINEENLPVYPDEINSSDSINIETEEKALIETYQKEISPYENKMGKTCNSQKRTWVQEEEDIHKEKKIRKNEIKFSDTTQDREVSSVLNQRMFLNFGFCFVFLNCGYSQILILVSGRQKIIIST

SEQ ID NO: 2602 - protein, 808 aa, Homo sapiens
VDPTGMGCWGQLLVWFGAAGAILCSSPGSQETFLRSSPLPLASPSPRDPKVSAPPSILEPASPLNSPGTEGSWLFSTCGASGRHGPTQTQCDGAYAGTSVVVTVGAAGQLRGVQLWRVPGPGQYLISAYGAAGGKGAKNHLSRAHGVFVSAIFSLGLGESLYILVGQQGEDACPGGSPESQLVCLGESRAVEEHAAMDGSEGVPGSRRWAGGGGGGGGATYVFRVRAGELEPLLVAAGGGGRAYLRPRDRGRTQASPEKLENRSEAPGSGGRGGAAGGDASETDNLWADGEDGVSFIHPSSELFLQPLAVTENHGEVEIRRHLNCSHCPLRDCQWQAELQLAECLCPEGMELAVDNVTCMDLHKPPGPLVLMVAVVATSTLSLLMVCGVLILVKQKKWQGLQEMRLPSPELELSKLRTSAIRTAPNPYYCQVGLGPAQSWPLPPGVTEVSPANVTLLRALGHGAFGEVYEGLVIGLPGDSSPLQVAIKTLPELCSPQDELDFLMEALIISKFRHQNIVRCVGLSLRATPRLILLELMSGGDMKSFLRHSRPHLGQPSPLVMRDLLQLAQDIAQGCHYLEENHFIHRDIAARNCLLSCAGPSRVAKIGDFGMARDIYRASYYRRGDRALLPVKWMPPEAFLEGIFTSKTDSWSFGVLLWEIFSLGYMPYPGRTNQEVLDFVVGGGRMDPPRGCPGPVYRIMTQCWQHEPELRPSFASILERLQYCTQDPDVLNSLLPMELGPTPEEEGTSGLGNRSLECLRPPQPQELSPEKLKSWGGSPLGPWLSSGLKPLKSRGLQPQNLWNPTYRS

SEQ ID NO: 2603 - protein, 869 aa, Homo sapiens
VDPTGMGCWGQLLVWFGAAGAILCSSPGSQETFLRSSPLPLASPSPRDPKVSAPPSILEPASPLNSPGTEGSWLFSTCGASGRHGPTQTQCDGAYAGTSVVVTVGAAGQLRGVQLWRVPGPGQYLISAYGAAGGKGAKNHLSRAHGVFVSAIFSLGLGESLYILVGQQGEDACPGGSPESQLVCLGESRAVEEHAAMDGSEGVPGSRRWAGGGGGGGGATYVFRVRAGELEPLLVAAGGGGRAYLRPRDRGRTQASPEKLENRSEAPGSGGRGGAAGGGGGWTSRAPSPQAGRSLQEGAEGGQGCSEAWATLGWAAAGGFGGGGGACTAGGGGGGYRGGDASETDNLWADGEDGVSFIHPSSELFLQPLAVTENHGEVEIRRHLNCSHCPLRDCQWQAELQLAECLCPEGMELAVDNVTCMDLHKPPGPLVLMVAVVATSTLSLLMVCGVLILVKQKKWQGLQEMRLPSPELELSKLRTSAIRTAPNPYYCQVGLGPAQSWPLPPGVTEVSPANVTLLRALGHGAFGEVYEGLVIGLPGDSSPLQVAIKTLPELCSPQDELDFLMEALIISKFRHQNIVRCVGLSLRATPRLILLELMSGGDMKSFLRHSRPHLGQPSPLVMRDLLQLAQDIAQGCHYLEENHFIHRDIAARNCLLSCAGPSRVAKIGDFGMARDIYRASYYRRGDRALLPVKWMPPEAFLEGIFTSKTDSWSFGVLLWEIFSLGYMPYPGRTNQEVLDFVVGGGRMDPPRGCPGPVYRIMTQCWQHEPELRPSFASILERLQYCTQDPDVLNSLLPMELGPTPEEEGTSGLGNRSLECLRPPQPQELSPEKLKSWGGSPLGPWLSSGLKPLKSRGLQPQNLWNPTYRS

SEQ ID NO: 2604 - protein, 567 aa, Homo sapiens
VDPTGMGCWGQLLVWFGAAGGDASETDNLWADGEDGVSFIHPSSELFLQPLAVTENHGEVEIRRHLNCSHCPLRDCQWQAELQLAECLCPEGMELAVDNVTCMDLHKPPGPLVLMVAVVATSTLSLLMVCGVLILGTKRLAGTVDSRLLLSMKQKKWQGLQEMRLPSPELELSKLRTSAIRTAPNPYYCQVGLGPAQSWPLPPGVTEVSPANVTLLRALGHGAFGEVYEGLVIGLPGDSSPLQVAIKTLPELCSPQDELDFLMEALIISKFRHQNIVRCVGLSLRATPRLILLELMSGGDMKSFLRHSRPHLGQPSPLVMRDLLQLAQDIAQGCHYLEENHFIHRDIAARNCLLSCAGPSRVAKIGDFGMARDIYRASYYRRGDRALLPVKWMPPEAFLEGIFTSKTDSWSFGVLLWEIFSLGYMPYPGRTNQEVLDFVVGGGRMDPPRGCPGPVYRIMTQCWQHEPELRPSFASILERLQYCTQDPDVLNSLLPMELGPTPEEEGTSGLGNRSLECLRPPQPQELSPEKLKSWGGSPLGPWLSSGLKPLKSRGLQPQNLWNPTYRS

SEQ ID NO: 2605 - protein, 481 aa, Homo sapiens
VDPTGMGCWGQLLVWFGAAGAILCSSPGSQETFLRSSPLPLASPSPRDPKVSAPPSILEPASPLNSPGTEGSWLFSTCGASGRHGPTQTQCDGAYAGTSVVVTVGAAGQLRGVQLWRVPGPGQYLISAYGAAGGKGAKNHLSRAHGVFVSAIFSLGLGESLYILVGQQGEDACPGGSPESQLVCLGESRAVEEHAAMDGSEGVPGSRRWAGGGGGGGGATYVFRVRAGELEPLLVAAGGGGRAYLRPRDRGRTQASPEKLENRSEAPGSGGRGGAAGGGGGWTSRAPSPQAGRSLQEGAEGGQGCSEAWATLGWAAAGGFGGGGGACTAGGGGGGYRGGDASETDNLWADGEDGVSFIHPSSELFLQPLAVTENHGEVEIRRHLNCSHCPLRDCQWQAELQLAECLCPEGMELAVDNVTCMDLHKPPGPLVLMVAVVATSTLSLLMVCGVLILGTKRLAGTVDSRLLLSSELGWVSAGSRG

SEQ ID NO: 2606 - protein, 281 aa, Homo sapiens
LVYCGNTNKIMSCSGPDVSDQNSVDCPQLYKPGQLNLLFNKRKFFICVLHGIYTSLVLFFIPYGAFYNVAGEDGQHIADYQSFAVTMATSLVIVVSVQIALDTSYWTFINHVFIWGSIAIYFSILFTMHSNGIFGIFPNQFPFVGNARHSLTQKCIWLVILLTTVASVMPVVAFRFLKVDLYPTLSDQIRRWQKAQKKARPPSSRRPRTRRSSSRRSGYAFAHQEGYGELITSGKNMRAKNPPPTSGLEKTHYNSTSWIENLCKKTTDTVSSFSQDKTVKL

SEQ ID NO: 2607 - protein, 1077 aa, Homo sapiens
LVLRKILQNEKWMNVKVGDIIKLENNQFVAADLLLLSSSEPHGLCYVETAELDGETNLKVRHALSVTSELGADISRLAGFDGIVVCEVPNNKLDKFMGILSWKDSKHSLNNEKIILRGCILRNTSWCFGMVIFAGPDTKLMQNSGKTKFKRTSIDRLMNTLVLWIFGFLICLGIILAIGNSIWESQTGDQFRTFLFWNEGEKSSVFSGFLTFWSYIIILNTVVPISLYVSVEVIRLGHSYFINWDRKMYYSRKAIPAVARTTTLNEELGQIEYIFSDKTGTLTQNIMTFKRCSINGRIYGEVHDDLDQKTEITQEKEPVDFSVKSQADREFQFFDHHLMESIKMGDPKVHEFLRLLALCHTVMSEENSAGELIYQVQSPDEGALVTAARNFGFIFKSRTPETITIEELGTLVTYQLLAFLDFNNTRKRMSVIVRNPEGQIKLYSKGADTILFEKLHPSNEVLLSLTSDHLSEFAGEGLRTLAIAYRDLDDKYFKEWHKMLEDANAATEERDERIAGLYEEIERDLMLLGATAVEDKLQEGVIETVTSLSLANIKIWVLTGDKQETAINIGYACNMLTDDMNDVFVIAGNNAVEVREELRKAKQNLFGQNRNFSNGHVVCEKKQQLELDSIVEETITGDYALIINGHSLAHALESDVKNDLLELACMCKTVICCRVTPLQKAQVVELVKKYRNAVTLAIGDGANDVSMIKSAHIGVGISGQEGLQAVLASDYSFAQFRYLQRLLLVHGRWSYFRMCKFLCYFFYKNFAFTLVHFWFGFFCGFSAQTVYDQWFITLFNIVYTSLPVLAMGIFDQDVSDQNSVDCPQLYKPGQLNLLFNKRKFFICVLHGIYTSLVLFFIPYGAFYNVAGEDGQHIADYQSFAVTMATSLVIVVSVQIALDTSYWTFINHVFIWGSIAIYFSILFTMHSNGIFGIFPNQFPFVGNARHSLTQKCIWLVILLTTVASVMPVVAFRFLKVDLYPTLSDQIRRWQKAQKKARPPSSRRPRTRRSSSRRSGYAFAHQEGYGELITSGKNMRAKNPPPTSGLEKTHYNSTSWIENLCKKTTDTVSSFSQDKTVKL

SEQ ID NO: 2608 - protein, 1014 aa, Homo sapiens
LVLRKILQNEKWMNVKVGDIIKLENNQFVAADLLLLSSSEPHGLCYVETAELDGETNLKVRHALSVTSELGADISRLAGFDGIVVCEVPNNKLDKFMGILSWKDSKHSLNNEKIILRGCILRNTSWCFGMVIFAGPDTKLMQNSGKTKFKRTSIDRLMNTLVLWIFGFLICLGIILAIGNSIWESQTGDQFRTFLFWNEGEKSSVFSGFLTFWSYIIILNTVVPISLYVSVEVIRLGHSYFINWDRKMYYSRKAIPAVARTTTLNEELGQIEYIFSDKTGTLTQNIMTFKRCSINGRIYGEVHDDLDQKTEITQEKEPVDFSVKSQADREFQFFDHHLMESIKMGDPKVHEFLRLLALCHTVMSEENSAVRNPEGQIKLYSKGADTILFEKLHPSNEVLLSLTSDHLSEFAGEGLRTLAIAYRDLDDKYFKEWHKMLEDANAATEERDERIAGLYEEIERDLMLLGATAVEDKLQEGVIETVTSLSLANIKIWVLTGDKQETAINIGYACNMLTDDMNDVFVIAGNNAVEVREELRKAKQNLFGQNRNFSNGHVVCEKKQQLELDSIVEETITGDYALIINGHSLAHALESDVKNDLLELACMCKTVICCRVTPLQKAQVVELVKKYRNAVTLAIGDGANDVSMIKSAHIGVGISGQEGLQAVLASDYSFAQFRYLQRLLLVHGRWSYFRMCKFLCYFFYKNFAFTLVHFWFGFFCGFSAQTVYDQWFITLFNIVYTSLPVLAMGIFDQDVSDQNSVDCPQLYKPGQLNLLFNKRKFFICVLHGIYTSLVLFFIPYGAFYNVAGEDGQHIADYQSFAVTMATSLVIVVSVQIALDTSYWTFINHVFIWGSIAIYFSILFTMHSNGIFGIFPNQFPFVGNARHSLTQKCIWLVILLTTVASVMPVVAFRFLKVDLYPTLSDQIRRWQKAQKKARPPSSRRPRTRRSSSRRSGYAFAHQEGYGELITSGKNMRAKNPPPTSGLEKTHYNSTSWIENLCKKTTDTVSSFSQDKTVKL

SEQ ID NO: 2609 - protein, 1203 aa, Homo sapiens
LLRPGERSGIIMFCSEKKLREVERIVKANDREYNEKFQYADNRIHTSKYNILTFLPINLFEQFQRVANAYFLCLLILQLIPEISSLTWFTTIVPLVLVITMTAVKDATDDYFRHKSDNQVNNRQSEVLINSKLQNEKWMNVKVGDIIKLENNQFVAADLLLLSSSEPHGLCYVETAELDGETNLKVRHALSVTSELGADISRLAGFDGIVVCEVPNNKLDKFMGILSWKDSKHSLNNEKIILRGCILRNTSWCFGMVIFAGPDTKLMQNSGKTKFKRTSIDRLMNTLVLWIFGFLICLGIILAIGNSIWESQTGDQFRTFLFWNEGEKSSVFSGFLTFWSYIIILNTVVPISLYVSVEVIRLGHSYFINWDRKMYYSRKAIPAVARTTTLNEELGQIEYIFSDKTGTLTQNIMTFKRCSINGRIYGEVHDDLDQKTEITQEKEPVDFSVKSQADREFQFFDHHLMESIKMGDPKVHEFLRLLALCHTVMSEENSAGELIYQVQSPDEGALVTAARNFGFIFKSRTPETITIEELGTLVTYQLLAFLDFNNTRKRMSVIVRNPEGQIKLYSKGADTILFEKLHPSNEVLLSLTSDHLSEFAGEGLRTLAIAYRDLDDKYFKEWHKMLEDANAATEERDERIAGLYEEIERDLMLLGATAVEDKLQEGVIETVTSLSLANIKIWVLTGDKQETAINIGYACNMLTDDMNDVFVIAGNNAVEVREELRKAKQNLFGQNRNFSNGHVVCEKKQQLELDSIVEETITGDYALIINGHSLAHALESDVKNDLLELACMCKTVICCRVTPLQKAQVVELVKKYRNAVTLAIGDGANDVSMIKSAHIGVGISGQEGLQAVLASDYSFAQFRYLQRLLLVHGRWSYFRMCKFLCYFFYKNFAFTLVHFWFGFFCGFSAQTVYDQWFITLFNIVYTSLPVLAMGIFDQDVSDQNSVDCPQLYKPGQLNLLFNKRKFFICVLHGIYTSLVLFFIPYGAFYNVAGEDGQHIADYQSFAVTMATSLVIVVSVQIALDTSYWTFINHVFIWGSIAIYFSILFTMHSNGIFGIFPNQFPFVGNARHSLTQKCIWLVILLTTVASVMPVVAFRFLKVDLYPTLSDQIRRWQKAQKKARPPSSRRPRTRRSSSRRSGYAFAHQEGYGELITSGKNMRAKNPPPTSGLEKTHYNSTSWIENLCKKTTDTVSSFSQDKTVKL

SEQ ID NO: 2610 - protein, 247 aa, Homo sapiens
LLKMFYPIIMAMPIQKAKQNLFGQNRNFSNGHVVCEKKQQLELDSIVEETITGDYALIINGHSLAHALESDVKNDLLELACMCKTVICCRVTPLQKAQVVELVKKYRNAVTLAIGDGANDVSMIKSAHIGVGISGQEGLQAVLASDYSFAQFRYLQRLLLVHGRWSYFRMCKFLCYFFYKNFAFTLVHFWFGFFCGFSAQVGKSMFFFVCLFVCFCMILQMTLLHSSLLINSEHFLMADSSNSITIM

SEQ ID NO: 2611 - protein, 728 aa, Homo sapiens
LLRPGERSGIIMFCSEKKLREVERIVKANDREYNEKFQYADNRIHTSKYNILTFLPINLFEQFQRVANAYFLCLLILQLIPEISSLTWFTTIVPLVLVITMTAVKDATDDYFRHKSDNQVNNRQSEVLINSKLQNEKWMNVKVGDIIKLENNQFVAADLLLLSSSEPHGLCYVETAELDGETNLKVRHALSVTSELGADISRLAGFDGIVVCEVPNNKLDKFMGILSWKDSKHSLNNEKIILRGCILRNTSWCFGMVIFAGPDTKLMQNSGKTKFKRTSIDRLMNTLVLWIFGFLICLGIILAIGNSIWESQTGDQFRTFLFWNEGEKSSVFSGFLTFWSYIIILNTVVPISLYVSVEVIRLGHSYFINWDRKMYYSRKAIPAVARTTTLNEELGQIEYIFSDKTGTLTQNIMTFKRCSINGRIYGEVHDDLDQKTEITQEKEPVDFSVKSQADREFQFFDHHLMESIKMGDPKVHEFLRLLALCHTVMSEENSAGELIYQVQSPDEGALVTAARNFGFIFKSRTPETITIEELGTLVTYQLLAFLDFNNTRKRMSVIVRNPEGQIKLYSKGADTILFEKLHPSNEVLLSLTSDHLSEFAGEGLRTLAIAYRDLDDKYFKEWHKMLEDANAATEERDERIAGLYEEIERDLMLLGATAVEDKLQEGVIETVTSLSLANIKIWVLTGDKQETAINIGYACNMLTDDMNDVFVIAGNNAVEVREELRLMP

SEQ ID NO: 2612 - protein, 53 aa, Homo sapiens
MGNSIWESQTGDQFRTFLFWNEGEKSSVFSGFLTFWSYIIILNTVVPISLYVR

SEQ ID NO: 2613 - protein, 236 aa, Homo sapiens
LTWFTTIVPLVLVITMTAVKDATDDYFRHKSDNQVNNRQSEVLINSKLQNEKWMNVKVGDIIKLENNQFVAADLLLLSSSEPHGLCYVETAELDGETNLKVRHALSVTSELGADISRLAGFDGIVVCEVPNNKLDKFMGILSWKDSKHSLNNEKIILRGCILRNTSWCFGMVIFAGPDTKLMQNSGKTKFKRTSIDRLMNTLVLWEIQSGRVKLGTNSELSSFGMKERRALCSPDS

SEQ ID NO: 2614 - protein, 86 aa, Homo sapiens
LILQLIPEISSLTWFTTIVPLVLVITMTAVKDATDDYFRHKSDNQVNNRQSEVLINSKLQNEKWMNVKVGDIIKLENNQFVALIKD

SEQ ID NO: 2615 - protein, 147 aa, Homo sapiens
LLLRGPALGLQVGHLLRPGERSGIIMFCSEKKLREVERIVKANDREYNEKFQYADNRIHTSKYNILTFLPINLFEQFQRVANAYFLCLLILQLIPEISSLTWFTTIVPLVLVITMTAVKDATDDYFRHKSDNQVNNRQSEVLINSKC

SEQ ID NO: 2616 - protein, 696 aa, Homo sapiens
LPGTPGNAHTTTPAPEPAAVPAAEELCLPLHLTRARRPAACAPAQPASPPGARPVAALHARGEPSALAGTEGPAAVMLSAIYTVLAGLLFLPLLVNLCCPYFFQDIGYFLKVAAVGRRVRSYGKRRPARTILRAFLEKARQTPHKPFLLFRDETLTYAQVDRRSNQVARALHDHLGLRQGDCVALLMGNEPAYVWLWLGLVKLGCAMACLNYNIRAKSLLHCFQCCGAKVLLVSPELQAAVEEILPSLKKDDVSIYYVSRTSNTDGIDSFLDKVDEVSTEPIPESWRSEVTFSTPALYIYTSGTTGLPKAAMITHQRIWYGTGLTFVSGLKADDVIYITLPFYHSAALLIGIHGCIVAGATLALRTKFSASQFWDDCRKYNVTVIQYIGELLRYLCNSPQKPNDRDHKVRLALGNGLRGDVWRQFVKRFGDICIYEFYAATEGNIGFMNYARKVGAVGRVNYLQKKIITYDLIKYDVEKDEPVRDENGYCVRVPKGEVGLLVCKITQLTPFNGYAGAKAQTEKKKLRDVFKKGDLYFNSGDLLMVDHENFIYFHDRVGDTFRWKGENVATTEVADTVGLVDFVQEVNVYGVHVPDHEGRIGMASIKMKENHEFDGKKLFQHIADYLPSYARPRFLRIQDTIEITGTFKHRKMTLVEEGFNPAVIKDALYFLDDTAKMYVPMTEDIYNAISAKTLKL

SEQ ID NO: 2617 - protein, 586 aa, Homo sapiens
LHARGEPSALAGTEGPAAVMLSAIYTVLAGLLFLPLLVNLCCPYFFQDIGYFLKVAAVGRRVRSYGKRRPARTILRAFLEKARQTPHKPFLLFRDETLTYAQVDRRSNQVARALHDHLGLRQGDCVALLMGNEPAYVWLWLGLVKLGCAMACLNYNIRAKSLLHCFQCCGAKVLLVSPELQAAVEEILPSLKKDDVSIYYVSRTSNTDGIDSFLDKVDEVSTEPIPESWRSEVTFSTPALYIYTSGTTGATLALRTKFSASQFWDDCRKYNVTVIQYIGELLRYLCNSPQKPNDRDHKVRLALGNGLRGDVWRQFVKRFGDICIYEFYAATEGNIGFMNYARKVGAVGRVNYLQKKIITYDLIKYDVEKDEPVRDENGYCVRVPKGEVGLLVCKITQLTPFNGYAGAKAQTEKKKLRDVFKKGDLYFNSGDLLMVDHENFIYFHDRVGDTFRWKGENVATTEVADTVGLVDFVQEVNVYGVHVPDHEGRIGMASIKMKENHEFDGKKLFQHIADYLPSYARPRFLRIQDTIEITGTFKHRKMTLVEEGFNPAVIKDALYFLDDTAKMYVPMTEDIYNAISAKTLKL

SEQ ID NO: 2618 - protein, 613 aa, Homo sapiens
MSTFFLIVFSSQPSDDESSSDETSNQPSPAFRRRRARKKTVSASESEDRLVAEQETEPSKELSKRQFSSGLNKCVILALVIAISMGFGHFYGTIQIQKRQQLVRKIHEDELNDMKDYLSQCQQEQESFIDYKSLKENLARCWTLTEAEKMSFETQKTNLATENQYLRVSLEKEEKALSSLQEELNKLREQIRILEDKGTSTELVKENQKLKQHLEEEKQKKHSFLSQRETLLTEAKMLKRELERERLVTTALRGELQQLSGSQLHGKSDSPNVYTEKKEIAILRERLTELERKLTFEQQRSDLWERLYVEAKDQNGKQGTDGKKKGGRGSHRAKNKSKETFLGSVKETFDAMKNSTKEFVRHHKEKIKQAKEAVKENLKKFSDSVKSTFRHFKDTTKNIFDEKGNKRFGATKEAAEKPRTVFSDYLHPQYKAPTENHHNRGPTMQNDGRKEKPVHFKEFRKNTNSKKCSPGHDCRENSHSFRKACSGVFDCAQQESMSLFNTVVNPIRMDEFRQIIQRYMLKELDTFCHWNELDQFINKFFLNGVFIHDQKLFTDFVNDVKDYLRNMKEYEVDNDGVFEKLDEYIYRHFFGHTFSPPYGPRSVYIKPCHYSSL

SEQ ID NO: 2619 - protein, 153 aa, Homo sapiens
LRGAWLSPLSAMACARPLISVYSEKGESSGKNVTLPAVFKAPIRPDIVNFVHTNLRKNNRQPYAVSELAGHQTSAESWGTGRAVARIPRVRGGGTHRSGQGAFGNMCRGGRMFAPTKTWRRWHRRVNTTQKRYAICSALAASALPALVMSKGL

SEQ ID NO: 2620 - protein, 160 aa, Homo sapiens [sequence omitted]

SEQ ID NO: 2621 - protein, 630 aa, Homo sapiens
VRARSSAGPGLSPRCPRVERVGLGHVGQDRVDFGQTEPHTVLFHEPGSSSVWVGGRGKVYLFDFPEGKNASVRTVNIGSTKGSCLDKRDCENYITLLERRSEGLLACGTNARHPSCWNLVNGTVVPLGEMRGYAPFSPDENSLVLFEGDEVYSTIRKQEYNGKIPRFRRIRGESELYTSDTVMQNPQFIKATIVHQDQAYDDKIYYFFREDNPDKNPEAPLNVSRVAQLCRGDQGGESSLSVSKWNTFLKAMLVCSDAATNKNFNRLQDVFLLPDPSGQWRDTRVYGVFSNPWNYSAVCVYSLGDIDKVFRTSSLKGYHSSLPNPRPGKCLPDQQPIPTETFQVADRHPEVAQRVEPMGPLKTPLFHSKYHYQKVAVHRMQASHGETFHVLYLTTDRGTIHKVVEPGEQEHSFAFNIMEIQPFRRAAAIQTMSLDAERRKLYVSSQWEVSQVPLDLCEVYGGGCHGCLMSRDPYCGWDQGRCISIYSSERSVLQSINPAEPHKECPNPKPDKAPLQKVSLAPNSRYYLSCPMESRHATYSWRHKENVEQSCEPGHQSPNCILFIENLTAQQYGHYFCEAQEGSYFREAQHWQLLPEDGIMAEHLLGHACALAASLWLGVLPTLTLGLLVH

SEQ ID NO: 2622 - protein, 790 aa, Homo sapiens
VLDSSAPLERGPPRLLRQSFYGVRGVELRPREGIGPAAPGRRPQVWLVRSWAFPVELPGRGWRRFPQQFRSRSGKPVRREKAARGGGRGGVGSALAPPPGAWVCLRPGAGSVSADCRCRSRGHGMTPPPPGRAAPSAPRARVPGPPARLGLPLRLRLLLLLWAAAASAQGHLRSGPRIFAVWKGHVGQDRVDFGQTEPHTVLFHEPGSSSVWVGGRGKVYLFDFPEGKNASVRTVNIGSTKGSCLDKRDCENYITLLERRSEGLLACGTNARHPSCWNLVNGTVVPLGEMRGYAPFSPDENSLVLFEGDEVYSTIRKQEYNGKIPRFRRIRGESELYTSDTVMQNPQFIKATIVHQDQAYDDKIYYFFREDNPDKNPEAPLNVSRVAQLCRGDQGGESSLSVSKWNTFLKAMLVCSDAATNKNFNRLQDVFLLPDPSGQWRDTRVYGVFSNPWNYSAVCVYSLGDIDKVFRTSSLKGYHSSLPNPRPGKCLPDQQPIPTETFQVADRHPEVAQRVEPMGPLKTPLFHSKYHYQKVAVHRMQASHGETFHVLYLTTDRGTIHKVVEPGEQEHSFAFNIMEIQPFRRAAAIQTMSLDAERRKLYVSSQWEVSQVPLDLCEVYGGGCHGCLMSRDPYCGWDQGRCISIYSSERSVLQSINPAEPHKECPNPKPDKAPLQKVSLAPNSRYYLSCPMESRHATYSWRHKENVEQSCEPGHQSPNCILFIENLTAQQYGHYFCEAQEGSYFREAQHWQLLPEDGIMAEHLLGHACALAASLWLGVLPTLTLGLLVH

SEQ ID NO: 2623 - protein, 516 aa, Homo sapiens
LEPSLILVIPGSKSPPFPAQLSTSATSKIPTLIMLFPISMSATEFLLASVIFCLVFWVIRASRPQVPKGLKNPPGPWGWPLIGHMLTLGKNPHLALSRMSQQYGDVLQIRIGSTPVVVLSGLDTIRQALVRQGDDFKGRPDLYTFTLISNGQSMSFSPDSGPVWAARRRLAQNGLKSFSIASDPASSTSCYLEEHVSKEAEVLISTLQELMAGPGHFNPYRYVVVSVTNVICAICFGRRYDHNHQELLSLVNLNNNFGEVVGSGNPADFIPILRYLPNPSLNAFKDLNEKFYSFMQKMVKEHYKTFEKGHIRDITDSLIEHCQEKQLDENANVQLSDEKIINIVLDLFGAGFDTVTTAISWSLMYLVMNPRVQRKIQEELDTVIGRSRRPRLSDRSHLPYMEAFILETFRHSSFVPFTIPHRKLWVNPSEFLPERFLTPDGAIDKVLSEKVIIFGMGKRKCIGETIARWEVFLFLAILLQRVEFSVPLGVKVDMTPIYGLTMKHACCEHFQMQLRS

SEQ ID NO: 2624 - protein, 545 aa, Homo sapiens
LEPSLILVIPGSKSPPFPAQLSTSATSKIPTLIMLFPISMSATEFLLASVIFCLVFWVIRASRPQVPKGLKNPPGPWGWPLIGHMLTLGKNPHLALSRMSQQYGDVLQIRIGSTPVVVLSGLDTIRQALVRQGDDFKGRPDLYTFTLISNGQSMSFSPDSGPVWAARRRLAQNGLKSFSIASDPASSTSCYLEEHVSKEAEVLISTLQELMAGPGHFNPYRYVVVSVTNVICAICFGRRYDHNHQELLSLVNLNNNFGEVVGSGNPADFIPILRYLPNPSLNAFKDLNEKFYSFMQKMVKEHYKTFEKGHIRDITDSLIEHCQEKQLDENANVQLSDEKIINIVLDLFGAGFDTVTTAISWSLMYLVMNPRVQRKIQEELDTVIGRSRRPRLSDRSHLPYMEAFILETFRHSSFVPFTIPHSTTRDTSLKGFYIPKGRCVFVNQWQINHDQKLWVNPSEFLPERFLTPDGAIDKVLSEKVIIFGMGKRKCIGETIARWEVFLFLAILLQRVEFSVPLGVKVDMTPIYGLTMKHACCEHFQMQLRS

SEQ ID NO: 2625 - protein, 546 aa, Homo sapiens
LEPSLILVIPGSKSPPFPAQLSTSAATSKIPTLIMLFPISMSATEFLLASVIFCLVFWVIRASRPQVPKGLKNPPGPWGWPLIGHMLTLGKNPHLALSRMSQQYGDVLQIRIGSTPVVVLSGLDTIRQALVRQGDDFKGRPDLYTFTLISNGQSMSFSPDSGPVWAARRRLAQNGLKSFSIASDPASSTSCYLEEHVSKEAEVLISTLQELMAGPGHFNPYRYVVVSVTNVICAICFGRRYDHNHQELLSLVNLNNNFGEVVGSGNPADFIPILRYLPNPSLNAFKDLNEKFYSFMQKMVKEHYKTFEKGHIRDITDSLIEHCQEKQLDENANVQLSDEKIINIVLDLFGAGFDTVTTAISWSLMYLVMNPRVQRKIQEELDTVIGRSRRPRLSDRSHLPYMEAFILETFRHSSFVPFTIPHSTTRDTSLKGFYIPKGRCVFVNQWQINHDQKLWVNPSEFLPERFLTPDGAIDKVLSEKVIIFGMGKRKCIGETIARWEVFLFLAILLQRVEFSVPLGVKVDMTPIYGLTMKHACCEHFQMQLRS

SEQ ID NO: 2626 - protein, 191 aa, Homo sapiens
LIMLFPISMSATEFLLASVIFCLVFWVIRASRPQVPKGLKNPPGPWGWPLIGHMLTLGKNPHLALSRMSQQYGDVLQIRIGSTPVVVLSGLDTIRQALVRQGDDFKGRPDLYTFTLISNGQSMSFSPDSGPVWAARRRLAQNGLKSFSIASDPASSTSCYLEEHVSKEAEVLISTLQELMAGPGHFNPYRT

SEQ ID NO: 2627 - protein, 83 aa, Homo sapiens
LTLWAATSADPERKSQAASAAMWATLPLLCAGAWLLGVPVCGAAELCVNSLEKFHFKSWMSKKTKAHCVLVAESVGEHQCMCF

SEQ ID NO: 2628 - protein, 62 aa, Homo sapiens
LTLWAATSADPERKSQAASAAMWATLPLLCAGAWLLGVPVCGAAELCVNSLGTQRARRPRGC

SEQ ID NO: 2629 - protein, 149 aa, Homo sapiens
VSRRGGGRAEGRRELARRDGSLATFPRGLGPSAAGQSSWTIVGVAALILFLVALLARVLVKRKPPRDPLFYVYAVFGFTSVVNLIIGLEQDGIIDGFMTHYLREGEPYLNTAYGHMICYWDGSAHYLMYLVMVAAIAWESGTALRLGSH

SEQ ID NO: 2630 - protein, 125 aa, Homo sapiens
LLLGWLCSLSDVPGDGGSHSMGMLAYMFYSVPYFVTALYGLVVPGCSWMPDITLIHAGGLAQAQFSHIGASLHARTAYVYRVPEEAKILFLALNIAYGVLPQLLAYRCIYKPEFFIKTKAEEKVE

SEQ ID NO: 2631 - protein, 644 aa, Homo sapiens
LYTPRGRFDYSRHIENWRSLHTLNAVDMELYTGLQKLTIKNSGLRSIQPRAFAKNPHLRYINLSSNRLTTLSWQLFQTLSLRELQLEQNFFNCSCDIRWMQLWQEQGEAKLNSQNLYCINADGSQLPLFRMNISQCDLPEISVSHVNLTVREGDNAVITCNGSGSPLPDVDWIVTGLQSINTHQTNLNWTNVHAINLTLVNVTSEDNGFTLTCIAENVVGMSNASVALTVYYPPRVVSLEEPELRLEHCIEFVVRGNPPPTLHWLHNGQPLRESKIIHVEYYQEGEISEGCLLFNKPTHYNNGNYTLIAKNPLGTANQTINGHFLKEPFPESTDNFILFDEVSPTPPITVTHKPEEDTFGVSIAVGLAAFACVLLVVLFVMINKYGRRSKFGMKGPVAVISGEEDSASPLHHINHGITTPSSLDAGPDTVVIGMTRIPVIENPQYFRQGHNCHKPDTYVQHIKRRDIVLKRELGEGAFGKVFLAECYNLSPTKDKMLVAVKALKDPTLAARKDFQREAELLTNLQHEHIVKFYGVCGDGDPLIMVFEYMKHGDLNKFLRAHGPDAMILVDGQPRQAKGELGLSQMLHIASQIASGMVYLASQHFVHRDLATRNCLVGANLLVKIGDFGMSRDVYSTDYYRVVQA

SEQ ID NO: 2632 - protein, 402 aa, Homo sapiens
LSSPACPFQRPRPRSMPRPRLLAALCGALLCAPSLLVALDICSKNPCHNGGLCEEISQEVRGDVFPSYTCTCLKGYAGNHCETKCVEPLGLENGNIANSQIAASSVRVTFLGLQHWVPELARLNRAGMVNAWTPSSNDDNPWIQVNLLRRMWVTGVVTQGASRLASHEYLKAFKVAYSLNGHEFDFIHDVNKKHKEFVGNWNKNAVHVNLFETPVEAQYVRLYPTSCHTACTLRFELLGCELNGCANPLGLKNNSIPDKQITASSSYKTWGLHLFSWNPSYARLDKQGNFNAWVAGSYGNDQWLQVDLGSSKEVTGIITQGARNFGSVQFVASYKVAYSNDSANWTEYQDPRTGSSKIFPGNWDNHSHKKNLFETPILARYVRILPVAWHNRIALRLELLGC

SEQ ID NO: 2633 - protein, 57 aa, Homo sapiens
LPRGVFIILNLGIWALINSAFLGLGERDGLPPGAHDLSSSKPIMYDSCVAVARLRLP

SEQ ID NO: 2634 - protein, 2359 aa, Homo sapiens
VLPAATMTEGARAADEVRVPLGAPPPGPAALVGASPESPGAPGREAERGSELGVSPSESPAAERGAELGADEEQRVPYPALAATVFFCLGQTTRPRSWCLRLVCNPWFEHVSMLVIMLNCVTLGMFRPCEDVECGSERCNILEAFDAFIFAFFAVEMVIKMVALGLFGQKCYLGDTWNRLDFFIVVAGMMEYSLDGHNVSLSAIRTVRVLRPLRAINRVPSMRILVTLLLDTLPMLGNVLLLCFFVFFIFGIVGVQLWAGLLRNRCFLDSAFVRNNNLTFLRPYYQTEEGEENPFICSSRRDNGMQKCSHIPGRRELRMPCTLGWEAYTQPQAEGVGAARNACINWNQYYNVCRSGDSNPHNGAINFDNIGYAWIAIFQVITLEGWVDIMYYVMDAHSFYNFIYFILLIIVGSFFMINLCLVVIATQFSETKQRESQLMREQRARHLSNDSTLASFSEPGSCYEELLKYVGHIFRKVKRRSLRLYARWQSRWRKKVDPSAVQGQGPGHRQRRAGRHTASVHHLVYHHHHHHHHHYHFSHGSPRRPGPEPGACDTRLVRAGAPPSPPSPGRGPPDAESVHSIYHADCHIEGPQERARVAHAAATAAASLRLATGLGTMNYPTILPSGVGSGKGSTSPGPKGKWAGGPPGTGGHGPLSLNSPDPYEKIPHVVGEHGLGQAPGHLSGLSVPCPLPSPPAGTLTCELKSCPYCTRALEDPEGELSGSESGDSDGRGVYEFTQDVRHGDRWDPTRPPRATDTPGPGPGSPQRRAQQRAAPGEPGWMGRLWVTFSGKLRRIVDSKYFSRGIMMAILVNTLSMGVEYHEQPEELTNALEISNIVFTSMFALEMLLKLLACGPLGYIRNPYNIFDGIIVVISVWEIVGQADGGLSVLRTFRLLRVLKLVRFLPALRRQLVVLVKTMDNVATFCTLLMLFIFIFSILGMHLFGCKFSLKTDTGDTVPDRKNFDSLLWAIVTVFQILTQEDWNVVLYNGMASTSSWAALYFVALMTFGNYVLFNLLVAILVEGFQAEGDANRSDTDEDKTSVHFEEDFHKLRELQTTELKMCSLAVTPNGHLEGRGSLSPPLIMCTAATPMPTPKSSPFLDAAPSLPDSRRGSSSSGDPPLGDQKPPASLRSSPCAPWGPSGAWSSRRSSWSSLGRAPSLKRRGQCGERESLLSGEGKGSTDDEAEDGRAAPGPRATPLRRAESLDPRPLRPAALPPTKCRDRDGQVVALPSDFFLRIDSHREDAAELDDDSEDSCCLRLHKVLEPYKPQWCRSREAWALYLFSPQNRFRVSCQKVITHKMFDHVVLVFIFLNCVTIALERPDIDPGSTERVFLSVSNYIFTAIFVAEMMVKVVALGLLSGEHAYLQSSWNLLDGLLVLVSLVDIVVAMASAGGAKILGVLRVLRLLRTLRPLRVISRAPGLKLVVETLISSLRPIGNIVLICCAFFIIFGILGVQLFKGKFYYCEGPDTRNISTKAQCRAAHYRWVRRKYNFDNLGQALMSLFVLSSKDGWVNIMYDGLDAVGVDQQPVQNHNPWMLLYFISFLLIVSFFVLNMFVGVVVENFHKCRQHQEAEEARRREEKRLRRLERRRRSTFPSPEAQRRPYYADYSPTRRSIHSLCTSHYLDLFITFIICVNVITMSMEHYNQPKSLDEALKYCNYVFTIVFVFEAALKLVAFGFRRFFKDRWNQLDLAIVLLSLMGITLEEIEMSAALPINPTIIRIMRVLRIARVLKLLKMATGMRALLDTVVQALPQVGNLGLLFMLLFFIYAALGVELFGRLECSEDNPCEGLSRHATFSNFGMAFLTLFRVSTGDNWNGIMKDTLRECSREDKHCLSYLPALSPVYFVTFVLVAQFVLVNVVVAVLMKHLEESNKEAREDAELDAEIELEMAQGPGSARRVDADRPPLPQESPGARDAPNLVARKVSVSRMLSLPNDSYMFRPVVPASAPHPRPLQEVEMETYGAGTPLGSVASVHSPPAESCASLQIPLAVSSPARSGEPLHALSPRGTARSPSLSRLLCRQEAVHTDSLEGKIDSPRDTLDPAEPGEKTPVRPVTQGGSLQSPPRSPRPASVRTRKHTFGQRCVSSRPAAPGGEEAEASDPADEEVSHITSSACPWQPTAEPHGPEASPVAGGERDLRRLYSVDAQGFLDKPGRADEQWRPSAELGSGEPGEAKAWGPEAEPALGARRKKKMSPPCISVEPPAEDEGSARPSAAEGGSTTLRRRTPSCEATPHRDSLEPTEGSGAGGDPAAKGERWGQASCRAEHLTVPSFAFEPLDLGVPSGDPFLDGSHSVTPESRASSSGAIVPLEPPESEPPMPVGDPPEKRRGLYLTVPQCPLEKPGSPSATPAPGGGADDPV

SEQ ID NO: 2635 - protein, 2346 aa, Homo sapiens
VLPAATMTEGARAADEVRVPLGAPPPGPAALVGASPESPGAPGREAERGSELGVSPSESPAAERGAELGADEEQRVPYPALAATVFFCLGQTTRPRSWCLRLVCNPWFEHVSMLVIMLNCVTLGMFRPCEDVECGSERCNILEMVIKMVALGLFGQKCYLGDTWNRLDFFIVVAGMMEYSLDGHNVSLSAIRTVRVLRPLRAINRVPSMRILVTLLLDTLPMLGNVLLLCFFVFFIFGIVGVQLWAGLLRNRCFLDSAFVRNNNLTFLRPYYQTEEGEENPFICSSRRDNGMQKCSHIPGRRELRMPCTLGWEAYTQPQAEGVGAARNACINWNQYYNVCRSGDSNPHNGAINFDNIGYAWIAIFQVITLEGWVDIMYYVMDAHSFYNFIYFILLIIVGSFFMINLCLVVIATQFSETKQRESQLMREQRARHLSNDSTLASFSEPGSCYEELLKYVGHIFRKVKRRSLRLYARWQSRWRKKVDPSAVQGQGPGHRQRRAGRHTASVHHLVYHHHHHHHHHYHFSHGSPRRPGPEPGACDTRLVRAGAPPSPPSPGRGPPDAESVHSIYHADCHIEGPQERARVAHAAATAAASLRLATGLGTMNYPTILPSGVGSGKGSTSPGPKGKWAGGPPGTGGHGPLSLNSPDPYEKIPHVVGEHGLGQAPGHLSGLSVPCPLPSPPAGTLTCELKSCPYCTRALEDPEGELSGSESGDSDGRGVYEFTQDVRHGDRWDPTRPPRATDTPGPGPGSPQRRAQQRAAPGEPGWMGRLWVTFSGKLRRIVDSKYFSRGIMMAILVNTLSMGVEYHEQPEELTNALEISNIVFTSMFALEMLLKLLACGPLGYIRNPYNIFDGIIVVISVWEIVGQADGGLSVLRTFRLLRVLKLVRFLPALRRQLVVLVKTMDNVATFCTLLMLFIFIFSILGMHLFGCKFSLKTDTGDTVPDRKNFDSLLWAIVTVFQILTQEDWNVVLYNGMASTSSWAALYFVALMTFGNYVLFNLLVAILVEGFQAEGDANRSDTDEDKTSVHFEEDFHKLRELQTTELKMCSLAVTPNGHLEGRGSLSPPLIMCTAATPMPTPKSSPFLDAAPSLPDSRRGSSSSGDPPLGDQKPPASLRSSPCAPWGPSGAWSSRRSSWSSLGRAPSLKRRGQCGERESLLSGEGKGSTDDEAEDGRAAPGPRATPLRRAESLDPRPLRPAALPPTKCRDRDGQVVALPSDFFLRIDSHREDAAELDDDSEDSCCLRLHKVLEPYKPQWCRSREAWALYLFSPQNRFRVSCQKVITHKMFDHVVLVFIFLNCVTIALERPDIDPGSTERVFLSVSNYIFTAIFVAEMMVKVVALGLLSGEHAYLQSSWNLLDGLLVLVSLVDIVVAMASAGGAKILGVLRVLRLLRTLRPLRVISRAPGLKLVVETLISSLRPIGNIVLICCAFFIIFGILGVQLFKGKFYYCEGPDTRNISTKAQCRAAHYRWVRRKYNFDNLGQALMSLFVLSSKDGWVNIMYDGLDAVGVDQQPVQNHNPWMLLYFISFLLIVSFFVLNMFVGVVVENFHKCRQHQEAEEARRREEKRLRRLERRRRSTFPSPEAQRRPYYADYSPTRRSIHSLCTSHYLDLFITFIICVNVITMSMEHYNQPKSLDEALKYCNYVFTIVFVFEAALKLVAFGFRRFFKDRWNQLDLAIVLLSLMGITLEEIEMSAALPINPTIIRIMRVLRIARVLKLLKMATGMRALLDTVVQALPQVGNLGLLFMLLFFIYAALGVELFGRLECSEDNPCEGLSRHATFSNFGMAFLTLFRVSTGDNWNGIMKDTLRECSREDKHCLSYLPALSPVYFVTFVLVAQFVLVNVVVAVLMKHLEESNKEAREDAELDAEIELEMAQGPGSARRVDADRPPLPQESPGARDAPNLVARKVSVSRMLSLPNDSYMFRPVVPASAPHPRPLQEVEMETYGAGTPLGSVASVHSPPAESCASLQIPLAVSSPARSGEPLHALSPRGTARSPSLSRLLCRQEAVHTDSLEGKIDSPRDTLDPAEPGEKTPVRPVTQGGSLQSPPRSPRPASVRTRKHTFGQRCVSSRPAAPGGEEAEASDPADEEVSHITSSACPWQPTAEPHGPEASPVAGGERDLRRLYSVDAQGFLDKPGRADEQWRPSAELGSGEPGEAKAWGPEAEPALGARRKKKMSPPCISVEPPAEDEGSARPSAAEGGSTTLRRRTPSCEATPHRDSLEPTEGSGAGGDPAAKGERWGQASCRAEHLTVPSFAFEPLDLGVPSGDPFLDGSHSVTPESRASSSGAIVPLEPPESEPPMPVGDPPEKRRGLYLTVPQCPLEKPGSPSATPAPGGGADDPV

SEQ ID NO: 2636 - protein, 2353 aa, Homo sapiens
VLPAATMTEGARAADEVRVPLGAPPPGPAALVGASPESPGAPGREAERGSELGVSPSESPAAERGAELGADEEQRVPYPALAATVFFCLGQTTRPRSWCLRLVCNPWFEHVSMLVIMLNCVTLGMFRPCEDVECGSERCNILEAFDAFIFAFFAVEMVIKMVALGLFGQKCYLGDTWNRLDFFIVVAGMMEYSLDGHNVSLSAIRTVRVLRPLRAINRVPSMRILVTLLLDTLPMLGNVLLLCFFVFFIFGIVGVQLWAGLLRNRCFLDSAFVRNNNLTFLRPYYQTEEGEENPFICSSRRDNGMQKCSHIPGRRELRMPCTLGWEAYTQPQAEGVGAARNACINWNQYYNVCRSGDSNPHNGAINFDNIGYAWIAIFQVITLEGWVDIMYYVMDAHSFYNFIYFILLIIVGSFFMINLCLVVIATQFSETKQRESQLMREQRARHLSNDSTLASFSEPGSCYEELLKYVGHIFRKVKRRSLRLYARWQSRWRKKVDPSAVQGQGPGHRQRRAGRHTASVHHLVYHHHHHHHHHYHFSHGSPRRPGPEPGACDTRLVRAGAPPSPPSPGRGPPDAESVHSIYHADCHIEGPQERARVAHAAATAAASLRLATGLGTMNYPTILPSGVGSGKGSTSPGPKGKWAGGPPGTGGHGPLSLNSPDPYEKIPHVVGEHGLGQAPGHLSGLSVPCPLPSPPAGTLTCELKSCPYCTRALEDPEGELSGSESGDSDGRGVYEFTQDVRHGDRWDPTRPPRATDTPGPGPGSPQRRAQQRAAPGEPGWMGRLWVTFSGKLRRIVDSKYFSRGIMMAILVNTLSMGVEYHEQPEELTNALEISNIVFTSMFALEMLLKLLACGPLGYIRNPYNIFDGIIVVISVWEIVGQADGGLSVLRTFRLLRVLKLVRFLPALRRQLVVLVKTMDNVATFCTLLMLFIFIFSILGMHLFGCKFSLKTDTGDTVPDRKNFDSLLWAIVTVFQILTQEDWNVVLYNGMASTSSWAALYFVALMTFGNYVLFNLLVAILVEGFQAEGDANRSDTDEDKTSVHFEEDFHKLRELQTTELKMCSLAVTPNGHLEGRGSLSPPLIMCTAATPMPTPKSSPFLDAAPSLPDSRRGSSSSGDPPLGDQKPPASLRSSPCAPWGPSGAWSSRRSSWSSLGRAPSLKRRGQCGERESLLSGEGKGSTDDEAEDGRAAPGPRATPLRRAESLDPRPLRPAALPPTKCRDRDGQVVALPSDFFLRIDSHREDAAELDDDSEDSCCLRLHKVLEPYKPQWCRSREAWALYLFSPQNRFRVSCQKVITHKMFDHVVLVFIFLNCVTIALERPDIDPGSTERVFLSVSNYIFTAIFVAEMMVKVVALGLLSGEHAYLQSSWNLLDGLLVLVSLVDIVVAMASAGGAKILGVLRVLRLLRTLRPLRVISRAPGLKLVVETLISSLRPIGNIVLICCAFFIIFGILGVQLFKGKFYYCEGPDTRNISTKAQCRAAHYRWVRRKYNFDNLGQALMSLFVLSSKDGWVNIMYDGLDAVGVDQQPVQNHNPWMLLYFISFLLIVSFFVLNMFVGVVVENFHKCRQHQEAEEARRREEKRLRRLERRRRKAQRRPYYADYSPTRRSIHSLCTSHYLDLFITFIICVNVITMSMEHYNQPKSLDEALKYCNYVFTIVFVFEAALKLVAFGFRRFFKDRWNQLDLAIVLLSLMGITLEEIEMSAALPINPTIIRIMRVLRIARVLKLLKMATGMRALLDTVVQALPQVGNLGLLFMLLFFIYAALGVELFGRLECSEDNPCEGLSRHATFSNFGMAFLTLFRVSTGDNWNGIMKDTLRECSREDKHCLSYLPALSPVYFVTFVLVAQFVLVNVVVAVLMKHLEESNKEAREDAELDAEIELEMAQGPGSARRVDADRPPLPQESPGARDAPNLVARKVSVSRMLSLPNDSYMFRPVVPASAPHPRPLQEVEMETYGAGTPLGSVASVHSPPAESCASLQIPLAVSSPARSGEPLHALSPRGTARSPSLSRLLCRQEAVHTDSLEGKIDSPRDTLDPAEPGEKTPVRPVTQGGSLQSPPRSPRPASVRTRKHTFGQRCVSSRPAAPGGEEAEASDPADEEVSHITSSACPWQPTAEPHGPEASPVAGGERDLRRLYSVDAQGFLDKPGRADEQWRPSAELGSGEPGEAKAWGPEAEPALGARRKKKMSPPCISVEPPAEDEGSARPSAAEGGSTTLRRRTPSCEATPHRDSLEPTEGSGAGGDPAAKGERWGQASCRAEHLTVPSFAFEPLDLGVPSGDPFLDGSHSVTPESRASSSGAIVPLEPPESEPPMPVGDPPEKRRGLYLTVPQCPLEKPGSPSATPAPGGGADDPV

SEQ ID NO: 2637 - protein, 211 aa, Homo sapiens
LGLQGTHGSPPASCAPVPGRPNSTARPNPAEPVRGPPRRAAVDASALAWRPGERGAPASRPRLALLLLLLLLPLPSGAWYKHVASPRYHTVGRAAGLLMGLRRSPYLWRRALRAAAGPLARDTLSPEPAAREAPLLLPSWVQELWETRRRSSQAGIPVRAPRSPRAPEPALEPESLDFSGAGQRLRRDVSRPAVDPAANRLGLPCLAPGPF

SEQ ID NO: 2638 - protein, 251 aa, Homo sapiens
LQRDYRPPPPPPPRAVPAARLPWRSRPQCAQASGLALLGFLVLVPMTMPWGQLGKDGWLGGTHCVACLAPPAGSVLYHLFMCHQGGSAVYARLLALDMCGVCLVNTLGALPIIHCTLACRPWLRPAALVGYTVLSGVAGWRALTAPSTSARLRAFGWQAAARLLVFGARGVGLGSGAPGSLPCYLRMDALALLGGLVNVARLPERWGPGRFDYWGNSHQIMHLLSVGSILQLHAGVVPDLLWAAHHACPRD

SEQ ID NO: 2639 - protein, 276 aa, Homo sapiens
VRTMAFLAGPRLLDWASSPPHLQFNKFVLTGYRPASSGSGCLRSLFYLHNELGNIYTHGLALLGFLVLVPMTMPWGQLGKDGWLGGTHCVACLAPPAGSVLYHLFMCHQGGSAVYARLLALDMCGVCLVNTLGALPIIHCTLACRPWLRPAALVGYTVLSGVAGWRALTAPSTSARLRAFGWQAAARLLVFGARGVGLGSGAPGSLPCYLRMDALALLGGLVNVARLPERWGPGRFDYWGNSHQIMHLLSVGSILQLHAGVVPDLLWAAHHACPRD

SEQ ID NO: 2640 - protein, 237 aa, Homo sapiens
VRTMAFLAGPRLLDWASSPPHLQFNKFVLTGYRPASSGSGCLRSLFYLHNELGNIYTHGSVLYHLFMCHQGGSAVYARLLALDMCGVCLVNTLGALPIIHCTLACRPWLRPAALVGYTVLSGVAGWRALTAPSTSARLRAFGWQAAARLLVFGARGVGLGSGAPGSLPCYLRMDALALLGGLVNVARLPERWGPGRFDYWGNSHQIMHLLSVGSILQLHAGVVPDLLWAAHHACPRD

SEQ ID NO: 2641 - protein, 202 aa, Homo sapiens
VRTMAFLAGPRLLDWASSPPHLQFNKFVLTGYRPASSGSGCLRSLFYLHNELGNIYTHGALPIIHCTLACRPWLRPAALVGYTVLSGVAGWRALTAPSTSARLRAFGWQAAARLLVFGARGVGLGSGAPGSLPCYLRMDALALLGGLVNVARLPERWGPGRFDYWGNSHQIMHLLSVGSILQLHAGVVPDLLWAAHHACPRD

SEQ ID NO: 2642 - protein, 223 aa, Homo sapiens
LSPSLGLALLGFLVLVPMTMPWGQLGKDGWLGGTHCVACLAPPAGSVLYHLFMCHQGGSAVYARLLALDMCGVCLVNTLGALPIIHCTLACRPWLRPAALVGYTVLSGVAGWRALTAPSTSARLRAFGWQAAARLLVFGARGVGLGSGAPGSLPCYLRMDALALLGGLVNVARLPERWGPGRFDYWGNSHQIMHLLSVGSILQLHAGVVPDLLWAAHHACPRD

SEQ ID NO: 2643 - protein, 449 aa, Homo sapiens
LAMPMPTEGTPPPLSGTPIPVPAYFRHAEPGFSLKRPRGLSRSLPPPPPAKGSIPISRLFPPRTPGWHQLQPRRVSFRGEASETLQSPGYDPSRPESFFQQSFQRLSRLGHGSYGEVFKVRSKEDGRLYAVKRSMSPFRGPKDRARKLAEVGSHEKVGQHPCCVRLEQAWEEGGILYLQTELCGPSLQQHCEAWGASLPEAQVWGYLRDTLLALAHLHSQGLVHLDVKPANIFLGPRGRCKLGDFGLLVELGTAGAGEVQEGDPRYMAPELLQGSYGTAADVFSLGLTILEVACNMELPHGGEGWQQLRQGYLPPEFTAGLSSELRSVLVMMLEPDPKLRATAEALLALPVLRQPRAWGVLWCMAAEALSRGWALWQALLALLCWLWHGLAHPASWLQPLGPPATPPGSPPCSLLLDSSLSSNWDDDSLGPCVLKRTEGALECSQMEGL

SEQ ID NO: 2644 - protein, 294 aa, Homo sapiens
VPPALSRPGSPPPGPRGGPSQAPFEPRRRPGLGRTMRLRLRLLALLLLLLAPPARAPKPSAQDVSLGVDWLTRYGYLPPPHPAQAQLQSPEKLRDAIKVMQRFAGLPETGRMDPGTVATMRKPRCSLPDVLGVAGLVRRRRRYALSGSVWKKRTLTWRVRSFPQSSQLSQETVRVLMSYALMAWGMESGLTFHEVDSPQGQEPDILIDFARAFHQDSYPFDGLGGTLAHAFFPGEHPISGDTHFDDEETWTFGSKASQQLEQELAGGSPVDEELGFSRGWRVNPLGPGSPERLS

SEQ ID NO: 2645 - protein, 597 aa, Homo sapiens
VPPALSRPGSPPPGPRGGPSQAPFEPRRRPGLGRTMRLRLRLLALLLLLLAPPARAPKPSAQDVSLGVDWLTRYGYLPPPHPAQAQLQSPEKLRDAIKVMQRFAGLPETGRMDPGTVATMRKPRCSLPDVLGVAGLVRRRRRYALSGSVWKKRTLTWRVRSFPQSSQLSQETVRVLMSYALMAWGMESGLTFHEVDSPQGQEPDILIDFARAFHQDSYPFDGLGGTLAHAFFPGEHPISGDTHFDDEETWTFGSKDGEGTDLFAVAVHEFGHALGLGHSSAPNSIMRPFYQGPVGDPDKYRLSQDDRDGLQQLYGKAPQTPYDKPTRKPLAPPPQPPASPTHSPSFPIPDRCEGNFDAIANIRGETFFFKGPWFWRLQPSGQLVSPRPARLHRFWEGLPAQVRVVQAAYARHRDGRILLFSGPQFWVFQDRQLEGGARPLTELGLPPGEEVDAVFSWPQNGKTYLVRGRQYWRYDEAAARPDPGYPRDLSLWEGAPPSPDDVTVSNAGDTYFFKGAHYWRFPKNSIKTEPDAPQPMGPNWLDCPAPSSGPRAPRPPKATPVSETCDCQCELNQAAGRWPAPIPLLLLPLLVGGVASR

SEQ ID NO: 2646 - protein, 539 aa, Homo sapiens
LWTVLRQGPDAAVLEKEWGGGIGKERNPPRPLFHPLGVQSPVLCFLCLVTLSLPHRPQSTSPSLLPSPSHPQSLLELHKRRKALTEPEARYYLRQIVLGCQYLHRNRVIHRDLKLGNLFLNEDLEVKIGDFGLATKVEYDGERKKTLCGTPNYIAPEVLSKKGHSFEVDVWSIGCIMYTLLVGKPPFETSCLKETYLRIKKNEYSIPKHINPVAASLIQKMLQTDPTARPTINELLNDEFFTSGYIPARLPITCLTIPPRFSIAPSSLDPSNRKPLTVLNKGLENPLPERPREKEEPVVRETGEVVDCHLSDMLQQLHSVNASKPSERGLVRQEEAEDPACIPIFWVSKWVDYSDKYGLGYQLCDNSVGVLFNDSTRLILYNDGDSLQYIERDGTESYLTVSSHPNSLMKKITLLKYFRNYMSEHLLKAGANITPREGDELARLPYLRTWFRTRSAIILHLSNGSVQINFFQDHTKLILCPLMAAVTYIDEKRDFRTYRLSLLEEYGCCKELASRLRYARTMVDKLLSSRSASNRLKAS

SEQ ID NO: 2647 - protein, 73 aa, Homo sapiens
LVPWHLPMGWLCSGLLFPVSCLVLLQVASSGLFRMPCGERKRVEARRSGGRSGVEEMRGSGSLWEVDLRTDWN

SEQ ID NO: 2648 - protein, 832 aa, Homo sapiens
LVPWHLPMGWLCSGLLFPVSCLVLLQVASSGNMKVLQEPTCVSDYMSISTCEWKMNGPTNCSTELRLLYQLVFLLSEAHTCIPENNGGAGCVCHLLMDDVVSADNYTLDLWAGQQLLWKGSFKPSEHVKPRAPGNLTVHTNVSDTLLLTWSNPYPPDNYLYNHLTYAVNIWSENDPADFRIYNVTYLEPSLRIAASTLKSGISYRARVRAWAQCYNTTWSEWSPSTKWHNSYREPFEQHLLLGVSVSCIVILAVCLLCYVSITKIKKEWWDQIPNPARSRLVAIIIQDAQGSQWEKRSRGQEPAKCPHWKNCLTKLLPCFLEHNMKRDEDPHKAAKEMPFQGSGKSAWCPVEISKTVLWPESISVVRCVELFEAPVECEEEEEVEEEKGSFCASPESSRDDFQEGREGIVARLTESLFLDLLGEENGGFCQQDMGESCLLPPSGSTSAHMPWDEFPSAGPKEAPPWGKEQPLHLEPSPPASPTQSPDNLTCTETPLVIAGNPAYRSFSNSLSQSPCPRELGPDPLLARHLEEVEPEMPCVPQLSEPTTVPQPEPETWEQILRRNVLQHGAAAAPVSAPTSGYQEFVHAVEQGGTQASAVVGLGPPGEAGYKAFSSLLASSAVSPEKCGFGASSGEEGYKPFQDLIPGCPGDPAPVPVPLFTFGLDREPPRSPQSSHLPSSSPEHLGLEPGEKVEDMPKPPLPQEQATDPLVDSLGSGIVYSALTCHLCGHLKQCHGQEDGGQTPVMASPCCGCCCGDRSSPPTTPLRAPDPSPGGVPLEASLCPASLAPSGISEKSKSSSSFHPAPGNAQSSSQTPKIVNFVSVGPTYMRVS

SEQ ID NO: 2649 - protein, 130 aa, Homo sapiens
VPWHLPMGWLCSGLLFPVSCLVLLQVASSGNMKVLQEPTCVSDYMSISTCEWKMNGPTNCSTELRLLYQLVFLLSEAHTCIPENNGGAGCVCHLLMDDVVSADNYTLDLWAGQQLLWKGSFKPSEHVQNL

SEQ ID NO: 2650 - protein, 560 aa, Homo sapiens
MSCRCIFLMKHGERVGWPVGVSMPRGWAAPLLLLLLQGGWGCPDLVCYTDYLQTVICILEMWNLHPSTLTLTWQDQYEELKDEATSCSLHRSAHNATHATYTCHMDVFHFMADDIFSVNITDQSGNYSQECGSFLLAESIKPAPPFNVTVTFSGQYNISWRSDYEDPAFYMLKGKLQYELQYRNRGDPWAVSPRRKLISVDSRSVSLLPLEFRKDSSYELQVRAGPMPGSSYQGTWSEWSDPVIFQTQSEELKEGWNPHLLLLLLLVIVFIPAFWSLKTHPLWRLWKKIWAVPSPERFFMPLYKGCSGDFKKWVGAPFTGSSLELGPWSPEVPSTLEVYSCHPPRSPAKRLQLTELQEPAELVESDGVPKPSFWPTAQNSGGSAYSEERDRPYGLVSIDTVTVLDAEGPCTWPCSCEDDGYPALDLDAGLEPSPGLEDPLLDAGTTVLSCGCVSAGSPGLGGPLGSLLDRLKPPLADGEDWAGGLPWGGRSPGGVSESEAGSPLAGLDMDTFDSGFVGSDCSSPVECDFTSPGDEGPPRSYLRQWVVIPPPLSSPGPQAS

SEQ ID NO: 2651 - protein, 73 aa, Homo sapiens
LDVQSWPGHWALSQRQGHLGCDVKTPAAFGLLDGPLSLMFTVSVCVCAYVCVCICMCVCVCVLGAQWHVHVCV

SEQ ID NO: 2652 - protein, 93 aa, Homo sapiens
VAMVEVQLESDHEYPPGLLVAFSACTTVLVAVHLFALMVSTCLLPHIEAVSNIHNLNSVHQSPHQRLHRYVELAWGFSTALGTFLFLAEVVLR

SEQ ID NO: 2653 - protein, 373 aa, Homo sapiens
LQPGMADSAQAQKLVYLVTGGCGFLGEHVVRMLLQREPRLGELRVFDQHLGPWLEELKTGPVRVTAIQGDVTQAHEVAAAVAGAHVVIHTAGLVDVFGRASPKTIHEVNVQGTRNVIEACVQTGTRFLVYTSSMEVVGPNTKGHPFYRGNEDTPYEAVHRHPYPCSKALAEWLVLEANGRKVRGGLPLVTCALRPTGIYGEGHQIMRDFYRQGLRLGGWLFRAIPASVEHGRVYVGNVAWMHVLAARELEQRATLMGGQVYFCYDGSPYRSYEDFNMEFLGPCGLRLVGARPLLPYWLLVFLAALNALLQWLLRPLVLYAPLLNPYTLAVANTTFTVSTDKAQRHFGYEPLFSWEDSRTRTILWVQAATGSAQ

SEQ ID NO: 2654 - protein, 155 aa, Homo sapiens
LQQGPGRVAGPGGQREEGNVAWMHVLAARELEQRATLMGGQVYFCYDGSPYRSYEDFNMEFLGPCGLRLVGARPLLPYWLLVFLAALNALLQWLLRPLVLYAPLLNPYTLAVANTTFTVSTDKAQRHFGYEPLFSWEDSRTRTILWVQAATGSAQ

SEQ ID NO: 2655 - protein, 1170 aa, Homo sapiens
VVPATPGSPPSRFWLLPAMALRVLLLTALTLCHGFNLDTENAMTFQENARGFGQSVVQLQGSRVVVGAPQEIVAANQRGSLYQCDYSTGSCEPIRLQVPVEAVNMSLGLSLAATTSPPQLLACGPTVHQTCSENTYVKGLCFLFGSNLRQQPQKFPEALRGCPQEDSDIAFLIDGSGSIIPHDFRRMKEFVSTVMEQLKKSKTLFSLMQYSEEFRIHFTFKEFQNNPNPRSLVKPITQLLGRTHTATGIRKVVRELFNITNGARKNAFKILVVITDGEKFGDPLGYEDVIPEADREGVIRYVIGVGDAFRSEKSRQELNTIASKPPRDHVFQVNNFEALKTIQNQLREKIFAIEGTQTGSSSSFEHEMSQEGFSAAITSNGPLLSTVGSYDWAGGVFLYTSKEKSTFINMTRVDSDMNDAYLGYAAAIILRNRVQSLVLGAPRYQHIGLVAMFRQNTGMWESNANVKGTQIGAYFGASLCSVDVDSNGSTDLVLIGAPHYYEQTRGGQVSVCPLPRGRARWQCDAVLYGEQGQPWGRFGAALTVLGDVNGDKLTDVAIGAPGEEDNRGAVYLFHGTSGSGISPSHSQRIAGSKLSPRLQYFGQSLSGGQDLTMDGLVDLTVGAQGHVLLLRSQPVLRVKAIMEFNPREVARNVFECNDQVVKGKEAGEVRVCLHVQKSTRDRLREGQIQSVVTYDLALDSGRPHSRAVFNETKNSTRRQTQVLGLTQTCETLKLQLPNCIEDPVSPIVLRLNFSLVGTPLSAFGNLRPVLAEDAQRLFTALFPFEKNCGNDNICQDDLSITFSFMSLDCLVVGGPREFNVTVTVRNDGEDSYRTQVTFFFPLDLSYRKVSTLQNQRSQRSWRLACESASSTEVSGALKSTSCSINHPIFPENSEVTFNITFDVDSKASLGNKLLLKANVTSENNMPRTNKTEFQLELPVKYAVYMVVTSHGVSTKYLNFTASENTSRVMQHQYQVSNLGQRSLPISLVFLVPVRLNQTVIWDRPQVTFSENLSSTCHTKERLPSHSDFLAELRKAPVVNCSIAVCQRIQCDIPFFGIQEEFNATLKGNLSFDWYIKTSHNHLLIVSTAEILFNDSVFTLLPGQGAFVRSQTETKVEPFEVPNPLPLIVGSSVGGLLLLALITAALYKLGFFKRQYKDMMSEGGPPGAEPQ

SEQ ID NO: 2656 - protein, 1171 aa, Homo sapiens
VVPATPGSPPSRFWLLPAMALRVLLLTALTLCHGFNLDTENAMTFQENARGFGQSVVQLQGSRVVVGAPQEIVAANQRGSLYQCDYSTGSCEPIRLQVPVEAVNMSLGLSLAATTSPPQLLACGPTVHQTCSENTYVKGLCFLFGSNLRQQPQKFPEALRGCPQEDSDIAFLIDGSGSIIPHDFRRMKEFVSTVMEQLKKSKTLFSLMQYSEEFRIHFTFKEFQNNPNPRSLVKPITQLLGRTHTATGIRKVVRELFNITNGARKNAFKILVVITDGEKFGDPLGYEDVIPEADREGVIRYVIGVGDAFRSEKSRQELNTIASKPPRDHVFQVNNFEALKTIQNQLREKIFAIEGTQTGSSSSFEHEMSQEGFSAAITSNGPLLSTVGSYDWAGGVFLYTSKEKSTFINMTRVDSDMNDAYLGYAAAIILRNRVQSLVLGAPRYQHIGLVAMFRQNTGMWESNANVKGTQIGAYFGASLCSVDVDSNGSTDLVLIGAPHYYEQTRGGQVSVCPLPRGQRARWQCDAVLYGEQGQPWGRFGAALTVLGDVNGDKLTDVAIGAPGEEDNRGAVYLFHGTSGSGISPSHSQRIAGSKLSPRLQYFGQSLSGGQDLTMDGLVDLTVGAQGHVLLLRSQPVLRVKAIMEFNPREVARNVFECNDQVVKGKEAGEVRVCLHVQKSTRDRLREGQIQSVVTYDLALDSGRPHSRAVFNETKNSTRRQTQVLGLTQTCETLKLQLPNCIEDPVSPIVLRLNFSLVGTPLSAFGNLRPVLAEDAQRLFTALFPFEKNCGNDNICQDDLSITFSFMSLDCLVVGGPREFNVTVTVRNDGEDSYRTQVTFFFPLDLSYRKVSTLQNQRSQRSWRLACESASSTEVSGALKSTSCSINHPIFPENSEVTFNITFDVDSKASLGNKLLLKANVTSENNMPRTNKTEFQLELPVKYAVYMVVTSHGVSTKYLNFTASENTSRVMQHQYQVSNLGQRSLPISLVFLVPVRLNQTVIWDRPQVTFSENLSSTCHTKERLPSHSDFLAELRKAPVVNCSIAVCQRIQCDIPFFGIQEEFNATLKGNLSFDWYIKTSHNHLLIVSTAEILFNDSVFTLLPGQGAFVRSQTETKVEPFEVPNPLPLIVGSSVGGLLLLALITAALYKLGFFKRQYKDMMSEGGPPGAEPQ

SEQ ID NO: 2657 - protein, 346 aa, Homo sapiens
LWSRPYLPGQSRHLLQLPRKQGQLRSLHLTCDSAPVGSQGTWSTSCRINHLIFRGGAQITFLATFDVSPKAVLGDRLLLTANVSSENNTPRTSKTTFQLELPVKYAVYTVVSSHEQFTKYLNFSESEEKESHVAMHRYQVNNLGQRDLPVSINFWVPVELNQEAVWMDVEVSHPQNPSLRCSSEKIAPPASDFLAHIQKNPVLDCSIAGCLRFRCDVPSFSVQEELDFTLKGNLSFGWVRQILQKKVSVVSVAEITFDTSVYSQLPGQEAFMRAQTTTVLEKYKVHNPTPLIVGSSIGGLLLLALITAVLYKVGFFKRQYKEMMEEANGQIAPENGTQTPSPPSEK

SEQ ID NO: 2658 - protein, 685 aa, Homo sapiens
VTPSEENDSPVAAADDTVPAESALPGPRQRNQTHRSSLHYKPTPDLRISIENSEEALTVHAPFPAAHPASRSFPDPRGLYHFCLYWNRHAGRLHLLYGKRDFLLSDKASSLLCFQHQEESLAQGPPLLATSVTSWWSPQNISLPSAASFTFSFHSPPHTAAHNASVDMCELKRDLQLLSQFLKHPQKASRRPSAAPASQQLQSLESKLTSVRFMGDMVSFEEDRINATVWKLQPTAGLQDLHIHSRQEEEQSEIMEYSVLLPRTLFQRTKGRSGEAEKRLLLVDFSSQALFQDKNSSQVLGEKVLGIVVQNTKVANLTEPVVLTFQHQLQPKNVTLQCVFWVEDPTLSSPGHWSSAGCETVRRETQTSCFCNHLTYFAVLMVSSVEVDAVHKHYLSLLSYVGCVVSALACLVTIAAYLCSRVPLPCRRKPRDYTIKVHMNLLLAVFLLDTSFLLSEPVALTGSEAGCRASAIFLHFSLLTCLSWMGLEGYNLYRLVVEVFGTYVPGYLLKLSAMGWGFPIFLVTLVALVDVDNYGPIILAVHRTPEGVIYPSMCWIRDSLVSYITNLGLFSLVFLFNMAMLATMVVQILRLRPHTQKWSHVLTLLGLSLVLGLPWALIFFSFASGTFQLVVLYLFSIITSFQGFLIFIWYWSMRLQARGGPSPLKSNSDSARLPISSGSTSSSRI

SEQ ID NO: 2659 - protein, 679 aa, Homo sapiens
VTPSEENDSPVAAADDTVPAESALPGPSQRNQTHRSSLHYKPTPDLRISIENSEEALTVHAPFPAAHPASRSFPDPRGLYHFCLYWNRHAGRLHLLYGKRDFLLSDKASSLLCFQHQEESLAQGPPLLATSVTSWWSPQNISLPSAASFTFSFHSPPHTAAHNASVDMCELKRDLQLLSQFLKHPQKASRRPSAAPASQQLQSLESKLTSVRFMGDMVSFEEDRINATVWKLQPTAGLQDLHIHSRQEEEQSEIMEYSVLLPRTLFQRTKGRSGEAEKRLLLVDFSSQALFQDKNSSQVLGEKVLGIVVQNTKVANLTEPVVLTFQHQLQPKNVTLQCVFWVEDPTLSSPGHWSSAGCETVRRETQTSCFCNHLTYFAVLMVSSVEVDAVHKHYLSLLSYVGCVVSALACLVTIAAYLCSRRKPRDYTIKVHMNLLLAVFLLDTSFLLSEPVALTGSEAGCRASAIFLHFSLLTCLSWMGLEGYNLYRLVVEVFGTYVPGYLLKLSAMGWGFPIFLVTLVALVDVDNYGPIILAVHRTPEGVIYPSMCWIRDSLVSYITNLGLFSLVFLFNMAMLATMVVQILRLRPHTQKWSHVLTLLGLSLVLGLPWALIFFSFASGTFQLVVLYLFSIITSFQGFLIFIWYWSMRLQARGGPSPLKSNSDSARLPISSGSTSSSRI

SEQ ID NO: 2660 - protein, 127 aa, Homo sapiens
LRESAAAGSADAMDNVQPKIKHRPFCFSVKGHVKMLRLDLTNSIITAVFLSVVAILAMQEKKRRHLLYVGGSLCLTAVIVCCIDAFVVTTKMRTNLKRFLGVEVERKLSPAKDAYPETGPDAPQRPA

SEQ ID NO: 2661 - protein, 593 aa, Homo sapiens
VVLKGRDLIPPSEASVEPVVRRMERAVRVESGVLVGVVCLLLACPATATGPEVAQPEVDTTLGRVRGRQVGVKGTDRLVNVFLGIPFAQPPLGPDRFSAPHPAQPWEGVRDASTAPPMCLQDVESMNSSRFVLNGKQQIFSVSEDCLVLNVYSPAEVPAGSGRPVMVWVHGGALITGAATSYDGSALAAYGDVVVVTVQYRLGVLGFFSTGDEHAPGNQGFLDVVAALRWVQENIAPFGGDLNCVTVFGGSAGGSIISGLVLSPVAAGLFHRAITQSGVITTPGIIDSHPWPLAQKIANTLACSSSSPAEMVQCLQQKEGEELVLSKKLKNTIYPLTVDGTVFPKSPKELLKEKPFHSVPFLMGVNNHEFSWLIPRGWGLLDTMEQMSREDMLAISTPVLTSLDVPPEMMPTVIDEYLGSNSDAQAKCQAFQEFMGDVFINVPTVSFSRYLRDSGSPVFFYEFQHRPSSFAKIKPAWVKADHGAEGAFVFGGPFLMDESSRLAFPEATEEEKQLSLTMMAQWTHFARTGDPNSKALPPWPQFNQAEQYLEINPVPRAGQKFREAWMQFWSETLPSKIQQWHQKQKNRKAQEDL

SEQ ID NO: 2662 - protein, 589 aa, Homo sapiens
VLKGRDLIPPSEASVEPVVRRMERAVRVESGVLVGVVCLLLACPATATGPEVAQPEVDTTLGRVRGRQVGVKGTDRLVNVFLGIPFAQPPLGPDRFSAPHPAQPWEGVRDASTAPPMCLQDVESMNSSRFVLNGKQQIFSVSEDCLVLNVYSPAEVPAGSGRPVMVWVHGGALITGAATSYDGSALAAYGDVVVVTVQYRLGVLGFFSTGDEHAPGNQGFLDVVAALRWVQENIAPFGGDLNCVTVFGGSAGGSIISGLVLSPVAAGLFHRAITQSGVITTPGIIDSHPWPLAQKIANTLACSSSSPAEMVQCLQQKEGEELVLSKKLKNTIYPLTVDGTVFPKSPKELLKEKPFHSVPFLMGVNNHEFSWLIPRGWGLLDTMEQMSREDMLAISTPVLTSLDVPPEMMPTVIDEYLGSNSDAQAKCQAFQEFMGDVFINVPTVSFSRYLRDSGSPVFFYEFQHRPSSFAKIKPAWVKADHGAEGAFVFGGPFLMDESSRLEATEEEKQLSLTMMAQWTHFARTGDPNSKALPPWPQFNQAEQYLEINPVPRAGQKFREAWMQFWSETLPSKIQQWHQKQKNRKAQEDL

SEQ ID NO: 2663 - protein, 191 aa, Homo sapiens
LRFRSLSRVSRAGYLPRTMAPKGKVGTRGKKQIFEENRETLKFYLRIILGANAIYCLVTLVFFYSSASFWAWLALGFSLAVYGASYHSMSSMARAAFSEDGALMDGGMDLNMEQGMAEHLKDVILLTAIVQVLSCFSLYVWSFWLLAPGRALYLLWVNVLGPWFTADSGTPAPEHNEKRQRRQERRQMKRL

SEQ ID NO: 2664 - protein, 57 aa, Homo sapiens
LAFDTLILALQLALGFSLAVYGASYHSMSSMARAAFSEDGALMDGGMDLNMEQGMAE

SEQ ID NO: 2665 - protein, 82 aa, Homo sapiens
VSVPHRQPRHLKDVILLTAIVQVLSCFSLYVWSFWLLAPGRALYLLWVNVLGPWFTADSGTPAPEHNEKRQRRQERRQMKRL

SEQ ID NO: 2666 - protein, 127 aa, Homo sapiens
VSPTASPGERPQGWGPDSPRSTATCNLKRVEGSCNLKRVEGPICCLSSFISIHRHLKDVILLTAIVQVLSCFSLYVWSFWLLAPGRALYLLWVNVLGPWFTADSGTPAPEHNEKRQRRQERRQMKRL

SEQ ID NO: 2667 - protein, 68 aa, Homo sapiens
LKRVEGSCNLKRVEGPICCLSSFISIHRHLKDVILLTAIVQVLSCFSLYVWSFWLLVCGLGALPRRGI

SEQ ID NO: 2668 - protein, 145 aa, Homo sapiens [sequence omitted]

SEQ ID NO: 2669 - protein, 498 aa, Homo sapiens
LPPLPACPALHNMQPSGLEGPGTFGRWPLLSLLLLLLLLQPVTCAYTTPGPPRALTTLGAPRAHTMPGTYAPSTTLSSPSTQGLQEQARALMRDFPLVDGHNDLPLVLRQVYQKGLQDVNLRNFSYGQTSLDRLRDGLVGAQFWSAYVPCQTQDRDALRLTLEQIDLIRRMCASYSELELVTSAKALNDTQKLACLIGVEGGHSLDNSLSILRTFYMLGVRYLTLTHTCNTPWAESSAKGVHSFYNNISGLTDFGEKVVAEMNRLGMMVDLSHVSDAVARRALEVSQAPVIFSHSAARGVCNSARNVPDDILQLLKKNGGVVMVSLSMGVIQCNPSANVSTVADHFDHIKAVIGSKFIGIGGDYDGAGKFPQGLEDVSTYPVLIEELLSRGWSEEELQGVLRGNLLRVFRQVEKVQEENKWQSPLEDKFPDEQLSSSCHSDLSRLRQRQSLTSGQELTEIPIHWTAKLPAKWSVSESSPHMAPVLAVVATFPVLILWL

SEQ ID NO: 2670 - protein, 707 aa, Homo sapiens
VRRARRGLKMAACGRVRRMFRLSAALHLLLLFAAGAEKLPGQGVHSQGQGPGANFVSFVGQAGGGGPAGQQLPQLPQSSQLQQQQQQQQQQQQPQPPQPPFPAGGPPARRGGAGAGGGWKLAEEESCREDVTRVCPKHTWSNNLAVLECLQDVREPENEISSDCNHLLWNYKLNLTTDPKFESVAREVCKSTITEIKECADEPVGKGYMVSCLVDHRGNITEYQCHQYITKMTAIIFSDYRLICGFMDDCKNDINILKCGSIRLGEKDAHSQGEVVSCLEKGLVKEAEEREPKIQVSELCKKAILRVAELSSDDFHLDRHLYFACRDDRERFCENTQAGEGRVYKCLFNHKFEESMSEKCREALTTRQKLIAQDYKVSYSLAKSCKSDLKKYRCNVENLPRSREARLSYLLMCLESAVHRGRQVSSECQGEMLDYRRMLMEDFSLSPEIILSCRGEIEHHCSGLHRKGRTLHCLMKVVRGEKGNLGMNCQQALQTLIQETDPGADYRIDRALNEACESVIQTACKHIRSGDPMILSCLMEHLYTEKMVEDCEHRLLELQYFISRDWKLDPVLYRKCQGDASRLCHTHGWNETSEFMPQGAVFSCLYRHAYRTEEQGRRLSRECRAEVQRILHQRAMDVKLDPALQDKCLIDLGKWCSEKTETGQELECLQDHLDDLVVECRDIVGNLTELESEAEREYVFKNLPFKV

SEQ ID NO: 2671 - protein, 160 aa, Homo sapiens
LGPARLDSPRWPPRPSTALLVGPRAQPAASLFQCVMTLLYAFSKDIFSVINFFSFFNWLCVALAIIGMIWLRHRKPELERPIKVNLALPVFFILACLFLIAVSFWKTPVECGIGFTIILSGLPVYFFGVWWKNKPKWLLQGIFSTTVLCQKLMQVVPQET

SEQ ID NO: 2672 - protein, 328 aa, Homo sapiens
VLLTAVNCYSVKAATRVQDAFAAAKLLALALIILLGFVQIGKGDVSNLDPNFSFEGTKLDVGNIVLALYSGLFAYGGWNYLNFVTEEMINPYRNLPLAIIISLPIVTLVYVLTNLAYFTTLSTEQMLSSEAVAVDFGNYHLGVMSWIIPVFVGLSCFGSVNGSLFTSSRLFFVGSREGHLPSILSMIHPQLLTPVPSLVFTCVMTLLYAFSKDIFSVINFFSFFNWLCVALAIIGMIWLRHRKPELERPIKVNLALPVFFILACLFLIAVSFWKTPVECGIGFTIILSGLPVYFFGVWWKNKPKWLLQGIFSTTVLCQKLMQVVPQET

SEQ ID NO: 2673 - protein, 801 aa, Homo sapiens
LDRTMAVQGSQRRLLGSLNSTPTAIPQLGLAANQTGARCLEVSISDGLFLSLGLVSLVENALVVATIAKNRNLHSPMYCFICCLALSDLLVSGSNVLETAVILLLEAGALVARAAVLQQLDNVIDVITCSSMLSSLCFLGAIAVDRYISIFYALRYHSIVTLPRARRAVAAIWVASVVFSTLFIAYYDHVAVLLCLVVFFLAMLVLMAVLYVHMLARACQHAQGIARLHKRQRPVHQGFGLKGAVTLTILLGIFFLCWGPFFLHLTLIVLCPEHPTCGCIFKNFNLFLALIICNAIIDPLIYAFHSQELRRTLKEVLTCSCSQDRALVSWDVKSLGGSVCQELLPQQPQEKGLCDQKASSTALQRLLQKEFWEVISDEHGIDPSGNYVGDSDLQLERISVYYNEASSHKYVPRAILVDLEPGTMDSVRSGAFGHLFRPDNFIFGQSGAGNNWAKGHYTEGAELVDSVLDVVRKECENCDCLQGFQLTHSLGGGTGSGMGTLLISKVREEYPDRIMNTFSVVPSPKVSDTVVEPYNATLSIHQLVENTDETYCIDNEALYDICFRTLKLATPTYGDLNHLVSATMSGVTTSLRFPGQLNADLRKLAVNMVPFPRLHFFMPGFAPLTARGSQQYRALTVPELTQQMFDAKNMMAACDPRHGRYLTVATVFRGRMSMKEVDEQMLAIQSKNSSYFVEWIPNNVKVAVCDIPPRGLKMSSTFIGNSTAIQELFKRISEQFTAMFRRKAFLHWYTGEGMDEMEFTEAESNMNDLVSEYQQYQDATAEEEGEMYEDDEEESEAQGPK

SEQ ID NO: 2674 - protein, 477 aa, Homo sapiens
LLSAQPSLRHRGFEQPLCAAETGGGREAGDGVSERGNVGSDPDVRMTYGSPQANASPSDAVALDHGEVSRRQQQELPNMFGDLRSTFIALMIGSYASSAVTFPGIKLIYDAGVSFIVVLVVWAGCSGLVFLNCFFNWPLEPFPGPEDMDYSVKIKFSWLGFDHKITGKQFYKQVTTVGRRLSVGSSMRSAKEQVALQEGHKLCLSTVDLEVKCQPDAAVAPSFMHSVFSPILLLSLVTMCVTQLRLIFYMGAMNNILKFLVSGDQKTVGLYTSIFGVLQLLCLLTAPVIGYIMDWRLKECEDASEEPEEKDANQGEKKKKKRDRQIQKITNAMRAFAFTNLLLVGFGVTCLIPNLPLQILSFILHTIVRGFIHSAVGGLYAAVYPSTQFGSLTGLQSLISALFALLQQPLFLAMMGPLQGDPLWVNVGLLLLSLLGFCLPLYLICYRRQLERQLQQRQEDDKLFLKINGSSNQEAFV

SEQ ID NO: 2675 - protein, 60 aa, Homo sapiens
LSPAQVTGARERYGPNELPSEEGKSLWELVLEQFEDLLVRILLLAALVSFVSRALPAILW

SEQ ID NO: 2676 - protein, 524 aa, Homo sapiens
LAPVSGQELQAGMAGGMSAECPEPGPGGLQGQSPGPGRQCPPPITPTSWSLPPWRAYVAAAVLCYINLLNYMNWFIIAGVLLDIQEVFQISDNHAGLLQTVFVSCLLLSAPVFGYLGDRHSRKATMSFGILLWSGAGLSSSFISPRYSWLFFLSRGIVGTGSASYSTIAPTVLGDLFVRDQRTRVLAVFYIFIPVGSGLGYVLGSAVTMLTGNWRWALRVMPCLEAVALILLILLVPDPPRGAAETQGEGAVGGFRSSWCEDVRYLGKNWSFVWSTLGVTAMAFVTGALGFWAPKFLLEARVVHGLQPPCFQEPCSNPDSLIFGALTIMTGVIGVILGAEAARRYKKVIPGAEPLICASSLLATAPCLYLALVLAPTTLLASYVFLGLGELLLSCNWAVVADILLSVVVPRCRGTAEALQITVGHILGDAGSPYLTGLISSVLRARRPDSYLQRFRSLQQSFLCCAFVIALGGGCFLLTALYLERDETRAWQPVTGTPDSNDVDSNDLERQGLLSGAGASTEEP

SEQ ID NO: 2677 - protein, 402 aa, Homo sapiens
LQECCWIYRRFSRSVTTMLVCFRLYSWLFFLSRGIVGTGSASYSTIAPTVLGDLFVRDQRTRVLAVFYIFIPVGSGLGYVLGSAVTMLTGNWRWALRVMPCLEAVALILLILLVPDPPRGAAETQGEGAVGGFRSSWCEDVRYLGKNWSFVWSTLGVTAMAFVTGALGFWAPKFLLEARVVHGLQPPCFQEPCSNPDSLIFGALTIMTGVIGVILGAEAARRYKKVIPGAEPLICASSLLATAPCLYLALVLAPTTLLASYVFLGLGELLLSCNWAVVADILLSVVVPRCRGTAEALQITVGHILGDAGSPYLTGLISSVLRARRPDSYLQRFRSLQQSFLCCAFVIALGGGCFLLTALYLERDETRAWQPVTGTPDSNDVDSNDLERQGLLSGAGASTEEP

SEQ ID NO: 2678 - protein, 664 aa, Homo sapiens
LCLRRSFCLPVLMPLLLLLLLLPSPLHPHPICEVSKVASHLEVNCDKRNLTALPPDLPKDTTILHLSENLLYTFSLATLMPYTRLTQLNLDRCELTKLQVDGTLPVLGTLDLSHNQLQSLPLLGQTLPALTVLDVSFNRLTSLPLGALRGLGELQELYLKGNELKTLPPGLLTPTPKLEKLSLANNNLTELPAGLLNGLENLDTLLLQENSLYTIPKGFFGSHLLPFAFLHGNPWLCNCEILYFRRWLQDNAENVYVWKQGVDVKAMTSNVASVQCDNSDKFPVYKYPGKGCPTLGDEGDTDLYDYYPEEDTEGDKVRATRTVVKFPTKAHTTPWGLFYSWSTASLDSQMPSSLHPTQESTKEQTTFPPRWTPNFTLHMESITFSKTPKSTTEPTPSPTTSEPVPEPAPNMTTLEPTPSPTTPEPTSEPAPSPTTPEPTSEPAPSPTTPEPTSEPAPSPTTPEPTPIPTIATSPTILVSATSLITPKSTFLTTTKPVSLLESTKKTIPELDQPPKLRGVLQGHLESSRNDPFLHPDFCCLLPLGFYVLGLFWLLFASVVLILLLSWVGHVKPQALDSGQGAALTTATQTTHLELQRGRQVTVPRAWLLFLRGSLPTFRSSLFLWVRPNGRVGPLVAGRRPSALSQGRGQDLLSTVSIRYSGHSL

SEQ ID NO: 2679 - protein, 638 aa, Homo sapiens
LCLRRSFCLPVLMPLLLLLLLLPSPLHPHPICEVSKVASHLEVNCDKRNLTALPPDLPKDTTILHLSENLLYTFSLATLMPYTRLTQLNLDRCELTKLQVDGTLPVLGTLDLSHNQLQSLPLLGQTLPALTVLDVSFNRLTSLPLGALRGLGELQELYLKGNELKTLPPGLLTPTPKLEKLSLANNNLTELPAGLLNGLENLDTLLLQENSLYTIPKGFFGSHLLPFAFLHGNPWLCNCEILYFRRWLQDNAENVYVWKQGVDVKAMTSNVASVQCDNSDKFPVYKYPGKGCPTLGDEGDTDLYDYYPEEDTEGDKVRATRTVVKFPTKAHTTPWGLFYSWSTASLDSQMPSSLHPTQESTKEQTTFPPRWTPNFTLHMESITFSKTPKSTTEPTPSPTTSEPVPEPAPNMTTLEPTPSPTTPEPTSEPAPSPTTPEPTPIPTIATSPTILVSATSLITPKSTFLTTTKPVSLLESTKKTIPELDQPPKLRGVLQGHLESSRNDPFLHPDFCCLLPLGFYVLGLFWLLFASVVLILLLSWVGHVKPQALDSGQGAALTTATQTTHLELQRGRQVTVPRAWLLFLRGSLPTFRSSLFLWVRPNGRVGPLVAGRRPSALSQGRGQDLLSTVSIRYSGHSL

SEQ ID NO: 2680 - protein, 66 aa, Homo sapiens
LSRASYFVPLFFSLCLSRPAETGHPFPRARVLLVPDNTFPLGYYLIPFTGIVGLLVLAMGAVMVSS

SEQ ID NO: 2681 - protein, 1389 aa, Homo sapiens
LGTSPRHPLNSGTEMAGGAWGRLACYLEFLKKEELKEFQLLLANKAHSRSSSGETPAQPEKTSGMEVASYLVAQYGEQRAWDLALHTWEQMGLRSLCAQAQEGAGHSPSFPYSPSEPHLGSPSQPTSTAVLMPWIHELPAGCTQGSERRVLRQLPDTSGRRWREISASLLYQALPSSPDHESPSQESPNAPTSTAVLGSWGSPPQPSLAPREQEAPGTQWPLDETSGIYYTEIREREREKSEKGRPPWAAVVGTPPQAHTSLQPHHHPWEPSVRESLCSTWPWKNEDFNQKFTQLLLLQRPHPRSQDPLVKRSWPDYVEENRGHLIEIRDLFGPGLDTQEPRIVILQGAAGIGKSTLARQVKEAWGRGQLYGDRFQHVFYFSCRELAQSKVVSLAELIGKDGTATPAPIRQILSRPERLLFILDGVDEPGWVLQEPSSELCLHWSQPQPADALLGSLLGKTILPEASFLITARTTALQNLIPSLEQARWVEVLGFSESSRKEYFYRYFTDERQAIRAFRLVKSNKELWALCLVPWVSWLACTCLMQQMKRKEKLTLTSKTTTTLCLHYLAQALQAQPLGPQLRDLCSLAAEGIWQKKTLFSPDDLRKHGLDGAIISTFLKMGILQEHPIPLSYSFIHLCFQEFFAAMSYVLEDEKGRGKHSNCIIDLEKTLEAYGIHGLFGASTTRFLLGLLSDEGEREMENIFHCRLSQGRNLMQWVPSLQLLLQPHSLESLHCLYETRNKTFLTQVMAHFEEMGMCVETDMELLVCTFCIKFSRHVKKLQLIEGRQHRSTWSPTMVVLFRWVPVTDAYWQILFSVLKVTRNLKELDLSGNSLSHSAVKSLCKTLRRPRCLLETLRLAGCGLTAEDCKDLAFGLRANQTLTELDLSFNVLTDAGAKHLCQRLRQPSCKLQRLQLVSCGLTSDCCQDLASVLSASPSLKELDLQQNNLDDVGVRLLCEGLRHPACKLIRLGLDQTTLSDEMRQELRALEQEKPQLLIFSRRKPSVMTPTEGLDTGEMSNSTSSLKRQRLGSERAASHVAQANLKLLDVSKIFPIAEIAGKSHEESSPEVVPVELLCVPSPASQGDLHTKPLGTDDDFWGPTGPVATEVVDKEKNLYRVHFPVAGSYRWPNTGLCFVMREAVTVEIEFCVWDQFLGEINPQHSWMVAGPLLDIKAEPGAVEAVHLPHFVALQGGHVDTSLFQMAHFKEEGMLLEKPARVELHHIVLENPSFSPLGVLLKMIHNALRFIPVTSVVLLYHRVHPEEVTFHLYLIPSDCSIRKAIDDLEMKFQFVRIHKPPPLTPLYMGCRYTVSGSGSGMLEILPKELELCYRSPGEDQLFSEFYVGHLGSGIRLQVKDKKDETLVWEALVKPGRNTSQPWNLRCNRDARRY

SEQ ID NO: 2682 - protein, 1443 aa, Homo sapiens
LGTSPRHPLNSGTEMAGGAWGRLACYLEFLKKEELKEFQLLLANKAHSRSSSGETPAQPEKTSGMEVASYLVAQYGEQRAWDLALHTWEQMGLRSLCAQAQEGAGHSPSFPYSPSEPHLGSPSQPTSTAVLMPWIHELPAGCTQGSERRVLRQLPDTSGRRWREISASLLYQALPSSPDHESPSQESPNAPTSTAVLGSWGSPPQPSLAPREQEAPGTQWPLDETSGIYYTEIREREREKSEKGRPPWAAVVGTPPQAHTSLQPHHHPWEPSVRESLCSTWPWKNEDFNQKFTQLLLLQRPHPRSQDPLVKRSWPDYVEENRGHLIEIRDLFGPGLDTQEPRIVILQGAAGIGKSTLARQVKEAWGRGQLYGDRFQHVFYFSCRELAQSKVVSLAELIGKDGTATPAPIRQILSRPERLLFILDGVDEPGWVLQEPSSELCLHWSQPQPADALLGSLLGKTILPEASFLITARTTALQNLIPSLEQARWVEVLGFSESSRKEYFYRYFTDERQAIRAFRLVKSNKELWALCLVPWVSWLACTCLMQQMKRKEKLTLTSKTTTTLCLHYLAQALQAQPLGPQLRDLCSLAAEGIWQKKTLFSPDDLRKHGLDGAIISTFLKMGILQEHPIPLSYSFIHLCFQEFFAAMSYVLEDEKGRGKHSNCIIDLEKTLEAYGIHGLFGASTTRFLLGLLSDEGEREMENIFHCRLSQGRNLMQWVPSLQLLLQPHSLESLHCLYETRNKTFLTQVMAHFEEMGMCVETDMELLVCTFCIKFSRHVKKLQLIEGRQHRSTWSPTMVVLFRWVPVTDAYWQILFSVLKVTRNLKELDLSGNSLSHSAVKSLCKTLRRPRCLLETLRLAGCGLTAEDCKDLAFGLRANQTLTELDLSFNVLTDAGAKHLCQRLRQPSCKLQRLQLVSCGLTSDCCQDLASVLSASPSLKELDLQQNNLDDVGVRLLCEGLRHPACKLIRLGLDQTTLSDEMRQELRALEQEKPQLLIFSRRKPSVMTPTEGLDTGEMSNSTSSLKRQRLGSERAASHVAQANLKLLDVSKIFPIAEIAEESSPEVVPVELLCVPSPASQGDLHTKPLGTDDDFWGPTGPVATEVVDKEKNLYRVHFPVAGSYRWPNTGLCFVMREAVTVEIEFCVWDQFLGEINPQHSWMVAGPLLDIKAEPGAVEAVHLPHFVALQGGHVDTSLFQMAHFKEEGMLLEKPARVELHHIVLENPSFSPLGVLLKMIHNALRFIPVTSVVLLYHRVHPEEVTFHLYLIPSDCSIRKELELCYRSPGEDQLFSEFYVGHLGSGIRLQVKDKKDETLVWEALVKPGDLMPATTLIPPARIAVPSPLDAPQLLHFVDQYREQLIARVTSVEVVLDKLHGQVLSQEQYERVLAENTRPSQMRKLFSLSQSWDRKCKDGLYQALKETHPHLIMELWEKGSKKGLLPLSS

SEQ ID NO: 2683 - protein, 1457 aa, Homo sapiens
LGTSPRHPLNSGTEMAGGAWGRLACYLEFLKKEELKEFQLLLANKAHSRSSSGETPAQPEKTSGMEVASYLVAQYGEQRAWDLALHTWEQMGLRSLCAQAQEGAGHSPSFPYSPSEPHLGSPSQPTSTAVLMPWIHELPAGCTQGSERRVLRQLPDTSGRRWREISASLLYQALPSSPDHESPSQESPNAPTSTAVLGSWGSPPQPSLAPREQEAPGTQWPLDETSGIYYTEIREREREKSEKGRPPWAAVVGTPPQAHTSLQPHHHPWEPSVRESLCSTWPWKNEDFNQKFTQLLLLQRPHPRSQDPLVKRSWPDYVEENRGHLIEIRDLFGPGLDTQEPRIVILQGAAGIGKSTLARQVKEAWGRGQLYGDRFQHVFYFSCRELAQSKVVSLAELIGKDGTATPAPIRQILSRPERLLFILDGVDEPGWVLQEPSSELCLHWSQPQPADALLGSLLGKTILPEASFLITARTTALQNLIPSLEQARWVEVLGFSESSRKEYFYRYFTDERQAIRAFRLVKSNKELWALCLVPWVSWLACTCLMQQMKRKEKLTLTSKTTTTLCLHYLAQALQAQPLGPQLRDLCSLAAEGIWQKKTLFSPDDLRKHGLDGAIISTFLKMGILQEHPIPLSYSFIHLCFQEFFAAMSYVLEDEKGRGKHSNCIIDLEKTLEAYGIHGLFGASTTRFLLGLLSDEGEREMENIFHCRLSQGRNLMQWVPSLQLLLQPHSLESLHCLYETRNKTFLTQVMAHFEEMGMCVETDMELLVCTFCIKFSRHVKKLQLIEGRQHRSTWSPTMVVLFRWVPVTDAYWQILFSVLKVTRNLKELDLSGNSLSHSAVKSLCKTLRRPRCLLETLRLAGCGLTAEDCKDLAFGLRANQTLTELDLSFNVLTDAGAKHLCQRLRQPSCKLQRLQLVSCGLTSDCCQDLASVLSASPSLKELDLQQNNLDDVGVRLLCEGLRHPACKLIRLGKPSVMTPTEGLDTGEMSNSTSSLKRQRLGSERAASHVAQANLKLLDVSKIFPIAEIAEESSPEVVPVELLCVPSPASQGDLHTKPLGTDDDFWGPTGPVATEVVDKEKNLYRVHFPVAGSYRWPNTGLCFVMREAVTVEIEFCVWDQFLGEINPQHSWMVAGPLLDIKAEPGAVEAVHLPHFVALQGGHVDTSLFQMAHFKEEGMLLEKPARVELHHIVLENPSFSPLGVLLKMIHNALRFIPVTSVVLLYHRVHPEEVTFHLYLIPSDCSIRKAIDDLEMKFQFVRIHKPPPLTPLYMGCRYTVSGSGSGMLEILPKELELCYRSPGEDQLFSEFYVGHLGSGIRLQVKDKKDETLVWEALVKPGDLMPATTLIPPARIAVPSPLDAPQLLHFVDQYREQLIARVTSVEVVLDKLHGQVLSQEQYERVLAENTRPSQMRKLFSLSQSWDRKCKDGLYQALKETHPHLIMELWEKGSKKGLLPLSS

SEQ ID NO: 2684 - protein, 1487 aa, Homo sapiens
LGTSPRHPLNSGTEMAGGAWGRLACYLEFLKKEELKEFQLLLANKAHSRSSSGETPAQPEKTSGMEVASYLVAQYGEQRAWDLALHTWEQMGLRSLCAQAQEGAGHSPSFPYSPSEPHLGSPSQPTSTAVLMPWIHELPAGCTQGSERRVLRQLPDTSGRRWREISASLLYQALPSSPDHESPSQESPNAPTSTAVLGSWGSPPQPSLAPREQEAPGTQWPLDETSGIYYTEIREREREKSEKGRPPWAAVVGTPPQAHTSLQPHHHPWEPSVRESLCSTWPWKNEDFNQKFTQLLLLQRPHPRSQDPLVKRSWPDYVEENRGHLIEIRDLFGPGLDTQEPRIVILQGAAGIGKSTLARQVKEAWGRGQLYGDRFQHVFYFSCRELAQSKVVSLAELIGKDGTATPAPIRQILSRPERLLFILDGVDEPGWVLQEPSSELCLHWSQPQPADALLGSLLGKTILPEASFLITARTTALQNLIPSLEQARWVEVLGFSESSRKEYFYRYFTDERQAIRAFRLVKSNKELWALCLVPWVSWLACTCLMQQMKRKEKLTLTSKTTTTLCLHYLAQALQAQPLGPQLRDLCSLAAEGIWQKKTLFSPDDLRKHGLDGAIISTFLKMGILQEHPIPLSYSFIHLCFQEFFAAMSYVLEDEKGRGKHSNCIIDLEKTLEAYGIHGLFGASTTRFLLGLLSDEGEREMENIFHCRLSQGRNLMQWVPSLQLLLQPHSLESLHCLYETRNKTFLTQVMAHFEEMGMCVETDMELLVCTFCIKFSRHVKKLQLIEGRQHRSTWSPTMVVLFRWVPVTDAYWQILFSVLKVTRNLKELDLSGNSLSHSAVKSLCKTLRRPRCLLETLRLAGCGLTAEDCKDLAFGLRANQTLTELDLSFNVLTDAGAKHLCQRLRQPSCKLQRLQLVSCGLTSDCCQDLASVLSASPSLKELDLQQNNLDDVGVRLLCEGLRHPACKLIRLGLDQTTLSDEMRQELRALEQEKPQLLIFSRRKPSVMTPTEGLDTGEMSNSTSSLKRQRLGSERAASHVAQANLKLLDVSKIFPIAEIAEESSPEVVPVELLCVPSPASQGDLHTKPLGTDDDFWGPTGPVATEVVDKEKNLYRVHFPVAGSYRWPNTGLCFVMREAVTVEIEFCVWDQFLGEINPQHSWMVAGPLLDIKAEPGAVEAVHLPHFVALQGGHVDTSLFQMAHFKEEGMLLEKPARVELHHIVLENPSFSPLGVLLKMIHNALRFIPVTSVVLLYHRVHPEEVTFHLYLIPSDCSIRKAIDDLEMKFQFVRIHKPPPLTPLYMGCRYTVSGSGSGMLEILPKELELCYRSPGEDQLFSEFYVGHLGSGIRLQVKDKKDETLVWEALVKPGDLMPATTLIPPARIAVPSPLDAPQLLHFVDQYREQLIARVTSVEVVLDKLHGQVLSQEQYERVLAENTRPSQMRKLFSLSQSWDRKCKDGLYQALKETHPHLIMELWEKGSKKGLLPLSS

SEQ ID NO: 2685 - protein, 1212 aa, Homo sapiens
LGTSPRHPLNSGTEMAGGAWGRLACYLEFLKKEELKEFQLLLANKAHSRSSSGETPAQPEKTSGMEVASYLVAQYGEQRAWDLALHTWEQMGLRSLCAQAQEGAGHSPSFPYSPSEPHLGSPSQPTSTAVLMPWIHELPAGCTQGSERRVLRQLPDTSGRRWREISASLLYQALPSSPDHESPSQESPNAPTSTAVLGSWGSPPQPSLAPREQEAPGTQWPLDETSGIYYTEIREREREKSEKGRPPWAAVVGTPPQAHTSLQPHHHPWEPSVRESLCSTWPWKNEDFNQKFTQLLLLQRPHPRSQDPLVKRSWPDYVEENRGHLIEIRDLFGPGLDTQEPRIVILQGAAGIGKSTLARQVKEAWGRGQLYGDRFQHVFYFSCRELAQSKVVSLAELIGKDGTATPAPIRQILSRPERLLFILDGVDEPGWVLQEPSSELCLHWSQPQPADALLGSLLGKTILPEASFLITARTTALQNLIPSLEQARWVEVLGFSESSRKEYFYRYFTDERQAIRAFRLVKSNKELWALCLVPWVSWLACTCLMQQMKRKEKLTLTSKTTTTLCLHYLAQALQAQPLGPQLRDLCSLAAEGIWQKKTLFSPDDLRKHGLDGAIISTFLKMGILQEHPIPLSYSFIHLCFQEFFAAMSYVLEDEKGRGKHSNCIIDLEKTLEAYGIHGLFGASTTRFLLGLLSDEGEREMENIFHCRLSQGRNLMQWVPSLQLLLQPHSLESLHCLYETRNKTFLTQVMAHFEEMGMCVETDMELLVCTFCIKFSRHVKKLQLIEGRQHRSTWSPTMVVLFRWVPVTDAYWQILFSVLKVTRNLKELDLSGNSLSHSAVKSLCKTLRRPRCLLETLRLAGCGLTAEDCKDLAFGLRANQTLTELDLSFNVLTDAGAKHLCQRLRQPSCKLQRLQLVSCGLTSDCCQDLASVLSASPSLKELDLQQNNLDDVGVRLLCEGLRHPACKLIRLGLDQTTLSDEMRQELRALEQEKPQLLIFSRRKPSVMTPTEGLDTGEMSNSTSSLKRQRLGSERAASHVAQANLKLLDVSKIFPIAEIAEESSPEVVPVELLCVPSPASQGDLHTKPLGTDDDFWGPTGPVATEVVDKEKNLYRVHFPVAGSYRWPNTGLCFVMREAVTVEIEFCVWDQFLGEINPQHSWMVAGPLLDIKAEPGAVEAVHLPHFVALQGREKKQCHQTPSESWSHETGASHRR

SEQ ID NO: 2686 - protein, 360 aa, Homo sapiens
LRGGGPWEGACPGLLTISSLPKAQGTGNDCPHKKSATLLPSFTVTPTVTESTGTTSHRTTKSHKTTTHRTTTTGTTSHGPTTATHNPTTTSHGNVTVHPTSNSTATSQGPSTATHSPATTSHGNATVHPTSNSTATSPGFTSSAHPEPPPPSPSPSPTSKETIGDYTWTNGSQPCVHLQAQIQIRVMYTTQGGGEAWGISVLNPNKTKVQGSCEGAHPHLLLSFPYGHLSFGFMQDLQQKVVYLSYMAVEYNVSFPHAAQWTFSAQNASLRDLQAPLGQSFSCSNSSIILSPAVHLDLLSLRLQAAQLPHTGVFGQSFSCPSDRSILLPLIIGLILLGLLALVLIAFCIIRRRPSAYQAL

SEQ ID NO: 2687 - protein, 107 aa, Homo sapiens
MATGQLSFHPLQDSASFPLLSLLSHCGELLTNLLLPSIPPFPPPTFIPTSTSLQIPTCPILPPGFSCPSDRSILLPLIIGLILLGLLALVLIAFCIIRRRPSAYQAL

SEQ ID NO: 2688 - protein, 160 aa, Homo sapiens
MLRPTFRSVGLASRSWGEALFLMLQTITICFLVMHYRGQTVKGVAFLACYGLVLLVLLSPLTPLTVVTLLQASNVPAVVVGRLLQAATNYHNGHTGQLSAITVFLLFGGSLARIFTSIQETGDPLMAGTFVVSSLCNGLIAAQLLFYWNAKPPHKQKKAQ

SEQ ID NO: 2689 - protein, 92 aa, Homo sapiens
LGPWSTASLTTSHSGVAFLACYGLVLLVLLSPLTPLTVVTLLQASNVPAVVVGRLLQAATNYHNGHTGQLSAITVFLLFGGSLARIFTSIQG

SEQ ID NO: 2690 - protein, 112 aa, Homo sapiens
LLPGHALQRTDCERCWGLTQEQAVWFLGTLLGTQLLQAATNYHNGHTGQLSAITVFLLFGGSLARIFTSIQETGDPLMAGTFVVSSLCNGLIAAQLLFYWNAKPPHKQKKAQ

SEQ ID NO: 2691 - protein, 122 aa, Homo sapiens
VSSWDGVARTKRWWEWRGLRISPKAWASPLPLCRLVAALSVTLGLFAVELAGFLSGVSMFNSTQSLISIGAHCSASVALSFFIFERWECTTYWYIFVFCSALPAVTEMALFVTVFGLKKKPF

SEQ ID NO: 2692 - protein, 79 aa, Homo sapiens
LSPRAMGRVSGLVPSRFLTLLAHLVVVITLFWSRDSNIQACLPLTFTPEEYDKQDIHALPAVTEMALFVTVFGLKKKPF

SEQ ID NO: 2693 - protein, 156 aa, Homo sapiens
LSLNFQPQRPPPLSPRAMGRVSGLVPSRFLTLLAHLVVVITLFWSRDSNIQACLPLTFTPEEYDKQDIHPLPLCRLVAALSVTLGLFAVELAGFLSGVSMFNSTQSLISIGAHCSASVALSFFIFERWECTTYCALPAVTEMALFVTVFGLKKKPF

SEQ ID NO: 2694 - protein, 163 aa, Homo sapiens
LSLNFQPQRPPPLSPRAMGRVSGLVPSRFLTLLAHLVVVITLFWSRDSNIQACLPLTFTPEEYDKQDIHPLPLCRLVAALSVTLGLFAVELAGFLSGVSMFNSTQSLISIGAHCSASVALSFFIFERWECTTYWYIFVFCSALPAVTEMALFVTVFGLKKKPF

SEQ ID NO: 2695 - protein, 115 aa, Homo sapiens
VSSWDGVARTKRWWEWRGLRISPKAWASPLPLCRLVAALSVTLGLFAVELAGFLSGVSMFNSTQSLISIGAHCSASVALSFFIFERWECTTYWYIFVFCRCGSIQYLGMREEGWP

SEQ ID NO: 2696 - protein, 124 aa, Homo sapiens
LSLNFQPQRPPPLSPRAMGRVSGLVPSRFLTLLAHLVVVITLFWSRDSNIQACLPLTFTPEEYDKQDIQLVAALSVTLGLFAVELAGFLSGVSMFNSTQSLICILSACPPFPHDPLLSGLPSAT

SEQ ID NO: 2697 - protein, 69 aa, Homo sapiens
LSLNFQPQRPPPLSPRAMGRVSGLVPSRFLTLLAHLVVVITLFWSRDSNIQACLPLTFTPEEYDKQDIQ

SEQ ID NO: 2698 - protein, 67 aa, Homo sapiens
LATGAHLGPMAFHLSGSCPLPHDLQEHPILFPKISWTDKDQNAKISADSIICLLMFLLWLCLFSVLL

SEQ ID NO: 2699 - protein, 123 aa, Homo sapiens
MAMLVLVPGRVMRPLGGQLWRFLPRGLEFWGPAEGTARVLLRQFCARQAEAWRASGRPGYCLGTRPLSTARPPPPWSQKGPGDSTRPSKPGPVSWKSLAITFAIGGALLAGMKHVKKEKAESK

SEQ ID NO: 2700 - protein, 395 aa, Homo sapiens
VPPLGRGGPRPVGPGHQRPSPEAQKRQAEARSGRYGHARRVSRGCPSPGAPSVGGARGPAGPAMLLETQDALYVALELVIAALSVAGNVLVCAAVGTANTLQTPTNYFLVSLAAADVAVGLFAIPFAITISLGFCTDFYGCLFLACFVLVLTQSSIFSLLAVAVDRYLAICVPLRYKSLVTGTRARGVIAVLWVLAFGIGLTPFLGWNSKDSATNNCTEPWDGTTNESCCLVKCLFENVVPMSYMVYFNFFGCVLPPLLIMLVIYIKIFLVACRQLQRTELMDHSRTTLQREIHAAKSLAMIVGIFALCWLPVHAVNCVTLFQPAQGKNKPKWAMNMAILLSHANSVVNPIVYAYRNRDFRYTFHKIISRYLLCQADVKSGNGQAGVQPALGVGL

SEQ ID NO: 2701 - protein, 243 aa, Homo sapiens [sequence omitted]

SEQ ID NO: 2702 - protein, 45 aa, Homo sapiens
VTQHSLHKFALRQPGAFRGGWLCWVSLFVSLWVDVVGDWQDPGIR

SEQ ID NO: 2703 - protein, 213 aa, Homo sapiens
LPSPRGGKAATEARGSGKARGFGPSSHISGSRPNRQTMGAPATRRCVEWLLGLYFLSHIPITLFMDLQAVLPRELYPVEFRNLLKWYAKEFKDPLLQEPPAWFKSFLFCELVFQLPFFPIATYAFLKGSCKWIRTPAIIYSVHTMTTLIPILSTFLFEDFSKASGFKGQRPETLHERLTLVSVYAPYLLIPFILLIFMLRSPYYKYEEKRKKK

SEQ ID NO: 2704 - protein, 163 aa, Homo sapiens
LSVSEGSSLDEVVSKVTCQHGSASFLFDKFRNLLKWYAKEFKDPLLQEPPAWFKSFLFCELVFQLPFFPIATYAFLKGSCKWIRTPAIIYSVHTMTTLIPILSTFLFEDFSKASGFKGQRPETLHERLTLVSVYAPYLLIPFILLIFMLRSPYYKYEEKRKKK

SEQ ID NO: 2705 - protein, 274 aa, Homo sapiens
LDWPERDPGSQNRPRRRPRGRTAGRASMPRLLHPALPLLLGATLTFRALRRALCRLPLPVHVRADPLRTWRWHNLLVSFAHSIVSGIWALLCVWQTPDMLVEIETAWSLSGYLLVCFSAGYFIHDTVDIVASGQTRASWEYLVHHVMAMGAFFSGIFWSSFVGGGVLTLLVEVSNIFLTIRMMMKISNAQDHLLYRVNKYVNLVMYFLFRLAPQAYLTHFFLRYVNQRTLGTFLLGILLMLDVMIIIYFSRLLRSDFCPEHVPKKQHKDKFLTE

SEQ ID NO: 2706 - protein, 202 aa, Homo sapiens
VAMGYSAVPKCPPRGRGRDSVWQTPDMLVEIETAWSLSGYLLVCFSAGYFIHDTVDIVASGQTRASWEYLVHHVMAMGAFFSGIFWSSFVGGGVLTLLVEVSNIFLTIRMMMKISNAQDHLLYRVNKYVNLVMYFLFRLAPQAYLTHFFLRYVNQRTLGTFLLGILLMLDVMIIIYFSRLLRSDFCPEHVPKKQHKDKFLTE

SEQ ID NO: 2707 - protein, 262 aa, Homo sapiens
VASMLLRSWFGNKDFQALPILARLPSMPTDMEHTGHYLHLAFLMTTVFSLSPGTKANYTRLWANSTSSWDSVIQNKTGRNQNENINTNPITPEVDYKGNSTNMPETSHIVALTSKSEQELYIPSVVSNSPSTVQSIENTSKSHGEIFKKDVCAENNNNMAMLICLIIIAVLFLICTFLFLSTVVLANKVSSLRRSKQVGKRQPRSNGDFLASGLWPAESDTWKRTKQLTGPNLVMQSTGVLTATRERKDEEGTEKLTNKQIG

SEQ ID NO: 2708 - protein, 246 aa, Homo sapiens
LTKHFVRLPSMPTDMEHTGHYLHLAFLMTTVFSLSPGTKANYTRLWANSTSSWDSVIQNKTGRNQNENINTNPITPEVDYKGNSTNMPETSHIVALTSKSEQELYIPSVVSNSPSTVQSIENTSKSHGEIFKKDVCAENNNNMAMLICLIIIAVLFLICTFLFLSTVVLANKVSSLRRSKQVGKRQPRSNGDFLASGLWPAESDTWKRTKQLTGPNLVMQSTGVLTATRERKDEEGTEKLTNKQIG

SEQ ID NO: 2709 - protein, 624 aa, Homo sapiens
VPDRNAAERGASRTRTRRAGKWKRTQVPLLGEECADMDLARKEFLRGNGLAAGKMNISIDLDTNYAELVLNVGRVTLGENNRKKMKDCQLRKQQNENVSRAVCALLNSGGGVIKAEVENKGYSYKKDGIGLDLENSFSNMLPFVPNFLDFMQNGNYFHIFVKSWSLETSGPQIATLSSSLYKRDVTSAKVMNASAALEFLKDMEKTGGRAYLRPEFPAKRACVDVQEESNMEALAADFFNRTELGYKEKLTFTESTHVEIKNFSTEKLLQRITEILPQYVSAFANTDGGYLFVGLNEDKEVIGFKAEKSYLTKLEEVTKNSIGKLPVHHFCVEKGTINYLCKFLGVYDKGRLCGYVYALRVERFCCAVFAKKPDSWHVKDNRVKQLTEKEWIQFMVDSEPVCEELPSPASTSSPVSQSYPLREYINFKIQPLRYHLPGLSEKITCAPKTFCRNLFSQHEGLKQLICEEMGSVNKGSLIFSRSWSLDLGLQENHKVLCDALLISQDKPPVLYTFHMVQDEEFKDYSTQTAQTLKQKLAKIGGYTKKVCVMTKIFYLSPEGKTSCQYDLNSQVIYPESYYWTTAQTMKDLEKALSNILPKENQIFLFVCLFRFCLFVCWFVCFFLR

SEQ ID NO: 2710 - protein, 706 aa, Homo sapiens
LRAAQRLWRLQCLRWITLRPIVLQAPSTLEALLQSLVIVLLGFRSLLSDLCSYEVLNLLTAQQYEIFSRSFHKNRELFVHGLPGLGKTIMAMKIMEKIRNVFHCEAHRILYICESQFLRNFIRKEFLRGNGLAAGKMNISIDLDTNYAELVLNVGRVTLGENNRKKMKDCQLRKQQNENVSRAVCALLNSGGGVIKAEVENKGYSYKKDGIGLDLENSFSNMLPFVPNFLDFMQNGNYFHIFVKSWSLETSGPQIATLSSSLYKRDVTSAKVMNASAALEFLKDMEKTGGRAYLRPEFPAKRACVDVQEESNMEALAADFFNRTELGYKEKLTFTESTHVEIKNFSTEKLLQRITEILPQYVSAFANTDGGYLFVGLNEDKEVIGFKAEKSYLTKLEEVTKNSIGKLPVHHFCVEKGTINYLCKFLGVYDKGRLCGYVYALRVERFCCAVFAKKPDSWHVKDNRVKQLTEKEWIQFMVDSEPVCEELPSPASTSSPVSQSYPLREYINFKIQPLRYHLPGLSEKITCAPKTFCRNLFSQHEGLKQLICEEMGSVNKGSLIFSRSWSLDLGLQENHKVLCDALLISQDKPPVLYTFHMVQDEEFKDYSTQTAQTLKQKLAKIGGYTKKVCVMTKIFYLSPEGKTSCQYDLNSQVIYPESYYWTTAQTMKDLEKALSNILPKENQIFLFVCLFRFCLFVCWFVCFFLR

SEQ ID NO: 2711 - protein, 551 aa, Homo sapiens
LPARPAPRSAVSSPPAPPPAPGTARPQPEPGPPPSSGPGQQAGRGQVRAPTMRGELWLLVLVLREAARALSPQPGAGHDEGPGSGWAAKGTVRGWNRRARESPGHVSEPDRTQLSQDLGGGTLAMDTLPDNRTRVVEDNHSYYVSRLYGPSEPHSRELWVDVAEANRSQVKIHTILSNTHRQASRVVLSFDFPFYGHPLRQITIATGGFIFMGDVIHRMLTATQYVAPLMANFNPGYSDNSTVVYFDNGTVFVVQWDHVYLQGWEDKGSFTFQAALHHDGRIVFAYKEIPMSVPEISSSQHPVKTGLSDAFMILNPSPDVPESRRRSIFEYHRIELDPSKVTSMSAVEFTPLPTCLQHRSCDACMSSDLTFNCSWCHVLQRCSSGFDRYRQEWMDYGCAQEAEGRMCEDFQDEDHDSASPDTSFSPYDGDLTTTSSSLFIDSLTTEDDTKLNPYAGGDGLQNNLSPKTKGTPVHLGTIVGIVLAVLLVAAIILAGIYINGHPTSNAALFFIERRPHHWPAMKFRSHPDHSTYAEVEPSGHEKEGFMEAEQC

SEQ ID NO: 2712 - protein, 1056 aa, Homo sapiens
VEEEGCLRKYKNEVVKLRFPSIGTGETRGAPRAAARPFPRGPLLRRAPGPHPSQHPAPRALPAGSSRSHGAGAAVSTMELAALCRWGLLLALLPPGAASTQDNYLSTDVGSCTLVCPLHNQEVTAEDGTQRCEKCSKPCARVCYGLGMEHLREVRAVTSANIQEFAGCKKIFGSLAFLPESFDGDPASNTAPLQPEQLQVFETLEEITGYLYISAWPDSLPDLSVFQNLQVIRGRILHNGAYSLTLQGLGISWLGLRSLRELGSGLALIHHNTHLCFVHTVPWDQLFRNPHQALLHTANRPEDECVGEGLACHQLCARGHCWGPGPTQCVNCSQFLRGQECVEECRVLQGLPREYVNARHCLPCHPECQPQNGSVTCFGPEADQCVACAHYKDPPFCVARCPSGVKPDLSYMPIWKFPDEEGACQPCPINCTHSCVDLDDKGCPAEQRASPLTSIISAVVGILLVVVLGVVFGILIKRRQQKIRKYTMRRLLQETELVEPLTPSGAMPNQAQMRILKETELRKVKVLGSGAFGTVYKGIWIPDGENVKIPVAIKVLRENTSPKANKEILDEAYVMAGVGSPYVSRLLGICLTSTVQLVTQLMPYGCLLDHVRENRGRLGSQDLLNWCMQIAKGMSYLEDVRLVHRDLAARNVLVKSPNHVKITDFGLARLLDIDETEYHADGGKVPIKWMALESILRRRFTHQSDVWSYGVTVWELMTFGAKPYDGIPAREIPDLLEKGERLPQPPICTIDVYMIMVKCWMIDSECRPRFRELVSEFSRMARDPQRFVVIQNEDLGPASPLDSTFYRSLLEDDDMGDLVDAEEYLVPQQGFFCPDPAPGAGGMVHHRHRSSSTRSGGGDLTLGLEPSEEEAPRSPLAPSEGAGSDVFDGDLGMGAAKGLQSLPTHDPSPLQRYSEDPTVPLPSETDGYVAPLTCSPQPEYVNQPDVRPQPPSPREGPLPAARPAGATLERPKTLSPGKNGVVKDVFAFGGAVENPEYLTPQGGAAPQPHPPPAFSPAFDNLYYWDQDPPERGAPPSTFKGTPTAENPEYLGLDVPV

SEQ ID NO: 2713 - protein, 1289 aa, Homo sapiens
LRRAPGPHPSQHPAPRALPAGSSRSHGAGAAVSTMELAALCRWGLLLALLPPGAASTQVCTGTDMKLRLPASPETHLDMLRHLYQGCQVVQGNLELTYLPTNASLSFLQDIQEVQGYVLIAHNQVRQVPLQRLRIVRGTQLFEDNYALAVLDNGDPLNNTTPVTGASPGGLRELQLRSLTEILKGGVLIQRNPQLCYQDTILWKDIFHKNNQLALTLIDTNRSRACHPCSPMCKGSRCWGESSEDCQSLTRTVCAGGCARCKGPLPTDCCHEQCAAGCTGPKHSDCLACLHFNHSGICELHCPALVTYNTDTFESMPNPEGRYTFGASCVTACPYNYLSTDVGSCTLVCPLHNQEVTAEDGTQRCEKCSKPCARVCYGLGMEHLREVRAVTSANIQEFAGCKKIFGSLAFLPESFDGDPASNTAPLQPEQLQVFETLEEITGYLYISAWPDSLPDLSVFQNLQVIRGRILHNGAYSLTLQGLGISWLGLRSLRELGSGLALIHHNTHLCFVHTVPWDQLFRNPHQALLHTANRPEDECVGEGLACHQLCARGHCWGPGPTQCVNCSQFLRGQECVEECRVLQGLPREYVNARHCLPCHPECQPQNGSVTCFGPEADQCVACAHYKDPPFCVARCPSGVKPDLSYMPIWKFPDEEGACQPCPINCTHSCVDLDDKGCPAEQRASPLTSIISAVVGILLVVVLGVVFGILIKRRQQKIRKYTMRRLLQETELVEPLTPSGAMPNQAQMRILKETELRKVKVLGSGAFGTVYKGIWIPDGENVKIPVAIKVLRENTSPKANKEILDEAYVMAGVGSPYVSRLLGICLTSTVQLVTQLMPYGCLLDHVRENRGRLGSQDLLNWCMQIAKGMSYLEDVRLVHRDLAARNVLVKSPNHVKITDFGLARLLDIDETEYHADGGKVPIKWMALESILRRRFTHQSDVWSYGVTVWELMTFGAKPYDGIPAREIPDLLEKGERLPQPPICTIDVYMIMVKCWMIDSECRPRFRELVSEFSRMARDPQRFVVIQNEDLGPASPLDSTFYRSLLEDDDMGDLVDAEEYLVPQQGFFCPDPAPGAGGMVHHRHRSSSTRSGGGDLTLGLEPSEEEAPRSPLAPSEGAGSDVFDGDLGMGAAKGLQSLPTHDPSPLQRYSEDPTVPLPSETDGYVAPLTCSPQPEYVNQPDVRPQPPSPREGPLPAARPAGATLERPKTLSPGKNGVVKDVFAFGGAVENPEYLTPQGGAAPQPHPPPAFSPAFDNLYYWDQDPPERGAPPSTFKGTPTAENPEYLGLDVPV

SEQ ID NO: 2714 - protein, 103 aa, Homo sapiens
VFKKLELLFFCWRPEFDGLCVCVLFFFFFPLCLVNPPFPLLLPPISYRTTCSNTIDLPMSPRTLDSLMQFGNNGEGAEPSAGGQFESLTFDMELTSECATSPM

SEQ ID NO: 2715 - protein, 56 aa, Homo sapiens
LQRFFALTSLRLVFLLAFGLMIIVCIDQWKNKIWPEIKAGALCTLGCSACPSSATM

SEQ ID NO: 2716 - protein, 708 aa, Homo sapiens
VDRVLLLQFPAAQHCSFWIGRNEEQHFYWGGSQPGIQRCACGLDRSCVDPALYCNCDADQPQWRTDKGLLTFVDHLPVTQVVIGDTNRSTSEAQFFLRPLRCYGDRNSWNTISFHTGAALRFPPIRANHSLDVSFYFRTSAPSGVFLENMGGPYCQWRRPYVRVELNTSRDVVFAFDVGNGDENLTVHSDDFEFNDDEWHLVRAEINVKQARLRVDHRPWVLRPMPLQTYIWMEYDQPLYVGSAELKRRPFVGCLRAMRLNGVTLNLEGRANASEGTSPNCTGHCAHPRLPCFHGGRCVERYSYYTCDCDLTAFDGPYCNHDIGGFFEPGTWMRYNLQSALRSAAREFSHMLSRPVPGYEPGYIPGYDTPGYVPGYHGPGYRLPDYPRPGRPVPGYRGPVYNVTGEEVSFSFSTSSAPAVLLYVSSFVRDYMAVLIKDDGTLQLRYQLGTSPYVYQLTTRPVTDGQPHSINITRVYRNLFIQVDYFPLTEQKFSLLVDSQLDSPKALYLGRVMETGVIDPEIQRYNTPGFSGCLSGVRFNNVAPLKTHFRTPRPMTAELAEALRVQGELSESNCGAMPRLVSEVPPELDPWYLPPDFPYYHDEGWVAILLGFLVAFLLLGLVGMLVLFYLQNHRYKGSYHTNEPKAAHEYHPGSKPPLPTSGPAQVPTPTAAPNQAPASAPAPAPTPAPAPGPRDQNLPQILEESRSE

SEQ ID NO: 2717 - protein, 1047 aa, Homo sapiens
LGGCGRRKMARALCPLQALWLLEWVLLLLGPCAAPPAWALNLDPVQLTFYAGPNGSQFGFSLDFHKDSHGRVAIVVGAPRTLGPSQEETGGVFLCPWRAEGGQCPSLLFDLRDETRNVGSQTLQTFKARQGLGASVVSWSDVIVACAPWQHWNVLEKTEEAEKTPVGSCFLAQPESGRRAEYSPCRGNTLSRIYVENDFSWDKRYCEAGFSSVVTQAGELVLGAPGGYYFLGLLAQAPVADIFSSYRPGILLWHVSSQSLSFDSSNPEYFDGYWGYSVAVGEFDGDLNTTEYVVGAPTWSWTLGAVEILDSYYQRLHRLRGEQMASYFGHSVAVTDVNGDGRHDLLVGAPLYMESRADRKLAEVGRVYLFLQPRGPHALGAPSLLLTGTQLYGRFGSAIAPLGDLDRDGYNDIAVAAPYGGPSGRGQVLVFLGQSEGLRSRPSQVLDSPFPTGSAFGFSLRGAVDIDDNGYPDLIVGAYGANQVAVYRAQPVVKASVQLLVQDSLNPAVKSCVLPQTKTPVSCFNIQMCVGATGHNIPQKLSLNAELQLDRQKPRQGRRVLLLGSQQAGTTLNLDLGGKHSPICHTTMAFLRDEADFRDKLSPIVLSLNVSLPPTEAGMAPAVVLHGDTHVQEQTRIVLDCGEDDVCVPQLQLTASVTGSPLLVGADNVLELQMDAANEGEGAYEAELAVHLPQGAHYMRALSNVEGFERLICNQKKENETRVVLCELGNPMKKNAQIGIAMLVSVGNLEEAGESVSFQLQIRSKNSQNPNSKIVLLDVPVRAEAQVELRGNSFPASLVVAAEEGEREQNSLDSWGPKVEHTYELHNNGPGTVNGLHLSIHLPGQSQPSDLLYILDIQPQGGLQCFPQPPVNPLKVDWGLPIPSPSPIHPAHHKRDRRQIFLPEPEQPSRLQDPVLVSCDSAPCTVVQCDLQEMARGQRAMVTVLAFLWLPSLYQRPLDQFVLQSHAWFNVSSLPYAVPPLSLPRGEAQVWTQLLRALEERAIPIWWVLVGVLGGLLLLTILVLAMWKVGFFKRNRPPLEEDDEEGE

SEQ ID NO: 2718 - protein, 170 aa, Homo sapiens
LLGPAGQRSHAAPMRPLPPVGDVRLELSPPPPLLPVPVVSGSPVGSSGRLMASSSSLVPDRLRLPLCFLGVFVCYFYYGILQEKITRGKYGEGAKQETFTFALTLVFIQCVINAVFAKIWWIVPGAGSMLPVLSPIWVPWSPAIQHYSLSTTQLRSLVNPASQSQSCSLG

SEQ ID NO: 2719 - protein, 145 aa, Homo sapiens
LIGKISRARDQSRGCRFPWPSGMEPRTRVGPLLVLPDACKQPIRPRPWCHSRNTVSSCLGTRGKYGEGAKQETFTFALTLVFIQCVINAVFAKIWWIVPGAGSMLPVLSPIWVPWSPAIQHYSLSTTQLRSLVNPASQSQSCSLG

SEQ ID NO: 2720 - protein, 331 aa, Homo sapiens
LTSDISAPFTRRNPGAGARSAGVTMTKAGSKGGNLRDKLDGNELDLSLSDLNEVPVKELAALPKATILDLSCNKLTTLPSDFCGLTHLVKLDLSKNKLQQLPADFGRLVNLQHLDLLNNKLVTLPVSFAQLKNLKWLDLKDNPLDPVLAKVAGDCLDEKQCKQCANKVLQHMKAVQADQERERQRRLEVEREAEKKREAKQRAKEAQERELRKREKAEEKERRRKEYDALKAAKREQEKKPKKEANQAPKSKSGSRPRKPPPRKHTRSWAVLKLLLLLLLFGVAGGLVACRVTELQQQPLCTSVNTIYDNAVQGLRRHEILQWVLQTDSQQ

SEQ ID NO: 2721 - protein, 74 aa, Homo sapiens
MGRGPGCRKSSYLQELHHNLEGSSWSCEFSLYSVTIPDHLIKMLPPSIGFIELVTSYCCIAFFSFFSCTLNNLT

SEQ ID NO: 2722 - protein, 365 aa, Homo sapiens
LHRAAGRRAARGGGESGSSTRPAPPPAREGSEEPAPPAPRGRPGVISDAQPRPPSPVDPGEELRPTCVPFFRPGGSRRCAKGSPGGSCCRPCACPASGEPPPERRGSAAAPRARRALLRGRGTKQQPRARARGMERCPSLGVTLYALVVVLGLRATPAGGQHYLHIRPAPSDNLPLVDLIEHPDPIFDPKEKDLNETLLRSLLGGHYDPGFMATSPPEDRPGGGGGAAGGAEDLAELDQLLRQRPSGAMPSEIKGLEFSEGLAQGKKQRLSKKLRRKLQMWLWSQTFCPVLYAWNDLGSRFWPRYVKVGSCFSKRSCSVPEGMVCKPSKSVHLTVLRWRCQRRGGQRCGWIPIQYPIISECKCSC

SEQ ID NO: 2723 - protein, 32 aa, Homo sapiens [sequence omitted]

SEQ ID NO: 2724 - protein, 188 aa, Homo sapiens
VITVFLSFKMPSKSLVMEYLAHPSTLGLAVGVACGMCLGWSLRVCFGMLPKSKTSKTHTDTESEASILGDSGEYKMILVVRNDLKMGKGKVAAQCSHAAVSAYKQIQRRNPEMLKQWEYCGQPKVVVKAPDEETLIALLAHAKMLGLTVSLIQDAGRTQIAPGSQTVLGIGPGPADLIDKVTGHLKLY

SEQ ID NO: 2725 - protein, 188 aa, Homo sapiens
LCFQLCKLMMPSKSLVMEYLAHPSTLGLAVGVACGMCLGWSLRVCFGMLPKSKTSKTHTDTESEASILGDSGEYKMILVVRNDLKMGKGKVAAQCSHAAVSAYKQIQRRNPEMLKQWEYCGQPKVVVKAPDEETLIALLAHAKMLGLTVSLIQDAGRTQIAPGSQTVLGIGPGPADLIDKVTGHLKLY

SEQ ID NO: 2726 - protein, 69 aa, Homo sapiens
LSPGGKYIFFNVFPAFLPKCVFFFGLLYPASSAVPGIGPSLQKPFQEYLEAQRQKLHHKSEMGTPQVRL

SEQ ID NO: 2727 - protein, 708 aa, Homo sapiens
LGPGAWHGACLGPVCLQARLLPPGSAPALPRPPPGPGVQPLPGRRSHARAAPAGRREWLRFQEAEYKFFEHHSTWAQAQRICTWFQAELTSVHSQAELDFLSHNLQKFSRAQEQHWWIGLHTSESDGRFRWTDGSIINFISWAPGKPRPVGKDKKCVYMTASREDWGDQRCLTALPYICKRSNVTKETQPPDLPTTALGGCPSDWIQFLNKCFQVQGQEPQSRVKWSEAQFSCEQQEAQLVTITNPLEQAFITASLPNVTFDLWIGLHASQRDFQWVEQEPLMYANWAPGEPSGPSPAPSGNKPTSCAVVLHSPSAHFTGRWDDRSCTEETHGFICQKGTDPSLSPSPAALPPAPGTELSYLNGTFRLLQKPLRWHDALLLCESRNASLAYVPDPYTQAFLTQAARGLRTPLWIGLAGEEGSRRYSWVSEEPLNYVGWQDGEPQQPGGCTYVDVDGAWRTTSCDTKLQGAVCGVSSGPPPPRRISYHGSCPQGLADSAWIPFREHCYSFHMELLLGHKEARQRCQRAGGAVLSILDEMENVFVWEHLQSYEGQSRGAWLGMNFNPKGGTLVWQDNTAVNYSNWGPPGLGPSMLSHNSCYWIQSNSGLWRPGACTNITMGVVCKLPRAEQSSFSPSALPENPAALVVVLMAVLLLLALLTAALILYRRRQSIERGAFEGARYSRSSSSPTEATEKNILVSDMEMNEQQE

SEQ ID NO: 2728 - protein, 156 aa, Homo sapiens
LPASSGLVAVFDYHRKKGYADLYSLHSWCGILVFVLYFVQWLVGFSFFLFPGASFSLRSRYRPQHIFFGATIFLLSVGTALLGLKEALLFNLGGKYSAFEPEGVLANVLGLLLACFGGAVLYILTRADWKRPSQAEEQALSMDFKTLTEGDSPGSQ

SEQ ID NO: 2729 - protein, 339 aa, Homo sapiens
LEGAVRNPGGVLRASSRGGCAHFGGGCAYLGGPCLSPGAAVRILRGVYISGGLCASWGAVCIRGGCAHLGVLCAAPLSSALSCSVCLSMEGGAAAATPTALPYYVAFSQLLGLTLVAMTGAWLGLYRGGIAWESDLQFNAHPLCMVIGLIFLQGNALLVYRVFRNEAKRTTKVLHGLLHIFALVIALVGLVAVFDYHRKKGYADLYSLHSWCGILVFVLYFVQWLVGFSFFLFPGASFSLRSRYRPQHIFFGATIFLLSVGTALLGLKEALLFNLGGKYSAFEPEGVLANVLGLLLACFGGAVLYILTRADWKRPSQAEEQALSMDFKTLTEGDSPGSQ

SEQ ID NO: 2730 - protein, 297 aa, Homo sapiens
MELLASCPRSRLSPWGGWAPPPSHSRDLRPLPQDDGWEGACGVCLSMEGGAAAATPTALPYYVAFSQLLGLTLVAMTGAWLGLYRGGIAWESDLQFNAHPLCMVIGLIFLQGNALLVYRVFRNEAKRTTKVLHGLLHIFALVIALVGLVAVFDYHRKKGYADLYSLHSWCGILVFVLYFVQWLVGFSFFLFPGASFSLRSRYRPQHIFFGATIFLLSVGTALLGLKEALLFNLGGKYSAFEPEGVLANVLGLLLACFGGAVLYILTRADWKRPSQAEEQALSMDFKTLTEGDSPGSQ

SEQ ID NO: 2731 - protein, 600 aa, Homo sapiens
LLSCGHGPGLGYCRTSQPPLPAALLRAPSAGPQPGGIPTDLVTDEAEASKFVEEYDRTSQVVWNEYAEANWNYNTNITTETSKILLQKNMQIANHTLKYGTQARKFDVNQLQNTTIKRIIKKVQDLERAALPAQELEEYNKILLDMETTYSVATVCHPNGSCLQLEPDLTNVMATSRKYEDLLWAWEGWRDKAGRAILQFYPKYVELINQAARLNGNMWAQTWSNIYDLVVPFPSAPSMDTTEAMLKQGWTPRRMFKEADDFFTSLGLLPVPPEFWNKSMLEKPTDGREVVCHASAWDFYNGKDFRIKQCTTVNLEDLVVAHHEMGHIQYFMQYKDLPVALREGANPGFHEAIGDVLALSVSTPKHLHSLNLLSSEGGSDEHDINFLMKMALDKIAFIPFSYLVDQWRWRVFDGSITKENYNQEWWSLRLKYQGLCPPVPRTQGDFDPGAKFHIPSSVPYIRTAMKLGFSRPWPEAMQLITGQPNMSASAMLSYFKPLLDWLRTENELHGEKLGWPQYNWTPNSARSEGPLPDSGRVSFLGLDLDAQQARVGQWLLLFLGIALLVATLGLSQRLFSIRHRSLHRHSHGPQFGSEVELRHS

SEQ ID NO: 2732 - protein, 548 aa, Homo sapiens
LELKAFKPLPDLTNVMATSRKYEDLLWAWEGWRDKAGRAILQFYPKYVELINQAARLNGYVDAGDSWRSMYETPSLEQDLERLFQELQPLYLNLHAYVRRALHRHYGAQHINLEGPIPAHLLGNMWAQTWSNIYDLVVPFPSAPSMDTTEAMLKQGWTPRRMFKEADDFFTSLGLLPVPPEFWNKSMLEKPTDGREVVCHASAWDFYNGKDFRIKQCTTVNLEDLVVAHHEMGHIQYFMQYKDLPVALREGANPGFHEAIGDVLALSVSTPKHLHSLNLLSSEGGSDEHDINFLMKMALDKIAFIPFSYLVDQWRWRVFDGSITKENYNQEWWSLRLKYQGLCPPVPRTQGDFDPGAKFHIPSSVPYIRYFVSFIIQFQFHEALCQAAGHTGPLHKCDIYQSKEAGQRLATAMKLGFSRPWPEAMQLITGQPNMSASAMLSYFKPLLDWLRTENELHGEKLGWPQYNWTPNSARSEGPLPDSGRVSFLGLDLDAQQARVGQWLLLFLGIALLVATLGLSQRLFSIRHRSLHRHSHGPQFGSEVELRHS

SEQ ID NO: 2733 - protein, 1000 aa, Homo sapiens
LSSRRPRPVLCPYRPRSQGRVLAMPARRLLLLLTLLLPGLGIFGSTSTVTLPETLLFVSTLDGSLHAVSKRTGSIKWTLKEDPVLQVPTHVEEPAFLPDPNDGSLYTLGSKNNEGLTKLPFTIPELVQASPCRSSDGILYMGKKQDIWYVIDLLTGEKQQTLSSAFADSLCPSTSLLYLGRTEYTITMYDTKTRELRWNATYFDYAASLPEDDVDYKMSHFVSNGDGLVVTVDSESGDVLWIQNYASPVVAFYVWQREGLRKVMHINVAVETLRYLTFMSGEVGRITKWKYPFPKETEAKSKLTPTLYVGKYSTSLYASPSMVHEGVAVVPRGSTLPLLEGPQTDGVTIGDKGECVITPSTDVKFDPGLKSKNKLNYLRNYWLLIGHHETPLSASTKMLERFPNNLPKHRENVIPADSEKKSFEEVINLVDQTSENAPTTVSRDVEEKPAHAPARPEAPVDSMLKDMATIILSTFLLIGWVAFIITYPLSMHQQQQLQHQQFQKELEKIQLLQQQQQQLPFHPPGDTAQDGELLDTSGPYSESSGTSSPSTSPRASNHSLCSGSSASKAGSSPSLEQDDGDEETSVVIVGKISFCPKDVLGHGAEGTIVYRGMFDNRDVAVKRILPECFSFADREVQLLRESDEHPNVIRYFCTEKDRQFQYIAIELCAATLQEYVEQKDFAHLGLEPITLLQQTTSGLAHLHSLNIVHRDLKPHNILISMPNAHGKIKAMISDFGLCKKLAVGRHSFSRRSGVPGTEGWIAPEMLSEDCKENPTYTVDIFSAGCVFYYVISEGSHPFGKSLQRQANILLGACSLDCLHPEKHEDVIARELIEKMIAMDPQKRPSAKHVLKHPFFWSLEKQLQFFQDVSDRIEKESLDGPIVKQLERGGRAVVKMDWRENITVPLQTDLRKFRTYKGGSVRDLLRAMRNKKHHYRELPAEVRETLGSLPDDFVCYFTSRFPHLLAHTYRAMELCSHERLFQPYYFHEPPEPQPPVTPDAL

SEQ ID NO: 2734 - protein, 226 aa, Homo sapiens
MWLPWALLLLWVPGCFALSKCRTVAGPVGGSLSVQCPYEKEHRTLNKYWCRPPQIFLCDKIVETKGSAGKRNGRVSIRDSPANLSFTVTLENLTEEDAGTYWCGVDTPWLRDFHDPVVEVEVSVFPASTSMTPASITAAKTSTITTAFPPVSSTTLFAVGATHSASIQEETEEVVNSQLPLLLSLLALLLLLLVGASLLAWRMFQKWIKAGDHSELSQNPKQVRGL

SEQ ID NO: 2735 - protein, 307 aa, Homo sapiens
LEERKRRNTSLGALGIHVIVPGCFALSKCRTVAGPVGGSLSVQCPYEKEHRTLNKYWCRPPQIFLCDKIVETKGSAGKRNGRVSIRDSPANLSFTVTLENLTEEDAGTYWCGVDTPWLRDFHDPVVEVEVSVFPASTSMTPASITAAKTSTITTAFPPVSSTTLFAVGATHSASIQEETEEVVNSQLPLLLSLLALLLLLLVGASLLAWRMFQKWIKAGDHSELSQNPKQAATQSELHYANLELLMWPLQEKPAPPREVEVEYSTVASPREELHYASVVFDSNTNRIAAQRPREEEPDSDYSVIRKT

SEQ ID NO: 2736 - protein, 665 aa, Homo sapiens
LEGLLLQGEEDDEHARPLAESLLLAIADLLFCPDFTVQSHRRSTVDSAEDVHSLDSCEYIWEAGVGFAHSPQPNYIHDMNRMELLKLLLTCFSEAMYLPPAPESGSTNPWVQFFCSTENRHALPLFTSLLNTVCAYDPVGYGIPYNHLLFSDYREPLVEEAAQVLIVTLDHDSASSASPTVDGTTTGTAMDDADPPGPENLFVNYLSRIHREEDFQFILKGIARLLSNPLLQTYLPNSTKKIQFHQELLVLFWKLCDFNKKFLFFVLKSSDVLDILVPILFFLNDARADQSRVGLMHIGVFILLLLSGERNFGVRLNKPYSIRVPMDIPVFTGTHADLLIVVFHKIITSGHQRLQPLFDCLLTIVVNVSPYLKSLSMVTANKLLHLLEAFSTTWFLFSAAQNHHLVFFLLEVFNNIIQYQFDGNSNLVYAIIRKRSIFHQLANLPTDPPTIHKALQRRRRTPEPLSRTGSQEGTSMEGSRPAAPAEPGTLKTSLVATPGIDKLTEKSQVSEDGTLRSLEPEPQQSLEDGSPAKGEPSQAWREQRRPSTSSASGQWSPTPEWVLSWKSKLPLQTIMRLLQVLVPQVEKICIDKGLTDESEILRFLQHGTLVGLLPVPHPILIRKYQANSGTAMWFRTYMWGVIYLRNVDPPVWYDTDVKLFEIQRV

SEQ ID NO: 2737 - protein, 812 aa, Homo sapiens
LEPELKPEPGWSLGGGRAGAGSRDMGSTDSKLNFRKAVIQLTTKTQPVEATDDAFWDQFWADTATSVQDVFALVPAAEIRAVREESPSNLATLCYKAVEKLVQGAESGCHSEKEKQIVLNCSRLLTRVLPYIFEDPDWRGFFWSTVPGAGRGGQGEEDDEHARPLAESLLLAIADLLFCPDFTVQSHRRSTVDSAEDVHSLDSCEYIWEAGVGFAHSPQPNYIHDMNRMELLKLLLTCFSEAMYLPPAPESGSTNPWVQFFCSTENRHALPLFTSLLNTVCAYDPVGYGIPYNHLLFSDYREPLVEEAAQVLIVTLDHDSASSASPTVDGTTTGTAMDDADPPGPENLFVNYLSRIHREEDFQFILKGIARLLSNPLLQTYLPNSTKKIQFHQELLVLFWKLCDFNKKFLFFVLKSSDVLDILVPILFFLNDARADQSRVGLMHIGVFILLLLSGERNFGVRLNKPYSIRVPMDIPVFTGTHADLLIVVFHKIITSGHQRLQPLFDCLLTIVVNVSPYLKSLSMVTANKLLHLLEAFSTTWFLFSAAQNHHLVFFLLEVFNNIIQYQFDGNSNLVYAIIRKRSIFHQLANLPTDPPTIHKALQRRRRTPEPLSRTGSQEGTSMEGSRPAAPAEPGTLKTSLVATPGIDKLTEKSQVSEDGTLRSLEPEPQQSLEDGSPAKGEPSQAWREQRRPSTSSASGQWSPTPEWVLSWKSKLPLQTIMRLLQVLVPQVEKICIDKGLTDESEILRFLQHGTLVGLLPVPHPILIRKYQANSGTAMWFRTYMWGVIYLRNVDPPVWYDTDVKLFEIQRV

SEQ ID NO: 2738 - protein, 809 aa, Homo sapiens
LARDMAQPLAFILDVPETPGDQGQGPSPYDESEVHDSFQQLIQEQSQCTAQEGLELQQREREVTGSSQQTLWRPEGTQSTATLRILASMPSRTIGRSRGAIISQYYNRTVQLRCRSSRPLLGNFVRSAWPSLRLYDLELDPTALEEEEKQSLLVKELQSLAVAQRDHMLRGMPLSLAEKRSLREKSRTPRGKWRGQPGSGGVCSCCGRLRYACVLALHSLGLALLSALQALMPWRYALKRIGGQFGSSVLSYFLFLKTLLAFNALLLLLLVAFIMGPQVAFPPALPGPAPVCTGLELLTGAGCFTHTVMYYGHYSNATLNQPCGSPLDGSQCTPRVGGLPYNMPLAYLSTVGVSFFITCITLVYSMAHSFGESYRVGSTSGIHAITVFCSWDYKVTQKRASRLQQDNIRTRLKELLAEWQLRHSPRSVCGRLRQAAVLGLVWLLCLGTALGCAVAVHVFSEFMIQSPEAAGQEAVLLVLPLVVGLLNLGAPYLCRVLAALEPHDSPVLEVYVAICRNLILKLAILGTLCYHWLGRRVGVLQGQCWEDFVGQELYRFLVMDFVLMLLDTLFGELVWRIISEKKLKRRRKPEFDIARNVLELIYGQTLTWLGVLFSPLLPAVQIIKLLLVFYVKKTSLLANCQAPRRPWLASHMSTVFLTLLCFPAFLGAAVFLCYAVWQVKPSSTCGPFRTLDTMYEAGRVWVRHLEAAGPRVSWLPWVHRYLMENTFFVFLVSALLLAVIYLNIQVVRGQRKVICLLKEQISNEGEDKIFLINKLHSIYERKEREERSRVGTTEEAAAPPALLTDEQDA

SEQ ID NO: 2739 - protein, 458 aa, Homo sapiens
LARDMAQPLAFILDVPETPGDQGQGPSPYDESEVHDSFQQLIQEQSQCTAQEGLELQQREREVTGSSQQTLWRPEGTQSTATLRILASMPSRTIGRSRGAIISQYYNRTVQLRCRSSRPLLGNFVRSAWPSLRLYDLELDPTALEEEEKQSLLVKELQSLAVAQRDHMLRGMPLSLAEKRSLREKSRTPRGKWRGQPGSGGVCSCCGRLRYACVLALHSLGLALLSALQALMPWRYALKRIGGQFGSSVLSYFLFLKTLLAFNALLLLLLVAFIMGPQVAFPPALPGPAPVCTGLELLTGAGCFTHTVMYYGHYSNATLNQPCGSPLDGSQCTPRVGGLPYNMPLAYLSTVGVSFFITCITLVYSMAHSFGESYRVGSTSGIHAITVFCSWDYKVTQKRASRLQQDNIRTRLKGEDKIFLINKLHSIYERKEREERSRVGTTEEAAAPPALLTDEQDA

SEQ ID NO: 2740 - protein, 76 aa, Homo sapiens
LGRRVGVLQGQCWEDFVGQELYRFLVMDFVLMLLDTLFGELVWRIISEKKLKRRRKPEFDIARNVLELIYGQTLTW

SEQ ID NO: 2741 - protein, 79 aa, Homo sapiens
VHLLSPVPAPQPLHPALRRNLILKLAILGTLCYHWLGRRVGVLQGQCWEDFVGQELYRFLVMDFVLMLLDTLFGELVWR

SEQ ID NO: 2742 - protein, 313 aa, Homo sapiens
LHSLGLALLSALQALMPWRYALKRIGGQFGSSVLSYFLFLKTLLAFNALLLLLLVAFIMGPQVAFPPALPGPAPVCTGLELLTGAGCFTHTVMYYGHYSNATLNQPCGSPLDGSQCTPRVGGLPYNMPLAYLSTVGVSFFITCITLVYSMAHSFGESYRVGSTSGIHAITVFCSWDYKVTQKRASRLQQDNIRTRLKELLAEWQLRHSPRSVCGRLRQAAVLGLVWLLCLGTALGCAVAVHVFSEFMIQSPEAAGQEAVLLVLPLVVGLLNLGAPYLCRVLAALEPHDSPVLEVYVAICRCVAAHENIIWCWS

SEQ ID NO: 2743 - protein, 196 aa, Homo sapiens
VQLRCRSSRPLLGNFVRSAWPSLRLYDLELDPTALEEEEKQSLLVKELQSLAVAQRDHMLRGMPLSLAEKRSLREKSRTPRGKWRGQPGSGGVCSCCGRLRYACVLALHSLGLALLSALQALMPWRYALKRIGGQFGSSVLSYFLFLKTLLAFNALLLLLLVAFIMGPQVAFPPALPGPAPVCTGLELLTGAVRKP

SEQ ID NO: 2744 - protein, 197 aa, Homo sapiens
VLLLGLLLAAVPLGYVVSSPTWPSLASIHSSWDCGLFTNYSAPWQVVPELVALGLPPIGQRALHYLGSHAFSFPLLIMLSLVLTVCVSQTQANARAIHRLRKQLVWVQEKWHLVEDLSRLLPEPGPSDSPGPKYPASQASRPQSFCPGCPCPGSPGHQAPRPGPSVVDAAGLRSPCPGQHGAPASARRFRFPSGAEL

SEQ ID NO: 2745 - protein, 478 aa, Homo sapiens
LQLPGEAEPTLLAMGGAVVDEGPTGVKAPDGGWGWAVLFGCFVITGFSYAFPKAVSVFFKELIQEFGIGYSDTAWISSILLAMLYGTGPLCSVCVNRFGCRPVMLVGGLFASLGMVAASFCRSIIQVYLTTGVITGLGLALNFQPSLIMLNRYFSKRRPMANGLAAAGSPVFLCALSPLGQLLQDRYGWRGGFLILGGLLLNCCVCAALMRPLVVTAQPGSGPPRPSRRLLDLSVFRDRGFVLYAVAASVMVLGLFVPPVFVVSYAKDLGVPDTKAAFLLTILGFIDIFARPAAGFVAGLGKVRPYSVYLFSFSMFFNGLADLAGSTAGDYGGLVVFCIFFGISYGMVGALQFEVLMAIVGTHKFSSAIGLVLLMEAVAVLVGPPSGGKLLDATHVYMYVFILAGAEVLTSSLILLLGNFFCIRKKPKEPQPEVAAAEEEKLHKPPADSGVDLREVEHFLKAEPEKNGEVVHTPETSV

SEQ ID NO: 2746 - protein, 479 aa, Homo sapiens
LLSLSGEAEPTLLAMGGAVVDEGPTGVKAPDGGWGWAVLFGCFVITGFSYAFPKAVSVFFKELIQEFGIGYSDTAWISSILLAMLYGTGPLCSVCVNRFGCRPVMLVGGLFASLGMVAASFCRSIIQVYLTTGVITGLGLALNFQPSLIMLNRYFSKRRPMANGLAAAGSPVFLCALSPLGQLLQDRYGWRGGFLILGGLLLNCCVCAALMRPLVVTAQPGSGPPRPSRRLLDLSVFRDRGFVLYAVAASVMVLGLFVPPVFVVSYAKDLGVPDTKAAFLLTILGFIDIFARPAAGFVAGLGKVRPYSVYLFSFSMFFNGLADLAGSTAGDYGGLVVFCIFFGISYGMVGALQFEVLMAIVGTHKFSSAIGLVLLMEAVAVLVGPPSGGKLLDATHVYMYVFILAGAEVLTSSLILLLGNFFCIRKKPKEPQPEVAAAEEEKLHKPPADSGVDLREVEHFLKAEPEKNGEVVHTPETSV

SEQ ID NO: 2747 - protein, 98 aa, Homo sapiens
LAMGGAVVDEGPTGVKAPDGGWGWAVLFGCFVITGFSYAFPKAVSVFFKELIQEFGIGYSDTAWISSILLAMLYGTGEGGLTPGPLSGALLADPAGRV

SEQ ID NO: 2748 - protein, 129 aa, Homo sapiens
LAMGGAVVDEGPTGVKAPDGGWGWAVLFGCFVITGFSYAFPKAVSVFFKELIQEFGIGYSDTAWISSILLAMLYGTGPLCSVCVNRFGCRPVMLVGGLFASLGMVAASFCRSIIQGWVWHSTSSPRSSC

SEQ ID NO: 2749 - protein, 245 aa, Homo sapiens
LAMGGAVVDEGPTGVKAPDGGWGWAVLFGCFVITGFSYAFPKAVSVFFKELIQEFGIGYSDTAWISSILLAMLYGTGPLCSVCVNRFGCRPVMLVGGLFASLGMVAASFCRSIIQVYLTTGVITGEWGRPVGRTCQEGQGPCTSAPGSRPLEDSRAGGCGVSRPHLVVPLSSGWVAGALHPGSLSLWEPGGRDEGLGLWGSLGGLSPHSLSSRVGFGTQLPALAHHAEPLLQQAAPHGQRAGGSR

SEQ ID NO: 2750 - protein, 186 aa, Homo sapiens
VLRMKLRAHGQESAIFNEVAPGYFSRDGWQLQVQGGVAQLVIKGARDSHAGLYMWHLVGHQRNNRQVTLEVSGAEPQSAPDTGFWPVPAVVTAVFILLVALVMFAWYRCRCSQQRREKKFFLLEPQMKVAALRAGAQQGLSRASAELWTPDSEPTPRPLALVFKPSPLGALELLSPQPLFPYAADP

SEQ ID NO: 2751 - protein, 1645 aa, Homo sapiens
VSAPFSRPAGHRQSVGEQEPRAQPARARSSARRRPGLGLGLPVERRRAERARPRPRPPPRPRPAARVPGPGQGKGRGGELSNRNRGKILAPRARPPLPLPAAPDAEWGQGQGRRTQDPVPAPLEPLEFGLLQLLALWGLGLALCCLPVSPRCLGTKAPGPLRPRAPTHRRRGAARPALSTMRGLGTCLATLAGLLLTAAGETFSGGCLFDEPYSTCGYSQSEGDDFNWEQVNTLTKPTSDPWMPSGSFMLVNASGRPEGQRAHLLLPQLKENDTHCIDFHYFVSSKSNSPPGLLNVYVKVNNGPLGNPIWNISGDPTRTWNRAELAISTFWPNFYQVIFEVITSGHQGYLAIDEVKVLGHPCTRTPHFLRIQNVEVNAGQFATFQCSAIGRTVAGDRLWLQGIDVRDAPLKEIKVTSSRRFIASFNVVNTTKRDAGKYRCMIRTEGGVGISNYAELVVKEPPVPIAPPQLASVGATYLWIQLNANSINGDGPIVAREVEYCTASGSWNDRQPVDSTSYKIGHLDPDTEYEISVLLTRPGEGGTGSPGPALRTRTKCADPMRGPRKLEVVEVKSRQITIRWEPFGYNVTRCHSYNLTVHYCYQVGGQEQVREEVSWDTENSHPQHTITNLSPYTNVSVKLILMNPEGRKESQELIVQTDEDLPGAVPTESIQGSTFEEKIFLQWREPTQTYGVITLYEITYKAVSSFDPEIDLSNQSGRVSKLGNETHFLFFGLYPGTTYSFTIRASTAKGFGPPATNQFTTKISAPSMPAYELETPLNQTDNTVTVMLKPAHSRGAPVSVYQIVVEEERPRRTKKTTEILKCYPVPIHFQNASLLNSQYYFAAEFPADSLQAAQPFTIGDNKTYNGYWNTPLLPYKSYRIYFQAASRANGETKIDCVQVATKGAATPKPVPEPEKQTDHTVKIAGVIAGILLFVIIFLGVVLVMKKRKLAKKRKETMSSTRQEMTVMVNSMDKSYAEQGTNCDEAFSFMDTHNLNGRSVSSPSSFTMKTNTLSTSVPNSYYPDPFVPTAILVPINDETHTMASDTSSLVQSHTYKKREPADVPYQTGQLHPAIRVADLLQHITQMKCAEGYGFKEEYESFFEGQSAPWDSAKKDENRMKNRYGNIIAYDHSRVRLQTIEGDTNSDYINGNYIDGYHRPNHYIATQGPMQETIYDFWRMVWHENTASIIMVTNLVEVGRVKCCKYWPDDTEIYKDIKVTLIETELLAEYVIRTFAVEKRGVHEIREIRQFHFTGWPDHGVPYHATGLLGFVRQVKSKSPPSAGPLVVHCSAGAGRTGCFIVIDIMLDMAEREGVVDIYNCVRELRSRRVNMVQTEEQYVFIHDAILEACLCGDTSVPASQVRSLYYDMNKLDPQTNSSQIKEEFRTLNMVTPTLRVEDCSIALLPRNHEKNRCMDILPPDRCLPFLITIDGESSNYINAALMDSYKQPSAFIVTQHPLPNTVKDFWRLVLDYHCTSVVMLNDVDPAQLCPQYWPENGVHRHGPIQVEFVSADLEEDIISRIFRIYNAARPQDGYRMVQQFQFLGWPMYRDTPVSKRSFLKLIRQVDKWQEEYNGGEGRTVVHCLNGGGRSGTFCAISIVCEMLRHQRTVDVFHAVKTLRNNKPNMVDLLDQYKFCYEVALEYLNSG

SEQ ID NO: 2752 - protein, 1632 aa, Homo sapiens
VSAPFSRPAGHRQSVGEQEPRAQPARARSSARRRPGLGLGLPVERRRAERARPRPRPPPRPRPAARVPGPGQGKGRGGELSNRNRGKILAPRARPPLPLPAAPDAEWGQGQGRRTQDPVPAPLEPLEFGLLQLLALWGLGLALCCLPVSPRCLGTKAPGPLRPRAPTHRRRGAARPALSTMRGLGTCLATLAGLLLTAAGETFSGGCLFDEPYSTCGYSQSEGDDFNWEQVNTLTKPTSDPWMPSGSFMLVNASGRPEGQRAHLLLPQLKENDTHCIDFHYFVSSKSNSPPGLLNVYVKVNNGPLGNPIWNISGDPTRTWNRAELAISTFWPNFYQVIFEVITSGHQGYLAIDEVKVLGHPCTRTPHFLRIQNVEVNAGQFATFQCSAIGRTVAGDRLWLQGIDVRDAPLKEIKVTSSRRFIASFNVVNTTKRDAGKYRCMIRTEGGVGISNYAELVVKEPPVPIAPPQLASVGATYLWIQLNANSINGDGPIVAREVEYCTASGSWNDRQPVDSTSYKIGHLDPDTEYEISVLLTRPGEGGTGSPGPALRTRTKCADPMRGPRKLEVVEVKSRQITIRWEPFGYNVTRCHSYNLTVHYCYQVGGQEQVREEVSWDTENSHPQHTITNLSPYTNVSVKLILMNPEGRKESQELIVQTDEDLPGAVPTESIQGSTFEEKIFLQWREPTQTYGVITLYEITYKAVSSFDPEIDLSNQSGRVSKLGNETHFLFFGLYPGTTYSFTIRASTAKGFGPPATNQFTTKISAPSMPAYELETPLNQTDNTVTVMLKPAHSRGAPVSVYQIVVEEERPRRTKKTTEILKCYPVPIHFQNASLLNSQYYFAAEFPADSLQAAQPFTIGDNKTYNGYWNTPLLPYKSYRIYFQAASRANGETKIDCVQVATKGAATPKPVPEPEKQTDHTVKIAGVIAGILLFVIIFLGVVLVMKKRKLAKKRKETMSSTRQEMTVMVNSMDKSYAEQGTNCDEAFSFMDTHNLNGRSVSSPSSFTMKTNTLSTSVPNSYYPDETHTMASDTSSLVQSHTYKKREPADVPYQTGQLHPAIRVADLLQHITQMKCAEGYGFKEEYESFFEGQSAPWDSAKKDENRMKNRYGNIIAYDHSRVRLQTIEGDTNSDYINGNYIDGYHRPNHYIATQGPMQETIYDFWRMVWHENTASIIMVTNLVEVGRVKCCKYWPDDTEIYKDIKVTLIETELLAEYVIRTFAVEKRGVHEIREIRQFHFTGWPDHGVPYHATGLLGFVRQVKSKSPPSAGPLVVHCSAGAGRTGCFIVIDIMLDMAEREGVVDIYNCVRELRSRRVNMVQTEEQYVFIHDAILEACLCGDTSVPASQVRSLYYDMNKLDPQTNSSQIKEEFRTLNMVTPTLRVEDCSIALLPRNHEKNRCMDILPPDRCLPFLITIDGESSNYINAALMDSYKQPSAFIVTQHPLPNTVKDFWRLVLDYHCTSVVMLNDVDPAQLCPQYWPENGVHRHGPIQVEFVSADLEEDIISRIFRIYNAARPQDGYRMVQQFQFLGWPMYRDTPVSKRSFLKLIRQVDKWQEEYNGGEGRTVVHCLNGGGRSGTFCAISIVCEMLRHQRTVDVFHAVKTLRNNKPNMVDLLDQYKFCYEVALEYLNSG

SEQ ID NO: 2753 - protein, 1438 aa, Homo sapiens
LERFKVGSIGGGCLFDEPYSTCGYSQSEGDDFNWEQVNTLTKPTSDPWMPSGSFMLVNASGRPEGQRAHLLLPQLKENDTHCIDFHYFVSSKSNSPPGLLNVYVKVNNGPLGNPIWNISGDPTRTWNRAELAISTFWPNFYQVIFEVITSGHQGYLAIDEVKVLGHPCTRTPHFLRIQNVEVNAGQFATFQCSAIGRTVAGDRLWLQGIDVRDAPLKEIKVTSSRRFIASFNVVNTTKRDAGKYRCMIRTEGGVGISNYAELVVKEPPVPIAPPQLASVGATYLWIQLNANSINGDGPIVAREVEYCTASGSWNDRQPVDSTSYKIGHLDPDTEYEISVLLTRPGEGGTGSPGPALRTRTKCADPMRGPRKLEVVEVKSRQITIRWEPFGYNVTRCHSYNLTVHYCYQVGGQEQVREEVSWDTENSHPQHTITNLSPYTNVSVKLILMNPEGRKESQELIVQTDEDLPGAVPTESIQGSTFEEKIFLQWREPTQTYGVITLYEITYKAVSSFDPEIDLSNQSGRVSKLGNETHFLFFGLYPGTTYSFTIRASTAKGFGPPATNQFTTKISAPSMPAYELETPLNQTDNTVTVMLKPAHSRGAPVSVYQIVVEEERPRRTKKTTEILKCYPVPIHFQNASLLNSQYYFAAEFPADSLQAAQPFTIGDNKTYNGYWNTPLLPYKSYRIYFQAASRANGETKIDCVQVATKGAATPKPVPEPEKQTDHTVKIAGVIAGILLFVIIFLGVVLVMKKRKLAKKRKETMSSTRQEMTVMVNSMDKSYAEQGTNCDEAFSFMDTHNLNGRSVSSPSSFTMKTNTLSTSVPNSYYPDETHTMASDTSSLVQSHTYKKREPADVPYQTGQLHPAIRVADLLQHITQMKCAEGYGFKEEYESFFEGQSAPWDSAKKDENRMKNRYGNIIAYDHSRVRLQTIEGDTNSDYINGNYIDGYHRPNHYIATQGPMQETIYDFWRMVWHENTASIIMVTNLVEVGRVKCCKYWPDDTEIYKDIKVTLIETELLAEYVIRTFAVEKRGVHEIREIRQFHFTGWPDHGVPYHATGLLGFVRQVKSKSPPSAGPLVVHCSAGAGRTGCFIVIDIMLDMAEREGVVDIYNCVRELRSRRVNMVQTEEQYVFIHDAILEACLCGDTSVPASQVRSLYYDMNKLDPQTNSSQIKEEFRTLNMVTPTLRVEDCSIALLPRNHEKNRCMDILPPDRCLPFLITIDGESSNYINAALMDSYKQPSAFIVTQHPLPNTVKDFWRLVLDYHCTSVVMLNDVDPAQLCPQYWPENGVHRHGPIQVEFVSADLEEDIISRIFRIYNAARPQDGYRMVQQFQFLGWPMYRDTPVSKRSFLKLIRQVDKWQEEYNGGEGRTVVHCLNGGGRSGTFCAISIVCEMLRHQRTVDVFHAVKTLRNNKPNMVDLLDQYKFCYEVALEYLNSG

SEQ ID NO: 2754 - protein, 312 aa, Homo sapiens
LSLARRLPRRDSARVGAQACPGSSMPEAGFQATNAFTECKFTCTSGKCLYLGSLVCNQQNDCGDNSDEENCLLVTEHPPPGIFNSELEFAQIIIIVVVVTVMVVVIVCLLNHYKVSTRSFINRPNQSRRREDGLPQIMHAPRSRDRFTAPSFIQRDRFSRFQPTYPYVQHEIDLPPTISLSDGEEPPPYQGPCTLQLRDPEQQMELNRESVRAPPNRTIFDSDLIDIAMYSGGPCPPSSNSGISASTCSSNGRMEGPPPTYSEVMGHHPGASFLHHQRSNAHRGSRLQFQQNNAESTIVPIKGKDRKPGNLV

SEQ ID NO: 2755 - protein, 330 aa, Homo sapiens
LSLARRLPRRDSARVGAQACPGSSMPEAGFQATNAFTECKFTCTSGKCLYLGSLVCNQQNDCGDNSDEENCLLVTEHPPPGIFNSELEFAQIIIIVVVVTVMVVVIVCLLNHYKVSTRSFINRPNQSRRREDGLPQEGCLWPSDSAAPRLGASEIMHAPRSRDRFTAPSFIQRDRFSRFQPTYPYVQHEIDLPPTISLSDGEEPPPYQGPCTLQLRDPEQQMELNRESVRAPPNRTIFDSDLIDIAMYSGGPCPPSSNSGISASTCSSNGRMEGPPPTYSEVMGHHPGASFLHHQRSNAHRGSRLQFQQNNAESTIVPIKGKDRKPGNLV

SEQ ID NO: 2756 - protein, 250 aa, Homo sapiens
VSCLAELEFAQIIIIVVVVTVMVVVIVCLLNHYKVSTRSFINRPNQSRRREDGLPQEGCLWPSDSAAPRLGASEIMHAPRSRDRFTAPSFIQRDRFSRFQPTYPYVQHEIDLPPTISLSDGEEPPPYQGPCTLQLRDPEQQMELNRESVRAPPNRTIFDSDLIDIAMYSGGPCPPSSNSGISASTCSSNGRMEGPPPTYSEVMGHHPGASFLHHQRSNAHRGSRLQFQQNNAESTIVPIKGKDRKPGNLV

SEQ ID NO: 2757 - protein, 271 aa, Homo sapiens
LIMSSDHLNNSTLKEAQFKDLFLKKAELEFAQIIIIVVVVTVMVVVIVCLLNHYKVSTRSFINRPNQSRRREDGLPQEGCLWPSDSAAPRLGASEIMHAPRSRDRFTAPSFIQRDRFSRFQPTYPYVQHEIDLPPTISLSDGEEPPPYQGPCTLQLRDPEQQMELNRESVRAPPNRTIFDSDLIDIAMYSGGPCPPSSNSGISASTCSSNGRMEGPPPTYSEVMGHHPGASFLHHQRSNAHRGSRLQFQQNNAESTIVPIKGKDRKPGNLV

SEQ ID NO: 2758 - protein, 253 aa, Homo sapiens
LIMSSDHLNNSTLKEAQFKDLFLKKAELEFAQIIIIVVVVTVMVVVIVCLLNHYKVSTRSFINRPNQSRRREDGLPQIMHAPRSRDRFTAPSFIQRDRFSRFQPTYPYVQHEIDLPPTISLSDGEEPPPYQGPCTLQLRDPEQQMELNRESVRAPPNRTIFDSDLIDIAMYSGGPCPPSSNSGISASTCSSNGRMEGPPPTYSEVMGHHPGASFLHHQRSNAHRGSRLQFQQNNAESTIVPIKGKDRKPGNLV

SEQ ID NO: 2759 - protein, 248 aa, Homo sapiens
MAAELEFAQIIIIVVVVTVMVVVIVCLLNHYKVSTRSFINRPNQSRRREDGLPQEGCLWPSDSAAPRLGASEIMHAPRSRDRFTAPSFIQRDRFSRFQPTYPYVQHEIDLPPTISLSDGEEPPPYQGPCTLQLRDPEQQMELNRESVRAPPNRTIFDSDLIDIAMYSGGPCPPSSNSGISASTCSSNGRMEGPPPTYSEVMGHHPGASFLHHQRSNAHRGSRLQFQQNNAESTIVPIKGKDRKPGNLV

SEQ ID NO: 2760 - protein, 230 aa, Homo sapiens
MAAELEFAQIIIIVVVVTVMVVVIVCLLNHYKVSTRSFINRPNQSRRREDGLPQIMHAPRSRDRFTAPSFIQRDRFSRFQPTYPYVQHEIDLPPTISLSDGEEPPPYQGPCTLQLRDPEQQMELNRESVRAPPNRTIFDSDLIDIAMYSGGPCPPSSNSGISASTCSSNGRMEGPPPTYSEVMGHHPGASFLHHQRSNAHRGSRLQFQQNNAESTIVPIKGKDRKPGNLV

SEQ ID NO: 2761 - protein, 908 aa, Homo sapiens
LLSGHRPWPLGLLLMALASAAPGSIFCKQLLFSLLVLTLLCDACQKVYLRVPSHLQAETLVGKVNLEECLKSASLIRSSDPAFRILEDGSIYTTHDLILSSERKSFSIFLSDGQRREQQEIKVVLSARENKSPKKRHTKDTALKRSKRRWAPIPASLMENSLGPFPQHVQQIQSDAAQNYTIFYSISGPGVDKEPFNLFYIEKDTGDIFCTRSIDREKYEQFALYGYATTADGYAPEYPLPLIIKIEDDNDNAPYFEHRVTIFTVPENCRSGTSVGKVTATDLDEPDTLHTRLKYKILQQIPDHPKHFSIHPDTGVITTTTPFLDREKCDTYQLIMEVRDMGGQPFGLFNTGTITISLEDENDNPPSFTETSYVTEVEENRIDVEILRMKVQDQDLPNTPHSKAVYKILQGNENGNFIISTDPNTNEGVLCVVKPLNYEVNRQVILQVGVINEAQFSKAASSQTPTMCTTTVTVKIIDSDEGPECHPPVKVIQSQDGFPAGQELLGYKALDPEISSGEGLRYQKLGDEDNWFEINQHTGDLRTLKVLDRESKFVKNNQYNISVVAVDAVGRSCTGTLVVHLDDYNDHAPQIDKEVTICQNNEDFAVLKPVDPDGPENGPPFQFFLDNSASKNWNIEEKDGKTAILRQRQNLDYNYYSVPIQIKDRHGLVATHMLTVRVCDCSTPSECRMKDKSTRDVRPNVILGRWAILAMVLGSVLLLCILFTCFCVTAKRTVKKCFPEDIAQQNLIVSNTEGPGEEVTEANIRLPMQTSNICDTSMSVGTVGGQGIKTQQSFEMVKGGYTLDSNKGGGHQTLESVKGVGQGDTGRYAYTDWQSFTQPRLGEKVYLCGQDEEHKHCEDYVCSYNYEGKGSLAGSVGCCSDRQEEEGLEFLDHLEPKFRTLAKTCIKK

SEQ ID NO: 2762 - protein, 854 aa, Homo sapiens
LLSGHRPWPLGLLLMALASAAPGSIFCKQLLFSLLVLTLLCDACQKVYLRVPSHLQAETLVGKVNLEECLKSASLIRSSDPAFRILEDGSIYTTHDLILSSERKSFSIFLSDGQRREQQEIKVVLSARENKSPKKRHTKDTALKRSKRRWAPIPASLMENSLGPFPQHVQQIQSDAAQNYTIFYSISGPGVDKEPFNLFYIEKDTGDIFCTRSIDREKYEQFALYGYATTADGYAPEYPLPLIIKIEDDNDNAPYFEHRVTIFTVPENCRSGTSVGKVTATDLDEPDTLHTRLKYKILQQIPDHPKHFSIHPDTGVITTTTPFLDREKCDTYQLIMEVRDMGGQPFGLFNTGTITISLEDENDNPPSFTETSYVTEVEENRIDVEILRMKVQDQDLPNTPHSKAVYKILQGNENGNFIISTDPNTNEGVLCVVKPLNYEVNRQVILQVGVINEAQFSKAASSQTPTMCTTTVTVKIIDSDEGPECHPPVKVIQSQDGFPAGQELLGYKALDPEISSGEGLRYQKLGDEDNWFEINQHTGDLRTLKVLDRESKFVKNNQYNISVVAVDAVGRSCTGTLVVHLDDYNDHAPQIDKEVTICQNNEDFAVLKPVDPDGPENGPPFQFFLDNSASKNWNIEEKDGKTAILRQRQNLDYNYYSVPIQIKDRHGLVATHMLTVRVCDCSTPSECRMKDKSTRDVRPNVILGRWAILAMVLGSVLLLCILFTCFCVTAKRTVKKCFPEDIAQQNLIVSNTEGPGEEVTEANIRLPMQTSNICDTSMSVGTVGGQGIKTQQSFEMVKGGYTLDSNKGGGHQTLESVKGVGQGDTGRYAYTDWQSFTQPRLGEESIRGHTLIKN

SEQ ID NO: 2763 - protein, 281 aa, Homo sapiens
MGRRNRSLIASGLYGYNATLVGVLMAVFSDKGDYFWWLLLPVCAMSMTCPIFSSALNSMLSKWDLPVFTLPFNMALSMYLSATGHYNPFFPAKLVIPITTAPNISWSDLSALELLKSIPVGVGQIYGCDNPWTGGIFLGAILLSSPLMCLHAAIGSLLGIAAGLSLSAPFEDIYFGLWGFNSSLACIAMGGMFMALTWQTHLLALGCALFTAYLGVGMANFMAEVGLPACTWPFCLATLLFLIMTTKNSNIYKMPLSKVTYPEENRIFYLQAKKRMVESPL

SEQ ID NO: 2764 - protein, 265 aa, Homo sapiens
LDSPGHIPSGVRQQPRQWNPDSGRTSCSEPLVGSHWLAGNSGLHSDGPLAQPGQVINSIWALWLQCHPGGSTHGCLFGQGRLFLVAVTPCMCYVHDLLLKSIPVGVGQIYGCDNPWTGGIFLGAILLSSPLMCLHAAIGSLLGIAAGLSLSAPFEDIYFGLWGFNSSLACIAMGGMFMALTWQTHLLALGCALFTAYLGVGMANFMAEVGLPACTWPFCLATLLFLIMTTKNSNIYKMPLSKVTYPEENRIFYLQAKKRMVESPL

SEQ ID NO: 2765 - protein, 126 aa, Homo sapiens
LVIPITTAPNISWSDLSALELLKSIPVGVGQIYGCDNPWTGGIFLGAILLSSPLMCLHAAIGSLLGIAAGLSLSAPFEDIYFGLWGFNSSLACIAMGGMFMALTWQTHLLALGCGESPTPLGEGCS

SEQ ID NO: 2766 - protein, 126 aa, Homo sapiens
LTPPVLTGLSLSAPFEDIYFGLWGFNSSLACIAMGGMFMALTWQTHLLALGCALFTAYLGVGMANFMAEVGLPACTWPFCLATLLFLIMTTKNSNIYKMPLSKVTYPEENRIFYLQAKKRMVESPL

SEQ ID NO: 2767 - protein, 267 aa, Homo sapiens
LSRAMAPRARRRRPLFALLLLCALLARLQVALQIAPPCTSEKHYEHLGRCCNKCEPGKYMSSKCTTTSDSVCLPCGPDEYLDSWNEEDKCLLHKVCDTGKALVAVVAGNSTTPRRCACTAGYHWSQDCECCRRNTECAPGLGAQHPLQLNKDTVCKPCLAGYFSDAFSSTDKCRPWTNCTFLGKRVEHHGTEKSDAVCSSSLPARKPPNEPHVYLPGLIILLLFASVALVAAIIFGVCYRKKGKALTANLWHWINEACGRLSGDKEM

SEQ ID NO: 2768 - protein, 303 aa, Homo sapiens
LSRAMAPRARRRRPLFALLLLCALLARLQVALQIAPPCTSEKHYEHLGRCCNKCEPGKYMSSKCTTTSDSVCLPCGPDEYLDSWNEEDKCLLHKVCDTGKALVAVVAGNSTTPRRCACTAGYHWSQDCECCRRNTECAPGLGAQHPLQLNKDTVCKPCLAGYFSDAFSSTDKCRPWTNCTFLGKRVEHHGTEKSDAVCSSSLPARKPPNGNVTGNSNSTFISSGQVMNFKGDIIVVYVSQTSQEGAAAAAEPMGRPVQEETLARRDSFAGNGPRFPDPCGGPEGLREPEKASRPVQEQGGAKA

SEQ ID NO: 2769 - protein, 341 aa, Homo sapiens
LSRAMAPRARRRRPLFALLLLCALLARLQVALQIAPPCTSEKHYEHLGRCCNKCEPGKYMSSKCTTTSDSVCLPCGPDEYLDSWNEEDKCLLHKVCDTGKALVAVVAGNSTTPRRCACTAGYHWSQDCECCRRNTECAPGLGAQHPLQLNKDTVCKPCLAGYFSDAFSSTDKCRPWTNCTFLGKRVEHHGTEKSDAVCSSSLPARKPPNEPHVYLPGLIILLLFASVALVAAIIFGVCYRKKGKALTGNVTGNSNSTFISSGQVMNFKGDIIVVYVSQTSQEGAAAAAEPMGRPVQEETLARRDSFAGNGPRFPDPCGGPEGLREPEKASRPVQEQGGAKA

SEQ ID NO: 2770 - protein, 620 aa, Homo sapiens
LSRAMAPRARRRRPLFALLLLCALLARLQVALQIAPPCTSEKHYEHLGRCCNKCEPGKYMSSKCTTTSDSVCLPCGPDEYLDSWNEEDKCLLHKVCDTGKALVAVVAGNSTTPRRCACTAGYHWSQDCECCRRNTECAPGLGAQHPLQLNKDTVCKPCLAGYFSDAFSSTDKCRPWTNCTFLGKRVEHHGTEKSDAVCSSSLPARKPPNEPHVYLPGLIILLLFASVALVAAIIFGVCYRKKGKALTANLWHWINEACGRLSGDKESSGDSCVSTHTANFGQQGACEGVLLLTLEEKTFPEDMCYPDQGGVCQGTCVGGGPYAQGEDARMLSLVSKTEIEEDSFRQMPTEDEYMDRPSQPTDQLLFLTEPGSKSTPPFSEPLEVGENDSLSQCFTGTQSTVGSESCNCTEPLCRTDWTPMSSENYLQKEVDSGHCPHWAASPSPNWADVCTGCRNPPGEDCEPLVGSPKRGPLPQCAYGMGLPPEEEASRTEARDQPEDGADGRLPSSARAGAGSGSSPGGQSPASGNVTGNSNSTFISSGQVMNFKGDIIVVYVSQTSQEGAAAAAEPMGRPVQEETLARRDSFAGNGPRFPDPCGGPEGLREPEKASRPVQEQGGAKA

SEQ ID NO: 2771 - protein, 51 aa, Homo sapiens
VVGLHMEDAFVELYGPSMRPLFDFSWLSLKTLLSLALVGACITLGAYLGHK

SEQ ID NO: 2772 - protein, 1225 aa, Homo sapiens
LTCMPKGGAPPWIMALMFTGHLLFLALLMFAFSTFEESVSNYSEWAVFTDDIDQFKTQKVQDFRPNQKLKKSMLHPSLYFDAGEIQAMRQKSRASHLHLFRAIRSAVTVMLSNPTYYLPPPKHADFAAKWNEIYGNNLPPLALYCLLCPEDKVAFEFVLEYMDRMVGYKDWLVENAPGDEVPIGHSLTGFATAFDFLYNLLDNHRRQKYLEKIWVITEEMYEYSKVRSWGKQLLHNHQATNMIALLTGALVTGVDKGSKANIWKQAVVDVMEKTMFLLNHIVDGSLDEGVAYGSYTAKSVTQYVFLAQRHFNINNLDNNWLKMHFWFYYATLLPGFQRTVGIADSNYNWFYGPESQLVFLDKFILKNGAGNWLAQQIRKHRPKDGPMVPSTAQRWSTLHTEYIWYDPQLTPQPPADYGTAKIHTFPNWGVVTYGAGLPNTQTNTFVSFKSGKLGGRAVYDIVHFQPYSWIDGWRSFNPGHEHPDQNSFTFAPNGQVFVSEALYGPKLSHLNNVLVFAPSPSSQCNKPWEGQLGECAQWLKWTGEEVGDAAGEIITASQHGEMVFVSGEAVSAYSSAMRLKSVYRALLLLNSQTLLVVDHIERQEDSPINSVSAFFHNLDIDFKYIPYKFMNRYNGAMMDVWDAHYKMFWFDHHGNSPMASIQEAEQAAEFKKRWTQFVNVTFQMEPTITRIAYVFYGPYINVSSCRFIDSSNPGLQISLNVNNTEHVVSIVTDYHNLKTRFNYLGFGGFASVADQGQITRFGLGTQAIVKPVRHDRIIFPFGFKFNIAVGLILCISLVILTFQWRFYLSFRKLMRWILILVIALWFIELLDVWSTCSQPICAKWTRTEAEGSKKSLSSEGHHMDLPDVVITSLPGSGAEILKQLFFNSSDFLYIRVPTAYIDIPETELEIDSFVDACEWKVSDIRSGHFRLLRGWLQSLVQDTKLHLQNIHLHEPNRGKLAQYFAMNKDKKRKFKRRESLPEQRSQMKGAFDRDAEYIRALRRHLVYYPSARPVLSLSSGSWTLKLHFFQEVLGASMRALYIVRDPRAWIYSMLYNSKPSLYSLKNVPEHLAKLFKIEGGKGKCNLNSGYAFEYEPLRKELSKSKSNAVSLLSHLWLANTAAALRINTDLLPTSYQLVKFEDIVHFPQKTTERIFAFLGIPLSPASLNQILFATSTNLFYLPYEGEISPTNTNVWKQNLPRDEIKLIENICWTLMDRLGYPKFMD

SEQ ID NO: 2773 - protein, 213 aa, Homo sapiens
LLCKDSFEAAVPSNSHIVSEPGKNVTLTCQPQMTWPVQAVRWEKIQPRQIDLLTYCNLVHGRNFTSKFPRQIVSNCSHGRWSVIVIPDVTVSDSGLYRCYLQASAGENETFVMRLTVAEGKTDNQYTLFVAGGTVLLLLFVISITTIIVIFLNRRRRRERRDLFTESWDTQKAPNNYRSPISTSQPTNQSMDDTREDIYVNYPTFSRRPKTRV

SEQ ID NO: 2774 - protein, 41 aa, Homo sapiens
VFQETLITTIDSSSSWWTNWVIPAISAVAVALMYRLYMAED

SEQ ID NO: 2775 - protein, 152 aa, Homo sapiens
LWASTIVASGTVIGVVIYTGKETRSVMNTSNPKNKVGLLDLELNRLTKALFLALVALSIVMVTLQGFVGPWYRNLFRFLLLFSYIIPISLRVNLDMGKAVYGWMMMKDENIPGTVVRTSTIPEELGRLVYLLTDKTGTVRGLCSPLNGQNDI

SEQ ID NO: 2776 - protein, 58 aa, Homo sapiens
LLHQVGLLDLELNRLTKALFLALVALSIVMVTLQGFVGPWYRNLFRFLLLFSYIIPIR

SEQ ID NO: 2777 - protein, 2172 aa, Homo sapiens
LPAAAPHVFSPTVVLTSLSRPLPSLTMAFWTQLMLLLWKNFMYRRRQPVQLLVELLWPLFLFFILVAVRHSHPPLEHHECHFPNKPLPSAGTVPWLQGLICNVNNTCFPQLTPGEEPGRLSNFNDSLVSRLLADARTVLGGASAHRTLAGLGKLIATLRAARSTAQPQPTKQSPLEPPMLDVAELLTSLLRTESLGLALGQAQEPLHSLLEAAEDLAQELLALRSLVELRALLQRPRGTSGPLELLSEALCSVRGPSSTVGPSLNWYEASDLMELVGQEPESALPDSSLSPACSELIGALDSHPLSRLLWRRLKPLILGKLLFAPDTPFTRKLMAQVNRTFEELTLLRDVREVWEMLGPRIFTFMNDSSNVAMLQRLLQMQDEGRRQPRPGGRDHMEALRSFLDPGSGGYSWQDAHADVGHLVGTLGRVTECLSLDKLEAAPSEAALVSRALQLLAEHRFWAGVVFLGPEDSSDPTEHPTPDLGPGHVRIKIRMDIDVVTRTNKIRDRFWDPGPAADPLTDLRYVWGGFVYLQDLVERAAVRVLSGANPRAGLYLQQMPYPCYVDDVFLRVLSRSLPLFLTLAWIYSVTLTVKAVVREKETRLRDTMRAMGLSRAVLWLGWFLSCLGPFLLSAALLVLVLKLGDILPYSHPGVVFLFLAAFAVATVTQSFLLSAFFSRANLAAACGGLAYFSLYLPYVLCVAWRDRLPAGGRVAASLLSPVAFGFGCESLALLEEQGEGAQWHNVGTRPTADVFSLAQVSGLLLLDAALYGLATWYLEAVCPGQYGIPEPWNFPFRRSYWCGPRPPKSPAPCPTPLDPKVLVEEAPPGLSPGVSVRSLEKRFPGSPQPALRGLSLDFYQGHITAFLGHNGAGKTTTLSILSGLFPPSGGSAFILGHDVRSSMAAIRPHLGVCPQYNVLFDMLTVDEHVWFYGRLKGLSAAVVGPEQDRLLQDVGLVSKQSVQTRHLSGGMQRKLSVAIAFVGGSQVVILDEPTAGVDPASRRGIWELLLKYREGRTLILSTHHLDEAELLGDRVAVVAGGRLCCCGSPLFLRRHLGSGYYLTLVKARLPLTTNEKADTDMEGSVDTRQEKKNGSQGSRVGTPQLLALVQHWVPGARLVEELPHELVLVLPYTGAHDGSFATLFRELDTRLAELRLTGYGISDTSLEEIFLKVVEECAADTDMEDGSCGQHLCTGIAGLDVTLRLKMPPQETALENGEPAGSAPETDQGSGPDAVGRVQGWALTRQQLQALLLKRFLLARRSRRGLFAQIVLPALFVGLALVFSLIVPPFGHYPALRLSPTMYGAQVSFFSEDAPGDPGRARLLEALLQEAGLEEPPVQHSSHRFSAPEVPAEVAKVLASGNWTPESPSPACQCSRPGARRLLPDCPAAAGGPPPPQAVTGSGEVVQNLTGRNLSDFLVKTYPRLVRQGLKTKKWVNEVRYGGFSLGGRDPGLPSGQELGRSVEELWALLSPLPGGALDRVLKNLTAWAHSLDAQDSLKIWFNNKGWHSMVAFVNRASNAILRAHLPPGPARHAHSITTLNHPLNLTKEQLSEGALMASSVDVLVSICVVFAMSFVPASFTLVLIEERVTRAKHLQLMGGLSPTLYWLGNFLWDMCNYLVPACIVVLIFLAFQQRAYVAPANLPALLLLLLLYGWSITPLMYPASFFFSVPSTAYVVLTCINLFIGINGSMATFVLELFSDQKLQEVSRILKQVFLIFPHFCLGRGLIDMVRNQAMADAFERLGDRQFQSPLRWEVVGKNLLAMVIQGPLFLLFTLLLQHRSQLLPQPRVRSLPLLGEEDEDVARERERVVQGATQGDVLVLRNLTKVYRGQRMPAVDRLCLGIPPGECFGLLGVNGAGKTSTFRMVTGDTLASRGEAVLAGHSVAREPSAAHLSMGYCPQSDAIFELLTGREHLELLARLRGVPEAQVAQTAGSGLARLGLSWYADRPAGTYSGGNKRKLATALALVGDPAVVFLDEPTTGMDPSARRFLWNSLLAVVREGRSVMLTSHSMEECEALCSRLAIMVNGRFRCLGSPQHLKGRFAAGHTLTLRVPAARSQPAAAFVAAEFPGAELREAHGGRLRFQLPPGGRCALARVFGELAVHGAEHGVEDFSVSQTMLEEVFLYFSKDQGKDEDTEEQKEAGVGVDPAPGLQHPKRVSQFLDDPSTAETVL

SEQ ID NO: 2778 - protein, 2008 aa, Homo sapiens
MVCLGTGQSAGPLVSVQNHCPPCGLSPQESLGLALGQAQEPLHSLLEAAEDLAQELLALRSLVELRALLQRPRGTSGPLELLSEALCSVRGPSSTVGPSLNWYEASDLMELVGQEPESALPDSSLSPACSELIGALDSHPLSRLLWRRLKPLILGKLLFAPDTPFTRKLMAQVNRTFEELTLLRDVREVWEMLGPRIFTFMNDSSNVAMLQRLLQMQDEGRRQPRPGGRDHMEALRSFLDPGSGGYSWQDAHADVGHLVGTLGRVTECLSLDKLEAAPSEAALVSRALQLLAEHRFWAGVVFLGPEDSSDPTEHPTPDLGPGHVRIKIRMDIDVVTRTNKIRDRFWDPGPAADPLTDLRYVWGGFVYLQDLVERAAVRVLSGANPRAGLYLQQMPYPCYVDDVFLRVLSRSLPLFLTLAWIYSVTLTVKAVVREKETRLRDTMRAMGLSRAVLWLGWFLSCLGPFLLSAALLVLVLKLGDILPYSHPGVVFLFLAAFAVATVTQSFLLSAFFSRANLAAACGGLAYFSLYLPYVLCVAWRDRLPAGGRVAASLLSPVAFGFGCESLALLEEQGEGAQWHNVGTRPTADVFSLAQVSGLLLLDAALYGLATWYLEAVCPGQYGIPEPWNFPFRRSYWCGPRPPKSPAPCPTPLDPKVLVEEAPPGLSPGVSVRSLEKRFPGSPQPALRGLSLDFYQGHITAFLGHNGAGKTTTLSILSGLFPPSGGSAFILGHDVRSSMAAIRPHLGVCPQYNVLFDMLTVDEHVWFYGRLKGLSAAVVGPEQDRLLQDVGLVSKQSVQTRHLSGGMQRKLSVAIAFVGGSQVVILDEPTAGVDPASRRGIWELLLKYREGRTLILSTHHLDEAELLGDRVAVVAGGRLCCCGSPLFLRRHLGSGYYLTLVKARLPLTTNEKADTDMEGSVDTRQEKKNGSQGSRVGTPQLLALVQHWVPGARLVEELPHELVLVLPYTGAHDGSFATLFRELDTRLAELRLTGYGISDTSLEEIFLKVVEECAADTDMEDGSCGQHLCTGIAGLDVTLRLKMPPQETALENGEPAGSAPETDQGSGPDAVGRVQGWALTRQQLQALLLKRFLLARRSRRGLFAQIVLPALFVGLALVFSLIVPPFGHYPALRLSPTMYGAQVSFFSEDAPGDPGRARLLEALLQEAGLEEPPVQHSSHRFSAPEVPAEVAKVLASGNWTPESPSPACQCSRPGARRLLPDCPAAAGGPPPPQAVTGSGEVVQNLTGRNLSDFLVKTYPRLVRQGLKTKKWVNEVRYGGFSLGGRDPGLPSGQELGRSVEELWALLSPLPGGALDRVLKNLTAWAHSLDAQDSLKIWFNNKGWHSMVAFVNRASNAILRAHLPPGPARHAHSITTLNHPLNLTKEQLSEGALMASSVDVLVSICVVFAMSFVPASFTLVLIEERVTRAKHLQLMGGLSPTLYWLGNFLWDMCNYLVPACIVVLIFLAFQQRAYVAPANLPALLLLLLLYGWSITPLMYPASFFFSVPSTAYVVLTCINLFIGINGSMATFVLELFSDQKLQEVSRILKQVFLIFPHFCLGRGLIDMVRNQAMADAFERLGDRQFQSPLRWEVVGKNLLAMVIQGPLFLLFTLLLQHRSQLLPQPRVRSLPLLGEEDEDVARERERVVQGATQGDVLVLRNLTKVYRGQRMPAVDRLCLGIPPGECFGLLGVNGAGKTSTFRMVTGDTLASRGEAVLAGHSVAREPSAAHLSMGYCPQSDAIFELLTGREHLELLARLRGVPEAQVAQTAGSGLARLGLSWYADRPAGTYSGGNKRKLATALALVGDPAVVFLDEPTTGMDPSARRFLWNSLLAVVREGRSVMLTSHSMEECEALCSRLAIMVNGRFRCLGSPQHLKGRFAAGHTLTLRVPAARSQPAAAFVAAEFPGAELREAHGGRLRFQLPPGGRCALARVFGELAVHGAEHGVEDFSVSQTMLEEVFLYFSKDQGKDEDTEEQKEAGVGVDPAPGLQHPKRVSQFLDDPSTAETVL

SEQ ID NO: 2779 - protein, 1332 aa, Homo sapiens
VSGGCSHCCASPGARAPSLGSTQAESWGRGGGGGERAPRGPGDTGDSDVTQEGSGPAGIRGGETVIRAGMGDSPGRGAPERRHKAQPGRARKYEWRPEGPTSMGSLGQREDLQDEDRNSAFTWKVQANNRAYNGQFKEKVILCWQRKKYKTNVIRTAKYNFYSFLPLNLYEQFHRVSNLFFLIIIILQSIPDISTLPWFSLSTPMVCLLFIRATRDLVDDMGRHKSDRAINNRPCQILMGKSFKQKKWQDLCVGDVVCLRKDNIVPADMLLLASTEPSSLCYVETVDIDGETNLKFRQALMVTHKELATIKKMASFQGTVTCEAPNSRMHHFVGCLEWNDKKYSLDIGNLLLRGCRIRNTDTCYGLVIYADGYMFVGFDTKIMKNCGKIHLKRTKLDLLMNKLVVVIFISVVLVCLVLAFGFGFSVKEFKDHHYYLSGVHGSSVAAESFFVFWSFLILLSVTIPMSMFILSEFIYLGNSVFIDWDVQMYYKPQDVPAKARSTSLNDHLGQVEYIFSDKTGTLTQNILTFNKCCISGRVYGPDSEATTRPKENPYLWNKFADGKLLFHNAALLHLVRTNGDEAVREFWRLLAICHTVMVRESPRERPDQLLYQAASPDEGALVTAARNFGYVFLSRTQDTVTIMELGEERVYQVLAIMDFNSTRKRMSVLVRKPEGAICLYTKGADTVIFERLHRRGAMEFATEEALAAFAQETLRTLCLAYREVAEDIYEDWQQRHQEASLLLQNRAQALQQVYNEMEQDLRLLGATAIEDRLQDGVPETIKCLKKSNIKIWVLTGDKQETAVNIGFACELLSENMLILEEKEISRILETYWENSNNLLTRESLSQVKLALVINGDFLDKLLVSLRKEPRALAQNVNMDEAWQELGQSRRDFLYARRLSLLCRRFGLPLAAPPAQDSRARRSSEVLQERAFVDLASKCQAVICCRVTPKQKALIVALVKKYHQVVTLAIGDGANDINMIKTADVGVGLAGQEGMQAVQNSDFVLGQFCFLQRLLLVHGRWSYVRICKFLRYFFYKSMASMMVQVWFACYNGFTGQPLYEGWFLALFNLLYSTLPVLYIGLFEQDVSAEQSLEKPELYVVGQKDELFNYWVFVQAIAHGVTTSLVNFFMTLWISRDTAGPASFSDHQSFAVVVALSCLLSITMEVILIIKYWTALCVATILLSLGFYAIMTTTTQSFWLFRVSPTTFPFLYADLSVMSSPSILLVVLLSVSINTFPVLALRVIFPALKELRAKEEKVEEGPSEEIFTMEPLPHVHRESRARRSSYAFSHREGYANLITQGTILRRGPGVSSDIASESLDPSDEEAASSPKESQ

SEQ ID NO: 2780 - protein, 671 aa, Homo sapiens
VGTAAAGPPSSRASGLPVWGGLAEGGASFTTPSPRSFKQKKWQDLCVGDVVCLRKDNIVPADMLLLASTEPSSLCYVETVDIDGETNLKFRQALMVTHKELATIKKMASFQGTVTCEAPNSRMHHFVGCLEWNDKKYSLDIGNLLLRGCRIRNTDTCYGLVIYAGFDTKIMKNCGKIHLKRTKLDLLMNKLVVVIFISVVLVCLVLAFGFGFSVKEFKDHHYYLSGVHGSSVAAESFFVFWSFLILLSVTIPMSMFILSEFIYLGNSVFIDWDVQMYYKPQDVPAKARSTSLNDHLGQVEYIFSDKTGTLTQNILTFNKCCISGRVYGPDSEATTRPKENPYLWNKFADGKLLFHNAALLHLVRTNGDEAVREFWRLLAICHTVMVRESPRERPDQLLYQAASPDEGALVTAARNFGYVFLSRTQDTVTIMELGEERVYQVLAIMDFNSTRKRMSVLVRKPEGAICLYTKGADTVIFERLHRRGAMEFATEEALAAFAQETLRTLCLAYREVAEDIYEDWQQRHQEASLLLQNRAQALQQVYNEMEQDLRLLGATAIEDRLQDGVPETIKCLKKSNIKIWVLTGDKQETAVNIGFACELLSENMLILEEKEISRILETYWENSNNLLTRESLSQVKLALVINGDFLAPVPAVPEVRAPAGCTASPGLQSPP

SEQ ID NO: 2781 - protein, 389 aa, Homo sapiens
VGRAAAPPICLASPLATLPPTPHQADMLLLASTEPSSLCYVETVDIDGETNLKFRQALMVTHKELATIKKMASFQGTVTCEAPNSRMHHFVGCLEWNDKKYSLDIGNLLLRGCRIRNTDTCYGLVIYAGFDTKIMKNCGKIHLKRTKLDLLMNKLVVVIFISVVLVCLVLAFGFGFSVKEFKDHHYYLSGVHGSSVAAESFFVFWSFLILLSVTIPMSMFILSEFIYLGNSVFIDWDVQMYYKPQDVPAKARSTSLNDHLGQVEYIFSDKTGTLTQNILTFNKCCISGRVYGAAPTPELPAGSSIFKGLRVPENQSHVWPHAQHLRPNLNQGTVARWPGFLWRGPGKFFFFFEAESHSVYPGRNAVVQSWLTAISTSQVQAILLAQPPE

SEQ ID NO: 2782 - protein, 583 aa, Homo sapiens
VTQEGSGPAGIRGGETVIRAGMGDSPGRGAPERRHKAQPGRARKYEWRPEGPTSMGSLGQREDLQDEDRNSAFTWKVQANNRAYNGQFKEKVILCWQRKKYKTNVIRTAKYNFYSFLPLNLYEQFHRVSNLFFLIIIILQSIPDISTLPWFSLSTPMVCLLFIRATRDLVDDMGRHKSDRAINNRPCQILMGKSFKQKKWQDLCVGDVVCLRKDNIVPADMLLLASTEPSSLCYVETVDIDGETNLKFRQALMVTHKELATIKKMASFQGTVTCEAPNSRMHHFVGCLEWNDKKYSLDIGNLLLRGCRIRNTDTCYGLVIYAGFDTKIMKNCGKIHLKRTKLDLLMNKLVVVIFISVVLVCLVLAFGFGFSVKEFKDHHYYLSGVHGSSVAAESFFVFWSFLILLSVTIPMSMFILSEFIYLGNSVFIDWDVQMYYKPQDVPAKARSTSLNDHLGQVEYIFSDKTGTLTQNILTFNKCCISGRVYGAAPTPELPAGSSIFKGLRVPENQSHVWPHAQHLRPNLNQGTVARWPGFLWRGPGKFFFFFEAESHSVYPGRNAVVQSWLTAISTSQVQAILLAQPPE

SEQ ID NO: 2783 - protein, 169 aa, Homo sapiens
MGSLGQREDLQDEDRNSAFTWKVQANNRAYNGQFKEKVILCWQRKKYKTNVIRTAKYNFYSFLPLNLYEQFHRVSNLFFLIIIILQSIPDISTLPWFSLSTPMVCLLFIRATRDLVDDMGRHKSDRAINNRPCQILMGKSPTGTGPAFIRRLAGTRTEAEALMANPCRA

SEQ ID NO: 2784 - protein, 415 aa, Homo sapiens
LIPQGSGAMWPNGSSLGPCFRPTNITLEERRLIASPWFAASFCVVGLASNLLALSVLAGARQGGSHTRSSFLTFLCGLVLTDFLGLLVTGTIVVSQHAALFEWHAVDPGCRLCRFMGVVMIFFGLSPLLLGAAMASERYLGITRPFSRPAVASQRRAWATVGLVWAAALALGLLPLLGVGRYTVQYPGSWCFLTLGAESGDVAFGLLFSMLGGLSVGLSFLLNTVSVATLCHVYHGQEAAQQRPRDSEVEMMAQLLGIMVVASVCWLPLLVFIAQTVLRNPPAMSPAGQLSRTTEKELLIYLRVATWNQILDPWVYILFRRAVLRRLQPRLSTRPRRSLTLWPSLEYSGTISAHCNLRLPGSSDSRASASRAAGITGVSHCARPCMLFDPEFDLLAGVQLLPFEPPTGKALSRKD

SEQ ID NO: 2785 - protein, 351 aa, Homo sapiens
LIPQGSGAMWPNGSSLGPCFRPTNITLEERRLIASPWFAASFCVVGLASNLLALSVLAGARQGGSHTRSSFLTFLCGLVLTDFLGLLVTGTIVVSQHAALFEWHAVDPGCRLCRFMGVVMIFFGLSPLLLGAAMASERYLGITRPFSRPAVASQRRAWATVGLVWAAALALGLLPLLGVGRYTVQYPGSWCFLTLGAESGDVAFGLLFSMLGGLSVGLSFLLNTVSVATLCHVYHGQEAAQQRPRDSEVEMMAQLLGIMVVASVCWLPLLVFIAQTVLRNPPAMSPAGQLSRTTEKELLIYLRVATWNQILDPWVYILFRRAVLRRLQPRLSTRPRSLSLQPQLTQRSGLQ

SEQ ID NO: 2786 - protein, 117 aa, Homo sapiens
LLGVGRYTVQYPGSWCFLTLGAESGDVAFGLLFSMLGGLSVGLSFLLNTVSVATLCHVYHGQEAAQQRPRDSEVEMMAQLLGIMVVASVCWLPLLLCPPHAVTPRTQFPSPDWTVSL

SEQ ID NO: 2787 - protein, 293 aa, Homo sapiens
LGGGEGGDGPGMGSPGMVLGLLVQIWALQEASSLSVQQGPNLLQVRQGSQATLVCQVDQATAWERLRVKWTKDGAILCQPYITNGSLSLGVCGPQGRLSWQAPSHLTLQLDPVSLNHSGAYVCWAAVEIPELEEAEGNITRLFVDPDDPTQNRNRIASFPGFLFVLLGVGSMGVAAIVWGAWFWGRRSCQQRDSGNSPGNAFYSNVLYRPRGAPKKSEDCSGEGKDQRGQSIYSTSFPQPAPRQPHLASRPCPSPRPCPSPRPGHPVSMVRVSPRPSPTQQPRPKGFPKVGEE

SEQ ID NO: 2788 - protein, 1537 aa, Homo sapiens
LPSMAPTWGPGMVSVVGPMGLLVVLLVGGCAAEEPPRFIKEPKDQIGVSGGVASFVCQATGDPKPRVTWNKKGKKVNSQRFETIEFDESAGAVLRIQPLRTPRDENVYECVAQNSVGEITVHAKLTVLREDQLPSGFPNIDMGPQLKVVERTRTATMLCAASGNPDPEITWFKDFLPVDPSASNGRIKQLRSGALQIESSEETDQGKYECVATNSAGVRYSSPANLYVRVRRVAPRFSILPMSHEIMPGGNVNITCVAVGSPMPYVKWMQGAEDLTPEDDMPVGRNVLELTDVKDSANYTCVAMSSLGVIEAVAQITVKSLPKAPGTPMVTENTATSITITWDSGNPDPVSYYVIEYKSKSQDGPYQIKEDITTTRYSIGGLSPNSEYEIWVSAVNSIGQGPPSESVVTRTGEQAPASAPRNVQARMLSATTMIVQWEEPVEPNGLIRGYRVYYTMEPEHPVGNWQKHNVDDSLLTTVGSLLEDETYTVRVLAFTSVGDGPLSDPIQVKTQQGVPGQPMNLRAEARSETSITLSWSPPRQESIIKYELLFREGDHGREVGRTFDPTTSYVVEDLKPNTEYAFRLAARSPQGLGAFTPVVRQRTLQSISPKNFKVKMIMKTSVLLSWEFPDNYNSPTPYKIQYNGLTLDVDGRTTKKLITHLKPHTFYNFVLTNRGSSLGGLQQTVTAWTAFNLLNGKPSVAPKPDADGFIMVYLPDGQSPVPVQSYFIVMVPLRKSRGGQFLTPLGSPEDMDLEELIQDISRLQRRSLRHSRQLEVPRPYIAARFSVLPPTFHPGDQKQYGGFDNRGLEPGHRYVLFVLAVLQKSEPTFAASPFSDPFQLDNPDPQPIVDGEEGLIWVIGPVLAVVFIICIVIAILLYKNKPDSKRKDSEPRTKCLLNNADLAPHHPKDPVEMRRINFQTPDSGLRSPLREPGFHFESMLSHPPIPIADMAEHTERLKANDSLKLSQEYESIDPGQQFTWEHSNLEVNKPKNRYANVIAYDHSRVILQPIEGIMGSDYINANYVDGYRCQNAYIATQGPLPETFGDFWRMVWEQRSATIVMMTRLEEKSRIKCDQYWPNRGTETYGFIQVTLLDTIELATFCVRTFSLHKNGSSEKREVRQFQFTAWPDHGVPEYPTPFLAFLRRVKTCNPPDAGPIVVHCSAGVGRTGCFIVIDAMLERIKPEKTVDVYGHVTLMRSQRNYMVQTEDQYSFIHEALLEAVGCGNTEVPARSLYAYIQKLAQVEPGEHVTGMELEFKRLANSKAHTSRFISANLPCNKFKNRLVNIMPYESTRVCLQPIRGVEGSDYINASFIDGYRQQKAYIATQGPLAETTEDFWRMLWENNSTIVVMLTKLREMGREKCHQYWPAERSARYQYFVVDPMAEYNMPQYILREFKVTDARDGQSRTVRQFQFTDWPEQGVPKSGEGFIDFIGQVHKTKEQFGQDGPISVHCSAGVGRTGVFITLSIVLERMRYEGVVDIFQTVKMLRTQRPAMVQTETESRPGWSAVAQSRLTASSASWIHAILLPQPPEWLGLQD

SEQ ID NO: 2789 - protein, 1505 aa, Homo sapiens
MAPTWGPGMVSVVGPMGLLVVLLVGGCAAEEPPRFIKEPKDQIGVSGGVASFVCQATGDPKPRVTWNKKGKKVNSQRFETIEFDESAGAVLRIQPLRTPRDENVYECVAQNSVGEITVHAKLTVLREDQLPSGFPNIDMGPQLKVVERTRTATMLCAASGNPDPEITWFKDFLPVDPSASNGRIKQLRSGALQIESSEETDQGKYECVATNSAGVRYSSPANLYVRELREVRRVAPRFSILPMSHEIMPGGNVNITCVAVGSPMPYVKWMQGAEDLTPEDDMPVGRNVLELTDVKDSANYTCVAMSSLGVIEAVAQITVKSLPKAPGTPMVTENTATSITITWDSGNPDPVSYYVIEYKSKSQDGPYQIKEDITTTRYSIGGLSPNSEYEIWVSAVNSIGQGPPSESVVTRTGEQAPASAPRNVQARMLSATTMIVQWEEPVEPNGLIRGYRVYYTMEPEHPVGNWQKHNVDDSLLTTVGSLLEDETYTVRVLAFTSVGDGPLSDPIQVKTQQGVPGQPMNLRAEARSETSITLSWSPPRQESIIKYELLFREGDHGREVGRTFDPTTSYVVEDLKPNTEYAFRLAARSPQGLGAFTPVVRQRTLQSISPKNFKVKMIMKTSVLLSWEFPDNYNSPTPYKIQYNGLTLDVDGRTTKKLITHLKPHTFYNFVLTNRGSSLGGLQQTVTAWTAFNLLNGKPSVAPKPDADGFIMVYLPDGQSPVPVQSYFIVMVPLRKSRGGQFLTPLGSPEDMDLEELIQDISRLQRRSLRHSRQLEVPRPYIAARFSVLPPTFHPGDQKQYGGFDNRGLEPGHRYVLFVLAVLQKSEPTFAASPFSDPFQLDNPDPQPIVDGEEGLIWVIGPVLAVVFIICIVIAILLYKNKPDSKRKDSEPRTKCLLNNADLAPHHPKDPVEMRRINFQTPGMLSHPPIPIADMAEHTERLKANDSLKLSQEYESIDPGQQFTWEHSNLEVNKPKNRYANVIAYDHSRVILQPIEGIMGSDYINANYVDGYRCQNAYIATQGPLPETFGDFWRMVWEQRSATIVMMTRLEEKSRIKCDQYWPNRGTETYGFIQVTLLDTIELATFCVRTFSLHKNGSSEKREVRQFQFTAWPDHGVPEYPTPFLAFLRRVKTCNPPDAGPIVVHCSAGVGRTGCFIVIDAMLERIKPEKTVDVYGHVTLMRSQRNYMVQTEDQYSFIHEALLEAVGCGNTEVPARSLYAYIQKLAQVEPGEHVTGMELEFKRLANSKAHTSRFISANLPCNKFKNRLVNIMPYESTRVCLQPIRGVEGSDYINASFIDGYRQQKAYIATQGPLAETTEDFWRMLWENNSTIVVMLTKLREMGREKCHQYWPAERSARYQYFVVDPMAEYNMPQYILREFKVTDARDGQSRTVRQFQFTDWPEQGVPKSGEGFIDFIGQVHKTKEQFGQDGPISVHCSAGVGRTGVFITLSIVLERMRYEGVVDIFQTVKMLRTQRPAMVQTEDEYQFCYQAALEYLGSFDHYAT

SEQ ID NO: 2790 - protein, 1504 aa, Homo sapiens
LPSMAPTWGPGMVSVVGPMGLLVVLLVGGCAAEEPPRFIKEPKDQIGVSGGVASFVCQATGDPKPRVTWNKKGKKVNSQRFETIEFDESAGAVLRIQPLRTPRDENVYECVAQNSVGEITVHAKLTVLREDQLPSGFPNIDMGPQLKVVERTRTATMLCAASGNPDPEITWFKDFLPVDPSASNGRIKQLRSGALQIESSEETDQGKYECVATNSAGVRYSSPANLYVRVRRVAPRFSILPMSHEIMPGGNVNITCVAVGSPMPYVKWMQGAEDLTPEDDMPVGRNVLELTDVKDSANYTCVAMSSLGVIEAVAQITVKSLPKAPGTPMVTENTATSITITWDSGNPDPVSYYVIEYKSKSQDGPYQIKEDITTTRYSIGGLSPNSEYEIWVSAVNSIGQGPPSESVVTRTGEQAPASAPRNVQARMLSATTMIVQWEEPVEPNGLIRGYRVYYTMEPEHPVGNWQKHNVDDSLLTTVGSLLEDETYTVRVLAFTSVGDGPLSDPIQVKTQQGVPGQPMNLRAEARSETSITLSWSPPRQESIIKYELLFREGDHGREVGRTFDPTTSYVVEDLKPNTEYAFRLAARSPQGLGAFTPVVRQRTLQSISPKNFKVKMIMKTSVLLSWEFPDNYNSPTPYKIQYNGLTLDVDGRTTKKLITHLKPHTFYNFVLTNRGSSLGGLQQTVTAWTAFNLLNGKPSVAPKPDADGFIMVYLPDGQSPVPVQSYFIVMVPLRKSRGGQFLTPLGSPEDMDLEELIQDISRLQRRSLRHSRQLEVPRPYIAARFSVLPPTFHPGDQKQYGGFDNRGLEPGHRYVLFVLAVLQKSEPTFAASPFSDPFQLDNPDPQPIVDGEEGLIWVIGPVLAVVFIICIVIAILLYKNKPDSKRKDSEPRTKCLLNNADLAPHHPKDPVEMRRINFQTPGMLSHPPIPIADMAEHTERLKANDSLKLSQEYESIDPGQQFTWEHSNLEVNKPKNRYANVIAYDHSRVILQPIEGIMGSDYINANYVDGYRCQNAYIATQGPLPETFGDFWRMVWEQRSATIVMMTRLEEKSRIKCDQYWPNRGTETYGFIQVTLLDTIELATFCVRTFSLHKNGSSEKREVRQFQFTAWPDHGVPEYPTPFLAFLRRVKTCNPPDAGPIVVHCSAGVGRTGCFIVIDAMLERIKPEKTVDVYGHVTLMRSQRNYMVQTEDQYSFIHEALLEAVGCGNTEVPARSLYAYIQKLAQVEPGEHVTGMELEFKRLANSKAHTSRFISANLPCNKFKNRLVNIMPYESTRVCLQPIRGVEGSDYINASFIDGYRQQKAYIATQGPLAETTEDFWRMLWENNSTIVVMLTKLREMGREKCHQYWPAERSARYQYFVVDPMAEYNMPQYILREFKVTDARDGQSRTVRQFQFTDWPEQGVPKSGEGFIDFIGQVHKTKEQFGQDGPISVHCSAGVGRTGVFITLSIVLERMRYEGVVDIFQTVKMLRTQRPAMVQTEDEYQFCYQAALEYLGSFDHYAT

SEQ ID NO: 2791 - protein, 1913 aa, Homo sapiens
LPSMAPTWGPGMVSVVGPMGLLVVLLVGGCAAEEPPRFIKEPKDQIGVSGGVASFVCQATGDPKPRVTWNKKGKKVNSQRFETIEFDESAGAVLRIQPLRTPRDENVYECVAQNSVGEITVHAKLTVLREDQLPSGFPNIDMGPQLKVVERTRTATMLCAASGNPDPEITWFKDFLPVDPSASNGRIKQLRSGALQIESSEETDQGKYECVATNSAGVRYSSPANLYVRVRRVAPRFSILPMSHEIMPGGNVNITCVAVGSPMPYVKWMQGAEDLTPEDDMPVGRNVLELTDVKDSANYTCVAMSSLGVIEAVAQITVKSLPKAPGTPMVTENTATSITITWDSGNPDPVSYYVIEYKSKSQDGPYQIKEDITTTRYSIGGLSPNSEYEIWVSAVNSIGQGPPSESVVTRTGEQAPASAPRNVQARMLSATTMIVQWEEPVEPNGLIRGYRVYYTMEPEHPVGNWQKHNVDDSLLTTVGSLLEDETYTVRVLAFTSVGDGPLSDPIQVKTQQGVPGQPMNLRAEARSETSITLSWSPPRQESIIKYELLFREGDHGREVGRTFDPTTSYVVEDLKPNTEYAFRLAARSPQGLGAFTPVVRQRTLQSKPSAPPQDVKCVSVRSTAILVSWRPPPPETHNGALVGYSVRYRPLGSEDPEPKEVNGIPPTTTQILLEALEKWTQYRITTVAHTEVGPGPESSPVVVRTDEDVPSAPPRKVEAEALNATAIRVLWRSPAPGRQHGQIRGYQVHYVRMEGAEARGPPRIKDVMLADAQEMVITNLQPETAYSITVAAYTMKGDGARSKPKVVVTKGAVLGRPTLSVQQTPEGSLLARWEPPAGTAEDQVLGYRLQFGREDSTPLATLEFPPSEDRYTASGVHKGATYVFRLAARSRGGLGEEAAEVLSIPEDTPRGHPQILEAAGNASAGTVLLRWLPPVPAERNGAIVKYTVAVREAGALGPARETELPAAAEPGAENALTLQGLKPDTAYDLQVRAHTRRGPGPFSPPVRYRTFLRDQVSPKNFKVKMIMKTSVLLSWEFPDNYNSPTPYKIQYNGLTLDVDGRTTKKLITHLKPHTFYNFVLTNRGSSLGGLQQTVTAWTAFNLLNGKPSVAPKPDADGFIMVYLPDGQSPVPVQSYFIVMVPLRKSRGGQFLTPLGSPEDMDLEELIQDISRLQRRSLRHSRQLEVPRPYIAARFSVLPPTFHPGDQKQYGGFDNRGLEPGHRYVLFVLAVLQKSEPTFAASPFSDPFQLDNPDPQPIVDGEEGLIWVIGPVLAVVFIICIVIAILLYKNKPDSKRKDSEPRTKCLLNNADLAPHHPKDPVEMRRINFQTPGMLSHPPIPIADMAEHTERLKANDSLKLSQEYESIDPGQQFTWEHSNLEVNKPKNRYANVIAYDHSRVILQPIEGIMGSDYINANYVDGYRCQNAYIATQGPLPETFGDFWRMVWEQRSATIVMMTRLEEKSRIKCDQYWPNRGTETYGFIQVTLLDTIELATFCVRTFSLHKNGSSEKREVRQFQFTAWPDHGVPEYPTPFLAFLRRVKTCNPPDAGPIVVHCSAGVGRTGCFIVIDAMLERIKPEKTVDVYGHVTLMRSQRNYMVQTEDQYSFIHEALLEAVGCGNTEVPARSLYAYIQKLAQVEPGEHVTGMELEFKRLANSKAHTSRFISANLPCNKFKNRLVNIMPYESTRVCLQPIRGVEGSDYINASFIDGYRQQKAYIATQGPLAETTEDFWRMLWENNSTIVVMLTKLREMGREKCHQYWPAERSARYQYFVVDPMAEYNMPQYILREFKVTDARDGQSRTVRQFQFTDWPEQGVPKSGEGFIDFIGQVHKTKEQFGQDGPISVHCSAGVGRTGVFITLSIVLERMRYEGVVDIFQTVKMLRTQRPAMVQTEDEYQFCYQAALEYLGSFDHYAT

SEQ ID NO: 2792 - protein, 1504 aa, Homo sapiens
LPSMAPTWGPGMVSVVGPMGLLVVLLVGGCAAEEPPRFIKEPKDQIGVSGGVASFVCQATGDPKPRVTWNKKGKKVNSQRFETIEFDESAGAVLRIQPLRTPRDENVYECVAQNSVGEITVHAKLTVLREDQLPSGFPNIDMGPQLKVVERTRTATMLCAASGNPDPEITWFKDFLPVDPSASNGRIKQLRSGALQIESSEETDQGKYECVATNSAGVRYSSPANLYVRVRRVAPRFSILPMSHEIMPGGNVNITCVAVGSPMPYVKWMQGAEDLTPEDDMPVGRNVLELTDVKDSANYTCVAMSSLGVIEAVAQITVKSLPKAPGTPMVTENTATSITITWDSGNPDPVSYYVIEYKSKSQDGPYQIKEDITTTRYSIGGLSPNSEYEIWVSAVNSIGQGPPSESVVTRTGEQAPASAPRNVQARMLSATTMIVQWEEPVEPNGLIRGYRVYYTMEPEHPVGNWQKHNVDDSLLTTVGSLLEDETYTVRVLAFTSVGDGPLSDPIQVKTQQGVPGQPMNLRAEARSETSITLSWSPPRQESIIKYELLFREGDHGREVGRTFDPTTSYVVEDLKPNTEYAFRLAARSPQGLGAFTPVVRQRTLQSISPKNFKVKMIMKTSVLLSWEFPDNYNSPTPYKIQYNGLTLDVDGRTTKKLITHLKPHTFYNFVLTNRGSSLGGLQQTVTAWTAFNLLNGKPSVAPKPDADGFIMVYLPDGQSPVPVQSYFIVMVPLRKSRGGQFLTPLGSPEDMDLEELIQDISRLQRRSLRHSRQLEVPRPYIAARFSVLPPTFHPGDQKQYGGFDNRGLEPGHRYVLFVLAVLQKSEPTFAASPFSDPFQLDNPDPQPIVDGEEGLIWVIGPVLAVVFIICIVIAILLYKKKPHSKRKDSEPRTKCLLNNADLAPHHPKDPVEMRRINFQTPGMLSHPPIPIADMAEHTERLKANDSLKLSQEYESIDPGQQFTWEHSNLEVNKPKNRYANVIAYDHSRVILQPIEGIMGSDYINANYVDGYRCQNAYIATQGPLPETFGDFWRMVWEQRSATIVMMTRLEEKSRIKCDQYWPNRGTETYGFIQVTLLDTIELATFCVRTFSLHKNGSSEKREVRQFQFTAWPDHGVPEYPTPFLAFLRRVKTCNPPDAGPIVVHCSAGVGRTGCFIVIDAMLERIKPEKTVDVYGHVTLMRSQRNYMVQTEDQYSFIHEALLEAVGCGNTEVPARSLYAYIQKLAQVEPGEHVTGMELEFKRLANSKAHTSRFISANLPCNKFKNRLVNIMPYESTRVCLQPIRGVEGSDYINASFIDGYRQQKAYIATQGPLAETTEDFWRMLWENNSTIVVMLTKLREMGREKCHQYWPAERSARYQYFVVDPMAEYNMPQYILREFKVTDARDGQSRTVRQFQFTDWPEQGVPKSGEGFIDFIGQVHKTKEQFGQDGPISVHCSAGVGRTGVFITLSIVLERMRYEGVVDIFQTVKMLRTQRPAMVQTEDEYQFCYQAALEYLGSFDHYAT

SEQ ID NO: 2793 - protein, 213 aa, Homo sapiens
VIAAAMPEEGSGCSVRRRPYGCVLRAALVPLVAGLVICLVVCIQRFAQAQQQLPLESLGWDVAELQLNHTGPQQDPRLYWQGGPALGRSFLHGPELDKGQLRIHRDGIYMVHIQVTLAICSSTTASRHHPTTLAVGICSPASRSISLLRLSFHQGLFGFWNWGLKVKCFLRHLIWTAHCFIPLTQLVFMQALQSWRNHHCSHFTDEENRGVNR

SEQ ID NO: 2794 - protein, 617 aa, Homo sapiens
MAMKIMEKIRNVFHCEAHRILYICESQFLRNFIRKEFLRGNGLAAGKMNISIDLDTNYAELVLNVGRVTLGENNRKKMKDCQLRKQQNENVSRAVCALLNSGGGVIKAEVENKGYSYKKDGIGLDLENSFSNMLPFVPNFLDFMQNGNYFHIFVKSWSLETSGPQIATLSSSLYKRDVTSAKVMNASAALEFLKDMEKTGGRAYLRPEFPAKRACVDVQEESNMEALAADFFNRTELGYKEKLTFTESTHVEIKNFSTEKLLQRITEILPQYVSAFANTDGGYLFVGLNEDKEVIGFKAEKSYLTKLEEVTKNSIGKLPVHHFCVEKGTINYLCKFLGVYDKGRLCGYVYALRVERFCCAVFAKKPDSWHVKDNRVKQLTEKEWIQFMVDSEPVCEELPSPASTSSPVSQSYPLREYINFKIQPLRYHLPGLSEKITCAPKTFCRNLFSQHEGLKQLICEEMGSVNKGSLIFSRSWSLDLGLQENHKVLCDALLISQDKPPVLYTFHMVQDEEFKDYSTQTAQTLKQKLAKIGGYTKKVCVMTKIFYLSPEGKTSCQYDLNSQVIYPESYYWTTAQTMKDLEKALSNILPKENQIFLFVCLFRFCLFVCWFVCFFLR

SEQ ID NO: 2795 - protein, 504 aa, Homo sapiens
LDPRLFLGLLVCSVSFAGFRVLGIRGERVGRSAAMGKPWLRALQLLLLLGASWARAGAPRCTYTFVLPPQKFTGAVCWSGPASTRATPEAANASELAALRMRVGRHEELLRELQRLAAADGAVAGEVRALRKESRGLSARLGQLRAQLQHEAGPGAGPGADLGAEPAAALALLGERVLNASAEAQRAAARFHQLDVKFRELAQLVTQQSSLIARLERLCPGGAGGQQQVLPPPPLVPVVPVRLVGSTSDTSRMLDPAPEPQRDQTQRQQEPMASPMPAGHPAVPTKPVGPWQDCAEARQAGHEQSGVYELRVGRHVVSVWCEQQLEGGGWTVIQRRQDGSVNFFTTWQHYKAGFGRPDGEYWLGLEPVYQLTSRGDHELLVLLEDWGGRGARAHYDGFSLEPESDHYRLRLGQYHGDAGDSLSWHNDKPFSTVDRDRDSYSGNCALYQRGGWWYHACAHSNLNGVWHHGGHYRSRYQDGVYWAEFRGGAYSLRKAAMLIRPLKL

SEQ ID NO: 2796 - protein, 582 aa, Homo sapiens
LQHLFRRGRREVSGKAAPPLGPQVASAIKDHAPQSTLSSSATQSCNLSLAMAPSSPRPALPALLVLLGALFPGPGNAQTSVSPSKVILPRGGSVLVTCSTSCDQPKLLGIETPLPKKELLLPGNNRKVYELSNVQEDSQPMCYSNCPDGQSTAKTFLTVYWTPERVELAPLPSWQPVGKNLTLRCQVEGGAPRANLTVVLLRGEKELKREPAVGEPAEVTTTVLVRRDHHGANFSCRTELDLRPQGLELFENTSAPYQLQTFVLPATPPQLVSPRVLEVDTQGTVVCSLDGLFPVSEAQVHLALGDQRLNPTVTYGNDSFSAKASVSVTAEDEGTQRLTCAVILGNQSQETLQTVTIYSFPAPNVILTKPEVSEGTEVTVKCEAHPRAKVTLNGVPAQPLGPRAQLLLKATPEDNGRSFSCSATLEVAGQLIHKNQTRELRVLYGPRLDERDCPGNWTWPENSQQTPMCQAWGNPLPELKCLKDGTFPLPIGESVTVTRDLEGTYLCRARSTQGEVTRKVTVNVLSPRYEIVIITVVAAAVIMGTAGLSTYLYNRQRKIKKYRLQQAQKGTPMKPNTQATPP

SEQ ID NO: 2797 - protein, 324 aa, Homo sapiens
LSSSATQSCNLSLAMAPSSPRPALPALLVLLGALFPVSEAQVHLALGDQRLNPTVTYGNDSFSAKASVSVTAEDEGTQRLTCAVILGNQSQETLQTVTIYSFPAPNVILTKPEVSEGTEVTVKCEAHPRAKVTLNGVPAQPLGPRAQLLLKATPEDNGRSFSCSATLEVAGQLIHKNQTRELRVLYGPRLDERDCPGNWTWPENSQQTPMCQAWGNPLPELKCLKDGTFPLPIGESVTVTRDLEGTYLCRARSTQGEVTRKVTVNVLSPRYEIVIITVVAAAVIMGTAGLSTYLYNRQRKIKKYRLQQAQKGTPMKPNTQATPP

SEQ ID NO: 2798 - protein, 431 aa, Homo sapiens
LLSNPLKTPPNHRRGVLGVQPRKLSSQPWGARPMESGLLRPAPVSEVIVLHYNYTGKLRGARYQPGAGLRADAVVCLAVCAFIVLENLAVLLVLGRHPRFHAPMFLLLGSLTLSDLLAGAAYAANILLSGPLTLKLSPALWFAREGGVFVALTASVLSLLAIALERSLTMARRGPAPVSSRGRTLAMAAAAWGVSLLLGLLPALGWNCLGRLDACSTVLPLYAKAYVLFCVLAFVGILAAICALYARIYCQVRANARRLPARPGTAGTTSTRARRKPRSLALLRTLSVVLLAFVACWGPLFLLLLLDVACPARTCPVLLQADPFLGLAMANSLLNPIIYTLTNRDLRHALLRLVCCGRHSCGRDPSGSQQSASAAEASGGLRRCLPPGLDGSFSGSERSSPQRDGLDTSGSTGSPGAPTAARTLVSEPAAD

SEQ ID NO: 2799 - protein, 866 aa, Homo sapiens
LAEAASMGPWGWKLRWTVALLLAAAGTAVGDRCERNEFQCQDGKCISYKWVCDGSAECQDGSDESQETCLSVTCKSGDFSCGGRVNRCIPQFWRCDGQVDCDNGSDEQGCPPKTCSQDEFRCHDGKCISRQFVCDSDRDCLDGSDEASCPVLTCGPASFQCNSSTCIPQLWACDNDPDCEDGSDEWPQRCRGLYVFQGDSSPCSAFEFHCLSGECIHSSWRCDGGPDCKDKSDEENCAVATCRPDEFQCSDGNCIHGSRQCDREYDCKDMSDEVGCVNVTLCEGPNKFKCHSGECITLDKVCNMARDCRDWSDEPIKECGTNECLDNNGGCSHVCNDLKIGYECLCPDGFQLVAQRRCEDIDECQDPDTCSQLCVNLEGGYKCQCEEGFQLDPHTKACKAVGSIAYLFFTNRHEVRKMTLDRSEYTSLIPNLRNVVALDTEVASNRIYWSDLSQRMICSTQLDRAHGVSSYDTVISRDIQAPDGLAVDWIHSNIYWTDSVLGTVSVADTKGVKRKTLFRENGSKPRAIVVDPVHGFMYWTDWGTPAKIKKGGLNGVDIYSLVTENIQWPNGITLDLLSGRLYWVDSKLHSISSIDVNGGNRKTILEDEKRLAHPFSLAVFEDKVFWTDIINEAIFSANRLTGSDVNLLAENLLSPEDMVLFHNLTQPRGVNWCERTTLSNGGCQYLCLPAPQINPHSPKFTCACPDGMLLARDMRSCLTEAEAAVATQETSTVRLKVSSTAVRTQHTTTRPVPDTSRLPGATPGLTTVEIVTMSHQALGDVAGRGNEKKPSSVRALSIVLPIVLLVFLCLGVFLLWKNWRLKNINSINFDNPVYQKTTEDEVHICHNQDGYSYPSRQMVSLEDDVA

SEQ ID NO: 2800 - protein, 698 aa, Homo sapiens
LAEAASMGPWGWKLRWTVALLLAAAGTAVGDRCERNEFQCQDGKCISYKWVCDGSAECQDGSDESQETCLSVTCKSGDFSCGGRVNRCIPQFWRCDGQVDCDNGSDEQGCLTLCEGPNKFKCHSGECITLDKVCNMARDCRDWSDEPIKECGTNECLDNNGGCSHVCNDLKIGYECLCPDGFQLVAQRRCEDIDECQDPDTCSQLCVNLEGGYKCQCEEGFQLDPHTKACKAVGSIAYLFFTNRHEVRKMTLDRSEYTSLIPNLRNVVALDTEVASNRIYWSDLSQRMICSTQLDRAHGVSSYDTVISRDIQAPDGLAVDWIHSNIYWTDSVLGTVSVADTKGVKRKTLFRENGSKPRAIVVDPVHGFMYWTDWGTPAKIKKGGLNGVDIYSLVTENIQWPNGITLDLLSGRLYWVDSKLHSISSIDVNGGNRKTILEDEKRLAHPFSLAVFEDKVFWTDIINEAIFSANRLTGSDVNLLAENLLSPEDMVLFHNLTQPRGVNWCERTTLSNGGCQYLCLPAPQINPHSPKFTCACPDGMLLARDMRSCLTEAEAAVATQETSTVRLKVSSTAVRTQHTTTRPVPDTSRLPGATPGLTTVEIVTMSHQALGDVAGRGNEKKPSSVRALSIVLPIVLLVFLCLGVFLLWKNWRLKNINSINFDNPVYQKTTEDEVHICHNQDGYSYPSRQMVSLEDDVA

SEQ ID NO: 2801 - protein, 825 aa, Homo sapiens
LAEAASMGPWGWKLRWTVALLLAAAGTAVGDRCERNEFQCQDGKCISYKWVCDGSAECQDGSDESQETCSPKTCSQDEFRCHDGKCISRQFVCDSDRDCLDGSDEASCPVLTCGPASFQCNSSTCIPQLWACDNDPDCEDGSDEWPQRCRGLYVFQGDSSPCSAFEFHCLSGECIHSSWRCDGGPDCKDKSDEENCAVATCRPDEFQCSDGNCIHGSRQCDREYDCKDMSDEVGCVNVTLCEGPNKFKCHSGECITLDKVCNMARDCRDWSDEPIKECGTNECLDNNGGCSHVCNDLKIGYECLCPDGFQLVAQRRCEDIDECQDPDTCSQLCVNLEGGYKCQCEEGFQLDPHTKACKAVGSIAYLFFTNRHEVRKMTLDRSEYTSLIPNLRNVVALDTEVASNRIYWSDLSQRMICSTQLDRAHGVSSYDTVISRDIQAPDGLAVDWIHSNIYWTDSVLGTVSVADTKGVKRKTLFRENGSKPRAIVVDPVHGFMYWTDWGTPAKIKKGGLNGVDIYSLVTENIQWPNGITLDLLSGRLYWVDSKLHSISSIDVNGGNRKTILEDEKRLAHPFSLAVFEDKVFWTDIINEAIFSANRLTGSDVNLLAENLLSPEDMVLFHNLTQPRGVNWCERTTLSNGGCQYLCLPAPQINPHSPKFTCACPDGMLLARDMRSCLTEAEAAVATQETSTVRLKVSSTAVRTQHTTTRPVPDTSRLPGATPGLTTVEIVTMSHQALGDVAGRGNEKKPSSVRALSIVLPIVLLVFLCLGVFLLWKNWRLKNINSINFDNPVYQKTTEDEVHICHNQDGYSYPSRQMVSLEDDVA

SEQ ID NO: 2802 - protein, 688 aa, Homo sapiens
LAEAASMGPWGWKLRWTVALLLAAAGTAVGDRCERNEFQCQDGKCISYKWVCDGSAECQDGSDESQETCLSVTCKSGDFSCGGRVNRCIPQFWRCDGQVDCDNGSDEQGCPVATCRPDEFQCSDGNCIHGSRQCDREYDCKDMSDEVGCVNVTLCEGPNKFKCHSGECITLDKVCNMARDCRDWSDEPIKECGTNECLDNNGGCSHVCNDLKIGYECLCPDGFQLVAQRRCEDIDECQDPDTCSQLCVNLEGGYKCQCEEGFQLDPHTKACKAVGSIAYLFFTNRHEVRKMTLDRSEYTSLIPNLRNVVALDTEVASNRIYWSDLSQRMICSTQLDRAHGVSSYDTVISRDIQAPDGLAVDWIHSNIYWTDSVLGTVSVADTKGVKRKTLFRENGSKPRAIVVDPVHGFMYWTDWGTPAKIKKGGLNGVDIYSLVTENIQWPNGITLDLLSGRLYWVDSKLHSISSIDVNGGNRKTILEDEKRLAHPFSLAVFEDKVFWTDIINEAIFSANRLTGSDVNLLAENLLSPEDMVLFHNLTQPREAEAAVATQETSTVRLKVSSTAVRTQHTTTRPVPDTSRLPGATPGLTTVEIVTMSHQALGDVAGRGNEKKPSSVRALSIVLPIVLLVFLCLGVFLLWKNWRLKNINSINFDNPVYQKTTEDEVHICHNQDGYSYPSRQMVSLEDDVA

SEQ ID NO: 2803 - protein, 864 aa, Homo sapiens
LAEAASMGPWGWKLRWTVALLLAAAGTAVGDRCERNEFQCQDGKCISYKWVCDGSAECQDGSDESQETCLSVTCKSGDFSCGGRVNRCIPQFWRCDGQVDCDNGSDEQGCPPKTCSQDEFRCHDGKCISRQFVCDSDRDCLDGSDEASCPVLTCGPASFQCNSSTCIPQLWACDNDPDCEDGSDEWPQRCRGLYVFQGDSSPCSAFEFHCLSGECIHSSWRCDGGPDCKDKSDEENCAVATCRPDEFQCSDGNCIHGSRQCDREYDCKDMSDEVGCVNVTLCEGPNKFKCHSGECITLDKVCNMARDCRDWSDEPIKECGTNECLDNNGGCSHVCNDLKIGYECLCPDGFQLVAQRRCEDIDECQDPDTCSQLCVNLEGGYKCQCEEGFQLDPHTKACKAVGSIAYLFFTNRHEVRKMTLDRSEYTSLIPNLRNVVALDTEVASNRIYWSDLSQRMICSTQLDRAHGVSSYDTVISRDIQAPDGLAVDWIHSNIYWTDSVLGTVSVADTKGVKRKTLFRENGSKPRAIVVDPVHGFMYWTDWGTPAKIKKGGLNGVDIYSLVTENIQWPNGITLDLLSGRLYWVDSKLHSISSIDVNGGNRKTILEDEKRLAHPFSLAVFEDKVFWTDIINEAIFSANRLTGSDVNLLAENLLSPEDMVLFHNLTQPRGVNWCERTTLSNGGCQYLCLPAPQINPHSPKFTCACPDGMLLARDMRSCLTEAEAAVATQETSTVRLKVSSTAVRTQHTTTRPVPDTSRLPGATPGLTTVEIVTMSHQALGDVAGRGNEKKPSSVRALSIVLPIVLLVFLCLGVFLLWKNWRLKNINSINFDNPVYQKTTEDEVHICHNQDGYSYPSMVSLEDDVA

SEQ ID NO: 2804 - protein, 147 aa, Homo sapiens
LDGWAHASHWGPGSRRWAPTLGPRGAANHTGLRPSYPAPSPSTSTFTSPPFHFFLYVFFLLETDSIHIEYNIFVYLTGRGRGGDRGGAGPAAWYSSPRGHWEGDPRPLPSPLCTVLWKRNTHLVSKEFILRRVCVCVCLFFLLNLFK

SEQ ID NO: 2805 - protein, 31 aa, Homo sapiens
LTFSFPDRRQWCAIAVLVGVLLLVLILLFSL

SEQ ID NO: 2806 - protein, 880 aa, Homo sapiens
LHRQFRGGPWASGCPPPLLYKVLASGQPAQLPSLRRRDSPVPLTLSPAAPAGSSAGTMGGRVFLVFLAFCVWLTLPGAETQDSRGCARWCPQDSSCVNATACRCNPGFSSFSEIITTPMETCDDINECATLSKVSCGKFSDCWNTEGSYDCVCSPGYEPVSGAKTFKNESENTCQDVDECQQNPRLCKSYGTCVNTLGSYTCQCLPGFKLKPEDPKLCTDVNECTSGQNPCHSSTHCLNNVGSYQCRCRPGWQPIPGSPNGPNNTVCEDVDECSSGQHQCDSSTVCFNTVGSYSCRCRPGWKPRHGIPNNQKDTVCEDMTFSTWTPPPGVHSQTLSRFFDKVQDLGRDYKPGLANNTIQSILQALDELLEAPGDLETLPRLQQHCVASHLLDGLEDVLRGLSKNLSNGLLNFSYPAGTELSLEVQKQVDRSVTLRQNQAVMQLDWNQAQKSGDPGPSVVGLVSIPGMGKLLAEAPLVLEPEKQMLLHETHQGLLQDGSPILLSDVISAFLSNNDTQNLSSPVTFTFSHRSVIPRQKVLCVFWEHGQNGCGHWATTGCSTIGTRDTSTICRCTHLSSFAVLMAHYDVQEEDPVLTVITYMGLSVSLLCLLLAALTFLLCKAIQNTSTSLHLQLSLCLFLAHLLFLVAIDQTGHKVLCSIIAGTLHYLYLATLTWMLLEALYLFLTARNLTVVNYSSINRFMKKLMFPVGYGVPAVTVAISAASRPHLYGTPSRCWLQPEKGFIWGFLGPVCAIFSVNLVLFLVTLWILKNRLSSLNSEVSTLRNTRMLAFKATAQLFILGCTWCLGILQVGPAARVMAYLFTIINSLQGVFIFLVYCLLSQQVREQYGKWSKGIRKLKTESEMHTLSSSAKADTSKPSTVN

SEQ ID NO: 2807 - protein, 858 aa, Homo sapiens
LPSLRRRDSPVPLTLSPAAPAGSSAGTMGGRVFLVFLAFCVWLTLPGAETQDSRGCARWCPQDSSCVNATACRCNPGFSSFSEIITTPMETCDDINECATLSKVSCGKFSDCWNTEGSYDCVCSPGYEPVSGAKTFKNESENTCQDVDECQQNPRLCKSYGTCVNTLGSYTCQCLPGFKLKPEDPKLCTDVNECTSGQNPCHSSTHCLNNVGSYQCRCRPGWQPIPGSPNGPNNTVCEDVDECSSGQHQCDSSTVCFNTVGSYSCRCRPGWKPRHGIPNNQKDTVCEDMTFSTWTPPPGVHSQTLSRFFDKVQDLGRDYKPGLANNTIQSILQALDELLEAPGDLETLPRLQQHCVASHLLDGLEDVLRGLSKNLSNGLLNFSYPAGTELSLEVQKQVDRSVTLRQNQAVMQLDWNQAQKSGDPGMGKLLAEAPLVLEPEKQMLLHETHQGLLQDGSPILLSDVISAFLSNNDTQNLSSPVTFTFSHRSVIPRQKVLCVFWEHGQNGCGHWATTGCSTIGTRDTSTICRCTHLSSFAVLMAHYDVQEEDPVLTVITYMGLSVSLLCLLLAALTFLLCKAIQNTSTSLHLQLSLCLFLAHLLFLVAIDQTGHKVLCSIIAGTLHYLYLATLTWMLLEALYLFLTARNLTVVNYSSINRFMKKLMFPVGYGVPAVTVAISAASRPHLYGTPSRCWLQPEKGFIWGFLGPVCAIFSVNLVLFLVTLWILKNRLSSLNSEVSTLRNTRMLAFKATAQLFILGCTWCLGILQVGPAARVMAYLFTIINSLQGVFIFLVYCLLSQQVREQYGKWSKGIRKLKTESEMHTLSSSAKADTSKPSTPGTVVQACNASTLGGQSRKIT

SEQ ID NO: 2808 - protein, 1028 aa, Homo sapiens
LLILGLVRKPRRPPPPTMDPPSPSRTSQTQPTATSPLTSYRWHTGGGGEKAAGGFRWGRFAGWGRALSHQEPMVSTQPAPRSIFRRVLSAPPKESRTSRLRLSKALWGRHKNPPPEPDPEPEQEAPELEPEPELEPPTPQIPEAPTPNVPVWDIGGFTLLDGKLVLLGGEEEGPRRPRVGSASSEGSIHVAMGNFRDPDRMPGKTEPETAGPNQVHNVRGLLKRLKEKKKARLEPRDGPPSALGSRESLATLSELDLGAERDVRIWPLHPSLLGEPHCFQVTWTGGSRCFSCRSAAERDRWIEDLRRQFQPTQDNVEREETWLSVWVHEAKGLPRAAAGAPGVRAELWLDGALLARTAPRAGPGQLFWAERFHFEALPPARRLSLRLRGLGPGSAVLGRVALALEELDAPRAPAAGLERWFPLLGAPAGAALRARIRARRLRVLPSERYKELAEFLTFHYARLCGALEPALPAQAKEELAAAMVRVLRATGRAQALVTDLGTAELARCGGREALLFRENTLATKAIDEYMKLVAQDYLQETLGQVVRRLCASTEDCEVDPSKCPASELPEHQARLRNSCEEVFETIIHSYDWFPAELGIVFSSWREACKERGSEVLGPRLVCASLFLRLLCPAILAPSLFGLAPDHPAPGPARTLTLIAKVIQNLANRAPFGEKEAYMGFMNSFLEEHGPAMQCFLDQVAMVDVDAAPSGYQGSGDLALQLAVLHAQLCTIFAELDQTTRDTLEPLPTILRAIEEGQPVLVSVPMRLPLPPAQVHSSLSAGEKPGFLAPRDLPKHTPLISKSQSLRSVRRSESWARPRPDEERPLRRPRPVQRTQSVPVRRPARRRQSAGPWPRPKGSLSMGPAPRARPWTRDSASLPRKPSVPWQRQMDQPQDRNQALGTHRPVNKLAELQCEVAALREEQKVLSRLVESLSTQIRALTEQQEQLRGQLQDLDSRLRAGSSEFDSEHNLTSNEGHSLKNLEHRLNEMERTQAQLRDAVQSLQLSPRTRGSWSQPQPLKAPCLNGDTT

SEQ ID NO: 2809 - protein, 669 aa, Homo sapiens
LRCLLWGANKPKRFPPSHSHLQDNVEREETWLSVWVHEAKGLPRAAAGAPGVRAELWLDGALLARTAPRAGPGQLFWAERFHFEALPPARRLSLRLRGLGPGSAVLGRVALALEELDAPRAPAAGLERWFPLLGAPAGAALRARIRARRLRVLPSERYKELAEFLTFHYARLCGALEPALPAQAKEELAAAMVRVLRATGRAQALVTDLGTAELARCGGREALLFRENTLATKAIDEYMKLVAQDYLQETLGQVVRRLCASTEDCEVDPSKCPASELPEHQARLRNSCEEVFETIIHSYDWFPAELGIVFSSWREACKERGSEVLGPRLVCASLFLRLLCPAILAPSLFGLAPDHPAPGPARTLTLIAKVIQNLANRAPFGEKEAYMGFMNSFLEEHGPAMQCFLDQVAMVDVDAAPSGYQGSGDLALQLAVLHAQLCTIFAELDQTTRDTLEPLPTILRAIEEGQPVLVSVPMRLPLPPAQVHSSLSAGEKPGFLAPRDLPKHTPLISKSQSLRSVRRSESWARPRPDEERPLRRPRPVQRTQSVPVRRPARRRQSAGPWPRPKGSLSMGPAPRARPWTRDSASLPRKPSVPWQRQMDQPQDRNQALGTHRPVNKLAELQCEVAALREEQKVLSRLVESLSTQIRALTEQQEQLRGQLQDLDSRLRAG

SEQ ID NO: 2810 - protein, 46 aa, Homo sapiens
LSAAFFIILYIVTDKYCITVHRETGGHFWATWFVFIRFCWVGFFFN

SEQ ID NO: 2811 - protein, 96 aa, Homo sapiens
LLQRAFAAKASSSPLLRPSMATPTQTPTKAPEEPDPFYYDYNTVQTVGMTLATILFLLGILIVISKKVKCRKADSSPTCKSCKSELPSSAPGGGGV

SEQ ID NO: 2812 - protein, 99 aa, Homo sapiens
LLQRAFAAKASSSPLLRPSMATPTQTPTKAPEEPDPFYYDYNTVQTVGMTLATILFLLGILIVISKKVKCRKADSRSESPTCKSCKSELPSSAPGGGGV

SEQ ID NO: 2813 - protein, 135 aa, Homo sapiens
LQRAFAAKASSSPLLRPSMATPTQTPTKAPEEPDPFYYDYNTVQTVGMTLATILFLLGILIVISKCDPFLGCLSLRFLCWLSSISYPLCPVFLFCLSLPTGKKVKCRKADSRSESPTCKSCKSELPSSAPGGGGV

SEQ ID NO: 2814 - protein, 37 aa, Homo sapiens
MRIRVTLTPRFPPLDWFYCGSGLISMSCCGAFTAFGL

SEQ ID NO: 2815 - protein, 41 aa, Homo sapiens
MRTGLQPSQAPWLLSWMLSVLRFTMRIVFPALAPDPYYSVN

SEQ ID NO: 2816 - protein, 48 aa, Homo sapiens
AREDGGRKPADRRLLHPKARAGAGTLGLAVFSSCSAVGGGGRNQSLGD

SEQ ID NO: 2817 - protein, 76 aa, Homo sapiens
SDAALRAPVVIKGRRRATHVTRIAEGAEVVGFLSLSLSLLALPTQQRRPPARNGLPGASSSSFPKLNCPVSDSDFS

SEQ ID NO: 2818 - protein, 23 aa, Homo sapiens
EVGGSPFIWLLILAGISGLSAGP

SEQ ID NO: 2819 - protein, 25 aa, Homo sapiens
PLGWESEGFLASFLLLLFSSLLLCR

SEQ ID NO: 2820 - protein, 50 aa, Homo sapiens
MCTAYCLSPVFKLYKLCFLIFPSALFWGGGYSSFGITFPPPMCFPSFEIF

SEQ ID NO: 2821 - protein, 46 aa, Homo sapiens
GTRTRGGGPRRRRARLSKNQVCRSGAVAAAAAAATVAAAELRRAGR

SEQ ID NO: 2822 - protein, 50 aa, Homo sapiens
KGNLVLSAEETGGQKAESRLRLQFLAYLCSLILSCLFVVLKGRSFVLWVC

SEQ ID NO: 2823 - protein, 51 aa, Homo sapiens
LGTESPGRRLGGRHLFCPGLGLPEHLSFLSQIVFSFSFKASGVAATLPGSL

SEQ ID NO: 2824 - protein, 68 aa, Homo sapiens
GGTGQAGQGRGGAAGVSVAWISLGAAAGSFSVCISASPRVPSPGSPPLSRGFGALGSHSLVLLHLPLT

SEQ ID NO: 2825 - protein, 74 aa, Homo sapiens
AALRAPVVIKGRRRATHVTRIAEGAEVVGFLSLSLSLLALPTQQRRPPARNGLPGASSSSFPKLNCPVSDSDFS

SEQ ID NO: 2826 - protein, 74 aa, Homo sapiens
AGLRAEVSPHCVFFSFYPKNGAVSTLAFLSPGWERGWCAEWFAFFSLELVSLFFFFFFFSFFRLSAVRAGLPGP

SEQ ID NO: 2827 - protein, 44 aa, Homo sapiens
LAFCFLLTGFGHWFFIFCLLHASRPPHLLPHSLDPALWAFTSVL

SEQ ID NO: 2828 - protein, 765 aa, Homo sapiens
VWQFRMMDQARSAFSNLFGGEPLSYTRFSLARQVDGDNSHVEMKLAVDEEENADNNTKANVTKPKRCSGSICYGTIAVIVFFLIGFMIGYLGYCKGVEPKTECERLAGTESPVREEPGEDFPAARRLYWDDLKRKLSEKLDSTDFTGTIKLLNENSYVPREAGSQKDENLALYVENQFREFKLSKVWRDQHFVKIQVKDSAQNSVIIVDKNGRLVYLVENPGGYVAYSKAATVTGKLVHANFGTKKDFEDLYTPVNGSIVIVRAGKITFAEKVANAESLNAIGVLIYMDQTKFPIVNAELSFFGHAHLGTGDPYTPGFPSFNHTQFPPSRSSGLPNIPVQTISRAAAEKLFGNMEGDCPSDWKTDSTCRMVTSESKNVKLTVSNVLKEIKILNIFGVIKGFVEPDHYVVVGAQRDAWGPGAAKSGVGTALLLKLAQMFSDMVLKDGFQPSRSIIFASWSAGDFGSVGATEWLEGYLSSLHLKAFTYINLDKAVLGTSNFKVSASPLLYTLIEKTMQNVKHPVTGQFLYQDSNWASKVEKLTLDNAAFPFLAYSGIPAVSFCFCEDTDYPYLGTTMDTYKELIERIPELNKVARAAAEVAGQFVIKLTHDVELNLDYERYNSQLLSFVRDLNQYRADIKEMGLSLQWLYSARGDFFRATSRLTTDFGNAEKTDRFVMKKLNDRVMRVEYHFLSPYVSPKESPFRHVFWGSGSHTLPALLENLKLRKQNNGAFNETLFRNQLALATWTIQGAANALSGDVWDIDNEF

SEQ ID NO: 2829 - protein, 911 aa, Homo sapiens
LSVGAGVRWPLVRSGGSKDSVATMLSRLFRMHGLFVASHPWEVIVGTVTLTICMMSMNMFTGNNKICGWNYECPKFEEDVLSSDIIILTITRCIAILYIYFQFQNLRQLGSKYILGIAGLFTIFSSFVFSTVVIHFLDKELTGLNEALPFFLLLIDLSRASTLAKFALSSNSQDEVRENIARGMAILGPTFTLDALVECLVIGVGTMSGVRQLEIMCCFGCMSVLANYFVFMTFFPACVSLVLELSRESREGRPIWQLSHFARVLEEEENKPNPVTQRVKMIMSLGLVLVHAHSRWIADPSPQNSTADTSKVSLGLDENVSKRIEPSVSLWQFYLSKMISMDIEQVITLSLALLLAVKYIFFEQTETESTLSLKNPITSPVVTQKKVPDNCCRREPMLVRNNQKCDSVEEETGINRERKVEVIKPLVAETDTPNRATFVVGNSSLLDTSSVLVTQEPEIELPREPRPNEECLQILGNAEKGAKFLSDAEIIQLVNAKHIPAYKLETLMETHERGVSIRRQLLSKKLSEPSSLQYLPYRDYNYSLVMGACCENVIGYMPIPVGVAGPLCLDEKEFQVPMATTEGCLVASTNRGCRAIGLGGGASSRVLADGMTRGPVVRLPRACDSAEVKAWLETSEGFAVIKEAFDSTSRFARLQKLHTSIAGRNLYIRFQSRSGDAMGMNMISKGTEKALSKLHEYFPEMQILAVSGNYCTDKKPAAINWIEGRGKSVVCEAVIPAKVVREVLKTTTEAMIEVNINKNLVGSAMAGSIGGYNAHAANIVTAIYIACGQDAAQNVGSSNCITLMEASGPTNEDLYISCTMPSIEIGTVGGGTNLLPQQACLQMLGVQGACKDNPGENARQLARIVCGTVMAGELSLMAALAAGHLVKSHMIHNRSKINLQDLQGACTKKTA

SEQ ID NO: 2830 - protein, 124 aa, Homo sapiens
LVRAPQVQTRPLSSRFVERRGALYRSPMNQENPPPYPGPGPTAPYPPYPPQPMGPGPMGGPYPPPQGYPYQGYPQYGWQGGPQEPPKTTVYVVEDQRRDELGPSTCLTACWTALCCCCLWDMLT

SEQ ID NO: 2831 - protein, 30 aa, Homo sapiens
IPFIIQNLGLLTGFTIMVVLTMYSGQIQIG

SEQ ID NO: 2832 - protein, 210 aa, Homo sapiens
VDRAADRGADARRGRPLGTAGGAVSVAMTDQTYCDRLVQDTPFLTGHGRLSEQQVDRIILQLNRYYPQILTNKEAEKFRNPKASLRVRLCDLLSHLQRSGERDCQEFYRALYIHAQPLHSRLPSRHALQNSDCTELDSGSQSGELSNRGPMSFLAGLGLAVGLALLLYCYPPDPKGLPGTRRVLGFSPVIIDRHVSRYLLAFLADDLGGL

SEQ ID NO: 2833 - protein, 249 aa, Homo sapiens
IGDAELRGTGLRRDGSKKCCGNRQAMNQADPRLRAVCLWTLTSAAMSRGDNCTDLLALGIPSITQAWGLWVLLGAVTLLFLISLAAHLSQWTRGRSRSHPGQGRWVKDNRDGLTESSLLPRSPHSSPKLCVASGESVEEVPLYGNLHYLQTGRLSQDPEPDQQDPTLGGPARAAEEVMCYTSLQLRPPQGRIPGPGTPVKYSEVVLDSEPKSQASGPEPELYASVCAQTRRARASFPDQAYANSQPAAS

SEQ ID NO: 2834 - protein, 126 aa, Homo sapiens
KMHKEEHEVAVLGPPPSTILPRSTVINIHSETSVPDHVVWSLFNTLFLNWCCLGFIAFAYSVKSRDRKMVGDVTGAQAYASTAKCLNIWALILGILMTIGFILLLVFGSVTVYHIMLQIIQEKRGY

SEQ ID NO: 2835 - protein, 35 aa, Homo sapiens
LLQQRRRKMRRRRSLKSQMMTWDLAFLIKFLLPCK

SEQ ID NO: 2836 - protein, 276 aa, Homo sapiens
VEGSSRTGGMGSACIKVTKYFLFLFNLIFFILGAVILGFGVWILADKSSFISVLQTSSSSLRMGAYVFIGVGAVTMLMGFLGCIGAVNEVRCLLGLYFAFLLLILIAQVTAGALFYFNMGKLKQEMGGIVTELIRDYNSSREDSLQDAWDYVQAQVKCCGWVSFYNWTDNAELMNRPEVTYPCSCEVKGEEDNSLSVRKGFCEAPGNRTQSGNHPEDWPVYQEGCMEKVQAWLQENLGIILGVGVGVAIIELLGMVLSICLCRHVHSEDYSKVPKY

SEQ ID NO: 2837 - protein, 408 aa, Homo sapiens
LSVSGIQASLPDMESNLSGLVPAAGLVPALPPAVTLGLTAAYTTLYALLFFSVYAQLWLVLLYGHKRLSYQTVFLALCLLWAALRTTLFSFYFRDTPRANRLGPLPFWLLYCCPVCLQFFTLTLMNLYFAQVVFKAKVKRRPEMSRGLLAVRGAFVGASLLFLLVNVLCAVLSHRRRAQPWALLLVRVLVSDSLFVICALSLAACLCLVARRAPSTSIYLEAKGTSVCQAAAMGGAMVLLYASRACYNLTALALAPQSRLDTFDYDWYNVSDQADLVNDLGNKGYLVFGLILFVWELLPTTLLVGFFRVHRPPQDLSTSHILNGQVFASRSYFFDRAGHCEDEGCSWEHSRGESTSMSGSLGSGSWYGAIGREPGWYGGSQTKTTPLLFSQVPGPGGHHHSLYSTPQT

SEQ ID NO: 2838 - protein, 30 aa, Homo sapiens [sequence omitted]

SEQ ID NO: 2839 - protein, 486 aa, Homo sapiens
VKLFGKRLEGPMAAKSQPNIPKAKSLDGVTNDRTASQGQWGRAWEVDWFSLASVIFLLLFAPFIVYYFIMACDQYSCALTGPVVDIVTGHARLSDIWAKTPPITRKAAQLYTLWVTFQVLLYTSLPDFCHKFLPGYVGGIQEGAVTPAGVVNKYQINGLQAWLLTHLLWFANAHLLSWFSPTIIFDNWIPLLWCANILGYAVSTFAMVKGYFFPTSARDCKFTGNFFYNYMMGIEFNPRIGKWFDFKLFFNGRPGIVAWTLINLSFAAKQRELHSHVTNAMVLVNVLQAIYVIDFFWNETWYLKTIDICHDHFGWYLGWGDCVWLPYLYTLQGLYLVYHPVQLSTPHAVGVLLLGLVGYYIFRVANHQKDLFRRTDGRCLIWGRKPKVIECSYTSADGQRHHSKLLVSGFWGVARHFNYVGDLMGSLAYCLACGGGHLLPYFYIIYMAILLTHRCLRDEHRCASKYGRDWERYTAAVPYRLLPGIF

SEQ ID NO: 2840 - protein, 606 aa, Homo sapiens
RGSGSRPEMPCIQAQYGTPAPSPGPRDHLASDPLTPEFIKPTMDLASPEAAPAAPTALPSFSTFMDGYTGEFDTFLYQLPGTVQPCSSASSSASSTSSSSATSPASASFKFEDFQVYGCYPGPLSGPVDEALSSSGSDYYGSPCSAPSPSTPSFQPPQLSPWDGSFGHFSPSQTYEGLRAWTEQLPKASGPPQPPAFFSFSPPTGPSPSLAQSPLKLFPSQATHQLGEGESYSMPTAFPGLAPTSPHLEGSGILDTPVTSTKARSGAPGGSEGRCAVCGDNASCQHYGVRTCEGCKGFFKRTVQKNAKYICLANKDCPVDKRRRNRCQFCRFQKCLAVGMVKEVVRTDSLKGRRGRLPSKPKQPPDASPANLLTSLVRAHLDSGPSTAKLDYSKFQELVLPHFGKEDAGDVQQFYDLLSGSLEVIRKWAEKIPGFAELSPADQDLLLESAFLELFILRLAYRSKPGEGKLIFCSGLVLHRLQCARGFGDWIDSILAFSRSLHSLLVDVPAFACLSALVLITDRHGLQEPRRVEELQNRIASCLKEHVAAVAGEPQPASCLSRLLGKLPELRTLCTQGLQRIFYLKLEDLVPPPPIIDKIFMDTLPF

SEQ ID NO: 2841 - protein, 2746 aa, Homo sapiens
MLRGESGIWPRHAVKLLSVLNQMPQRHGPDTFFNFPGCSAAAIALPPIAKWPYQNGFTLNTWFRMDPLNNINVDKDKPYLYCFRTSKGVGYSAHFVGNCLIVTSLKSKGKGFQHCVKYDFQPRKWYMISIVHIYNRWRNSEIRCYVNGQLVSYGDMAWHVNTNDSYDKCFLGSSETADANRVFCGQLGAVYVFSEALNPAQIFAIHQLGPGYKSTFKFKSESDIHLAEHHKQVLYDGKLASSIAFTYNAKATDAQLCLESSPKENASIFVHSPHALMLQDVKAIVTHSIHSAIHSIGGIQVLFPLFAQLDNRQLNDSQVETTVCATLLAFLVELLKSSVAMQEQMLGGKGFLVIGYLLEKSSRVHITRAVLEQFLSFAKYLDGLSHGAPLLKQLCDHILFNPAIWIHTPAKVQLSLYTYLSAEFIGTATIYTTIRRVGTVLQLMHTLKYYYWVINPADSSGITPKGLDGPRPSQKEIISLRAFMLLFLKQLILKDRGVKEDELQSILNYLLTMHEDENIHDVLQLLVALMSEHPASMIPAFDQRNGIRVIYKLLASKSESIWVQALKVLGYFLKHLGHKRKVEIMHTHSLFTLLGERLMLHTNTVTVTTYNTLYEILTEQVCTQVVHKPHPEPDSTVKIQNPMILKVVATLLKNSTPSAELMEVRRLFLSDMIKLFSNSRENRRCLLQCSVWQDWMFSLGYINPKNSEEQKITEMVYNIFRILLYHAIKYEWGGWRVWVDTLSIAHSKVTYEAHKEYLAKMYEEYQRQEEENIKKGKKGNVSTISGLSSQTTGAKGGMEIREIEDLSQSQSPESETDYPVSTDTRDLLMSTKVSDDILGNSDRPGSGVHVEVHDLLVDIKAEKVEATEVKLDDMDLSPETLVGGENGALVEVESLLDNVYSAAVEKLQNNVHGSVGIIKKNEEKDNGPLITLADEKEDLPNSSTSFLFDKIPKQEEKLLPELSSNHIIPNIQDTQVHLGVSDDLGLLAHMTGSVDLTCTSSIIEEKEFKIHTTSDGMSSISERDLASSTKGLEYAEMTATTLETESSSSKIVPNIDAGSIISDTERSDDGKESGKEIRKIQTTTTTQAVQGRSITQQDRDLRVDLGFRGMPMTEEQRRQFSPGPRTTMFRIPEFKWSPMHQRLLTDLLFALETDVHVWRSHSTKSVMDFVNSNENIIFVHNTIHLISQMVDNIIIACGGILPLLSAATSPTGSKTELENIEVTQGMSAETAVTFLSRLMAMVDVLVFASSLNFSEIEAEKNMSSGGLMRQCLRLVCCVAVRNCLECRQRQRDRGNKSSHGSSKPQEVPQSVTATAASKTPLENVPGNLSPIKDPDRLLQDVDINRLRAVVFRDVDDSKQAQFLALAVVYFISVLMVSKYRDILEPQRETTRTGSQPGRNIRQEINSPTSTVVVIPSIPHPSLNHGFLAKLIPEQSFGHSFYKETPAAFPDTIKEKETPTPGEDIQVESSIPHTDSGIGEEQVASILNGAELETSTGPDAMSELLSTLSSEVKKSQESLTENPSETLKPATSISSISQTKGINVKEILKSLVAAPVEIAECGPEPIPYPDPALKRETQAILPMQFHSFDRSVVVPVKKPPPGSLAVTTVGATTAGSGLPTGSTSNIFAATGATPKSMINTTGAVDSGSSSSSSSSSFVNGATSKNLPAVQTVAPMPEDSAENMSITAKLERALEKVAPLLREIFVDFAPFLSRTLLGSHGQELLIEGLVCMKSSTSVVELVMLLCSQEWQNSIQKNAGLAFIELINEGRLLCHAMKDHIVRVANEAEFILNRQRAEDVHKHAEFESQCAQYAADRREEEKMCDHLISAAKHRDHVTANQLKQKILNILTNKHGAWGAVSHSQLHDFWRLDYWEDDLRRRRRFVRNAFGSTHAEALLKAAIEYGTEEDVVKSKKTFRSQAIVNQNAETELMLEGDDDAVSLLQEKEIDNLAGPVVLSTPAQLIAPVVVAKGTLSITTTEIYFEVDEDDSAFKKIDTKVLAYTEGLHGKWMFSEIRAVFSRRYLLQNTALEVFMANRTSVMFNFPDQATVKKVVYSLPRVGVGTSYGLPQARRISLATPRQLYKSSNMTQRWQRREISNFEYLMFLNTIAGRTYNDLNQYPVFPWVLTNYESEELDLTLPGNFRDLSKPIGALNPKRAVFYAERYETWEDDQSPPYHYNTHYSTATSTLSWLVRIEPFTTFFLNANDGKFDHPDRTFSSVARSWRTSQRDTSDVKELIPEFYYLPEMFVNSNGYNLGVREDEVVVNDVDLPPWAKKPEDFVRINRMALESEFVSCQLHQWIDLIFGYKQRGPEAVRALNVFHYLTYEGSVNLDSITDPVLREAMEAQIQNFGQTPSQLLIEPHPPRSSAMHLCFLPQSPLMFKDQMQQDVIMVLKFPSNSPVTHVAANTLPHLTIPAVVTVTCSRLFAVNRWHNTVGLRGAPGYSLDQAHHLPIEMDPLIANNSGVNKRQITDLVDQSIQINAHCFVVTADNRYILICGFWDKSFRVYSTETGKLTQIVFGHWDVVTCLARSESYIGGDCYIVSGSRDATLLLWYWSGRHHIIGDNPNSSDYPAPRAVLTGHDHEVVCVSVCAELGLVISGAKEGPCLVHTITGDLLRALEGPENCLFPRLISVSSEGHCIIYYERGRFSNFSINGKLLAQMEINDSTRAILLSSDGQNLVTGGDNGVVEVWQACDFKQLYIYPGCDAGIRAMDLSHDQRTLITGMASGSIVAFNIDFNRWHYEHQNRY

SEQ ID NO: 2842 - protein, 731 aa, Homo sapiens
LAGAARRALRARGRRRRTRGRTLAAGSLAAGSAGTGRAGRVALTMVSYWDTGVLLCALLSCLLLTGSSSGSKLKDPELSLKGTQHIMQAGQTLHLQCRGEAAHKWSLPEMVSKESERLSITKSACGRNGKQFCSTLTLNTAQANHTGFYSCKYLAVPTSKKKETESAIYIFISDTGRPFVEMYSEIPEIIHMTEGRELVIPCRVTSPNITVTLKKFPLDTLIPDGKRIIWDSRKGFIISNATYKEIGLLTCEATVNGHLYKTNYLTHRQTNTIIDVQISTPRPVKLLRGHTLVLNCTATTPLNTRVQMTWSYPDEKNKRASVRRRIDQSNSHANIFYSVLTIDKMQNKDKGLYTCRVRSGPSFKSVNTSVHIYDKAFITVKHRKQQVLETVAGKRSYRLSMKVKAFPSPEVVWLKDGLPATEKSARYLTRGYSLIIKDVTEEDAGNYTILLSIKQSNVFKNLTATLIVNVKPQIYEKAVSSFPDPALYPLGSRQILTCTAYGIPQPTIKWFWHPCNHNHSEARCDFCSNNEESFILDADSNMGNRIESITQRMAIIEGKNKMASTLVVADSRISGIYICIASNKVGTVGRNISFYITDVPNGFHVNLEKMPTEGEDLKLSCTVNKFLYRDVTWILLRTVNNRTMHYSISKQKMAITKEHSITLNLTIMNVSLQDSGTYACRARNVYTGEEILQKKEITIRGEHCNKKAVFSRISKFKSTRNDCTTQSNVKH

SEQ ID NO: 2843 - protein, 186 aa, Homo sapiens
ISGSRPNRQTMGAPATRRCVEWLLGLYFLSHIPITLFMDLQAVLPRELYPVEFRNLLKWYAKEFKDPLLQEPPAWFKSFLFCELVFQLPFFPIATYAFLKGSCKWIRTPAIIYSVHTMTTLIPILSTFLFEDFSKASGFKGQRPETLHERLTLVSVYAPYLLIPFILLIFMLRSPYYKYEEKRKKK

SEQ ID NO: 2844 - protein, 327 aa, Homo sapiens
ISAPFTRRNPGAGARSAGVTMTKAGSKGGNLRDKLDGNELDLSLSDLNEVPVKELAALPKATILDLSCNKLTTLPSDFCGLTHLVKLDLSKNKLQQLPADFGRLVNLQHLDLLNNKLVTLPVSFAQLKNLKWLDLKDNPLDPVLAKVAGDCLDEKQCKQCANKVLQHMKAVQADQERERQRRLEVEREAEKKREAKQRAKEAQERELRKREKAEEKERRRKEYDALKAAKREQEKKPKKEANQAPKSKSGSRPRKPPPRKHTRSWAVLKLLLLLLLFGVAGGLVACRVTELQQQPLCTSVNTIYDNAVQGLRRHEILQWVLQTDSQQ

SEQ ID NO: 2845 - protein, 62 aa, Homo sapiens
LRFLDVTQGRLVAKPPRPARSTAEDSSTPRDMLGLRPPLLALVGLLSLGCGEFCVPRRGLHA

SEQ ID NO: 2846 - protein, 238 aa, Homo sapiens
TQPSAHKDMTTNAGPLHPYWPQHLRLDNFVPNDRPTWHILAGLFSVTGVLVVTTWLLSGRAAVVPLGTWRRLSLCWFAVCGFIHLVIEGWFVLYYEDLLGDQAFLSQLWKEYAKGDSRYILGDNFTVCMETITACLWGPLSLWVVIAFLRQHPLRFILQLVVSVGQIYGDVLYFLTEHRDGFQHGELGHPLYFWFYFVFMNALWLVLPGVLVLDAVKHLTHAQSTLDAKATKAKSKKN

SEQ ID NO: 2847 - protein, 30 aa, Homo sapiens
MSSLPLARELFFDGLLYFFLLFSGALLING

SEQ ID NO: 2848 - protein, 315 aa, Homo sapiens [sequence omitted]

SEQ ID NO: 2849 - protein, 71 aa, Homo sapiens
MEESITFYLPNILKMLEDPYAAWRLLFLGTQVSSLYCYNFFSRTAVFFACTNGTSSSAGYFSTAGVWREEG

SEQ ID NO: 2850 - protein, 111 aa, Homo sapiens
MQNFLLSNIAWSWVEWIAAVTIAAGTAAIGYLAYKRFYVKDHRNKAMINLHIQKDNPKIVHAFDMEDLGDKAVYCRCWRSKKFPFCDGAHTKHNEETGDNVGPLIIKKKET

SEQ ID NO: 2851 - protein, 159 aa, Homo sapiens
MHYYRYSNAKVSCWYKYLLFSYNIIFWLAGVVFLGVGLWAWSEKGVLSDLTKVTRMHGIDPVVLVLMVGVVMFTLGFAGCVGALRENICLLNFFCGTIVLIFFLELAVAVLAFLFQDWVRDRFREFFESNIKSYRDDIDLQNLIDSLQKAVSTSPAGPR

SEQ ID NO: 2852 - protein, 439 aa, Homo sapiens
MALPAGAAALLLLLPATMFHLLLAARSGPARLLGPPASLPGLEVLWSPRALLLWLAWLGLQAALYLLPARKVRAPLADARGREANGLGEGKDAPGLIRAPLDPQVAEGQELKDKSRLRYPINGFQALVLTALLVGLGMSAGLPLGALPEMLLPLAFVATLTAFIFSLFLYMKAQVAPVSALAPGGNSGNPIYDFFLGRELNPRICFFDFKYFCELRPGLIGWVLINLALLMKEAELRGSPSLAMWLVNGFQLLYVGDALWHEEAVLTTMDITHDGFGFMLAFGDMAWVPFTYSLQAQFLLHHPQPLGLPMASVICLINATGYYIFRGANSQKNTFRKNPSDPRVAGLETISTATGRKLLVSGWWGMVRHPNYLGDLIMALAWSLPCGVSHLLPYFYLLYFTALLVHREARDERQCLQKYGLAWQEYCRRVPYRIMPYIY

SEQ ID NO: 2853 - protein, 142 aa, Homo sapiens
MACARPLISVYSEKGESSGKNVTLPAVFKAPIRPDIVNFVHTNLRKNNRQPYAVSELAGHQTSAESWGTGRAVARIPRVRGGGTHRSGQGAFGNMCRGGRMFAPTKTWRRWHRRVNTTQKRYAICSALAASALPALVMSKGL

SEQ ID NO: 2854 - protein, 1960 aa, Homo sapiens
MDAHSFYNFIYFILLIIVGSFFMINLCLVVIATQFSETKQRESQLMREQRARHLSNDSTLASFSEPGSCYEELLKYVGHIFRKVKRRSLRLYARWQSRWRKKVDPSAVQGQGPGHRQRRAGRHTASVHHLVYHHHHHHHHHYHFSHGSPRRPGPEPGACDTRLVRAGAPPSPPSPGRGPPDAESVHSIYHADCHIEGPQERARVAHAAATAAASLRLATGLGTMNYPTILPSGVGSGKGSTSPGPKGKWAGGPPGTGGHGPLSLNSPDPYEKIPHVVGEHGLGQAPGHLSGLSVPCPLPSPPAGTLTCELKSCPYCTRALEDPEGELSGSESGDSDGRGVYEFTQDVRHGDRWDPTRPPRATDTPGPGPGSPQRRAQQRAAPGEPGWMGRLWVTFSGKLRRIVDSKYFSRGIMMAILVNTLSMGVEYHEQPEELTNALEISNIVFTSMFALEMLLKLLACGPLGYIRNPYNIFDGIIVVISVWEIVGQADGGLSVLRTFRLLRVLKLVRFLPALRRQLVVLVKTMDNVATFCTLLMLFIFIFSILGMHLFGCKFSLKTDTGDTVPDRKNFDSLLWAIVTVFQILTQEDWNVVLYNGMASTSSWAALYFVALMTFGNYVLFNLLVAILVEGFQAEGDANRSDTDEDKTSVHFEEDFHKLRELQTTELKMCSLAVTPNGHLEGRGSLSPPLIMCTAATPMPTPKSSPFLDAAPSLPDSRRGSSSSGDPPLGDQKPPASLRSSPCAPWGPSGAWSSRRSSWSSLGRAPSLKRRGQCGERESLLSGEGKGSTDDEAEDGRAAPGPRATPLRRAESLDPRPLRPAALPPTKCRDRDGQVVALPSDFFLRIDSHREDAAELDDDSEDSCCLRLHKVLEPYKPQWCRSREAWALYLFSPQNRFRVSCQKVITHKMFDHVVLVFIFLNCVTIALERPDIDPGSTERVFLSVSNYIFTAIFVAEMMVKVVALGLLSGEHAYLQSSWNLLDGLLVLVSLVDIVVAMASAGGAKILGVLRVLRLLRTLRPLRVISRAPGLKLVVETLISSLRPIGNIVLICCAFFIIFGILGVQLFKGKFYYCEGPDTRNISTKAQCRAAHYRWVRRKYNFDNLGQALMSLFVLSSKDGWVNIMYDGLDAVGVDQQPVQNHNPWMLLYFISFLLIVSFFVLNMFVGVVVENFHKCRQHQEAEEARRREEKRLRRLERRRRKAQRRPYYADYSPTRRSIHSLCTSHYLDLFITFIICVNVITMSMEHYNQPKSLDEALKYCNYVFTIVFVFEAALKLVAFGFRRFFKDRWNQLDLAIVLLSLMGITLEEIEMSAALPINPTIIRIMRVLRIARVLKLLKMATGMRALLDTVVQALPQVGNLGLLFMLLFFIYAALGVELFGRLECSEDNPCEGLSRHATFSNFGMAFLTLFRVSTGDNWNGIMKDTLRECSREDKHCLSYLPALSPVYFVTFVLVAQFVLVNVVVAVLMKHLEESNKEAREDAELDAEIELEMAQGPGSARRVDADRPPLPQESPGARDAPNLVARKVSVSRMLSLPNDSYMFRPVVPASAPHPRPLQEVEMETYGAGTPLGSVASVHSPPAESCASLQIPLAVSSPARSGEPLHALSPRGTARSPSLSRLLCRQEAVHTDSLEGKIDSPRDTLDPAEPGEKTPVRPVTQGGSLQSPPRSPRPASVRTRKHTFGQRCVSSRPAAPGGEEAEASDPADEEVSHITSSACPWQPTAEPHGPEASPVAGGERDLRRLYSVDAQGFLDKPGRADEQWRPSAELGSGEPGEAKAWGPEAEPALGARRKKKMSPPCISVEPPAEDEGSARPSAAEGGSTTLRRRTPSCEATPHRDSLEPTEGSGAGGDPAAKGERWGQASCRAEHLTVPSFAFEPLDLGVPSGDPFLDGSHSVTPESRASSSGAIVPLEPPESEPPMPVGDPPEKRRGLYLTVPQCPLEKPGSPSATPAPGGGADDPV

SEQ ID NO: 2855 - protein, 265 aa, Homo sapiens
MEDLPRPSISAEPGTVIPLGSHVTFVCRGPVGVQTFRLERDSRSTYNDTEDVSQASPSESEARFRIDSVREGNAGLYRCIYYKPPKWSEQSDYLELLVKESSGGPDSPDTEPGSSAGPTQRPSDNSHNEHAPASQGLKAEHLYILIGVSVVFLFCLLLLVLFCLHRQNQIKQGPPRSKDEEQKPQQRPDLAVDVLERTADKATVNGLPEKDRETDTSALAAGSSQEVTYAQLDHWALTQRTARAVSPQSTKPMAESITYAAVARH

SEQ ID NO: 2856 - protein, 338 aa, Homo sapiens
MHLCAISVDRYIAIKKPIQANQYNSRATAFIKITVVWLISIGIAIPVPIKGIETDVDNPNNITCVLTKERFGDFMLFGSLAAFFTPLAIMIVTYFLTIHALQKKAYLVKNKPPQRLTWLTVSTVFQRDETPCSSPEKVAMLDGSRKDKALPNSGDETLMRRTSTIGKKSVQTISNEQRASKVLGIVFFLFLLMWCPFFITNITLVLCDSCNQTTLQMLLEIFVWIGYVSSGVNPLVYTLFNKTFRDAFGRYITCNYRATKSVKTLRKRSSKIYFRNPMAENSKFFKKHGIRNGINPAMYQSPMRLRSSTIQSSSIILLDTLLLTENEGDKTEEQVSYV

SEQ ID NO: 2857 - protein, 486 aa, Homo sapiens [sequence omitted]

SEQ ID NO: 2858 - protein, 220 aa, Homo sapiens
MAGVTASYGGSLLPEGHLNLTAPCNAACSCQPEHYSPVCGSDGLMYFSLCHAGCPAATETNVDGQKVYRDCSCIPQNLSSGFGHATAGKCTSTCQRKPLLLVFIFVVIFFTFLSSIPALTATLRCVRDPQRSFALGIQWIVVRILGGIPGPIAFGWVIDKACLLWQDQCGQQGSCLVYQNSAMSRYILIMGLLYKFQLPEVHHSLNVLNRKFQKQTVHNL

SEQ ID NO: 2859 - protein, 713 aa, Homo sapiens
MSFVIAACQLVLGLLMTSLTESSIQNSECPQLCVCEIRPWFTPQSTYREATTVDCNDLRLTRIPSNLSSDTQVLLLQSNNIAKTVDELQQLFNLTELDFSQNNFTNIKEVGLANLTQLTTLHLEENQITEMTDYCLQDLSNLQELYINHNQISTISAHAFAGLKNLLRLHLNSNKLKVIDSRWFDSTPNLEILMIGENPVIGILDMNFKPLANLRSLVLAGMYLTDIPGNALVGLDSLESLSFYDNKLVKVPQLALQKVPNLKFLDLNKNPIHKIQEGDFKNMLRLKELGINNMGELVSVDRYALDNLPELTKLEATNNPKLSYIHRLAFRSVPALESLMLNNNALNAIYQKTVESLPNLREISIHSNPLRCDCVIHWINSNKTNIRFMEPLSMFCAMPPEYKGHQVKEVLIQDSSEQCLPMISHDSFPNRLNVDIGTTVFLDCRAMAEPEPEIYWVTPIGNKITVETLSDKYKLSSEGTLEISNIQIEDSGRYTCVAQNVQGADTRVATIKVNGTLLDGTQVLKIYVKQTESHSILVSWKVNSNVMTSNLKWSSATMKIDNPHITYTARVPVDVHEYNLTHLQPSTDYEVCLTVSNIHQQTQKSCVNVTTKNAAFAVDISDQETSTALAAVMGSMFAVISLASIAVYFAKRFKRKNYHHSLKKYMQKTSSIPLNELYPPLINLWEGDSEKDKDGSADTKPTQVDTSRSYYMW

SEQ ID NO: 2860 - protein, 234 aa, Homo sapiens
MSRSLVQESTGGNSQVAGAISSLFILLIIVKLGELFHDLPKAVLAAIIIVNLKGMLRQLSDMRSLWKANRADLLIWLVTFTATILLNLDLGLVVAVIFSLLLVVVRTQMPHYSVLGQVPDTDIYRDVAEYSECGVDVDFLISQKKKLLKKQEQLKLKQLQKEEKLRKQAGPLLSGDPHLLPPVPCPSLSPGPRLLPRPHSSSLPLSPSCSQGPCFTPLAGPGSRQHFLSHHLNQ

SEQ ID NO: 2861 - protein, 141 aa, Homo sapiens
MQLLLTLAFNPEPLVLQSFPSDEGWPFAKYLGACGRMVAVNYVGEELWSYFNAPWEKRVDLAWQLMEIAEQLTNNDFEFALYLLDVSFDNFAVGPRDGKVIIVDAENVLVADKRLIRQSKYIILDFFLLIFSYVKIMFILV

SEQ ID NO: 2862 - protein, 217 aa, Homo sapiens
MILIGRMSAQVPMNMTITGCMMTFYRTTPAVLFWQWINQSFNAVVNYTNRSGDAPLTVNELGTAYVSATTGAVATALGLNALTKHVSPLIGRFVPFAAVAAANCINIPLMRQRELKVGIPVTDENGNRLGESANAAKQAITQVVVSRILMAAPGMAIPPFIMNTLEKKAFLKRFPWMSAPIQVGLVGFCLVFATPLCCALFPQKRYVFVIRQNHHEY

SEQ ID NO: 2863 - protein, 1337 aa, Homo sapiens
MTPPTLNITEESHVIDTGDSLSISCRGQHPLEWAWPGAQEAPATGDKDSEDTGVVRDCEGTDARPYCKVLLLHEVHANDTGSYVCYYKYIKARIEGTTAASSYVFVRDFEQPFINKPDTLLVNRKDAMWVPCLVSIPGLNVTLRSQSSVLWPDGQEVVWDDRRGMLVSTPLLHDALYLQCETTWGDQDFLSNPFLVHITGNELYDIQLLPRKSLELLVGEKLVLNCTVWAEFNSGVTFDWDYPGKQAERGKWVPERRSQQTHTELSSILTIHNVSQHDLGSYVCKANNGIQRFRESTEVIVHENPFISVEWLKGPILEATAGDELVKLPVKLAAYPPPEFQWYKDGKALSGRHSPHALVLKEVTEASTGTYTLALWNSAAGLRRNISLELVVNVPPQIHEKEASSPSIYSRHSRQALTCTAYGVPLPLSIQWHWRPWTPCKMFAQRSLRRRQQQDLMPQCRDWRAVTTQDAVNPIESLDTWTEFVEGKNKTVSKLVIQNANVSAMYKCVVSNKVGQDERLIYFYVTTIPDGFTIESKPSEELLEGQPVLLSCQADSYKYEHLRWYRLNLSTLHDAHGNPLLLDCKNVHLFATPLAASLEEVAPGARHATLSLSIPRVAPEHEGHYVCEVQDRRSHDKHCHKKYLSVQALEAPRLTQNLTDLLVNVSDSLEMQCLVAGAHAPSIVWYKDERLLEEKSGVDLADSNQKLSIQRVREEDAGRYLCSVCNAKGCVNSSASVAVEGSEDKGSMEIVILVGTGVIAVFFWVLLLLIFCNMRRPAHADIKTGYLSIIMDPGEVPLEEQCEYLSYDASQWEFPRERLHLGRVLGYGAFGKVVEASAFGIHKGSSCDTVAVKMLKEGATASEHRALMSELKILIHIGNHLNVVNLLGACTKPQGPLMVIVEFCKYGNLSNFLRAKRDAFSPCAEKSPEQRGRFRAMVELARLDRRRPGSSDRVLFARFSKTEGGARRASPDQEAEDLWLSPLTMEDLVCYSFQVARGMEFLASRKCIHRDLAARNILLSESDVVKICDFGLARDIYKDPDYVRKGSARLPLKWMAPESIFDKVYTTQSDVWSFGVLLWEIFSLGASPYPGVQINEEFCQRLRDGTRMRAPELATPAIRRIMLNCWSGDPKARPAFSELVEILGDLLQGRGLQEEEEVCMAPRSSQSSEEGSFSQVSTMALHIAQADAEDSPPSLQRHSLAARYYNWVSFPGCLARGAETRGSSRMKTFEEFPMTPTTYKGSVDNQTDSGMVLASEEFEQIESRHRQESGFSCKGPGQNVAVTRAHPDSQGRRRRPERGARGGQVFYNSEYGELSEPSEEDHCSPSARVTFFTDNSY

SEQ ID NO: 2864 - protein, 112 aa, Homo sapiens
MLPFIISLRFLFSSAGLIGFLFMLRALVAANFNTVYIYTAEVYPTTMRALGMGTSGSLCRIGAMVAPFISQVLMSASILGALCLFSSVCVVCAISAFTLPIETKGRALQQIK

SEQ ID NO: 2865 - protein, 500 aa, Homo sapiens
MGTWLLACICICTCVCLGVSVTGEGQGPRSRTFTCLTNNILRIDCHWSAPELGQGSSPWLLFTSNQAPGGTHKCILRGSECTVVLPPEAVLVPSDNFTITFHHCMSGREQVSLVDPEYLPRRHVKLDPPSDLQSNISSGHCILTWSISPALEPMTTLLSYELAFKKQEEAWEQAQHRDHIVGVTWLILEAFELDPGFIHEARLRVQMATLEDDVVEEERYTGQWSEWSQPVCFQAPQRQGPLIPPWGWPGNTLVAVSIFLLLTGPTYLLFKLSPRVKRIFYQNVPSPAMFFQPLYSVHNGNFQTWMGAHGAGVLLSQDCAGTPQGALEPCVQEATALLTCGPARPWKSVALEEEQEGPGTRLPGNLSSEDVLPAGCTEWRVQTLAYLPQEDWAPTSLTRPAPPDSEGSRSSSSSSSSNNNNYCALGCYGGWHLSALPGNTQSSGPIPALACGLSCDHQGLETQQGVAWVLAGHCQRPGLHEDLQGMLLPSVLSKARSWTF

SEQ ID NO: 2866 - protein, 87 aa, Homo sapiens
MSHGPYIKLITGFLFTSLAFMLVEGNFVLFCTYTLGFRNEFQNLLLAIMLSATLTIPIWQWFLTRFGKKTAVYVGISVSGVEEQSLG

SEQ ID NO: 2867 - protein, 414 aa, Homo sapiens
MTAGKSPSLIFTNRHEVRRIDLVKRNYSRLIPMLKNVVALDVEVATNRIYWCDLSYRKIYSAYMDKASDPKEQEVLIDEQLHSPEGLAVDWVHKHIYWTDSGNKTISVATVDGGRRRTLFSRNLSEPRAIAVDPLRGFMYWSDWGDQAKIEKSGLNGVDRQTLVSDNIEWPNGITLDLLSQRLYWVDSKLHQLSSIDFSGGNRKTLISSTDFLSHPFGIAVFEDKVFWTDLENEAIFSANRLNGLEISILAENLNNPHDIVIFHELKQPRAPDACELSVQPNGGCEYLCLPAPQISSHSPKYTCACPDTMWLGPDMKRCYRDANEDSKMGSTVTAAVIGIIVPIVVIALLCMSGYLIWRNWKRKNTKSMNFDNPVYRKTTEEEDEDELHIGRTAQIGHVYPARVALSLEDDGLP

SEQ ID NO: 2868 - protein, 286 aa, Homo sapiens
MHVFIDEHGEIRSCYLKSGNQKEGPLQPLPSNNDCLSQAREMQVSSSSTTTSESQDPSSGDPAVSALQQQLLLMVARRTQSETPRHVSQDLEASSCSSTQGKFNREQFYKFIIFPGKWIKVWYDRLTLLALLDRTEDIKENVLAILLIVLVSLLGFLTLSQGFCKDMWVLLFCLVMASCQYSLLKSVQPDPASPIHGHNQIITYSRPIYFCVLCGLILLLDTGAKARHPPSYVVYGLKLFSPVFLQSARDYLIGKIMNSHKDFFTSEKKKDKIISAISSVIFLKSW

SEQ ID NO: 2869 - protein, 60 aa, Homo sapiens
MWEAQGETTLGTWTPPVLYIGLGLREGNNQMASLKPAFVNYFFLLLLEVSHLLLIINADV

SEQ ID NO: 2870 - protein, 416 aa, Homo sapiens
MAGAMPLQLLLLLILLGPGNSLQLWDTWADEAEKALGPLLARDRRQATEYEYLDYDFLPETEPPEMLRNSTDTTPLTGPGTPESTTVEPAARRSTGLDAGGAVTELTTELANMGNLSTDSAAMEIQTTQPAATEAQTTQPVPTEAQTTPLAATEAQTTRLTATEAQTTPLAATEAQTTPPAATEAQTTQPTGLEAQTTAPAAMEAQTTAPAAMEAQTTPPAAMEAQTTQTTAMEAQTTAPEATEAQTTQPTATEAQTTPLAAMEALSTEPSATEALSMEPTTKRGLFIPFSVSSVTHKGIPMAASNLSVNYPVGAPDHISVKQCLLAILILALVATIFFVCTVVLAVRLSRKGHMYPVRNYSPTEMVCISSLLPDGGEGPSATANGGLSKAKSPGLTPEPREDREGDDLTLHSFLP

SEQ ID NO: 2871 - protein, 1299 aa, Homo sapiens
MGLRSLCAQAQEGAGHSPSFPYSPSEPHLGSPSQPTSTAVLMPWIHELPAGCTQGSERRVLRQLPDTSGRRWREISASLLYQALPSSPDHESPSQESPNAPTSTAVLGSWGSPPQPSLAPREQEAPGTQWPLDETSGIYYTEIREREREKSEKGRPPWAAVVGTPPQAHTSLQPHHHPWEPSVRESLCSTWPWKNEDFNQKFTQLLLLQRPHPRSQDPLVKRSWPDYVEENRGHLIEIRDLFGPGLDTQEPRIVILQGAAGIGKSTLARQVKEAWGRGQLYGDRFQHVFYFSCRELAQSKVVSLAELIGKDGTATPAPIRQILSRPERLLFILDGVDEPGWVLQEPSSELCLHWSQPQPADALLGSLLGKTILPEASFLITARTTALQNLIPSLEQARWVEVLGFSESSRKEYFYRYFTDERQAIRAFRLVKSNKELWALCLVPWVSWLACTCLMQQMKRKEKLTLTSKTTTTLCLHYLAQALQAQPLGPQLRDLCSLAAEGIWQKKTLFSPDDLRKHGLDGAIISTFLKMGILQEHPIPLSYSFIHLCFQEFFAAMSYVLEDEKGRGKHSNCIIDLEKTLEAYGIHGLFGASTTRFLLGLLSDEGEREMENIFHCRLSQGRNLMQWVPSLQLLLQPHSLESLHCLYETRNKTFLTQVMAHFEEMGMCVETDMELLVCTFCIKFSRHVKKLQLIEGRQHRSTWSPTMVVLFRWVPVTDAYWQILFSVLKVTRNLKELDLSGNSLSHSAVKSLCKTLRRPRCLLETLRLAGCGLTAEDCKDLAFGLRANQTLTELDLSFNVLTDAGAKHLCQRLRQPSCKLQRLQLVSCGLTSDCCQDLASVLSASPSLKELDLQQNNLDDVGVRLLCEGLRHPACKLIRLGLDQTTLSDEMRQELRALEQEKPQLLIFSRRKPSVMTPTEGLDTGEMSNSTSSLKRQRLGSERAASHVAQANLKLLDVSKIFPIAEIAGKSHEESSPEVVPVELLCVPSPASQGDLHTKPLGTDDDFWGPTGPVATEVVDKEKNLYRVHFPVAGSYRWPNTGLCFVMREAVTVEIEFCVWDQFLGEINPQHSWMVAGPLLDIKAEPGAVEAVHLPHFVALQGGHVDTSLFQMAHFKEEGMLLEKPARVELHHIVLENPSFSPLGVLLKMIHNALRFIPVTSVVLLYHRVHPEEVTFHLYLIPSDCSIRKAIDDLEMKFQFVRIHKPPPLTPLYMGCRYTVSGSGSGMLEILPKELELCYRSPGEDQLFSEFYVGHLGSGIRLQVKDKKDETLVWEALVKPGRNTSQPWNLRCNRDARRY

SEQ ID NO: 2872 - protein, 57 aa, Homo sapiens
MFNSTQSLISIGAHCSASVALSFFIFERWECTTYWYIFVFCRCGSIQYLGMREEGWP

SEQ ID NO: 2873 - protein, 75 aa, Homo sapiens
MPAPPLAFSDPSLSVDPKTFLNLVPSQAIGAHCSASVALSFFIFERWECTTYWYIFVFCRCGSIQYLGMREEGWP

SEQ ID NO: 2874 - protein, 52 aa, Homo sapiens
MGRVSGLVPSRFLTLLAHLVVVITLFWSRDSNIQACLPLTFTPEEYDKQDIQ

SEQ ID NO: 2875 - protein, 75 aa, Homo sapiens
MPCVKKKADWALRWIGDKEATYGERVVAFAAVEGIFFSGSFASIFWLKKRGLMPGLTFSNELISRDEVSLSQIIG

SEQ ID NO: 2876 - protein, 477 aa, Homo sapiens
MSVGVSTSAPLSPTSGTSVGMSTFSIMDYVVFVLLLVLSLAIGLYHACRGWGRHTVGELLMADRKMGCLPVALSLLATFQSAVAILGVPSEIYRFGTQYWFLGCCYFLGLLIPAHIFIPVFYRLHLTSAYEYLELRFNKTVRVCGTVTFIFQMVIYMGVVLYAPSLALNAVTGFDLWLSVLALGIVCTVYTALGGLKAVIWTDVFQTLVMFLGQLAVIIVGSAKVGGLGRVWAVASQHGRISGFELDPDPFVRHTFWTLAFGGVFMMLSLYGVNQAQVQRYLSSRTEKAAVLSCYAVFPFQQVSLCVGCLIGLVMFAYYQEYPMSIQQAQAAPDQFVLYFVMDLLKGLPGLPGLFIACLFSGSLSTISSAFNSLATVTMEDLIRPWFPEFSEARAIMLSRGLGGVMLPHLFSLGLSKLHPDHCHQFAVKHPLYPGLSTCLMKHTTFPACMVVSISGHVLGRSLSHIGVRTWWEEAGA

SEQ ID NO: 2877 - protein, 160 aa, Homo sapiens
MAPPNTEIPSKLVSFSPYTSIPPPGFPIAEVFTLKPLEFGKPNTLVCFVSNLFPPMLTVNWQHHSVPVEGFGPTFVSAVDGLSFQAFSYLNFTPEPSDIFSCIVTHEIDRYTAIAYWVPRNALPSDLLENVLCGVAFGLGVLGIIVGIVLIIYFRKPCSD

SEQ ID NO: 2878 - protein, 706 aa, Homo sapiens
MGKTPPGPGLGPAPEPDQLLLSTLPVSLGFPRAAVAPYWTSPEKMEKKLHAVPAAKTVKFKCPSSGTPNPTLRWLKNGKEFKPDHRIGGYKVRYATWSIIMDSVVPSDKGNYTCIVENEYGSINHTYQLDVVERSPHRPILQAGLPANKTVALGSNVEFMCKVYSDPQPHIQWLKHIEVNGSKIGPDNLPYVQILKTAGVNTTDKEMEVLHLRNVSFEDAGEYTCLAGNSIGLSHHSAWLTVLEALEERPAVMTSPLYLEIIIYCTGAFLISCMVGSVIVYKMKSGTKKSDFHSQMAVHKLAKSIPLRRQVTVSADSSASMNSGVLLVRPSRLSSSGTPMLAGVSEYELPEDPRWELPRDRLVLGKPLGEGCFGQVVLAEAIGLDKDKPNRVTKVAVKMLKSDATEKDLSDLISEMEMMKMIGKHKNIINLLGACTQDGPLYVIVEYASKGNLREYLQARRPPGLEYCYNPSHNPEEQLSSKDLVSCAYQVARGMEYLASKKCIHRDLAARNVLVTEDNVMKIADFGLARDIHHIDYYKKTTNGRLPVKWMAPEALFDRIYTHQSDVWSFGVLLWEIFTLGGSPYPGVPVEELFKLLKEGHRMDKPSNCTNELYMMMRDCWHAVPSQRPTFKQLVEDLDRIVALTSNQEYLDLSMPLDQYSPSFPDTRSSTCSSGEDSVFSHEPLPEEPCLPRHPAQLANGGLKRR

SEQ ID NO: 2879 - protein, 633 aa, Homo sapiens
LKSTRAAENRRDRTWAPRASPASQVGAGRQATSRPAPGMRVLLAALGLLFLGALRAFPQDRPFEDTCHGNPSHYYDKAVRRCCYRCPMGLFPTQQCPQRPTDCRKQCEPDYYLDEADRCTACVTCSRDDLVEKTPCAWNSSRVCECRPGMFCSTSAVNSCARCFFHSVCPAGMIVKFPGTAQKNTVCEPASPGVSPACASPENCKEPSSGTIPQAKPTPVSPATSSASTMPVRGGTRLAQEAASKLTRAPDSPSSVGRPSSDPGLSPTQPCPEGSGDCRKQCEPDYYLDEAGRCTACVSCSRDDLVEKTPCAWNSSRTCECRPGMICATSATNSCARCVPYPICAAETVTKPQDMAEKDTTFEAPPLGTQPDCNPTPENGEAPASTSPTQSLLVDSQASKTLPIPTSAPVALSSTGKPVLDAGPVLFWVILVLVVVVGSSAFLLCHRRACRKRIRQKLHLCYPVQTSQPKLELVDSRPRRSSTQLRSGASVTEPVAEERGLMSQPLMETCHSVGAAYLESLPLQDASPAGGPSSPRDLPEPRVSTEHTNNKIEKIYIMKADTVIVGTVKAELPEGRGLAGPAEPELEEELEADHTPHYPEQETEPPLGSCSDVMLSVEEEGKEDPLPTAASGK

SEQ ID NO: 2880 - protein, 526 aa, Homo sapiens
IAMDTESTYSGYSYYSSHSKKSHRQGERTRERHKSPRNKDGRGSEKSVTIQPPTGEPLLGNDSTRTEEVQDDNWGETTTAITGTSEHSISQEDIARISKDMEDSVGLDCKRYLGLTVASFLGLLVFLTPIAFILLPPILWRDELEPCGTICEGLFISMAFKLLILLIGTWALFFRKRRADMPRVFVFRALLLVLIFLFVVSYWLFYGVRILDSRDRNYQGIVQYAVSLVDALLFIHYLAIVLLELRQLQPMFTLQVVRSTDGESRFYSLGHLSIQRAALVVLENYYKDFTIYNPNLLTASKFRAAKHMAGLKVYNVDGPSNNATGQSRAMIAAAARRRDSSHNELYYEEAEHERRVKKRKARLVVAVEEAFIHIQRLQAEEQQKAPGEVMDPREAAQAIFPSMARALQKYLRITRQQNYHSMESILQHLAFCITNGMTPKAFLERYLSAGPTLQYDKDRWLSTQWRLVSDEAVTNGLRDGIVFVLKCLDFSLVVNVKKIPFIILSEEFIDPKSHKFVLRLQSETSV

SEQ ID NO: 2881 - protein, 204 aa, Homo sapiens
IMQRYKKLQFEREVLFDPCRTWCPASTCQAVCQLQDVGLQTPQPVQCKACRMEFCSTCKASWHPGQGCPETMPITFLPGETSAAFKMEEDDAPIKRCPKCKVYIERDEGCAQMMCKNCKHAFCWYCLESLDDDFLLIHYDKGPCRNKLGHSRASVIWHRTQVVGIFAGFGLLLLVASPFLLLATPFVLCCKCKCSKGDDDPLPT

SEQ ID NO: 2882 - protein, 402 aa, Homo sapiens
LSWLLALLRCASTMLSLRVPLAPITDPQQLQLSPLKGLSLVDKENTPPALSGTRVLASKTARRIFQEPTEPKTKAAAPGVEDEPLLRENPRRFVIFPIEYHDIWQMYKKAEASFWTAEEVDLSKDIQHWESLKPEERYFISHVLAFFAASDGIVNENLVERFSQEVQITEARCFYGFQIAMENIHSEMYSLLIDTYIKDPKEREFLFNAIETMPCVKKKADWALRWIGDKEATYGERVVAFAAVEGIFFSGSFASIFWLKKRGLMPGLTFSNELISRDEGLHCDFACLMFKHLVHKPSEERVREIIINAVRIEQEFLTEALPVKLIGMNCTLMKQYIEFVADRLMLELGFSKVFRVENPFDFMENISLEGKTNFFEKRVGEYQRMGVMSSPTENSFTLDADF

SEQ ID NO: 2883 - protein, 674 aa, Homo sapiens
VEEDCETVAGSQIVATHPPLPYPRALEQQLAADHRHSEDMSVGVSTSAPLSPTSGTSVGMSTFSIMDYVVFVLLLVLSLAIGLYHACRGWGRHTVGELLMADRKMGCLPVALSLLATFQSAVAILGVPSEIYRFGTQYWFLGCCYFLGLLIPAHIFIPVFYRLHLTSAYEYLELRFNKTVRVCGTVTFIFQMVIYMGVVLYAPSLALNAVTGFDLWLSVLALGIVCTVYTALGGLKAVIWTDVFQTLVMFLGQLAVIIVGSAKVGGLGRVWAVASQHGRISGFELDPDPFVRHTFWTLAFGGVFMMLSLYGVNQAQVQRYLSSRTEKAAVLSCYAVFPFQQVSLCVGCLIGLVMFAYYQEYPMSIQQAQAAPDQFVLYFVMDLLKGLPGLPGLFIACLFSGSLSTISSAFNSLATVTMEDLIRPWFPEFSEARAIMLSRGLAFGYGLLCLGMAYISSQMGPVLQAAISIFGMVGGPLLGLFCLGMFFPCANPPGAVVGLLAGLVMAFWIGIGSIVTSMGSSMPPSPSNGSSFSLPTNLTVATVTTLMPLTTFSKPTGLQRFYSLSYLWYSAHNSTTVIVVGLIVSLLTGRMRGRSLNPATIYPVLPKLLSLLPLSCQKRLHCRSYGQDHLDTGLFPEKPRNGVLGDSRDKEAMALDGTAYQGSSSTCILQETSL

SEQ ID NO: 2884 - protein, 48 aa, Homo sapiens
MQLPQGLAYALLAGLPPVFGLYSSFYPVFIYFLFGTSRHISVGKWRQA

SEQ ID NO: 2885 - protein, 77 aa, Homo sapiens
INLLRQSQSYCTDTECLQELPGPSGDNGISVTMILVAWMVIALILFLLRPPNLRGSSLPGKPTSPHNGQDPPAPPVD

SEQ ID NO: 2886 - protein, 108 aa, Homo sapiens
VERRGALYRSPMNQENPPPYPGPGPTAPYPPYPPQPMGPGPMGGPYPPPQGYPYQGYPQYGWQGGPQEPPKTTVYVVEDQRRDELGPSTCLTACWTALCCCCLWDMLT

SEQ ID NO: 2887 - protein, 475 aa, Homo sapiens
LQAPEGGSCQPGKTENTITMTTSHQPQDRYKAVWLIFFMLGLGTLLPWNFFMTATQYFTNRLDMSQNVSLVTAELSKDAQASAAPAAPLPERNSLSAIFNNVMTLCAMLPLLLFTYLNSFLHQRIPQSVRILGSLVAILLVFLITAILVKVQLDALPFFVITMIKIVLINSFGAILQGSLFGLAGLLPASYTAPIMSGQGLAGFFASVAMICAIASGSELSESAFGYFITACAVIILTIICYLGLPRLEFYRYYQQLKLEGPGEQETKLDLISKGEEPRAGKEESGVSVSNSQPTNESHSIKAILKNISVLAFSVCFIFTITIGMFPAVTVEVKSSIAGSSTWERYFIPVSCFLTFNIFDWLGRSLTAVFMWPGKDSRWLPSLVLARLVFVPLLLLCNIKPRRYLTVVFEHDAWFIFFMAAFAFSNGYLASLCMCFGPKKVKPAEAETAGAIMAFFLCLGLALGAVFSFLFRAIV

SEQ ID NO: 2888 - protein, 427 aa, Homo sapiens [sequence omitted]

SEQ ID NO: 2889 - protein, 238 aa, Homo sapiens
LGLGLPSGRGRLTAMPGRAPLRTVPGALGAWLLGGLWAWTLCGLCSLGAVGAPRPCQAPQQWEGRQVMYQQSSGRNSRALLSYDGLNQRVRVLDERKALIPCKRLFEYILLYKDGVMFQIDQATKQCSKMTLTQPWDPLDIPQNSTFEDQYSIGGPQEQITVQEWSDRKSARSYETWIGIYTVKDCYPVQETFTINYSVILSTRFFDIQLGIKDPSVFTPPSTCQMAQLEKMSEDCSW

SEQ ID NO: 2890 - protein, 603 aa, Homo sapiens
LVPHFGENLKPTRADNLRLDRCHQRSLGTMWTFLGIATFTYFYKKFGDFITLANREVLLCVLVFLSLGLVLSYRCRHRNGGLLGRQQSGSQFALFSDILSGLPFIGFFWAKSPPESENKEQLEARRRRKGTNISETSLIGTAACTSTSSQNDPEVIIVGAGVLGSALAAVLSRDGRKVTVIERDLKEPDRIVGEFLQPGGYHVLKDLGLGDTVEGLDAQVVNGYMIHDQESKSEVQIPYPLSENNQVQSGRAFHHGRFIMSLRKAAMAEPNAKFIEGVVLQLLEEDDVVMGVQYKDKETGDIKELHAPLTVVADGLFSKFRKSLVSNKVSVSSHFVGFLMKNAPQFKANHAELILANPSPVLIYQISSSETRVLVDIRGEMPRNLREYMVEKIYPQIPDHLKEPFLEATDNSHLRSMPASFLPPSSVKKRGVLLLGDAYNMRHPLTGGGMTVAFKDIKLWRKLLKGIPDLYDDAAIFEAKKSFYWARKTSHSFVVNILAQALYELFSATDDSLHQLRKACFLYFKLGGECVAGPVGLLSVLSPNPLVLIGHFFAVAIYAVYFCFKSEPWITKPRALLSSGAVLYKACSVIFPLIYSEMKYMVH

SEQ ID NO: 2891 - protein, 258 aa, Homo sapiens
KMVSWMICRLVVLVFGMLCPAYASYKAVKTKNIREYVRWMMYWIVFALFMAAEIVTDIFISWFPFYYEIKMAFVLWLLSPYTKGASLLYRKFVHPSLSRHEKEIDAYIVQAKERSYETVLSFGKRGLNIAASAAVQAATKSQGALAGRLRSFSMQDLRSISDAPAPAYHDPLYLEDQVSHRRPPIGYRAGGLQDSDTEDECWSDTEAVPRAPARPREKPLIRSQSLRVVKRKPPVREGTSRSLKVRTRKKTVPSDVDS

SEQ ID NO: 2892 - protein, 234 aa, Homo sapiens
IHHIRTMSYVFVNDSSQTNVPLLQACIDGDFNYSKRLLESGFDPNIRDSRGRTGLHLAAARGNVDICQLLHKFGADLLATDYQGNTALHLCGHVDTIQFLVSNGLKIDICNHQGATPLVLAKRRGVNKDVIRLLESLEEQEVKGFNRGTHSKLETMQTAESESAMESHSLLNPNLQQGEGVLSSFRTTWQEFVEDLGFWRVLLLIFVIALLSLGIAYYVSGVLPFVENQPELVH

SEQ ID NO: 2893 - protein, 1080 aa, Homo sapiens
LCYPRFRCLFCLQFAIPASRMEQLNELELLMEKSFWEEAELPAELFQKKVVASFPRTVLSTGMDNRYLVLAVNTVQNKEGNCEKRLVITASQSLENKELCILRNDWCSVPVEPGDIIHLEGDCTSDTWIIDKDFGYLILYPDMLISGTSIASSIRCMRRAVLSETFRSSDPATRQMLIGTVLHEVFQKAINNSFAPEKLQELAFQTIQEIRHLKEMYRLNLSQDEIKQEVEDYLPSFCKWAGDFMHKNTSTDFPQMQLSLPSDNSKDNSTCNIEVVKPMDIEESIWSPRFGLKGKIDVTVGVKIHRGYKTKYKIMPLELKTGKESNSIEHRSQVVLYTLLSQERRADPEAGLLLYLKTGQMYPVPANHLDKRELLKLRNQMAFSLFHRISKSATRQKTQLASLPQIIEEEKTCKYCSQIGNCALYSRAVEQQMDCSSVPIVMLPKIEEETQHLKQTHLEYFSLWCLMLTLESQSKDNKKNHQNIWLMPASEMEKSGSCIGNLIRMEHVKIVCDGQYLHNFQCKHGAIPVTNLMAGDRVIVSGEERSLFALSRGYVKEINMTTVTCLLDRNLSVLPESTLFRLDQEEKNCDIDTPLGNLSKLMENTFVSKKLRDLIIDFREPQFISYLSSVLPHDAKDTVACILKGLNKPQRQAMKKVLLSKDYTLIVGMPGTGKTTTICTLVRILYACGFSVLLTSYTHSAVDNILLKLAKFKIGFLRLGQIQKVHPAIQQFTEQEICRSKSIKSLALLEELYNSQLIVATTCMGINHPIFSRKIFDFCIVDEASQISQPICLGPLFFSRRFVLVGDHQQLPPLVLNREARALGMSESLFKRLEQNKSAVVQLTVQYRMNSKIMSLSNKLTYEGKLECGSDKVANAVINLRHFKDVKLELEFYADYSDNPWLMGVFEPNNPVCFLNTDKVPAPEQVEKGGVSNVTEAKLIVFLTSIFVKAGCSPSDIGIIAPYRQQLKIINDLLARSIGMVEVNTVDKYQGRDKSIVLVSFVRSNKDGTVGELLKDWRRLNVAITRAKHKLILLGCVPSLNCYPPLEKLLNHLNSEKLIIDLPSREHESLCHILGDFQRE

SEQ ID NO: 2894 - protein, 73 aa, Homo sapiens [sequence omitted]

SEQ ID NO: 2895 - protein, 28 aa, Homo sapiens
MHSIIVKELIVTFFLGITVLLLLMQRSL

SEQ ID NO: 2896 - protein, 29 aa, Homo sapiens
IIIILILMMVMMMMIMTLMIFNRIKIEFF

SEQ ID NO: 2897 - protein, 53 aa, Homo sapiens
MNTVFPSTSTPWPPPSSRRCFRQIPLPAQPLTSCLMTSSLLLAISLPVSPSPA

SEQ ID NO: 2898 - protein, 254 aa, Homo sapiens
LAMAQLCGLRRSRAFLALLGSLLLSGVLAADRERSIHDFCLVSKVVGRCRASMPRWWYNVTDGSCQLFVYGGCDGNSNNYLTKEECLKKCATVTENATGDLATSRNAADSSVPSAPRRQDSEDHSSDMFNYEEYCTANAVTGPCRASFPRWYFDVERNSCNNFIYGGCRGNKNSYRSEEACMLRCFRQQENPPLPLGSKVVVLAGLFVMVLILFLGASMVYLIRVARRNQERALRTVWSSGDDKEQLVKNTYVL

SEQ ID NO: 2899 - protein, 216 aa, Homo sapiens
LPATIFLLFLLSAVYLGPGCQALWMHKVPASLMVSLGEDAHFQCPHNSSNNANVTWWRVLHGNYTWPPEFLGPGEDPNGTLIIQNVNKSHGGIYVCRVQEGNESYQQSCGTYLRVRQPPPRPFLDMGEGTKNRIITAEGIILLFCAVVPGTLLLFRKRWQNEKLGLDAGDEYEDENLYEGLNLDDCSMYEDISRGLQGTYQDVGSLNIGDVQLEKP

SEQ ID NO: 2900 - protein, 82 aa, Homo sapiens
TPALSAPTFFLQPRPPPPLLAAAMESSTFALVPVFAHLSILQSLVPAAGAASPVAISAQHLCYSHVTPGDPGAGAGQGPAPS

SEQ ID NO: 2901 - protein, 307 aa, Homo sapiens
LQSSVLALVRLRPGCTAGTWAMSPHPTALLGLVLCLAQTIHTQEDLPRPSISAEPGTVIPLGSHVTFVCRGPVGVQTFRLERDSRSTYNDTEDVSQASPSESEARFRIDSVREGNAGLYRCIYYKPPKWSEQSDYLELLVKESSGGPDSPDTEPGSSAGPTQRPSDNSHNEHAPASQGLKAEHLYILIGVSVVFLFCLLLLVLFCLHRQNQIKQGPPRSKDEEQKPQQRPDLAVDVLERTADKATVNGLPEKDRETDTSALAAGSSQEVTYAQLDHWALTQRTARAVSPQSTKPMAESITYAAVARH

SEQ ID NO: 2902 - protein, 544 aa, Homo sapiens
VMSRESDVEAQQSHGSSACSQPHGSVTQSQGSSSQSQGISSSSTSTMPNSSQSSHSSSGTLSSLETVSTQELYSIPEDQEPEDQEPEEPTPAPWARLWALQDGFANLECVNDNYWFGRDKSCEYCFDEPLLKRTDKYRTYSKKHFRIFREVGPKNSYIAYIEDHSGNGTFVNTELVGKGKRRPLNNNSEIALSLSRNKVFVFFDLTVDDQSVYPKALRDEYIMSKTLGSGACGEVKLAFERKTCKKVAIKIISKRKFAIGSAREADPALNVETEIEILKKLNHPCIIKIKNFFDAEDYYIVLELMEGGELFDKVVGNKRLKEATCKLYFYQMLLAVQYLHENGIIHRDLKPENVLLSSQEEDCLIKITDFGHSKILGETSLMRTLCGTPTYLAPEVLVSVGTAGYNRAVDCWSLGVILFICLSGYPPFSEHRTQVSLKDQITSGKYNFIPEVWAEVSEKALDLVKKLLVVDPKARFTTEEALRHPWLQDEDMKRKFQDLLSEENESTALPQVLAQPSTSRKRPREGEAEGAETTKRPAVCAAVL

SEQ ID NO: 2903 - protein, 812 aa, Homo sapiens
IVRPPALSRVAALRVPARPGPGRCVALSGAPPAGSPRGKGARPGGGLASDAPGRARSRRGSRFSSGEESTSHLIMSRRSQRLTRYSQGDDDGSSSSGGSSVAGSQSTLFKDSPLRTLKRKSSNMKRLSPAPQLGPSSDAHTSYYSESLVHESWFPPRSSLEELHGDANWGEDLRVRRRRGTGGSESSRASGLVGRKATEDFLGSSSGYSSEDDYVEDSEGRGSKVTETEPVSSFPAGYSDVDQQSSSSRLRSAVSRAGSLLWMVATSPGRLFRLLYWWAGTTWYRLTTAASLLDVFVLTRRFSSLKTFLWFLLPLLLLTCLTYGAWYFYPYGLQTFHPALVSWWAAKDSRRPDEGWEARDSSPHFQAEQRVMSRVHSLERRLEALAAEFSSNWQKEAMRLERLELRQGAPGQGGGGGLSHEDTLALLEGLVSRREAALKEDFRRETAARIQEELSALRAEHQQDSEDLFKKIVRASQESEARIQQLKSEWQSMTQESFQESSVKELRRLEDQLAGLQQELAALALKQSSVAEEVGLLPQQIQAVRDDVESQFPAWISQFLARGGGGRVGLLQREEMQAQLRELESKILTHVAEMQGKSAREAAASLSLTLQKEGVIGVTEEQVHHIVKQALQRYSEDRIGLADYALESGGASVISTRCSETYETKTALLSLFGIPLWYHSQSPRVILQPDVHPGNCWAFQGPQGFAVVRLSARIRPTAVTLEHVPKALSPNSTISSAPKDFAIFGFDEDLQQEGTLLGKFTYDQDGEPIQTFHFQAPTMATYQVVELRILTNWGHPEYTCIYRFRVHGEPAH

SEQ ID NO: 2904 - protein, 609 aa, Homo sapiens
VGAGRQATSRPAPGMRVLLAALGLLFLGALRAFPQDRPFEDTCHGNPSHYYDKAVRRCCYRCPMGLFPTQQCPQRPTDCRKQCEPDYYLDEADRCTACVTCSRDDLVEKTPCAWNSSRVCECRPGMFCSTSAVNSCARCFFHSVCPAGMIVKFPGTAQKNTVCEPASPGVSPACASPENCKEPSSGTIPQAKPTPVSPATSSASTMPVRGGTRLAQEAASKLTRAPDSPSSVGRPSSDPGLSPTQPCPEGSGDCRKQCEPDYYLDEAGRCTACVSCSRDDLVEKTPCAWNSSRTCECRPGMICATSATNSCARCVPYPICAAETVTKPQDMAEKDTTFEAPPLGTQPDCNPTPENGEAPASTSPTQSLLVDSQASKTLPIPTSAPVALSSTGKPVLDAGPVLFWVILVLVVVVGSSAFLLCHRRACRKRIRQKLHLCYPVQTSQPKLELVDSRPRRSSTQLRSGASVTEPVAEERGLMSQPLMETCHSVGAAYLESLPLQDASPAGGPSSPRDLPEPRVSTEHTNNKIEKIYIMKADTVIVGTVKAELPEGRGLAGPAEPELEEELEADHTPHYPEQETEPPLGSCSDVMLSVEEEGKEDPLPTAASGK

SEQ ID NO: 2905 - protein, 323 aa, Homo sapiens
LSRDRRYVPGDFFGWSPSALLVPTQFLASLPHLRRSPQPPPSAMAPRKGSSRVAKTNSLRRRKLASFLKDFDREVEIRIKQIESDRQNLLKEVDNLYNIEILRLPKALREMNWLDYFALGGNKQALEEAATADLDITEINKLTAEAIQTPLKSAKTRKVIQVDEMIVEEEEEEENERKNLQTARVKRCPPSKKRTQSIQGKGKGKRSSRANTVTPAVGRLEVSMVKPTPGLTPRFDSRVFKTPGLRTPAAGERIYNISGNGSPLADSKEIFLTVPVGGGESLRLLASDLQRHSIAQLDPEALGNIKKLSNRLAQICSSIRTHK

SEQ ID NO: 2906 - protein, 649 aa, Homo sapiens
LEQQLAADHRHSEDMSVGVSTSAPLSPTSGTSVGMSTFSIMDYVVFVLLLVLSLAIGLYHACRGWGRHTVGELLMADRKMGCLPVALSLLATFQSAVAILGVPSEIYRFGTQYWFLGCCYFLGLLIPAHIFIPVFYRLHLTSAYEYLELRFNKTVRVCGTVTFIFQMVIYMGVVLYAPSLALNAVTGFDLWLSVLALGIVCTVYTALGGLKAVIWTDVFQTLVMFLGQLAVIIVGSAKVGGLGRVWAVASQHGRISGFELDPDPFVRHTFWTLAFGGVFMMLSLYGVNQAQVQRYLSSRTEKAAVLSCYAVFPFQQVSLCVGCLIGLVMFAYYQEYPMSIQQAQAAPDQFVLYFVMDLLKGLPGLPGLFIACLFSGSLSTISSAFNSLATVTMEDLIRPWFPEFSEARAIMLSRGLAFGYGLLCLGMAYISSQMGPVLQAAISIFGMVGGPLLGLFCLGMFFPCANPPGAVVGLLAGLVMAFWIGIGSIVTSMGSSMPPSPSNGSSFSLPTNLTVATVTTLMPLTTFSKPTGLQRFYSLSYLWYSAHNSTTVIVVGLIVSLLTGRMRGRSLNPATIYPVLPKLLSLLPLSCQKRLHCRSYGQDHLDTGLFPEKPRNGVLGDSRDKEAMALDGTAYQGSSSTCILQETSL

SEQ ID NO: 2907 - protein, 236 aa, Homo sapiens
LGLPSGRGRLTAMPGRAPLRTVPGALGAWLLGGLWAWTLCGLCSLGAVGAPRPCQAPQQWEGRQVMYQQSSGRNSRALLSYDGLNQRVRVLDERKALIPCKRLFEYILLYKDGVMFQIDQATKQCSKMTLTQPWDPLDIPQNSTFEDQYSIGGPQEQITVQEWSDRKSARSYETWIGIYTVKDCYPVQETFTINYSVILSTRFFDIQLGIKDPSVFTPPSTCQMAQLEKMSEDCSW

SEQ ID NO: 2908 - protein, 897 aa, Homo sapiens
TSISNVTAFFMAALIPIPALRAFSLQAAVVVVFNFAMVLLIFPAILSMDLYRREDRRLDIFCCFTSPCVSRVIQVEPQAYTDTHDNTRYSPPPPYSSHSFAHETQITMQSTVQLRTEYDPHTHVYYTTAEPRSEISVQPVTVTQDTLSCQSPESTSSTRDLLSQFSDSSLHCLEPPCTKWTLSSFAEKHYAPFLLKPKAKVVVIFLFLGLLGVSLYGTTRVRDGLDLTDIVPRETREYDFIAAQFKYFSFYNMYIVTQKADYPNIQHLLYDLHRSFSNVKYVMLEENKQLPKMWLHYFRDWLQGLQDAFDSDWETGKIMPNNYKNGSDDGVLAYKLLVQTGSRDKPIDISQLTKQRLVDADGIINPSAFYIYLTAWVSNDPVAYAASQANIRPHRPEWVHDKADYMPETRLRIPAAEPIEYAQFPFYLNGLRDTSDFVEAIEKVRTICSNYTSLGLSSYPNGYPFLFWEQYIGLRHWLLLFISVVLACTFLVCAVFLLNPWTAGIIVMVLALMTVELFGMMGLIGIKLSAVPVVILIASVGIGVEFTVHVALAFLTAIGDKNRRAVLALEHMFAPVLDGAVSTLLGVLMLAGSEFDFIVRYFFAVLAILTILGVLNGLVLLPVLLSFFGPYPEVSPANGLNRLPTPSPEPPPSVVRFAMPPGHTHSGSDSSDSEYSSQTTVSGLSEELRHYEAQQGAGGPAHQVIVEATENPVFAHSTVVHPESRHHPPSNPRQQPHLDSGSLPPGRQGQQPRRDPPREGLWPPPYRPRRDAFEISTEGHSGPSNRARWGPRGARSHNPRNPASTAMGSSVPGYCQPITTVTASASVTVAVHPPPVPGPGRNPRGGLCPGYPETDHGLFEDPHVPFHVRCERRDSKVEVIELQDVECEERPRGSSSN

SEQ ID NO: 2909 - protein, 286 aa, Homo sapiens
VGPVTSCTGFVEGSSRTGGMGSACIKVTKYFLFLFNLIFFILGAVILGFGVWILADKSSFISVLQTSSSSLRMGAYVFIGVGAVTMLMGFLGCIGAVNEVRCLLGLYFAFLLLILIAQVTAGALFYFNMGKLKQEMGGIVTELIRDYNSSREDSLQDAWDYVQAQVKCCGWVSFYNWTDNAELMNRPEVTYPCSCEVKGEEDNSLSVRKGFCEAPGNRTQSGNHPEDWPVYQEGCMEKVQAWLQENLGIILGVGVGVAIIELLGMVLSICLCRHVHSEDYSKVPKY

SEQ ID NO: 2910 - protein, 1106 aa, Homo sapiens
RWANVKVECEPSWQPFQGHCYRLQAEKRSWQESKKACLRGGGDLVSIHSMAELEFITKQIKQEVEELWIGLNDLKLQMNFEWSDGSLVSFTHWHPFEPNNFRDSLEDCVTIWGPEGRWNDSPCNQSLPSICKKAGQLSQGAAEEDHGCRKGWTWHSPSCYWLGEDQVTYSEARRLCTDHGSQLVTITNRFEQAFVSSLIYNWEGEYFWTALQDLNSTGSFFWLSGDEVMYTHWNRDQPGYSRGGCVALATGSAMGLWEVKNCTSFRARYICRQSLGTPVTPELPGPDPTPSLTGSCPQGWASDTKLRYCYKVFSSERLQDKKSWVQAQGACQELGAQLLSLASYEEEHFVANMLNKIFGESEPEIHEQHWFWIGLNRRDPRGGQSWRWSDGVGFSYHNFDRSRHDDDDIRGCAVLDLASLQWVAMQCDTQLDWICKIPRGTDVREPDDSPQGRREWLRFQEAEYKFFEHHSTWAQAQRICTWFQAELTSVHSQAELDFLSHNLQKFSRAQEQHWWIGLHTSESDGRFRWTDGSIINFISWAPGKPRPVGKDKKCVYMTASREDWGDQRCLTALPYICKRSNVTKETQPPDLPTTALGGCPSDWIQFLNKCFQVQGQEPQSRVKWSEAQFSCEQQEAQLVTITNPLEQAFITASLPNVTFDLWIGLHASQRDFQWVEQEPLMYANWAPGEPSGPSPAPSGNKPTSCAVVLHSPSAHFTGRWDDRSCTEETHGFICQKGTDPSLSPSPAALPPAPGTELSYLNGTFRLLQKPLRWHDALLLCESRNASLAYVPDPYTQAFLTQAARGLRTPLWIGLAGEEGSRRYSWVSEEPLNYVGWQDGEPQQPGGCTYVDVDGAWRTTSCDTKLQGAVCGVSSGPPPPRRISYHGSCPQGLADSAWIPFREHCYSFHMELLLGHKEARQRCQRAGGAVLSILDEMENVFVWEHLQSYEGQSRGAWLGMNFNPKGGTLVWQDNTAVNYSNWGPPGLGPSMLSHNSCYWIQSNSGLWRPGACTNITMGVVCKLPRAEQSSFSPSALPENPAALVVVLMAVLLLLALLTAALILYRRRQSIERGAFEGARYSRSSSSPTEATEKNILVSDMEMNEQQE

SEQ ID NO: 2911 - protein, 125 aa, Homo sapiens
RLMAMLVLVPGRVMRPLGGQLWRFLPRGLEFWGPAEGTARVLLRQFCARQAEAWRASGRPGYCLGTRPLSTARPPPPWSQKGPGDSTRPSKPGPVSWKSLAITFAIGGALLAGMKHVKKEKAESK

SEQ ID NO: 2912 - protein, 63 aa, Homo sapiens [sequence omitted]

SEQ ID NO: 2913 - protein, 422 aa, Homo sapiens
MFHLLLAARSGPARLLGPPASLPGLEVLWSPRALLLWLAWLGLQAALYLLPARKVRAPLADARGREANGLGEGKDAPGLIRAPLDPQVAEGQELKDKSRLRYPINGFQALVLTALLVGLGMSAGLPLGALPEMLLPLAFVATLTAFIFSLFLYMKAQVAPVSALAPGGNSGNPIYDFFLGRELNPRICFFDFKYFCELRPGLIGWVLINLALLMKEAELRGSPSLAMWLVNGFQLLYVGDALWHEEAVLTTMDITHDGFGFMLAFGDMAWVPFTYSLQAQFLLHHPQPLGLPMASVICLINATGYYIFRGANSQKNTFRKNPSDPRVAGLETISTATGRKLLVSGWWGMVRHPNYLGDLIMALAWSLPCGVSHLLPYFYLLYFTALLVHREARDERQCLQKYGLAWQEYCRRVPYRIMPYIY

SEQ ID NO: 2914 - protein, 735 aa, Homo sapiens
MVVILGASNILWIMFAASQAFKIETTPESRYLAQIGDSVSLTCSTTGCESPFFSWRTQIDSPLNGKVTNEGTTSTLTMNPVSFGNEHSYLCTATCESRKLEKGIQVEIYSFPKDPEIHLSGPLEAGKPITVKCSVADVYPFDRLEIDLLKGDHLMKSQEFLEDADRKSLETKSLEVTFTPVIEDIGKVLVCRAKLHIDEMDSVPTVRQAVKELQVYISPKNTVISVNPSTKLQEGGSVTMTCSSEGLPAPEIFWSKKLDNGNLQHLSGNATLTLIAMRMEDSGIYVCEGVNLIGKNRKEVELIVQEKPFTVEISPGPRIAAQIGDSVMLTCSVMGCESPSFSWRTQIDSPLSGKVRSEGTNSTLTLSPVSFENEHSYLCTVTCGHKKLEKGIQVELYSFPRDPEIEMSGGLVNGSSVTVSCKVPSVYPLDRLEIELLKGETILENIEFLEDTDMKSLENKSLEMTFIPTIEDTGKALVCQAKLHIDDMEFEPKQRQSTQTLYVNVAPRDTTVLVSPSSILEEGSSVNMTCLSQGFPAPKILWSRQLPNGELQPLSENATLTLISTKMEDSGVYLCEGINQAGRSRKEVELIIQVTPKDIKLTAFPSESVKEGDTVIISCTCGNVPETWIILKKKAETGDTVLKSIDGAYTIRKAQLKDAGVYECESKNKVGSQLRSLTLDVQGRENNKDYFSPELLVLYFASSLIIPAIGMIIYFARKANMKGSYSLVEAQKSKV

SEQ ID NO: 2915 - protein, 1289 aa, Homo sapiens
MRGAGAAGLLALLLLLLLLLLGLGGRVEGGPAGERGAGGGGALARERFKVVFAPVICKRTCLKGQCRDSCQQGSNMTLIGENGHSTDTLTGSGFRVVVCPLPCMNGGQCSSRNQCLCPPDFTGRFCQVPAGGAGGGTGGSGPGLSRTGALSTGALPPLAPEGDSVASKHAIYAVQVIADPPGPGEGPPAQHAAFLVPLGPGQISAEVQAPPPVVNVRVHHPPEASVQVHRIESSNAESAAPSQHLLPHPKPSHPRPPTQKPLGRCFQDTLPKQPCGSNPLPGLTKQEDCCGSIGTAWGQSKCHKCPQLQYTGVQKPGPVRGEVGADCPQGYKRLNSTHCQDINECAMPGVCRHGDCLNNPGSYRCVCPPGHSLGPSRTQCIADKPEEKSLCFRLVSPEHQCQHPLTTRLTRQLCCCSVGKAWGARCQRCPTDGTAAFKEICPAGKGYHILTSHQTLTIQGESDFSLFLHPDGPPKPQQLPESPSQAPPPEDTEEERGVTTDSPVSEERSVQQSHPTATTTPARPYPELISRPSPPTMRWFLPDLPPSRSAVEIAPTQVTETDECRLNQNICGHGECVPGPPDYSCHCNPGYRSHPQHRYCVDVNECEAEPCGPGRGICMNTGGSYNCHCNRGYRLHVGAGGRSCVDLNECAKPHLCGDGGFCINFPGHYKCNCYPGYRLKASRPPVCEDIDECRDPSSCPDGKCENKPGSFKCIACQPGYRSQGGGACRDVNECAEGSPCSPGWCENLPGSFRCTCAQGYAPAPDGRSCLDVDECEAGDVCDNGICSNTPGSFQCQCLSGYHLSRDRSHCEDIDECDFPAACIGGDCINTNGSYRCLCPQGHRLVGGRKCQDIDECSQDPSLCLPHGACKNLQGSYVCVCDEGFTPTQDQHGCEEVEQPHHKKECYLNFDDTVFCDSVLATNVTQQECCCSLGAGWGDHCEIYPCPVYSSAEFHSLCPDGKGYTQDNNIVNYGIPAHRDIDECMLFGSEICKEGKCVNTQPGYECYCKQGFYYDGNLLECVDVDECLDESNCRNGVCENTRGGYRCACTPPAEYSPAQRQCLSPEEMDVDECQDPAACRPGRCVNLPGSYRCECRPPWVPGPSGRDCQLPESPAERAPERRDVCWSQRGEDGMCAGPLAGPALTFDDCCCRQGRGWGAQCRPCPPRGAGSHCPTSQSESNSFWDTSPLLLGKPPRDEDSSEEDSDECRCVSGRCVPRPGGAVCECPGGFQLDASRARCVDIDECRELNQRGLLCKSERCVNTSGSFRCVCKAGFARSRPHGACVPQRRR

SEQ ID NO: 2916 - protein, 1242 aa, Homo sapiens
MRGAGAAGLLALLLLLLLLLLGLGGRVEGGPAGERGAGGGGALARERFKVVFAPVICKRTCLKGQCRDSCQQGSNMTLIGENGHSTDTLTGSGFRVVVCPLPCMNGGQCSSRNQCLCPPDFTGRFCQVPAGGAGGGTGGSGPGLSRTGALSTGALPPLAPEGDSVASKHAIYAVQVIADPPGPGEGPPAQHAAFLVPLGPGQISAEVQAPPPVVNVRVHHPPEASVQVHRIESSNAESAAPSQHLLPHPKPSHPRPPTQKPLGRCFQDTLPKQPCGSNPLPGLTKQEDCCGSIGTAWGQSKCHKCPQLQYTGVQKPGPVRGEVGADCPQGYKRLNSTHCQDINECAMPGVCRHGDCLNNPGSYRCVCPPGHSLGPSRTQCIADKPEEKSLCFRLVSPEHQCQHPLTTRLTRQLCCCSVGKAWGARCQRCPTDGTAAFKEICPAGKGYHILTSHQTLTIQGESDFSLFLHPDGPPKPQQLPESPSQAPPPEDTEEERGVTTDSPVSEERSVQQSHPTATTTPARPYPELISRPSPPTMRWFLPDLPPSRSAVEIAPTQVTETDECRLNQNICGHGECVPGPPDYSCHCNPGYRSHPQHRYCVDVNECEAEPCGPGRGICMNTGGSYNCHCNRGYRLHVGAGGRSCVDLNECAKPHLCGDGGFCINFPGHYKCNCYPGYRLKASRPPVCEDIDECRDPSSCPDGKCENKPGSFKCIACQPGYRSQGGGACRDVNECAEGSPCSPGWCENLPGSFRCTCAQGYAPAPDGRSCLDVDECEAGDVCDNGICSNTPGSFQCQCLSGYHLSRDRSHCEDIDECDFPAACIGGDCINTNGSYRCLCPQGHRLVGGRKCQDIDECSQDPSLCLPHGACKNLQGSYVCVCDEGFTPTQDQHGCEEVEQPHHKKECYLNFDDTVFCDSVLATNVTQQECCCSLGAGWGDHCEIYPCPVYSSAEFHSLCPDGKGYTQDNNIVNYGIPAHRDIDECMLFGSEICKEGKCVNTQPGYECYCKQGFYYDGNLLECVDVDECLDESNCRNGVCENTRGGYRCACTPPAEYSPAQRQCLSPEEMERAPERRDVCWSQRGEDGMCAGPLAGPALTFDDCCCRQGRGWGAQCRPCPPRGAGSHCPTSQSESNSFWDTSPLLLGKPPRDEDSSEEDSDECRCVSGRCVPRPGGAVCECPGGFQLDASRARCVDIDECRELNQRGLLCKSERCVNTSGSFRCVCKAGFARSRPHGACVPQRRR

SEQ ID NO: 2917 - protein, 151 aa, Homo sapiens
MPGSEPPLLWRRFSPEVLGLCASTALVWVVMEVLALLLGLYLATVRSDLSTFHLLAYSGYKYVGMILSVLTGLLFGSDGYYVALAWTSSALMYFIVSLVHPPIPLPSLEGKPPPPGQASVLLSSRCALCGQQPWAPTAWGAPSPGSVSSST

SEQ ID NO: 2918 - protein, 622 aa, Homo sapiens
MIAFLSLDSSLQGLHSVSVCIGFTRAFRMVWQNTENALLETVIVSTVHLISSTDIWWNRSLDTGLRLLLFAVTVLLTSWTEKKQRRKTTATLCILNIVFSPFVLVIIVFSTLLSSPLLPLFTLPVFLVGFPRPIQSWPGAAGTTACVCADTVYYYQMVPRLTAVLQTAMAAGSLGLLLPGSHYLGRFQDRLMWIMILECGYTYCSINIKGLELQETSCHTAEARRVDEVFEDAFEQEYTRVCSLNEHFGNVLTPCTVLPVKLYSDARNVLSGIIDSHENLKEFKGDLIKVLVWILVQYCSKRPGMKENVHNTENKGKAPLMLPALNTLPPPKSPEDIDSLNSETFNDWSDDNIFDDEPTIKKVIEEKHQLKDLPGTNLFIPGSVESQRVGDHSTGTVPENDLYKAVLLGYPAVDKGKQEDMPYIPLMEFSCSHSHLVCLPAEWRTSCMPSSKMKEMSSLFPEDWYQFVLRQLECYHSEEKASNVLEEIAKDKVLKDFYVHTVMTCYFSLFGIDNMAPSPGHILRVYGGVLPWSVALDWLTEKPELFQLALKAFRYTLKLMIDKASLGPIEDFRELIKYLEEYERDWYIGLVSDEKWKEAILQEKPYLFSLGYDSNMVRLKNF

SEQ ID NO: 2919 - protein, 91 aa, Homo sapiens
MVEVQLESDHEYPPGLLVAFSACTTVLVAVHLFALMVSTCLLPHIEAVSNIHNLNSVHQSPHQRLHRYVELAWGFSTALGTFLFLAEVVLR

SEQ ID NO: 2920 - protein, 1212 aa, Homo sapiens
MALMFTGHLLFLALLMFAFSTFEESVSNYSEWAVFTDDIDQFKTQKVQDFRPNQKLKKSMLHPSLYFDAGEIQAMRQKSRASHLHLFRAIRSAVTVMLSNPTYYLPPPKHADFAAKWNEIYGNNLPPLALYCLLCPEDKVAFEFVLEYMDRMVGYKDWLVENAPGDEVPIGHSLTGFATAFDFLYNLLDNHRRQKYLEKIWVITEEMYEYSKVRSWGKQLLHNHQATNMIALLTGALVTGVDKGSKANIWKQAVVDVMEKTMFLLNHIVDGSLDEGVAYGSYTAKSVTQYVFLAQRHFNINNLDNNWLKMHFWFYYATLLPGFQRTVGIADSNYNWFYGPESQLVFLDKFILKNGAGNWLAQQIRKHRPKDGPMVPSTAQRWSTLHTEYIWYDPQLTPQPPADYGTAKIHTFPNWGVVTYGAGLPNTQTNTFVSFKSGKLGGRAVYDIVHFQPYSWIDGWRSFNPGHEHPDQNSFTFAPNGQVFVSEALYGPKLSHLNNVLVFAPSPSSQCNKPWEGQLGECAQWLKWTGEEVGDAAGEIITASQHGEMVFVSGEAVSAYSSAMRLKSVYRALLLLNSQTLLVVDHIERQEDSPINSVSAFFHNLDIDFKYIPYKFMNRYNGAMMDVWDAHYKMFWFDHHGNSPMASIQEAEQAAEFKKRWTQFVNVTFQMEPTITRIAYVFYGPYINVSSCRFIDSSNPGLQISLNVNNTEHVVSIVTDYHNLKTRFNYLGFGGFASVADQGQITRFGLGTQAIVKPVRHDRIIFPFGFKFNIAVGLILCISLVILTFQWRFYLSFRKLMRWILILVIALWFIELLDVWSTCSQPICAKWTRTEAEGSKKSLSSEGHHMDLPDVVITSLPGSGAEILKQLFFNSSDFLYIRVPTAYIDIPETELEIDSFVDACEWKVSDIRSGHFRLLRGWLQSLVQDTKLHLQNIHLHEPNRGKLAQYFAMNKDKKRKFKRRESLPEQRSQMKGAFDRDAEYIRALRRHLVYYPSARPVLSLSSGSWTLKLHFFQEVLGASMRALYIVRDPRAWIYSMLYNSKPSLYSLKNVPEHLAKLFKIEGGKGKCNLNSGYAFEYEPLRKELSKSKSNAVSLLSHLWLANTAAALRINTDLLPTSYQLVKFEDIVHFPQKTTERIFAFLGIPLSPASLNQILFATSTNLFYLPYEGEISPTNTNVWKQNLPRDEIKLIENICWTLMDRLGYPKFMD

SEQ ID NO: 2921 - protein, 206 aa, Homo sapiens
MLGGLSVGLSFLLNTVSVATLCHVYHGQEAAQQRPRDSEVEMMAQLLGIMVVASVCWLPLLVFIAQTVLRNPPAMSPAGQLSRTTEKELLIYLRVATWNQILDPWVYILFRRAVLRRLQPRLSTRPRRSLTLWPSLEYSGTISAHCNLRLPGSSDSRASASRAAGITGVSHCARPCMLFDPEFDLLAGVQLLPFEPPTGKALSRKD

SEQ ID NO: 2922 - protein, 951 aa, Homo sapiens
MRLGALYTYWVPLGFVLAVTVIREAVEEIRCYVRDKEVNSQVYSRLTARGTVKVKSSNIQVGDLIIVEKNQRVPADMIFLRTSEKNGSCFLRTDQLDGETDWKLRLPVACTQRLPTAADLLQIRSYVYAEEPNIDIHNFVGTFTREDSDPPISESLSIENTLWAGTVVASGTVVGVVLYTGRELRSVMNTSNPRSKIGLFDLEVNCLTKILFGALVVVSLVMVALQHFAGRWYLQIIRFLLLFSNIIPISLRVNLDMGKIVYSWVIRRDSKIPGTVVRSSTIPEQLGRISYLLTDKTGTLTQNEMIFKRLHLGTVAYGLDSMDEVQSHIFSIYTQQSQDPPAQKGPTLTTKVRRTMSSRVHEAVKAIALCHNVTPVYESNGVTDQAEAEKQYEDSCRVYQASSPDEVALVQWTESVGLTLVGRDQSSMQLRTPGDQILNFTILQIFPFTYESKRMGIIVRDESTGEITFYMKGADVVMAGIVQYNDWLEEECGNMAREGLRVLVVAKKSLAEEQYQDFEARYVQAKLSVHDRSLKVATVIESLEMEMELLCLTGVEDQLQADVRPTLETLRNAGIKVWMLTGDKLETATCTAKNAHLVTRNQDIHVFRLVTNRGEAHLELNAFRRKHDCALVISGDSLEVCLKYYEYEFMELACQCPAVVCCRCAPTQKAQIVRLLQERTGKLTCAVGDGGNDVSMIQESDCGVGVEGKEGKQASLAADFSITQFKHLGRLLMVHGRNSYKRSAALSQFVIHRSLCISTMQAVFSSVFYFASVPLYQGFLIIGYSTIYTMFPVFSLVLDKDVKSEVAMLYPELYKDLLKGRPLSYKTFLIWVLISIYQGSTIMYGALLLFESEFVHIVAISFTSLILTELLMVALTIQTWHWLMTVAELLSLACYIASLVFLHEFIDVYFIATLSFLWKVSVITLVSCLPLYVLKYLRRRFSPPSYSKLTS

SEQ ID NO: 2923 - protein, 200 aa, Homo sapiens
MLISVLGIWVPGCGSNWAQEPLNETDTGDSEPRMCGFLSLQIMGPLIVLVGLCFFVVAHVKKRNTLNAGQDASEREEGQIQIMEPVQVTVGDSVIIFPPPPPPYFPESSASAVAESPGTNSLLPNENPPSYYSIFNYGTPTSEGAASERDCESIYTISGTNSSSEASHTPHLPSELPPRYEEKENAAATFLPLSSEPSPP

SEQ ID NO: 2924 - protein, 455 aa, Homo sapiens
MLLLPLLLLLVATTGPVGALTDEEKRLMVELHNLYRAQVSPTASDMLHMRWDEELAAFAKAYARQCVWGHNKERGRRGENLFAITDEGMDVPLAMEEWHHEREHYNLSAATCSPGQMCGHYTQVVWAKTERIGCGSHFCEKLQGVEETNIELLVCNYEPPGNVKGKRPYQEGTPCSQCPSGYHCKNSLCEPIGSPEDAQDLPYLVTEAPSFRATEASDSRKMGTPSSLATGIPAFLVTEVSGSLATKALPAVETQAPTSLATKDPPSMATEAPPCVTTEVPSILAAHSLPSLDEEPVTFPKSTHVPIPKSADKVTDKTKVPSRSPENSLDPKMSLTGARELLPHAQEEAEAEAELPPSSEVLASVFPAQDKPGELQATLDHTGHTSSKSLPNFPNTSATANATGGRALALQSSLPGAEGPDKPSVVSGLNSGPGHVWGPLLGLLLLPPLVLAGIF

SEQ ID NO: 2925 - protein, 613 aa, Homo sapiens
MGISIPAQSSAHQLYGFAHGKPSPDESRYDGSLKSVPPPDFGTPTLHYFEDWGVVTYGSALPAEINRSFLSFKSGKLGGRAIYDIVHRNKYKDWIKGWRNFNAGHEHPDQNSFTFAPNGVPFITEALYGPKYTFFNNVLMFSPAVSKSCFSPWVGQVTEDCSSKWSKYKHDLAASCQGRVVAAEEKNGVVFIRGEGVGAYNPQLNLKNVQRNLILLHPQLLLLVDQIHLGEESPLETAASFFHNVDVPFEETVVDGVHGAFIRQRDGLYKMYWMDDTGYSEKATFASVTYPRGYPYNGTNYVNVTMHLRSPITRAAYLFIGPSIDVQSFTVHGDSQQLDVFIATSKHAYATYLWTGEATGQSAFAQVIADRHKILFDRNSAIKSSIVPEVKDYAAIVEQNLQHFKPVFQLLEKQILSRVRNTASFRKTAERLLRFSDKRQTEEAIDRIFAISQQQQQQSKSKKNRRAGKRYKFVDAVPDIFAQIEVNEKKIRQKAQILAQKELPIDEDEEMKDLLDFADVTYEKHKNGGLIKGRFGQARMVTTTHSRAPSLSASYTRLFLILNIAIFFVMLAMQLTYFQRAQSLHGQRCLYAVLLIDSCILLWLYSSCSQSQC

SEQ ID NO: 2926 - protein, 1007 aa, Homo sapiens
MVCSLWVLLLVSSVLALEEVLLDTTGETSEIGWLTYPPGGWDEVSVLDDQRRLTRTFEACHVAGAPPGTGQDNWLQTHFVERRGAQRAHIRLHFSVRACSSLGVSGGTCRETFTLYYRQAEEPDSPDSVSSWHLKRWTKVDTIAADESFPSSSSSSSSSSSSAAWAVGPHGAGQRAGLQLNVKERSFGPLTQRGFYVAFQDTGACLALVAVRLFSYTCPAVLRSFASFPETQASGAGGASLVAAVGTCVAHAEPEEDGVGGQAGGSPPRLHCNGEGKWMVAVGGCRCQPGYQPARGDKACQACPRGLYKASAGNAPCSPCPARSHAPNPAAPVCPCLEGFYRASSDPPEAPCTGPPSAPQELWFEVQGSALMLHWRLPRELGGRGDLLFNVVCKECEGRQEPASGGGGTCHRCRDEVHFDPRQRGLTESRVLVGGLRAHVPYILEVQAVNGVSELSPDPPQAAAINVSTSHEVPSAVPVVHQVSRASNSITVSWPQPDQTNGNILDYQLRYYDQAEDESHSFTLTSETNTATVTQLSPGHIYGFQVRARTAAGHGPYGGKVYFQTLPQGELSSQLPERLSLVIGSILGALAFLLLAAITVLAVVFQRKRRGTGYTEQLQQYSSPGLGVKYYIDPSTYEDPCQAIRELAREVDPAYIKIEEVIGTGSFGEVRQGRLQPRGRREQTVAIQALWAGGAESLQMTFLGRAAVLGQFQHPNILRLEGVVTKSRPLMVLTEFMELGPLDSFLRQREGQFSSLQLVAMQRGVAAAMQYLSSFAFVHRSLSAHSVLVNSHLVCKVARLGHSPQGPSCLLRWAAPEVIAHGKHTTSSDVWSFGILMWEVMSYGERPYWDMSEQEVLNAIEQEFRLPPPPGCPPGLHLLMLDTWQKDRARRPHFDQLVAAFDKMIRKPDTLQAGGDPGERPSQALLTPVALDFPCLDSPQAWLSAIGLECYQDNFSKFGLCTFSDVAQLSLEDLPALGITLAGHQKKLLHHIQLLQQHLRQQGSVEV

SEQ ID NO: 2927 - protein, 577 aa, Homo sapiens
MPVAPYWTSPEKMEKKLHAVPAAKTVKFKCPSSGTPNPTLRWLKNGKEFKPDHRIGGYKTAGVNTTDKEMEVLHLRNVSFEDAGEYTCLAGNSIGLSHHSAWLTVLEALEERPAVMTSPLYLEIIIYCTGAFLISCMVGSVIVYKMKSGTKKSDFHSQMAVHKLAKSIPLRRQVSADSSASMNSGVLLVRPSRLSSSGTPMLAGVSEYELPEDPRWELPRDRLVLGKPLGEGCFGQVVLAEAIGLDKDKPNRVTKVAVKMLKSDATEKDLSDLISEMEMMKMIGKHKNIINLLGACTQDGPLYVIVEYASKGNLREYLQARRPPGLEYCYNPSHNPEEQLSSKDLVSCAYQVARGMEYLASKKCIHRDLAARNVLVTEDNVMKIADFGLARDIHHIDYYKKTTNGRLPVKWMAPEALFDRIYTHQSDVWSFGVLLWEIFTLGGSPYPGVPVEELFKLLKEGHRMDKPSNCTNELYMMMRDCWHAVPSQRPTFKQLVEDLDRIVALTSNQVLHPDLTTHLLPLRCFWKVRKRRCLLRGQEPHPCSRGAGQRVKAQQPSTMDGFLQGNRWGWAGEGAPT

SEQ ID NO: 2928 - protein, 751 aa, Homo sapiens
MGLTSTWRYGRGPGIGTVTMVSWGRFICLVVVTMATLSLARPSFSLVEDTTLEPEDAISSGDDEDDTDGAEDFVSENSNNKRAPYWTNTEKMEKRLHAVPAANTVKFRCPAGGNPMPTMRWLKNGKEFKQEHRIGGYKVRNQHWSLIMESVVPSDKGNYTCVVENEYGSINHTYHLDVVERSPHRPILQAGLPANASTVVGGDVEFVCKVYSDAQPHIQWIKHVEKNGSKYGPDGLPYLKVLKAAGVNTTDKEIEVLYIRNVTFEDAGEYTCLAGNSIGISFHSAWLTVLPAPGREKEITASPDYLEIAIYCIGVFLIACMVVTVILCRMKNTTKKPDFSSQPAVHKLTKRIPLRRQVTVSAESSSSMNSNTPLVRITTRLSSTADTPMLAGVSEYELPEDPKWEFPRDKLTLGKPLGEGCFGQVVMAEAVGIDKDKPKEAVTVAVKMLKDDATEKDLSDLVSEMEMMKMIGKHKNIINLLGACTQDGPLYVIVEYASKGNLREYLRARRPPGMEYSYDINRVPEEQMTFKDLVSCTYQLARGMEYLASQKCIHRDLAARNVLVTENNVMKIADFGLARDINNIDYYKKTTNGRLPVKWMAPEALFDRVYTHQSDVWSFGVLMWEIFTLGGSPYPGIPVEELFKLLKEGHRMDKPANCTNELYMMMRDCWHAVPSQRPTFKQLVEDLDRILTLTTNEEYLDLSQPLEQYSPSYPDTRSSCSSGDDSVFSPDPMPYEPCLPQYPHINGSVKT

SEQ ID NO: 2929 - protein, 1078 aa, Homo sapiens
MPKHPNSLSGKGTQLVPSSHLPPPKLRIPNVFSISVALAKRHLSQPQLSSDRMFGTNRNAISMIRPLRPQETDLDLVDGDSTEVLENMDTSCDDGLFSYDSLDSPNSDDQEHCDSAKKVAYSKPPTPPLHRFPSWESRIYAVAKSGIRMSEAFNMESVNKNSAATLSYTTSGLYTSLIYKNMTTPVYTTLKGKATQISSSPFLDDSSGSEEEDSSRSSSRTSESDSRSRSGPGSPRAMKRGVSLSSVASESDYAIPPDAYSTDTEYSQPEQKLPKTCSSSSDNGKNEPLEKSGYLLKMSGKVKSWKRRWFVLKGGELLYYKSPSDVIRKPQGHIELSASCSILRGDNKQTVQLTTEKHTYYLTADSPNILEEWIKVLQNVLRVQAANPLSLQPEGKPTMKGLLTKVKHGYSKRVWCTLIGKTLYYFRSQEDKFPLGQIKLWEAKVEEVDRSCDSDEDYEASGRSLLSTHYTIVIHPKDQGPTYLLIGSKHEKDTWLYHLTVAAGSNNVNVGSEFEQLVCKLLNIDGEPSSQIWRHPTLCHSKEGIISPLTTLPSEALQTEAIKLFKTCQLFINAAVDSPAIDYHISLAQSALQICLTHPELQNEICCQLIKQTRRRQPQNQPGPLQGWQLLALCVGLFLPHHPFLWLLRLHLKRNADSRTEFGKYAIYCQRCVERTQQNGDREARPSRMEILSTLLRNPYHHSLPFSIPVHFMNGIYQVVGFDASTTVEEFLNTLNQDTGMRKPAQSGFALFTDDPSGRDLEHCLQGNIKICDIISKWEQASKEQQPGKCEGTRTVRLTYKNRLYFSVQARGETDREKLLLMYQTNDQIINGLFPLNKDLALEMAALLSQVEIGDFERPFSTPAGHVTNQCKVNQTLKQVIEKFYPKRYRDGCSEEQLRQLCQRLSTRWMALRGHSAADCVRIYLTVARKWPFFGAKLFLAKPITPSSLGSTFLWLAVHEDGLSLLEYNSMRLIVSYVYKSLMTFGGYQDDFMVVINNTHSKDKPTEKLLFAMAKPKILEITLLIASYINNFHQQKAAFHHLSAPALLSAQTRGPQARMMGSQPLLSSSRPTKGPTLL

SEQ ID NO: 2930 - protein, 262 aa, Homo sapiens
MPFSHLSTYSLVWVMAAVVLCTAQVQVVTQDEREQLYTPASLKCSLQNAQEALIVTWQKKKAVSPENMVTFSENHGVVIQPAYKDKINITQLGLQNSTITFWNITLEDEGCYMCLFNTFGFGKISGTACLTVYVQPIVSLHYKFSEDHLNITCSATARPAPMVFWKVPRSGIENSTVTLSHPNGTTSVTSILHIKDPKNQVGKEVICQVLHLGTVTDFKQTVNKGYWFSVPLLLSIVSLVILLVLISILLYWKRHRNQDREP

SEQ ID NO: 2931 - protein, 565 aa, Homo sapiens
MEKKLHAVPAAKTVKFKCPSSGTPNPTLRWLKNGKEFKPDHRIGGYKTAGVNTTDKEMEVLHLRNVSFEDAGEYTCLAGNSIGLSHHSAWLTVLEALEERPAVMTSPLYLEIIIYCTGAFLISCMVGSVIVYKMKSGTKKSDFHSQMAVHKLAKSIPLRRQVSADSSASMNSGVLLVRPSRLSSSGTPMLAGVSEYELPEDPRWELPRDRLVLGKPLGEGCFGQVVLAEAIGLDKDKPNRVTKVAVKMLKSDATEKDLSDLISEMEMMKMIGKHKNIINLLGACTQDGPLYVIVEYASKGNLREYLQARRPPGLEYCYNPSHNPEEQLSSKDLVSCAYQVARGMEYLASKKCIHRDLAARNVLVTEDNVMKIADFGLARDIHHIDYYKKTTNGRLPVKWMAPEALFDRIYTHQSDVWSFGVLLWEIFTLGGSPYPGVPVEELFKLLKEGHRMDKPSNCTNELYMMMRDCWHAVPSQRPTFKQLVEDLDRIVALTSNQVLHPDLTTHLLPLRCFWKVRKRRCLLRGQEPHPCSRGAGQRVKAQQPSTMDGFLQGNRWGWAGEGAPT

SEQ ID NO: 2932 - protein, 807 aa, Homo sapiens
MATLSLARPSFSLVEDTTLEPEEPPTKYQISQPEVYVAAPGESLEVRCLLKDAAVISWTKDGVHLGPNNRTVLIGEYLQIKGATPRDSGLYACTASRTVDSETWYFMVNVTDAISSGDDEDDTDGAEDFVSENSNNKRAPYWTNTEKMEKRLHAVPAANTVKFRCPAGGNPMPTMRWLKNGKEFKQEHRIGGYKVRNQHWSLIMESVVPSDKGNYTCVVENEYGSINHTYHLDVVERSPHRPILQAGLPANASTVVGGDVEFVCKVYSDAQPHIQWIKHVEKNGSKYGPDGLPYLKVLKAAGVNTTDKEIEVLYIRNVTFEDAGEYTCLAGNSIGISFHSAWLTVLPAPGREKEITASPDYLEIAIYCIGVFLIACMVVTVILCRMKNTTKKPDFSSQPAVHKLTKRIPLRRQVTVSAESSSSMNSNTPLVRITTRLSSTADTPMLAGVSEYELPEDPKWEFPRDKLTLGKPLGEGCFGQVVMAEAVGIDKDKPKEAVTVAVKMLKDDATEKDLSDLVSEMEMMKMIGKHKNIINLLGACTQDGPLYVIVEYASKGNLREYLRARRPPGMEYSYDINRVPEEQMTFKDLVSCTYQLARGMEYLASQKCIHRDLAARNVLVTENNVMKIADFGLARDINNIDYYKKTTNGRLPVKWMAPEALFDRVYTHQSDVWSFGVLMWEIFTLGGSPYPGIPVEELFKLLKEGHRMDKPANCTNELYMMMRDCWHAVPSQRPTFKQLVEDLDRILTLTTNEEYLDLSQPLEQYSPSYPDTRSSCSSGDDSVFSPDPMPYEPCLPQYPHINGSVKT

SEQ ID NO: 2933 - protein, 51 aa, Homo sapiens [sequence omitted]

SEQ ID NO: 2934 - protein, 374 aa, Homo sapiens
MKYRSCADCVLARDPYCAWSVNTSRCVAVGGHSGSLLIQHVMTSDTSGICNLRGSKKGELFHSRRIGLSPGPELEFLFSSSPALLSCTNMHSVFSATTVRPTPKNITVVAGTDLVLPCHLSSNLAHARWTFGGRDLPAEQPGSFLYDARLQALVVMAAQPRHAGAYHCFSEEQGARLAAEGYLVAVVAGPSVTLEARAPLENLGLVWLAVVALGAVCLVLLLLVLSLRRRLREELEKGAKATERTLVYPLELPKEPTSPPFRPCPEPDEKLWDPVGYYYSDGSLKIVPGHARCQPGGGPPSPPPGIPGQPLPSPTRLHLGGGRNSNANGYVRLQLGGEDRGGLGHPLPELADELRRKLQQRQPLPDSNPEESSV

SEQ ID NO: 2935 - protein, 355 aa, Homo sapiens
MNVAEKHRGNYTCHASYTYLGKQYPITRVIEFITLEENKPTRPVIVSPANETMEVDLGSQIQLICNVTGQLSDIAYWKWNGSVIDEDDPVLGEDYYSVENPANKRRSTLITVLNISEIESRFYKHPFTCFAKNTHGIDAAYIQLIYPVTNFQKHMIGICVTLTVIIVCSVFIYKIFKIDIVLWYRDSCYDFLPIKVLPEVLEKQCGYKLFIYGRDDYVGEDIVEVINENVKKSRRLIIILVRETSGFSWLGGSSEEQIAMYNALVQDGIKVVLLELEKIQDYEKMPESIKFIKQKHGAIRWSGDFTQGPQSAKTRFWKNVRYHMPVQRRSPSSKHQLLSPATKEKLQREAHVPLG

SEQ ID NO: 2936 - protein, 1017 aa, Homo sapiens
LLGLLLLLARSGTRALVCLPCDESKCEEPRNCPGSIVQGVCGCCYTCASQRNESCGGTFGIYGTCDRGLRCVIRPPLNGDSLTEYEAGVCEDENWTDDQLLGFKPCNENLIAGCNIINGKCECNTIRTCSNPFEFPSQDMCLSALKRIEEEKPDCSKARCEVQFSPRCPEDSVLIEGYAPPGECCPLPSRCVCNPAGCLRKVCQPGNLNILVSKASGKPGECCDLYECKPVFGVDCRTVECPPVQQTACPPDSYETQVRLTADGCCTLPTRCECLSGLCGFPVCEVGSTPRIVSRGDGTPGKCCDVFECVNDTKPACVFNNVEYYDGDMFRMDNCRFCRCQGGVAICFTAQCGEINCERYYVPEGECCPVCEDPVYPFNNPAGCYANGLILAHGDRWREDDCTFCQCVNGERHCVATVCGQTCTNPVKVPGECCPVCEEPTIITVDPPACGELSNCTLTGKDCINGFKRDHNGCRTCQCINTEELCSERKQGCTLNCPFGFLTDAQNCEICECRPRPKKCRPIICDKYCPLGLLKNKHGCDICRCKKCPELSCSKICPLGFQQDSHGCLICKCREASASAGPPILSGTCLTVDGHHHKNEESWHDGCRECYCLNGREMCALITCPVPACGNPTIHPGQCCPSCADDFVVQKPELSTPSICHAPGGEYFVEGETWNIDSCTQCTCHSGRVLCETEVCPPLLCQNPSRTQDSCCPQCTDQPFRPSLSRNNSVPNYCKNDEGDIFLAAESWKPDVCTSCICIDSVISCFSESCPSVSCERPVLRKGQCCPYCIEDTIPKKVVCHFSGKAYADEERWDLDSCTHCYCLQGQTLCSTVSCPPLPCVEPINVEGSCCPMCPEMYVPEPTNIPIEKTNHRGEVDLEVPLWPTPSENDIVHLPRDMGHLQVDYRDNRLHPSEDSSLDSIASVVVPIIICLSIIIAFLFINQKKQWIPLLCWYRTPTKPSSLNNQLVSVDCKKGTRVQVDSSQRMLRIAEPDARFSGFYSMQKQNHLQADNFYQTV

SEQ ID NO: 2937 - protein, 572 aa, Homo sapiens
KKNMKVLLRLICFIALLISSLEADKCKEREEKIILVSSANEIDVRPCPLNPNEHKGTITWYKDDSKTPVSTEQASRIHQHKEKLWFVPAKVEDSGHYYCVVRNSSYCLRIKISAKFVENEPNLCYNAQAIFKQKLPVAGDGGLVCPYMEFFKNENNELPKLQWYKDCKPLLLDNIHFSGVKDRLIVMNVAEKHRGNYTCHASYTYLGKQYPITRVIEFITLEENKPTRPVIVSPANETMEVDLGSQIQLICNVTGQLSDIAYWKWNGSVIDEDDPVLGEDYYSVENPANKRRSTLITVLNISEIESRFYKHPFTCFAKNTHGIDAAYIQLIYPVTNFQKHMIGICVTLTVIIVCSVFIYKIFKIDIVLWYRDSCYDFLPIKASDGKTYDAYILYPKTVGEGSTSDCDIFVFKVLPEVLEKQCGYKLFIYGRDDYVGEDIVEVINENVKKSRRLIIILVRETSGFSWLGGSSEEQIAMYNALVQDGIKVVLLELEKIQDYEKMPESIKFIKQKHGAIRWSGDFTQGPQSAKTRFWKNVRYHMPVQRRSPSSKHQLLSPATKEKLQREAHVPLG

SEQ ID NO: 2938 - protein, 771 aa, Homo sapiens
LLLSVLRPAGPVAVGISLGFTLSLLSVTWVEEPCGPGPPQPGDSELPPRGNTNAARRPNSVQPGAEREKPGAGEGAGENWEPRVLPYHPAQPGQAAKKAVRTRYISTELGIRQRLLVAVLTSQTTLPTLGVAVNRTLGHRLERVVFLTGARGRRAPPGMAVVTLGEERPIGHLHLALRHLLEQHGDDFDWFFLVPDTTYTEAHGLARLTGHLSLASAAHLYLGRPQDFIGGEPTPGRYCHGGFGVLLSRMLLQQLRPHLEGCRNDIVSARPDEWLGRCILDATGVGCTGDHEGVHYSHLELSPGEPVQEGDPHFRSALTAHPVRDPVHMYQLHKAFARAELERTYQEIQELQWEIQNTSHLAVDGDQAAAWPVGIPAPSRPASRFEVLRWDYFTEQHAFSCADGSPRCPLRGADRADVADVLGTALEELNRRYHPALRLQKQQLVNGYRRFDPARGMEYTLDLQLEALTPQGGRRPLTRRVQLLRPLSRVEILPVPYVTEASRLTVLLPLAAAERDLAPGFLEAFATAALEPGDAAAALTLLLLYEPRQAQRVAHADVFAPVKAHVAELERRFPGARVPWLSVQTAAPSPLRLMDLLSKKHPLDTLFLLAGPDTVLTPDFLNRCRMHAISGWQAFFPMHFQAFHPAVAPPQGPGPPELGRDTGRFDRQAASEACFYNSDYVAARGRLAAASEQEEELLESLDVYELFLHFSSLHVLRAVEPALLQRYRAQTCSARLSEDLYHRCLQSVLEGLGSRTQLAMLLFEQEQGNST

SEQ ID NO: 2939 - protein, 2603 aa, Homo sapiens
RMPVTEKDLAEDAPWKKIQQNTFTRWCNEHLKCVNKRIGNLQTDLSDGLRLIALLEVLSQKRMYRKYHQRPTFRQMQLENVSVALEFLDRESIKLVSIDSKAIVDGNLKLILGLVWTLILHYSISMPVWEDEGDDDAKKQTPKQRLLGWIQNKIPYLPITNFNQNWQDGKALGALVDSCAPGLCPDWESWDPQKPVDNAREAMQQADDWLGVPQVITPEEIIHPDVDEHSVMTYLSQFPKAKLKPGAPLKPKLNPKKARAYGRGIEPTGNMVKQPAKFTVDTISAGQGDVMVFVEDPEGNKEEAQVTPDSDKNKTYSVEYLPKVTGLHKVTVLFAGQHISKSPFEVSVDKAQGDASKVTAKGPGLEAVGNIANKPTYFDIYTAGAGVGDIGVEVEDPQGKNTVELLVEDKGNQVYRCVYKPMQPGPHVVKIFFAGDTIPKSPFVVQVGEACNPNACRASGRGLQPKGVRIRETTDFKVDTKAAGSGELGVTMKGPKGLEELVKQKDFLDGVYAFEYYPSTPGRYSIAITWGGHHIPKSPFEVQVGPEAGMQKVRAWGPGLHGGIVGRSADFVVESIGSEVGSLGFAIEGPSQAKIEYNDQNDGSCDVKYWPKEPGEYAVHIMCDDEDIKDSPYMAFIHPATGGYNPDLVRAYGPGLEKSGCIVNNLAEFTVDPKDAGKAPLKIFAQDGEGQRIDIQMKNRMDGTYACSYTPVKAIKHTIAVVWGGVNIPHSPYRVNIGQGSHPQKVKVFGPGVERSGLKANEPTHFTVDCTEAGEGDVSVGIKCDARVLSEDEEDVDFDIIHNANDTFTVKYVPPAAGRYTIKVLFASQEIPASPFRVKVDPSHDASKVKAEGPGLSKAGVENGKPTHFTVYTKGAGKAPLNVQFNSPLPGDAVKDLDIIDNYDYSHTVKYTPTQQGNMQVLVTYGGDPIPKSPFTVGVAAPLDLSKIKLNGLENRVEVGKDQEFTVDTRGAGGQGKLDVTILSPSRKVVPCLVTPVTGRENSTAKFIPREEGLYAVDVTYDGHPVPGSPYTVEASLPPDPSKVKAHGPGLEGGLVGKPAEFTIDTKGAGTGGLGLTVEGPCEAKIECSDNGDGTCSVSYLPTKPGEYFVNILFEEVHIPGSPFKADIEMPFDPSKVVASGPGLEHGKVGEAGLLSVDCSEAGPGALGLEAVSDSGTKAEVSIQNNKDGTYAVTYVPLTAGMYTLTMKYGGELVPHFPARVKVEPAVDTSRIKVFGPGIEGKDVFREATTDFTVDSRPLTQVGGDHIKAHIANPSGASTECFVTDNADGTYQVEYTPFEKGLHVVEVTYDDVPIPNSPFKVAVTEGCQPSRVQAQGPGLKEAFTNKPNVFTVVTRGAGIGGLGITVEGPSESKINCRDNKDGSCSAEYIPFAPGDYDVNITYGGAHIPGSPFRVPVKDVVDPSKVKIAGPGLGSGVRARVLQSFTVDSSKAGLAPLEVRVLGPRGLVEPVNVVDNGDGTHTVTYTPSQEGPYMVSVKYADEEIPRSPFKVKVLPTYDASKVTASGPGLSSYGVPASLPVDFAIDARDAGEGLLAVQITDQEGKPKRAIVHDNKDGTYAVTYIPDKTGRYMIGVTYGGDDIPLSPYRIRATQTGDASKCLATGPGIASTVKTGEEVGFVVDAKTAGKGKVTCTVLTPDGTEAEADVIENEDGTYDIFYTAAKPGTYVIYVRFGGVDIPNSPFTVMATDGEVTAVEEAPVNACPPGFRPWVTEEAYVPVSDMNGLGFKPFDLVIPFAVRKGEITGEVHMPSGKTATPEIVDNKDGTVTVRYAPTEVGLHEMHIKYMGSHIPESPLQFYVNYPNSGSVSAYGPGLVYGVANKTATFTIVTEDAGEGGLDLAIEGPSKAEISCIDNKDGTCTVTYLPTLPGDYSILVKYNDKHIPGSPFTAKITDDSRRCSQVKLGSAADFLLDISETDLSSLTASIKAPSGRDEPCLLKRLPNNHIGISFIPREVGEHLVSIKKNGNHVANSPVSIMVVQSEIGDARRAKVYGRGLSEGRTFEMSDFIVDTRDAGYGGISLAVEGPSKVDIQTEDLEDGTCKVSYFPTVPGVYIVSTKFADEHVPGSPFTVKISGEGRVKESITRTSRAPSVATVGSICDLNLKIPEINSSDMSAHVTSPSGRVTEAEIVPMGKNSHCVRFVPQEMGVHTVSVKYRGQHVTGSPFQFTVGPLGEGGAHKVRAGGPGLERGEAGVPAEFSIWTREAGAGGLSIAVEGPSKAEITFDDHKNGSCGVSYIAQEPGNYEVSIKFNDEHIPESPYLVPVIAPSDDARRLTVMSLQESGLKVNQPASFAIRLNGAKGKIDAKVHSPSGAVEECHVSELEPDKYAVRFIPHENGVHTIDVKFNGSHVVGSPFKVRVGEPGQAGNPALVSAYGTGLEGGTTGIQSEFFINTTRAGPGTLSVTIEGPSKVKMDCQETPEGYKVMYTPMAPGNYLISVKYGGPNHIVGSPFKAKVTGQRLVSPGSANETSSILVESVTRSSTETCYSAIPKASSDASKVTSKGAGLSKAFVGQKSSFLVDCSKAGSNMLLIGVHGPTTPCEEVSMKHVGNQQYNVTYVVKERGDYVLAVKWGEEHIPGSPFHVTVP

SEQ ID NO: 2940 - protein, 100 aa, Homo sapiens
IMAEGGFDPCECVCSHEHAMRRLINLLRQSQSYCTDTECLQELPGPSGDNGISVTMILVAWMVIALILFLLRPPNLRGSSLPGKPTSPHNGQDPPAPPVD

SEQ ID NO: 2941 - protein, 106 aa, Homo sapiens
RRGALYRSPMNQENPPPYPGPGPTAPYPPYPPQPMGPGPMGGPYPPPQGYPYQGYPQYGWQGGPQEPPKTTVYVVEDQRRDELGPSTCLTACWTALCCCCLWDMLT

SEQ ID NO: 2942 - protein, 51 aa, Homo sapiens
RGRKRRKNRSSASDLRWLKERMYLVSAISLHPSMTLLSMSLIFLARKPSAV

SEQ ID NO: 2943 - protein, 1118 aa, Homo sapiens
VPTPEAISSKDTMRLPGAMPALALKGELLLLSLLLLLEPQISQGLVVTPPGPELVLNVSSTFVLTCSGSAPVVWERMSQEPPQEMAKAQDGTFSSVLTLTNLTGLDTGEYFCTHNDSRGLETDERKRLYIFVPDPTVGFLPNDAEELFIFLTEITEITIPCRVTDPQLVVTLHEKKGDVALPVPYDHQRGFSGIFEDRSYICKTTIGDREVDSDAYYVYRLQVSSINVSVNAVQTVVRQGENITLMCIVIGNEVVNFEWTYPRKESGRLVEPVTDFLLDMPYHIRSILHIPSAELEDSGTYTCNVTESVNDHQDEKAINITVVESGYVRLLGEVGTLQFAELHRSRTLQVVFEAYPPPTVLWFKDNRTLGDSSAGEIALSTRNVSETRYVSELTLVRVKVAEAGHYTMRAFHEDAEVQLSFQLQINVPVRVLELSESHPDSGEQTVRCRGRGMPQPNIIWSACRDLKRCPRELPPTLLGNSSEEESQLETNVTYWEEEQEFEVVSTLRLQHVDRPLSVRCTLRNAVGQDTQEVIVVPHSLPFKVVVISAILALVVLTIISLIILIMLWQKKPRYEIRWKVIESVSSDGHEYIYVDPMQLPYDSTWELPRDQLVLGRTLGSGAFGQVVEATAHGLSHSQATMKVAVKMLKSTARSSEKQALMSELKIMSHLGPHLNVVNLLGACTKGGPIYIITEYCRYGDLVDYLHRNKHTFLQHHSDKRRPPSAELYSNALPVGLPLPSHVSLTGESDGGYMDMSKDESVDYVPMLDMKGDVKYADIESSNYMAPYDNYVPSAPERTCRATLINESPVLSYMDLVGFSYQVANGMEFLASKNCVHRDLAARNVLICEGKLVKICDFGLARDIMRDSNYISKGSTFLPLKWMAPESIFNSLYTTLSDVWSFGILLWEIFTLGGTPYPELPMNEQFYNAIKRGYRMAQPAHASDEIYEIMQKCWEEKFEIRPPFSQLVLLLERLLGEGYKKKYQQVDEEFLRSDHPAILRSQARLPGFHGLRSPLDTSSVLYTAVQPNEGDNDYIIPLPDPKPEVADEGPLEGSPSLASSTLNEVNTSSTISCDSPLEPQDEPEPEPQLELQVEPEPELEQLPDSGCPAPRAEAEDSFL

SEQ ID NO: 2944 - protein, 466 aa, Homo sapiens
LATMHGSCSFLMLLLPLLLLLVATTGPVGALTDEEKRLMVELHNLYRAQVSPTASDMLHMRWDEELAAFAKAYARQCVWGHNKERGRRGENLFAITDEGMDVPLAMEEWHHEREHYNLSAATCSPGQMCGHYTQVVWAKTERIGCGSHFCEKLQGVEETNIELLVCNYEPPGNVKGKRPYQEGTPCSQCPSGYHCKNSLCEPIGSPEDAQDLPYLVTEAPSFRATEASDSRKMGTPSSLATGIPAFLVTEVSGSLATKALPAVETQAPTSLATKDPPSMATEAPPCVTTEVPSILAAHSLPSLDEEPVTFPKSTHVPIPKSADKVTDKTKVPSRSPENSLDPKMSLTGARELLPHAQEEAEAEAELPPSSEVLASVFPAQDKPGELQATLDHTGHTSSKSLPNFPNTSATANATGGRALALQSSLPGAEGPDKPSVVSGLNSGPGHVWGPLLGLLLLPPLVLAGIF

SEQ ID NO: 2945 - protein, 403 aa, Homo sapiens
LARLALVLLGWVSSSSPTSSASSFSSSAPFLASAVSAQPPLPDQCPALCECSEAARTVKCVNRNLTEVPTDLPAYVRNLFLTGNQLAVLPAGAFARRPPLAELAALNLSGSRLDEVRAGAFEHLPSLRQLDLSHNPLADLSPFAFSGSNASVSAPSPLVELILNHIVPPEDERQNRSFEGMVVAALLAGRALQGLRRLELASNHFLYLPRDVLAQLPSLRHLDLSNNSLVSLTYVSFRNLTHLESLHLEDNALKVLHNGTLAELQGLPHIRVFLDNNPWVCDCHMADMVTWLKETEVVQGKDRLTCAYPEKMRNRVLLELNSADLDCDPILPPSLQTSYVFLGIVLALIGAIFLLVLYLNRKGIKKWMHNIRDACRDHMEGYHYRYEINADPRLTNLSSNSDV

SEQ ID NO: 2946 - protein, 965 aa, Homo sapiens
IWRSDATMRTHTRGAPSVFFIYLLCFVSAYITDENPEVMIPFTNANYDSHPMLYFSRAEVAELQLRAASSHEHIAARLTEAVHTMLSSPLEYLPPWDPKDYSARWNEIFGNNLGALAMFCVLYPENIEARDMAKDYMERMAAQPSWLVKDAPWDEVPLAHSLVGFATAYDFLYNYLSKTQQEKFLEVIANASGYMYETSYRRGWGFQYLHNHQPTNCMALLTGSLVLMNQGYLQEAYLWTKQVLTIMEKSLVLLREVTDGSLYEGVAYGSYTTRSLFQYMFLVQRHFNINHFGHPWLKQHFAFMYRTILPGFQRTVAIADSNYNWFYGPESQLVFLDKFVMRNGSGNWLADQIRRNRVVEGPGTPSKGQRWCTLHTEFLWYDGSLKSVPPPDFGTPTLHYFEDWGVVTYGSALPAEINRSFLSFKSGKLGGRAIYDIVHRNKYKDWIKGWRNFNAGHEHPDQNSFTFAPNGVPFITEALYGPKYTFFNNVLMFSPAVSKSCFSPWVGQVTEDCSSKWSKYKHDLAASCQGRVVAAEEKNGVVFIRGEGVGAYNPQLNLKNVQRNLILLHPQLLLLVDQIHLGEESPLETAASFFHNVDVPFEETVVDGVHGAFIRQRDGLYKMYWMDDTGYSEKATFASVTYPRGYPYNGTNYVNVTMHLRSPITRAAYLFIGPSIDVQSFTVHGDSQQLDVFIATSKHAYATYLWTGEATGQSAFAQVIADRHKILFDRNSAIKSSIVPEVKDYAAIVEQNLQHFKPVFQLLEKQILSRVRNTASFRKTAERLLRFSDKRQTEEAIDRIFAISQQQQQQSKSKKNRRAGKRYKFVDAVPDIFAQIEVNEKKIRQKAQILAQKELPIDEDEEMKDLLDFADVTYEKHKNGGLIKGRFGQARMVTTTHSRAPSLSASYTRLFLILNIAIFFVMLAMQLTYFQRAQSLHGQRCLYAVLLIDSCILLWLYSSCSQSQC

SEQ ID NO: 2947 - protein, 613 aa, Homo sapiens
LESGRLSVLLLVPHFGENLKPTRADNLRLDRCHQRSLGTMWTFLGIATFTYFYKKFGDFITLANREVLLCVLVFLSLGLVLSYRCRHRNGGLLGRQQSGSQFALFSDILSGLPFIGFFWAKSPPESENKEQLEARRRRKGTNISETSLIGTAACTSTSSQNDPEVIIVGAGVLGSALAAVLSRDGRKVTVIERDLKEPDRIVGEFLQPGGYHVLKDLGLGDTVEGLDAQVVNGYMIHDQESKSEVQIPYPLSENNQVQSGRAFHHGRFIMSLRKAAMAEPNAKFIEGVVLQLLEEDDVVMGVQYKDKETGDIKELHAPLTVVADGLFSKFRKSLVSNKVSVSSHFVGFLMKNAPQFKANHAELILANPSPVLIYQISSSETRVLVDIRGEMPRNLREYMVEKIYPQIPDHLKEPFLEATDNSHLRSMPASFLPPSSVKKRGVLLLGDAYNMRHPLTGGGMTVAFKDIKLWRKLLKGIPDLYDDAAIFEAKKSFYWARKTSHSFVVNILAQALYELFSATDDSLHQLRKACFLYFKLGGECVAGPVGLLSVLSPNPLVLIGHFFAVAIYAVYFCFKSEPWITKPRALLSSGAVLYKACSVIFPLIYSEMKYMVH

SEQ ID NO: 2948 - protein, 867 aa, Homo sapiens
KESEAPPLRSGGGGHKVWRPRVADGSPPPAPPPGHQLRLHCSRPGWRRRAPSAAGSRAPAAELLRPRQDPNRARGRRAGAGDAGTRPLAQATADSPEAEPPRRARVSLKRRIELTVEYPWRCGALSPTSNCRTGMWSWKCLLFWAVLVTATLCTARPSPTLPEQDALPSSEDDDDDDDSSSEEKETDNTKPNRMPVAPYWTSPEKMEKKLHAVPAAKTVKFKCPSSGTPNPTLRWLKNGKEFKPDHRIGGYKVRYATWSIIMDSVVPSDKGNYTCIVENEYGSINHTYQLDVVERSPHRPILQAGLPANKTVALGSNVEFMCKVYSDPQPHIQWLKHIEVNGSKIGPDNLPYVQILKTAGVNTTDKEMEVLHLRNVSFEDAGEYTCLAGNSIGLSHHSAWLTVLEALEERPAVMTSPLYLEIIIYCTGAFLISCMVGSVIVYKMKSGTKKSDFHSQMAVHKLAKSIPLRRQVTVSADSSASMNSGVLLVRPSRLSSSGTPMLAGVSEYELPEDPRWELPRDRLVLGKPLGEGCFGQVVLAEAIGLDKDKPNRVTKVAVKMLKSDATEKDLSDLISEMEMMKMIGKHKNIINLLGACTQDGPLYVIVEYASKGNLREYLQARRPPGLEYCYNPSHNPEEQLSSKDLVSCAYQVARGMEYLASKKCIHRDLAARNVLVTEDNVMKIADFGLARDIHHIDYYKKTTNGRLPVKWMAPEALFDRIYTHQSDVWSFGVLLWEIFTLGGSPYPGVPVEELFKLLKEGHRMDKPSNCTNELYMMMRDCWHAVPSQRPTFKQLVEDLDRIVALTSNQEYLDLSMPLDQYSPSFPDTRSSTCSSGEDSVFSHEPLPEEPCLPRHPAQLANGGLKRR

SEQ ID NO: 2949 - protein, 492 aa, Homo sapiens
LLLLVLAAAAAAAAALLPGATALQCFCHLCTKDNFTCVTDGLCFVSVTETTDKVIHNSMCIAEIDLIPRDRPFVCAPSSKTGSVTTTYCCNQDHCNKIELPTTVKSSPGLGPVELAAVIAGPVCFVCISLMLMVYICHNRTVIHHRVPNEEDPSLDRPFISEGTTLKDLIYDMTTSGSGSGLPLLVQRTIARTIVLQESIGKGRFGEVWRGKWRGEEVAVKIFSSREERSWFREAEIYQTVMLRHENILGFIAADNKDNGTWTQLWLVSDYHEHGSLFDYLNRYTVTVEGMIKLALSTASGLAHLHMEIVGTQGKPAIAHRDLKSKNILVKKNGTCCIADLGLAVRHDSATDTIDIAPNHRVGTKRYMAPEVLDDSINMKHFESFKRADIYAMGLVFWEIARRCSIGGIHEDYQLPYYDLVPSDPSVEEMRKVVCEQKLRPNIPNRWQSCEALRVMAKIMRECWYANGAARLTALRIKKTLSQLSQQEGIKM

SEQ ID NO: 2950 - protein, 2071 aa, Homo sapiens
LKLAFYQLRTMLRVIVESASNIPKTKFGKPDPIVSVIFKDEKKKTKKVDNELNPVWNEILEFDLRGIPLDFSSSLGIIVKDFETIGQNKLIGTATVALKDLTGDQSRSLPYKLISLLNEKGQDTGATIDLVIGYDPPSAPHPNDLSGPSVPGMGGDGEEDEGDEDRLDNAVRGPGPKGPVGTVSEAQLARRLTKVKNSRRMLSNKPQDFQIRVRVIEGRQLSGNNIRPVVKVHVCGQTHRTRIKRGNNPFFDELFFYNVNMTPSELMDEIISIRVYNSHSLRADCLMGEFKIDVGFVYDEPGHAVMRKWLLLNDPEDTSSGSKGYMKVSMFVLGTGDEPPPERRDRDNDSDDVESNLLLPAGIALRWVTFLLKIYRAEDIPQMDDAFSQTVKEIFGGNADKKNLVDPFVEVSFAGKKVCTNIIEKNANPEWNQVVNLQIKFPSVCEKIKLTIYDWDRLTKNDVVGTTYLHLSKIAASGGEVEDFSSSGTGAASYTVNTGETEVGFVPTFGPCYLNLYGSPREYTGFPDPYDELNTGKGEGVAYRGRILVELATFLEKTPPDKKLEPISNDDLLVVEKYQRRRKYSLSAVFHSATMLQDVGEAIQFEVSIGNYGNKFDTTCKPLASTTQYSRAVFDGNYYYYLPWAHTKPVVTLTSYWEDISHRLDAVNTLLAMAERLQTNIEALKSGIQGKIPANQLAELWLKLIDEVIEDTRYTLPLTEGKANVTVLDTQIRKLRSRSLSQIHEAAVRMRSEATDVKSTLAEIEDWLDKLMQLTEEPQNSMPDIIIWMIRGEKRLAYARIPAHQVLYSTSGENASGKYCGKTQTIFLKYPQEKNNGPKVPVELRVNIWLGLSAVEKKFNSFAEGTFTVFAEMYENQALMFGKWGTSGLVGRHKFSDVTGKIKLKREFFLPPKGWEWEGEWIVDPERSLLTEADAGHTEFTDEVYQNESRYPGGDWKPAEDTYTDANGDKAASPSELTCPPGWEWEDDAWSYDINRAVDEKGWEYGITIPPDHKPKSWVAAEKMYHTHRRRRLVRKRKKDLTQTASSTARAMEELQDQEGWEYASLIGWKFHWKQRSSDTFRRRRWRRKMAPSETHGAAAIFKLEGALGADTTEDGDEKSLEKQKHSATTVFGANTPIVSCNFDRVYIYHLRCYVYQARNLLALDKDSFSDPYAHICFLHRSKTTEIIHSTLNPTWDQTIIFDEVEIYGEPQTVLQNPPKVIMELFDNDQVGKDEFLGRSIFSPVVKLNSEMDITPKLLWHPVMNGDKACGDVLVTAELILRGKDGSNLPILPPQRAPNLYMVPQGIRPVVQLTAIEILAWGLRNMKNFQMASITSPSLVVECGGERVESVVIKNLKKTPNFPSSVLFMKVFLPKEELYMPPLVIKVIDHRQFGRKPVVGQCTIERLDRFRCDPYAGKEDIVPQLKASLLSAPPCRDIVIEMEDTKPLLASKLTEKEEEIVDWWSKFYASSGEHEKCGQYIQKGYSKLKIYNCELENVAEFEGLTDFSDTFKLYRGKSDENEDPSVVGEFKGSFRIYPLPDDPSVPAPPRQFRELPDSVPQECTVRIYIVRGLELQPQDNNGLCDPYIKITLGKKVIEDRDHYIPNTLNPVFGRMYELSCYLPQEKDLKISVYDYDTFTRDEKVGETIIDLENRFLSRFGSHCGIPEEYCVSGVNTWRDQLRPTQLLQNVARFKGFPQPILSEDGSRIRYGGRDYSLDEFEANKILHQHLGAPEERLALHILRTQGLVPEHVETRTLHSTFQPNISQGKLQMWVDVFPKSLGPPGPPFNITPRKAKKYYLRVIIWNTKDVILDEKSITGEEMSDIYVKGWIPGNEENKQKTDVHYRSLDGEGNFNWRFVFPFDYLPAEQLCIVAKKEHFWSIDQTEFRIPPRLIIQIWDNDKFSLDDYLGFLELDLRHTIIPAKSPEKCRLDMIPDLKAMNPLKAKTASLFEQKSMKGWWPCYAEKDGARVMAGKVEMTLEILNEKEADERPAGKGRDEPNMNPKLDLPNRPETSFLWFTNPCKTMKFIVWRRFKWVIIGLLFLLILLLFVAVLLYSLPNYLSMKIVKPNV

SEQ ID NO: 2951 - protein, 427 aa, Homo sapiens
VPTFSWEEIQKHNLRTDRWLVIDRKVYNITKWSIQHPGGQRVIGHYAGEDATDAFRAFHPDLEFVGKFLKPLLIGELAPEEPSQDHGKNSKITEDFRALRKTAEDMNLFKTNHVFFLLLLAHIIALESIAWFTVFYFGNGWIPTLITAFVLATSQAQAGWLQHDYGHLSVYRKPKWNHLVHKFVIGHLKGASANWWNHRHFQHHAKPNIFHKDPDVNMLHVFVLGEWQPIEYGKKKLKYLPYNHQHEYFFLIGPPLLIPMYFQYQIIMTMIVHKNWVDLAWAVSYYIRFFITYIPFYGILGALLFLNFIRFLESHWFVWVTQMNHIVMEIDQEAYRDWFSSQLTATCNVEQSFFNDWFSGHLNFQIEHHLFPTMPRHNLHKIAPLVKSLCAKHGIEYQEKPLLRALLDIIRSLKKSGKLWLDAYLHK

SEQ ID NO: 2952 - protein, 759 aa, Homo sapiens
IAMLLRLLLAWAAAGPTLGQDPWAAEPRAACGPSSCYALFPRRRTFLEAWRACRELGGDLATPRTPEEAQRVDSLVGAGPASRLLWIGLQRQARQCQLQRPLRGFTWTTGDQDTAFTNWAQPASGGPCPAQRCVALEASGEHRWLEGSCTLAVDGYLCQFGFEGACPALQDEAGQAGPAVYTTPFHLVSTEFEWLPFGSVAAVQCQAGRGASLLCVKQPEGGVGWSRAGPLCLGTGCSPDNGGCEHECVEEVDGHVSCRCTEGFRLAADGRSCEDPCAQAPCEQQCEPGGPQGYSCHCRLGFRPAEDDPHRCVDTDECQIAGVCQQMCVNYVGGFECYCSEGHELEADGISCSPAGAMGAQASQDLGDELLDDGEDEEDEDEAWKAFNGGWTEMPGILWMEPTQPPDFALAYRPSFPEDREPQIPYPEPTWPPPLSAPRVPYHSSVLSVTRPVVVSATHPTLPSAHQPPVIPATHPALSRDHQIPVIAANYPDLPSAYQPGILSVSHSAQPPAHQPPMISTKYPELFPAHQSPMFPDTRVAGTQTTTHLPGIPPNHAPLVTTLGAQLPPQAPDALVLRTQATQLPIIPTAQPSLTTTSRSPVSPAHQISVPAATQPAALPTLLPSQSPTNQTSPISPTHPHSKAPQIPREDGPSPKLALWLPSPAPTAAPTALGEAGLAEHSQRDDRWLLVALLVPTCVFLVVLLALGIVYCTRCGPHAPNKRITDCYRWVIHAGSKSPTEPMPPRGSLTGVQTCRTSV

SEQ ID NO: 2953 - protein, 233 aa, Homo sapiens
KLALTMPVKGGTKCIKYLLFGFNFIFWLAGIAVLAIGLWLRFDSQTKSIFEQETNNNNSSFYTGVYILIGAGALMMLVGFLGCCGAVQESQCMLGLFFGFLLVIFAIEIAAAIWGYSHKDEVIKEVQEFYKDTYNKLKTKDEPQRETLKAIHYALNCCGLAGGVEQFISDICPKKDVLETFTVKSCPDAIKEVFDNKFHIIGAVGIGIAVVMIFGMIFSMILCCAIRRNREMV

SEQ ID NO: 2954 - protein, 34 aa, Homo sapiens
LAFTFLILFLGNFLTTLKVVHAKLQKNRGKTKQP

SEQ ID NO: 2955 - protein, 172 aa, Homo sapiens
LGELVCGSGCCCHCCAGGPVARQKALPRLRGVMSRFLNVLRSWLVMVSIIAMGNTLQSFRDHTFLYEKLYTGKPNLVNGLQARTFGIWTLLSSVIRCLCAIDIHNKTLYHITLWTFLLALGHFLSELFVYGTAAPTIGVLAPLMVASFSILGMLVGLRYLEVEPVSRQKKRN

SEQ ID NO: 2956 - protein, 74 aa, Homo sapiens
VAFSACTTVLVAVHLFALMVSTCLLPHIEAVSNIHNLNSVHQSPHQRLHRYVELAWGFSTALGTFLFLAEVVLR

SEQ ID NO: 2957 - protein, 467 aa, Homo sapiens
LAMGGAVVDEGPTGVKAPDGGWGWAVLFGCFVITGFSYAFPKAVSVFFKELIQEFGIGYSDTAWISSILLAMLYGTGPLCSVCVNRFGCRPVMLVGGLFASLGMVAASFCRSIIQVYLTTGVITGLGLALNFQPSLIMLNRYFSKRRPMANGLAAAGSPVFLCALSPLGQLLQDRYGWRGGFLILGGLLLNCCVCAALMRPLVVTAQPGSGPPRPSRRLLDLSVFRDRGFVLYAVAASVMVLGLFVPPVFVVSYAKDLGVPDTKAAFLLTILGFIDIFARPAAGFVAGLGKVRPYSVYLFSFSMFFNGLADLAGSTAGDYGGLVVFCIFFGISYGMVGALQFEVLMAIVGTHKFSSAIGLVLLMEAVAVLVGPPSGGKLLDATHVYMYVFILAGAEVLTSSLILLLGNFFCIRKKPKEPQPEVAAAEEEKLHKPPADSGVDLREVEHFLKAEPEKNGEVVHTPETSV

SEQ ID NO: 2958 - protein, 344 aa, Homo sapiens
RAQASSFGWGAAELTSDISAPFTRRNPGAGARSAGVTMTKAGSKGGNLRDKLDGNELDLSLSDLNEVPVKELAALPKATILDLSCNKLTTLPSDFCGLTHLVKLDLSKNKLQQLPADFGRLVNLQHLDLLNNKLVTLPVSFAQLKNLKWLDLKDNPLDPVLAKVAGDCLDEKQCKQCANKVLQHMKAVQADQERERQRRLEVEREAEKKREAKQRAKEAQERELRKREKAEEKERRRKEYDALKAAKREQEKKPKKEANQAPKSKSGSRPRKPPPRKHTRSWAVLKLLLLLLLFGVAGGLVACRVTELQQQPLCTSVNTIYDNAVQGLRRHEILQWVLQTDSQQ

SEQ ID NO: 2959 - protein, 1451 aa, Homo sapiens
RGLGTCLATLAGLLLTAAGETFSGGCLFDEPYSTCGYSQSEGDDFNWEQVNTLTKPTSDPWMPSGSFMLVNASGRPEGQRAHLLLPQLKENDTHCIDFHYFVSSKSNSPPGLLNVYVKVNNGPLGNPIWNISGDPTRTWNRAELAISTFWPNFYQVIFEVITSGHQGYLAIDEVKVLGHPCTRTPHFLRIQNVEVNAGQFATFQCSAIGRTVAGDRLWLQGIDVRDAPLKEIKVTSSRRFIASFNVVNTTKRDAGKYRCMIRTEGGVGISNYAELVVKEPPVPIAPPQLASVGATYLWIQLNANSINGDGPIVAREVEYCTASGSWNDRQPVDSTSYKIGHLDPDTEYEISVLLTRPGEGGTGSPGPALRTRTKCADPMRGPRKLEVVEVKSRQITIRWEPFGYNVTRCHSYNLTVHYCYQVGGQEQVREEVSWDTENSHPQHTITNLSPYTNVSVKLILMNPEGRKESQELIVQTDEDLPGAVPTESIQGSTFEEKIFLQWREPTQTYGVITLYEITYKAVSSFDPEIDLSNQSGRVSKLGNETHFLFFGLYPGTTYSFTIRASTAKGFGPPATNQFTTKISAPSMPAYELETPLNQTDNTVTVMLKPAHSRGAPVSVYQIVVEEERPRRTKKTTEILKCYPVPIHFQNASLLNSQYYFAAEFPADSLQAAQPFTIGDNKTYNGYWNTPLLPYKSYRIYFQAASRANGETKIDCVQVATKGAATPKPVPEPEKQTDHTVKIAGVIAGILLFVIIFLGVVLVMKKRKLAKKRKETMSSTRQEMTVMVNSMDKSYAEQGTNCDEAFSFMDTHNLNGRSVSSPSSFTMKTNTLSTSVPNSYYPDETHTMASDTSSLVQSHTYKKREPADVPYQTGQLHPAIRVADLLQHITQMKCAEGYGFKEEYESFFEGQSAPWDSAKKDENRMKNRYGNIIAYDHSRVRLQTIEGDTNSDYINGNYIDGYHRPNHYIATQGPMQETIYDFWRMVWHENTASIIMVTNLVEVGRVKCCKYWPDDTEIYKDIKVTLIETELLAEYVIRTFAVEKRGVHEIREIRQFHFTGWPDHGVPYHATGLLGFVRQVKSKSPPSAGPLVVHCSAGAGRTGCFIVIDIMLDMAEREGVVDIYNCVRELRSRRVNMVQTEEQYVFIHDAILEACLCGDTSVPASQVRSLYYDMNKLDPQTNSSQIKEEFRTLNMVTPTLRVEDCSIALLPRNHEKNRCMDILPPDRCLPFLITIDGESSNYINAALMDSYKQPSAFIVTQHPLPNTVKDFWRLVLDYHCTSVVMLNDVDPAQLCPQYWPENGVHRHGPIQVEFVSADLEEDIISRIFRIYNAARPQDGYRMVQQFQFLGWPMYRDTPVSKRSFLKLIRQVDKWQEEYNGGEGRTVVHCLNGGGRSGTFCAISIVCEMLRHQRTVDVFHAVKTLRNNKPNMVDLLDQYKFCYEVALEYLNSG

SEQ ID NO: 2960 - protein, 238 aa, Homo sapiens
IPIIKMSQSNRELVVDFLSYKLSQKGYSWSQFSDVEENRTEAPEGTESEMETPSAINGNPSWHLADSPAVNGATGHSSSLDAREVIPMAAVKQALREAGDEFELRYRRAFSDLTSQLHITPGTAYQSFEQVVNELFRDGVNWGRIVAFFSFGGALCVESVDKEMQVLVSRIAAWMATYLNDHLEPWIQENGGWDTFVELYGNNAAAESRKGQERFNRWFLTGMTVAGVVLLGSLFSRK

SEQ ID NO: 2961 - protein, 32 aa, Homo sapiens [sequence omitted]

SEQ ID NO: 2962 - protein, 859 aa, Homo sapiens
LRPRLRLQCRAQEPCAAQSSCWRGIEARLRGFGSGRWLCSAGRERARPRGPSPPDPPPPRSRPLGDSSGCSGGSPGPGTRGPGAMRASLLLSVLRPAGPVAVGISLGFTLSLLSVTWVEEPCGPGPPQPGDSELPPRGNTNAARRPNSVQPGAEREKPGAGEGAGENWEPRVLPYHPAQPGQAAKKAVRTRYISTELGIRQRLLVAVLTSQTTLPTLGVAVNRTLGHRLERVVFLTGARGRRAPPGMAVVTLGEERPIGHLHLALRHLLEQHGDDFDWFFLVPDTTYTEAHGLARLTGHLSLASAAHLYLGRPQDFIGGEPTPGRYCHGGFGVLLSRMLLQQLRPHLEGCRNDIVSARPDEWLGRCILDATGVGCTGDHEGVHYSHLELSPGEPVQEGDPHFRSALTAHPVRDPVHMYQLHKAFARAELERTYQEIQELQWEIQNTSHLAVDGDQAAAWPVGIPAPSRPASRFEVLRWDYFTEQHAFSCADGSPRCPLRGADRADVADVLGTALEELNRRYHPALRLQKQQLVNGYRRFDPARGMEYTLDLQLEALTPQGGRRPLTRRVQLLRPLSRVEILPVPYVTEASRLTVLLPLAAAERDLAPGFLEAFATAALEPGDAAAALTLLLLYEPRQAQRVAHADVFAPVKAHVAELERRFPGARVPWLSVQTAAPSPLRLMDLLSKKHPLDTLFLLAGPDTVLTPDFLNRCRMHAISGWQAFFPMHFQAFHPAVAPPQGPGPPELGRDTGRFDRQAASEACFYNSDYVAARGRLAAASEQEEELLESLDVYELFLHFSSLHVLRAVEPALLQRYRAQTCSARLSEDLYHRCLQSVLEGLGSRTQLAMLLFEQEQGNST

SEQ ID NO: 2963 - protein, 970 aa, Homo sapiens
LAALEIWRSDATMRTHTRGAPSVFFIYLLCFVSAYITDENPEVMIPFTNANYDSHPMLYFSRAEVAELQLRAASSHEHIAARLTEAVHTMLSSPLEYLPPWDPKDYSARWNEIFGNNLGALAMFCVLYPENIEARDMAKDYMERMAAQPSWLVKDAPWDEVPLAHSLVGFATAYDFLYNYLSKTQQEKFLEVIANASGYMYETSYRRGWGFQYLHNHQPTNCMALLTGSLVLMNQGYLQEAYLWTKQVLTIMEKSLVLLREVTDGSLYEGVAYGSYTTRSLFQYMFLVQRHFNINHFGHPWLKQHFAFMYRTILPGFQRTVAIADSNYNWFYGPESQLVFLDKFVMRNGSGNWLADQIRRNRVVEGPGTPSKGQRWCTLHTEFLWYDGSLKSVPPPDFGTPTLHYFEDWGVVTYGSALPAEINRSFLSFKSGKLGGRAIYDIVHRNKYKDWIKGWRNFNAGHEHPDQNSFTFAPNGVPFITEALYGPKYTFFNNVLMFSPAVSKSCFSPWVGQVTEDCSSKWSKYKHDLAASCQGRVVAAEEKNGVVFIRGEGVGAYNPQLNLKNVQRNLILLHPQLLLLVDQIHLGEESPLETAASFFHNVDVPFEETVVDGVHGAFIRQRDGLYKMYWMDDTGYSEKATFASVTYPRGYPYNGTNYVNVTMHLRSPITRAAYLFIGPSIDVQSFTVHGDSQQLDVFIATSKHAYATYLWTGEATGQSAFAQVIADRHKILFDRNSAIKSSIVPEVKDYAAIVEQNLQHFKPVFQLLEKQILSRVRNTASFRKTAERLLRFSDKRQTEEAIDRIFAISQQQQQQSKSKKNRRAGKRYKFVDAVPDIFAQIEVNEKKIRQKAQILAQKELPIDEDEEMKDLLDFADVTYEKHKNGGLIKGRFGQARMVTTTHSRAPSLSASYTRLFLILNIAIFFVMLAMQLTYFQRAQSLHGQRCLYAVLLIDSCILLWLYSSCSQSQC

SEQ ID NO: 2964 - protein, 298 aa, Homo sapiens
TGECDCVSGSMAEKRHTRDSEAQRLPDSFKDSPSKGLGPCGWILVAFSFLFTVITFPISIWMCIKIIKEYERAIIFRLGRILQGGAKGPGLFFILPCTDSFIKVDMRTISFDIPPQEILTKDSVTISVDGVVYYRVQNATLAVANITNADSATRLLAQTTLRNVLGTKNLSQILSDREEIAHNMQSTLDDATDAWGIKVERVEIKDVKLPVQLQRAMAAEAEASREARAKVIAAEGEMNASRALKEASMVITESPAALQLRYLQTLTTIAAEKNSTIVFPLPIDMLQGIIGAKHSHLG

SEQ ID NO: 2965 - protein, 386 aa, Homo sapiens
VLGMAGIPGLLFLLFFLLCAVGQVSPYSAPWKPTWPAYRLPVVLPQSTLNLAKPDFGAEAKLEVSSSCGPQCHKGTPLPTYEEAKQYLSYETLYANGSRTETQVGIYILSSSGDGAQHRDSGSSGKSRRKRQIYGYDSRFSIFGKDFLLNYPFSTSVKLSTGCTGTLVAEKHVLTAAHCIHDGKTYVKGTQKLRVGFLKPKFKDGGRGANDSTSAMPEQMKFQWIRVKRTHVPKGWIKGNANDIGMDYDYALLELKKPHKRKFMKIGVSPPAKQLPGGRIHFSGYDNDRPGNLVYRFCDVKDETYDLLYQQCDAQPGASGSGVYVRMWKRQQQKWERKIIGIFSGHQWVDMNGSPQDFNVAVRITPLKYAQICYWIKGNYLDCREG

SEQ ID NO: 2966 - protein, 462 aa, Homo sapiens
LLGPRPPPGIPRTRACSMGGVGEPGPREGPAQPGAPLPTFCWEQIRAHDQPGDKWLVIERRVYDISRWAQRHPGGSRLIGHHGAEDATDAFRAFHQDLNFVRKFLQPLLIGELAPEEPSQDGPLNAQLVEDFRALHQAAEDMKLFDASPTFFAFLLGHILAMEVLAWLLIYLLGPGWVPSALAAFILAISQAQSWCLQHDLGHASIFKKSWWNHVAQKFVMGQLKGFSAHWWNFRHFQHHAKPNIFHKDPDVTVAPVFLLGESSVEYGKKKRRYLPYNQQHLYFFLIGPPLLTLVNFEVENLAYMLVCMQWADLLWAASFYARFFLSYLPFYGVPGVLLFFVAVRVLESHWFVWITQMNHIPKEIGHEKHRDWVSSQLAATCNVEPSLFTNWFSGHLNFQIEHHLFPRMPRHNYSRVAPLVKSLCAKHGLSYEVKPFLTALVDIVRSLKKSGDIWLDAYLHQ

SEQ ID NO: 2967 - protein, 293 aa, Homo sapiens
LSTQAITLSETAAALDCSLPRLHARQSMRVTLATIAWMVSFVSNYSHTANILPDIENEDFIKDCVRIHNKFRSEVKPTASDMLYMTWDPALAQIAKAWASNCQFSHNTRLKPPHKLHPNFTSLGENIWTGSVPIFSVSSAITNWYDEIQDYDFKTRICKKVCGHYTQVVWADSYKVGCAVQFCPKVSGFDALSNGAHFICNYGPGGNYPTWPYKRGATCSACPNNDKCLDNLCVNRQRDQVKRYYSVVYPGWPIYPRNRYTSLFLIVNSVILILSVIITILVQHKYPNLVLLD

SEQ ID NO: 2968 - protein, 1069 aa, Homo sapiens
LGGLGSGSGSVAPGQGRAGAMGSRTPESPLHAVQLRWGPRRRPPLLPLLLLLLPPPPRVGGFNLDAEAPAVLSGPPGSFFGFSVEFYRPGTDGVSVLVGAPKANTSQPGVLQGGAVYLCPWGASPTQCTPIEFDSKGSRLLESSLSSSEGEEPVEYKSLQWFGATVRAHGSSILACAPLYSWRTEKEPLSDPVGTCYLSTDNFTRILEYAPCRSDFSWAAGQGYCQGGFSAEFTKTGRVVLGGPGSYFWQGQILSATQEQIAESYYPEYLINLVQGQLQTRQASSIYDDSYLGYSVAVGEFSGDDTEDFVAGVPKGNLTYGYVTILNGSDIRSLYNFSGEQMASYFGYAVAATDVNGDGLDDLLVGAPLLMDRTPDGRPQEVGRVYVYLQHPAGIEPTPTLTLTGHDEFGRFGSSLTPLGDLDQDGYNDVAIGAPFGGETQQGVVFVFPGGPGGLGSKPSQVLQPLWAASHTPDFFGSALRGGRDLDGNGYPDLIVGSFGVDKAVVYRGRPIVSASASLTIFPAMFNPEERSCSLEGNPVACINLSFCLNASGKHVADSIGFTVELQLDWQKQKGGVRRALFLASRQATLTQTLLIQNGAREDCREMKIYLRNESEFRDKLSPIHIALNFSLDPQAPVDSHGLRPALHYQSKSRIEDKAQILLDCGEDNICVPDLQLEVFGEQNHVYLGDKNALNLTFHAQNVGEGGAYEAELRVTAPPEAEYSGLVRHPGNFSSLSCDYFAVNQSRLLVCDLGNPMKAGASLWGGLRFTVPHLRDTKKTIQFDFQILSKNLNNSQSDVVSFRLSVEAQAQVTLNGVSKPEAVLFPVSDWHPRDQPQKEEDLGPAVHHVYELINQGPSSISQGVLELSCPQALEGQQLLYVTRVTGLNCTTNHPINPKGLELDPEGSLHHQQKREAPSRSSASSGPQILKCPEAECFRLRCELGPLHQQESQSLQLHFRVWAKTFLQREHQPFSLQCEAVYKALKMPYRILPRQLPQKERQVATAVQWTKAEGSYGVPLWIIILAILFGLLLLGLLIYILYKLGFFKRSLPYGTAMEKAQLKPPATSDA

SEQ ID NO: 2969 - protein, 329 aa, Homo sapiens
LPLPDGADMSEQSKDLSDPNFAAEAPNSEVHSSPGVSEGVPPSATLAEPQSPPLGPTAAPQAAPPPQAPNDEGDPKALQQAAEEGRAHQAPSAAQPGPAPPAPAQLVQKAHELMWYVLVKDQKKMIIWFPDMVKDVIGSYKKWCRSILRRTSLILARVFGLHLRLTSLHTMEFALVKALEPEELDRVALSNRMPMTGLLLMILSLIYVKGRGARESAVWNVLRILGLRPWKKHSTFGDVRKLITEEFVQMNYLKYQRVPYVEPPEYEFFWGSRASREITKMQIMEFLARVFKKDPQAWPSRYREALEEARALREANPTAHYPRSSVSED

SEQ ID NO: 2970 - protein, 34 aa, Homo sapiens
IVCPLSRTSTLSTPLLMQVRVMTCFLLALRIISI

SEQ ID NO: 2971 - protein, 395 aa, Homo sapiens
LLGALLAAAAAAAVRVCARHAEAQAAARQELALKTLGTDGLFLFSSLDTDGDMYISPEEFKPIAEKLTGSTPAASCEEEELPPDPSEETLTIEARFQPLLPETMTKSKDGFLGVSRLALSGLRNWTAAASPSAVFATRHFQPFLPPPGQELGEPWWIIPSELSMFTGYLSNNRFYPPPPKGKEVIIHRLLSMFHPRPFVKTRFAPQGAVACLTAISDFYYTVMFRIHAEFQLSEPPDFPFWFSPAQFTGHIILSKDATHVRDFRLFVPNHRSLNVDMEWLYGASESSNMEVDIGYIPQMELEATGPSVPSVILDEDGSMIDSHLPSGEPLQFVFEEIKWQQELSWEEAARRLEVAMYPFKKVSYLPFTEAFDRAKAENKLVHSILLWGALDDQSC

SEQ ID NO: 2972 - protein, 194 aa, Homo sapiens
VYAAAGRAGAGQPGSGALTAGRGAAPQSSMDAPRRDMELLSNSLAAYAHIRANPESFGLYFVLGVCFGLLLTLCLLVISISWAPRPRPRGPAQRRDPRSSTLEPEDDDEDEEDTVTRLGPDDTLPGPELSAEPDGPLNVNVFTSAEELERAQRLEERERILREIWRTGQPDLLGTGTLGPSPTATGTLGRMHYY

SEQ ID NO: 2973 - protein, 594 aa, Homo sapiens
LDMASEIHMTGPMCLIENTNGRLMANPEALKILSAITQPMVVVAIVGLYRTGKSYLMNKLAGKKKGFSLGSTVQSHTKGIWMWCVPHPKKPGHILVLLDTEGLGDVEKGDNQNDSWIFALAVLLSSTFVYNSIGTINQQAMDQLYYVTELTHRIRSKSSPDENENEVEDSADFVSFFPDFVWTLRDFSLDLEADGQPLTPDEYLTYSLKLKKGTSQKDETFNLPRLCIRKFFPKKKCFVFDRPVHRRKLAQLEKLQDEELDPEFVQQVADFCSYIFSNSKTKTLSGGIQVNGPRLESLVLTYVNAISSGDLPCMENAVLALAQIENSAAVQKAIAHYEQQMGQKVQLPTETLQELLDLHRDSEREAIEVFIRSSFKDVDHLFQKELAAQLEKKRDDFCKQNQEASSDRCSALLQVIFSPLEEEVKAGIYSKPGGYRLFVQKLQDLKKKYYEEPRKGIQAEEILQTYLKSKESMTDAILQTDQTLTEKEKEIEVERVKAESAQASAKMLQEMQRKNEQMMEQKERSYQEHLKQLTEKMENDRVQLLKEQERTLALKLQEQEQLLKEGFQKESRIMKNEIQDLQTKMRRRKACTIS

SEQ ID NO: 2974 - protein, 374 aa, Homo sapiens
IEDRRNWSLIGRPGAPASGLNRSSGLWLGPDRCRPRSRCSCRVMENPSPAAALGKALCALLLATLGAAGQPLGGESICSARALAKYSITFTGKWSQTAFPKQYPLFRPPAQWSSLLGAAHSSDYSMWRKNQYVSNGLRDFAERGEAWALMKEIEAAGEALQSVHAVFSAPAVPSGTGQTSAELEVQRRHSLVSFVVRIVPSPDWFVGVDSLDLCDGDRWREQAALDLYPYDAGTDSGFTFSSPNFATIPQDTVTEITSSSPSHPANSFYYPRLKALPPIARVTLVRLRQSPRAFIPPAPVLPSRDNEIVDSASVPETPLDCEVSLWSSWGLCGGHCGRLGTKSRTRYVRVQPANNGSPCPELEEEAECVPDNCV

SEQ ID NO: 2975 - protein, 894 aa, Homo sapiens
KDSVATMLSRLFRMHGLFVASHPWEVIVGTVTLTICMMSMNMFTGNNKICGWNYECPKFEEDVLSSDIIILTITRCIAILYIYFQFQNLRQLGSKYILGIAGLFTIFSSFVFSTVVIHFLDKELTGLNEALPFFLLLIDLSRASTLAKFALSSNSQDEVRENIARGMAILGPTFTLDALVECLVIGVGTMSGVRQLEIMCCFGCMSVLANYFVFMTFFPACVSLVLELSRESREGRPIWQLSHFARVLEEEENKPNPVTQRVKMIMSLGLVLVHAHSRWIADPSPQNSTADTSKVSLGLDENVSKRIEPSVSLWQFYLSKMISMDIEQVITLSLALLLAVKYIFFEQTETESTLSLKNPITSPVVTQKKVPDNCCRREPMLVRNNQKCDSVEEETGINRERKVEVIKPLVAETDTPNRATFVVGNSSLLDTSSVLVTQEPEIELPREPRPNEECLQILGNAEKGAKFLSDAEIIQLVNAKHIPAYKLETLMETHERGVSIRRQLLSKKLSEPSSLQYLPYRDYNYSLVMGACCENVIGYMPIPVGVAGPLCLDEKEFQVPMATTEGCLVASTNRGCRAIGLGGGASSRVLADGMTRGPVVRLPRACDSAEVKAWLETSEGFAVIKEAFDSTSRFARLQKLHTSIAGRNLYIRFQSRSGDAMGMNMISKGTEKALSKLHEYFPEMQILAVSGNYCTDKKPAAINWIEGRGKSVVCEAVIPAKVVREVLKTTTEAMIEVNINKNLVGSAMAGSIGGYNAHAANIVTAIYIACGQDAAQNVGSSNCITLMEASGPTNEDLYISCTMPSIEIGTVGGGTNLLPQQACLQMLGVQGACKDNPGENARQLARIVCGTVMAGELSLMAALAAGHLVKSHMIHNRSKINLQDLQGACTKKTA

SEQ ID NO: 2976 - protein, 100 aa, Homo sapiens
RSPMNQENPPPYPGPGPTAPYPPYPPQPMGPGPMGGPYPPPQGYPYQGYPQYGWQGGPQEPPKTTVYVVEDQRRDELGPSTCLTACWTALCCCCLWDMLT

SEQ ID NO: 2977 - protein, 1417 aa, Homo sapiens
LVTAPGIIRPGGNVTIGVELLEHCPSQVTVKAELLKTASNLTVSVLEAEGVFEKGSFKTLTLPSLPLNSADEIYELRVTGRTQDEILFSNSTRLSFETKRISVFIQTDKALYKPKQEVKFRIVTLFSDFKPYKTSLNILIKDPKSNLIQQWLSQQSDLGVISKTFQLSSHPILGDWSIQVQVNDQTYYQSFQVSEYVLPKFEVTLQTPLYCSMNSKHLNGTITAKYTYGKPVKGDVTLTFLPLSFWGKKKNITKTFKINGSANFSFNDEEMKNVMDSSNGLSEYLDLSSPGPVEILTTVTESVTGISRNVSTNVFFKQHDYIIEFFDYTTVLKPSLNFTATVKVTRADGNQLTLEERRNNVVITVTQRNYTEYWSGSNSGNQKMEAVQKINYTVPQSGTFKIEFPILEDSSELQLKAYFLGSKSSMAVHSLFKSPSKTYIQLKTRDENIKVGSPFELVVSGNKRLKELSYMVVSRGQLVAVGKQNSTMFSLTPENSWTPKACVIVYYIEDDGEIISDVLKIPVQLVFKNKIKLYWSKVKAEPSEKVSLRISVTQPDSIVGIVAVDKSVNLMNASNDITMENVVHELELYNTGYYLGMFMNSFAVFQECGLWVLTDANLTKDYIDGVYDNAEYAERFMEENEGHIVDIHDFSLGSSPHVRKHFPETWIWLDTNMGYRIYQEFEVTVPDSITSWVATGFVISEDLGLGLTTTPVELQAFQPFFIFLNLPYSVIRGEEFALEITIFNYLKDATEVKVIIEKSDKFDILMTSNEINATGHQQTLLVPSEDGATVLFPIRPTHLGEIPITVTALSPTASDAVTQMILVKAEGIEKSYSQSILLDLTDNRLQSTLKTLSFSFPPNTVTGSERVQITAIGDVLGPSINGLASLIRMPYGCGEQNMINFAPNIYILDYLTKKKQLTDNLKEKALSFMRQGYQRELLYQREDGSFSAFGNYDPSGSTWLSAFVLRCFLEADPYIDIDQNVLHRTYTWLKGHQKSNGEFWDPGRVIHSELQGGNKSPVTLTAYIVTSLLGYRKYQPNIDVQESIHFLESEFSRGISDNYTLALITYALSSVGSPKAKEALNMLTWRAEQEGGMQFWVSSESKLSDSWQPRSLDIEVAAYALLSHFLQFQTSEGIPIMRWLSRQRNSLGGFASTQDTTVALKALSEFAALMNTERTNIQVTVTGPSSPSPVKFLIDTHNRLLLQTAELAVVQPTAVNISANGFGFAICQLNVVYNVKASGSSRRRRSIQNQEAFDLDVAVKENKDDLNHVDLNVCTSFSGPGRSGMALMEVNLLSGFMVPSEAISLSETVKKVEYDHGKLNLYLDSVNETQFCVNIPAVRNFKVSNTQDASVSIVDYYEPRRQAVRSYNSEVKLSSCDLCSDVQGCRPCEDGASGSHHHSSVIFIFCFKLLYFMELWL

SEQ ID NO: 2978 - protein, 967 aa, Homo sapiens
LEIWRSDATMRTHTRGAPSVFFIYLLCFVSAYITDENPEVMIPFTNANYDSHPMLYFSRAEVAELQLRAASSHEHIAARLTEAVHTMLSSPLEYLPPWDPKDYSARWNEIFGNNLGALAMFCVLYPENIEARDMAKDYMERMAAQPSWLVKDAPWDEVPLAHSLVGFATAYDFLYNYLSKTQQEKFLEVIANASGYMYETSYRRGWGFQYLHNHQPTNCMALLTGSLVLMNQGYLQEAYLWTKQVLTIMEKSLVLLREVTDGSLYEGVAYGSYTTRSLFQYMFLVQRHFNINHFGHPWLKQHFAFMYRTILPGFQRTVAIADSNYNWFYGPESQLVFLDKFVMRNGSGNWLADQIRRNRVVEGPGTPSKGQRWCTLHTEFLWYDGSLKSVPPPDFGTPTLHYFEDWGVVTYGSALPAEINRSFLSFKSGKLGGRAIYDIVHRNKYKDWIKGWRNFNAGHEHPDQNSFTFAPNGVPFITEALYGPKYTFFNNVLMFSPAVSKSCFSPWVGQVTEDCSSKWSKYKHDLAASCQGRVVAAEEKNGVVFIRGEGVGAYNPQLNLKNVQRNLILLHPQLLLLVDQIHLGEESPLETAASFFHNVDVPFEETVVDGVHGAFIRQRDGLYKMYWMDDTGYSEKATFASVTYPRGYPYNGTNYVNVTMHLRSPITRAAYLFIGPSIDVQSFTVHGDSQQLDVFIATSKHAYATYLWTGEATGQSAFAQVIADRHKILFDRNSAIKSSIVPEVKDYAAIVEQNLQHFKPVFQLLEKQILSRVRNTASFRKTAERLLRFSDKRQTEEAIDRIFAISQQQQQQSKSKKNRRAGKRYKFVDAVPDIFAQIEVNEKKIRQKAQILAQKELPIDEDEEMKDLLDFADVTYEKHKNGGLIKGRFGQARMVTTTHSRAPSLSASYTRLFLILNIAIFFVMLAMQLTYFQRAQSLHGQRCLYAVLLIDSCILLWLYSSCSQSQC

SEQ ID NO: 2979 - protein, 1179 aa, Homo sapiens
IMPKKKRLSAGRVPLILFLCQMISALEVPLDLVQPPTITQQSPKDYIIDPRENIVIQCEAKGKPPPSFSWTRNGTHFDIDKDPLVTMKPGTGTLIINIMSEGKAETYEGVYQCTARNERGAAVSNNIVVRPSRSPLWTKEKLEPITLQSGQSLVLPCRPPIGLPPPIIFWMDNSFQRLPQSERVSQGLNGDLYFSNVLPEDTREDYICYARFNHTQTIQQKQPISVKVISVDELNDTIAANLSDTEFYGAKSSRERPPTFLTPEGNASNKEELRGNVLSLECIAEGLPTPIIYWAKEDGMLPKNRTVYKNFEKTLQIIHVSEADSGNYQCIAKNALGAIHHTISVRVKAAPYWITAPQNLVLSPGEDGTLICRANGNPKPRISWLTNGVPIEIAPDDPSRKIDGDTIIFSNVQERSSAVYQCNASNEYGYLLANAFVNVLAEPPRILTPANTLYQVIANRPALLDCAFFGSPLPTIEWFKGAKGSALHEDIYVLHENGTLEIPVAQKDSTGTYTCVARNKLGMAKNEVHLEIKDPTWIVKQPEYAVVQRGSMVSFECKVKHDHTLSLTVLWLKDNRELPSDERFTVDKDHLVVADVSDDDSGTYTCVANTTLDSVSASAVLSVVDVPNPPFDLELTDQLDKSVQLSWTPGDDNNSPITKFIIEYEDAMHKPGLWHHQTEVSGTQTTAQLKLSPYVNYSFRVMAVNSIGKSLPSEASEQYLTKASEPDKNPTAVEGLGSEPDNLVITWKPLNGFESNGPGLQYKVSWRQKDGDDEWTSVVVANVSKYIVSGTPTFVPYLIKVQALNDMGFAPEPAVVMGHSGEDLPMVAPGNVRVNVVNSTLAEVHWDPVPLKSIRGHLQGYRIYYWKTQSSSKRNRRHIEKKILTFQGSKTHGMLPGLEPFSHYTLNVRVVNGKGEGPASPDRVFNTPEGVPSAPSSLKIVNPTLDSLTLEWDPPSHPNGILTEYTLKYQPINSTHELGPLVDLKIPANKTRWTLKNLNFSTRYKFYFYAQTSAGSGSQITEEAVTTVDEAMASRQVDIATQGWFIGLMCAVALLILILLIVCFIRRNKGGKYPVKEKEDAHADPEIQPMKEDDGTFGEYSDAEDHKPLKKGSRTPSDRTVKKEDSDDSLVDYGEGVNGQFNEDGSFIGQYSGKKEKEPAEGNESSEAPSPVNAMNSFV

SEQ ID NO: 2980 - protein, 776 aa, Homo sapiens
TADSPEAEPPRRARVSLKRRIELTVEYPWRCGALSPTSNCRTGMWSWKCLLFWAVLVTATLCTARPSPTLPEQDALPSSEDDDDDDDSSSEEKETDNTKPNRMPVAPYWTSPEKMEKKLHAVPAAKTVKFKCPSSGTPNPTLRWLKNGKEFKPDHRIGGYKVRYATWSIIMDSVVPSDKGNYTCIVENEYGSINHTYQLDVVERSPHRPILQAGLPANKTVALGSNVEFMCKVYSDPQPHIQWLKHIEVNGSKIGPDNLPYVQILKTAGVNTTDKEMEVLHLRNVSFEDAGEYTCLAGNSIGLSHHSAWLTVLEALEERPAVMTSPLYLEIIIYCTGAFLISCMVGSVIVYKMKSGTKKSDFHSQMAVHKLAKSIPLRRQVTVSADSSASMNSGVLLVRPSRLSSSGTPMLAGVSEYELPEDPRWELPRDRLVLGKPLGEGCFGQVVLAEAIGLDKDKPNRVTKVAVKMLKSDATEKDLSDLISEMEMMKMIGKHKNIINLLGACTQDGPLYVIVEYASKGNLREYLQARRPPGLEYCYNPSHNPEEQLSSKDLVSCAYQVARGMEYLASKKCIHRDLAARNVLVTEDNVMKIADFGLARDIHHIDYYKKTTNGRLPVKWMAPEALFDRIYTHQSDVWSFGVLLWEIFTLGGSPYPGVPVEELFKLLKEGHRMDKPSNCTNELYMMMRDCWHAVPSQRPTFKQLVEDLDRIVALTSNQEYLDLSMPLDQYSPSFPDTRSSTCSSGEDSVFSHEPLPEEPCLPRHPAQLANGGLKRR

SEQ ID NO: 2981 - protein, 325 aa, Homo sapiens
IAMAALIAENFRFLSLFFKSKDVMIFNGLVALGTVGSQELFSVVAFHCPCSPARNYLYGLAAIGVPALVLFIIGIILNNHTWNLVAECQHRRTKNCSAAPTFLLLSSILGRAAVAPVTWSVISLLRGEAYVCALSEFVDPSSLTAREEHFPSAHATEILARFPCKENPDNLSDFREEVSRRLRYESQLFGWLLIGVVAILVFLTKCLKHYCSPLSYRQEAYWAQYRANEDQLFQRTAEVHSRVLAANNVRRFFGFVALNKDDEELIANFPVEGTQPRPQWNAITGVYLYRENQGLPLYSRLHKWAQGLAGNGAAPDNVEMALLPS

SEQ ID NO: 2982 - protein, 283 aa, Homo sapiens
VTSCTGFVEGSSRTGGMGSACIKVTKYFLFLFNLIFFILGAVILGFGVWILADKSSFISVLQTSSSSLRMGAYVFIGVGAVTMLMGFLGCIGAVNEVRCLLGLYFAFLLLILIAQVTAGALFYFNMGKLKQEMGGIVTELIRDYNSSREDSLQDAWDYVQAQVKCCGWVSFYNWTDNAELMNRPEVTYPCSCEVKGEEDNSLSVRKGFCEAPGNRTQSGNHPEDWPVYQEGCMEKVQAWLQENLGIILGVGVGVAIIELLGMVLSICLCRHVHSEDYSKVPKY

SEQ ID NO: 2983 - protein, 450 aa, Homo sapiens
RLFLSRHHWPPAAAPGVLAAQPRRRPGTPVLCAKPWPRGPGHGPGARGEAASRGAVTGRASAMKTLIAAYSGVLRGERQAEADRSQRSHGGPALSREGSGRWGTGSSILSALQDLFSVTWLNRSKVEKQLQVISVLQWVLSFLVLGVACSAILMYIFCTDCWLIAVLYFTWLVFDWNTPKKGGRRSQWVRNWAVWRYFRDYFPIQLVKTHNLLTTRNYIFGYHPHGIMGLGAFCNFSTEATEVSKKFPGIRPYLATLAGNFRMPVLREYLMSGGICPVSRDTIDYLLSKNGSGNAIIIVVGGAAESLSSMPGKNAVTLRNRKGFVKLALRHGADLVPIYSFGENEVYKQVIFEEGSWGRWVQKKFQKYIGFAPCIFHGRGLFSSDTWGLVPYSKPITTVVGEPITIPKLEHPTQQDIDLYHTMYMEALVKLFDKHKTKFGLPETEVLEVN

SEQ ID NO: 2984 - protein, 206 aa, Homo sapiens
RPHSRKSPSAEAGLEEKMAAKQPPPLMKKHSQTDLVSRLKTRKILGVGGEDDDGEVHRSKISQVLGNEIKFTIREPLGLRVWQFVSAVLFSGIAIMALAFPDQLYDAVFDGAQVTSKTPIRLYGGALLSISLIMWNALYTAEKVIIRWTLLTEACYFGVQFLVVTATLAETGLMSLGILLLLVSRLLFVVISIYYYYQVGRRPKKA

SEQ ID NO: 2985 - protein, 775 aa, Homo sapiens
LKMAEAHQAVAFQFTVTPDGIDLRLSHEALRQIYLSGLHSWKKKFIRFKNGIITGVYPASPSSWLIVVVGVMTTMYAKIDPSLGIIAKINRTLETANCMSSQTKNVVSGVLFGTGLWVALIVTMRYSLKVLLSYHGWMFTEHGKMSRATKIWMGMVKIFSGRKPMLYSFQTSLPRLPVPAVKDTVNRYLQSVRPLMKEEDFKRMTALAQDFAVGLGPRLQWYLKLKSWWATNYVSDWWEEYIYLRGRGPLMVNSNYYAMDLLYILPTHIQAARAGNAIHAILLYRRKLDREEIKPIRLLGSTIPLCSAQWERMFNTSRIPGEETDTIQHMRDSKHIVVYHRGRYFKVWLYHDGRLLKPREMEQQMQRILDNTSEPQPGEARLAALTAGDRVPWARCRQAYFGRGKNKQSLDAVEKAAFFVTLDETEEGYRSEDPDTSMDSYAKSLLHGRCYDRWFDKSFTFVVFKNGKMGLNAEHSWADAPIVAHLWEYVMSIDSLQLGYAEDGHCKGDINPNIPYPTRLQWDIPGECQEVIETSLNTANLLANDVDFHSFPFVAFGKGIIKKCRTSPDAFVQLALQLAHYKDMGKFCLTYEASMTRLFREGRTETVRSCTTESCDFVRAMVDPAQTVEQRLKLFKLASEKHQHMYRLAMTGSGIDRHLFCLYVVSKYLAVESPFLKEVLSEPWRLSTSQTPQQQVELFDLENNPEYVSSGGGFGPVADDGYGVSYILVGENLINFHISSKFSCPETDSHRFGRHLKEAMTDIITLFGLSSNSKK

SEQ ID NO: 2986 - protein, 53 aa, Homo sapiens
TCLLPHIEAVSNIHNLNSVHQSPHQRLHRYVELAWGFSTALGTFLFLAEVVLR

SEQ ID NO: 2987 - protein, 1594 aa, Homo sapiens
LGLPVERRRAERARPRPRPPPRPRPAARVPGPGQGKGRGGELSNRNRGKILAPRARPPLPLPAAPDAEWGQGQGRRTQDPVPAPLEPLEFGLLQLLALWGLGLALCCLPVSPRCLGTKAPGPLRPRAPTHRRRGAARPALSTMRGLGTCLATLAGLLLTAAGETFSGGCLFDEPYSTCGYSQSEGDDFNWEQVNTLTKPTSDPWMPSGSFMLVNASGRPEGQRAHLLLPQLKENDTHCIDFHYFVSSKSNSPPGLLNVYVKVNNGPLGNPIWNISGDPTRTWNRAELAISTFWPNFYQVIFEVITSGHQGYLAIDEVKVLGHPCTRTPHFLRIQNVEVNAGQFATFQCSAIGRTVAGDRLWLQGIDVRDAPLKEIKVTSSRRFIASFNVVNTTKRDAGKYRCMIRTEGGVGISNYAELVVKEPPVPIAPPQLASVGATYLWIQLNANSINGDGPIVAREVEYCTASGSWNDRQPVDSTSYKIGHLDPDTEYEISVLLTRPGEGGTGSPGPALRTRTKCADPMRGPRKLEVVEVKSRQITIRWEPFGYNVTRCHSYNLTVHYCYQVGGQEQVREEVSWDTENSHPQHTITNLSPYTNVSVKLILMNPEGRKESQELIVQTDEDLPGAVPTESIQGSTFEEKIFLQWREPTQTYGVITLYEITYKAVSSFDPEIDLSNQSGRVSKLGNETHFLFFGLYPGTTYSFTIRASTAKGFGPPATNQFTTKISAPSMPAYELETPLNQTDNTVTVMLKPAHSRGAPVSVYQIVVEEERPRRTKKTTEILKCYPVPIHFQNASLLNSQYYFAAEFPADSLQAAQPFTIGDNKTYNGYWNTPLLPYKSYRIYFQAASRANGETKIDCVQVATKGAATPKPVPEPEKQTDHTVKIAGVIAGILLFVIIFLGVVLVMKKRKLAKKRKETMSSTRQEMTVMVNSMDKSYAEQGTNCDEAFSFMDTHNLNGRSVSSPSSFTMKTNTLSTSVPNSYYPDETHTMASDTSSLVQSHTYKKREPADVPYQTGQLHPAIRVADLLQHITQMKCAEGYGFKEEYESFFEGQSAPWDSAKKDENRMKNRYGNIIAYDHSRVRLQTIEGDTNSDYINGNYIDGYHRPNHYIATQGPMQETIYDFWRMVWHENTASIIMVTNLVEVGRVKCCKYWPDDTEIYKDIKVTLIETELLAEYVIRTFAVEKRGVHEIREIRQFHFTGWPDHGVPYHATGLLGFVRQVKSKSPPSAGPLVVHCSAGAGRTGCFIVIDIMLDMAEREGVVDIYNCVRELRSRRVNMVQTEEQYVFIHDAILEACLCGDTSVPASQVRSLYYDMNKLDPQTNSSQIKEEFRTLNMVTPTLRVEDCSIALLPRNHEKNRCMDILPPDRCLPFLITIDGESSNYINAALMDSYKQPSAFIVTQHPLPNTVKDFWRLVLDYHCTSVVMLNDVDPAQLCPQYWPENGVHRHGPIQVEFVSADLEEDIISRIFRIYNAARPQDGYRMVQQFQFLGWPMYRDTPVSKRSFLKLIRQVDKWQEEYNGGEGRTVVHCLNGGGRSGTFCAISIVCEMLRHQRTVDVFHAVKTLRNNKPNMVDLLDQYKFCYEVALEYLNSG

SEQ ID NO: 2988 - protein, 52 aa, Homo sapiens
LLDLELNRLTKALFLALVALSIVMVTLQGFVGPWYRNLFRFLLLFSYIIPIR

SEQ ID NO: 2989 - protein, 346 aa, Homo sapiens
LSRRRAPGAMRPTLLWSLLLLLGVFAAAAAAPPDPLSQLPAPQHPKIRLYNAEQVLSWEPVALSNSTRPVVYQVQFKYTDSKWFTADIMSIGVNCTQITATECDFTAASPSAGFPMDFNVTLRLRAELGALHSAWVTMPWFQHYRNVTVGPPENIEVTPGEGSLIIRFSSPFDIADTSTAFFCYYVHYWEKGGIQQVKGPFRSNSISLDNLKPSRVYCLQVQAQLLWNKSNIFRVGHLSNISCYETMADASTELQQVILISVGTFSLLSVLAGACFFLVLKYRGLIKYWFHTPPSIPLQIEEYLKDPTQPILEALDKDSSPKDDVWDSVSIISFPEKEQEDVLQTL

SEQ ID NO: 2990 - protein, 751 aa, Homo sapiens
VSPPSAGQRLRGVPVWAAGAFRFSSGEESTSHLIMSRRSQRLTRYSQGDDDGSSSSGGSSVAGSQSTLFKDSPLRTLKRKSSNMKRLSPAPQLGPSSDAHTSYYSESLVHESWFPPRSSLEELHGDANWGEDLRVRRRRGTGGSESSRASGLVGRKATEDFLGSSSGYSSEDDYVGYSDVDQQSSSSRLRSAVSRAGSLLWMVATSPGRLFRLLYWWAGTTWYRLTTAASLLDVFVLTRRFSSLKTFLWFLLPLLLLTCLTYGAWYFYPYGLQTFHPALVSWWAAKDSRRPDEGWEARDSSPHFQAEQRVMSRVHSLERRLEALAAEFSSNWQKEAMRLERLELRQGAPGQGGGGGLSHEDTLALLEGLVSRREAALKEDFRRETAARIQEELSALRAEHQQDSEDLFKKIVRASQESEARIQQLKSEWQSMTQESFQESSVKELRRLEDQLAGLQQELAALALKQSSVAEEVGLLPQQIQAVRDDVESQFPAWISQFLARGGGGRVGLLQREEMQAQLRELESKILTHVAEMQGKSAREAAASLSLTLQKEGVIGVTEEQVHHIVKQALQRYSEDRIGLADYALESGGASVISTRCSETYETKTALLSLFGIPLWYHSQSPRVILQPDVHPGNCWAFQGPQGFAVVRLSARIRPTAVTLEHVPKALSPNSTISSAPKDFAIFGFDEDLQQEGTLLGKFTYDQDGEPIQTFHFQAPTMATYQVVELRILTNWGHPEYTCIYRFRVHGEPAH

SEQ ID NO: 2991 - protein, 242 aa, Homo sapiens
LPIHTQPSAHKDMTTNAGPLHPYWPQHLRLDNFVPNDRPTWHILAGLFSVTGVLVVTTWLLSGRAAVVPLGTWRRLSLCWFAVCGFIHLVIEGWFVLYYEDLLGDQAFLSQLWKEYAKGDSRYILGDNFTVCMETITACLWGPLSLWVVIAFLRQHPLRFILQLVVSVGQIYGDVLYFLTEHRDGFQHGELGHPLYFWFYFVFMNALWLVLPGVLVLDAVKHLTHAQSTLDAKATKAKSKKN

SEQ ID NO: 2992 - protein, 511 aa, Homo sapiens
MASFLAFLLLNFRVCLLLLQLLMPHSAQFSVLGPSGPILAMVGEDADLPCHLFPTMSAETMELKWVSSSLRQVVNVYADGKEVEDRQSAPYRGRTSILRDGITAGKAALRIHNVTASDSGKYLCYFQDGDFYEKALVELKVAALGSDLHVDVKGYKDGGIHLECRSTGWYPQPQIQWSNNKGENIPTVEAPVVADGVGLYAVAASVIMRGSSGEGVSCTIRSSLLGLEKTASISIADPFFRSAQRWIAALAGTLPVLLLLLGGAGYFLWQQQEEKKTQFRKKKREQELREMAWSTMKQEQSTRVKLLEELRWRSIQYASRGERHSAYNEWKKALFKPADVILDPKTANPILLVSEDQRSVQRAKEPQDLPDNPERFNWHYCVLGCESFISGRHYWEVEVGDRKEWHIGVCSKNVQRKGWVKMTPENGFWTMGLTDGNKYRTLTEPRTNLKLPKPPKKVGVFLDYETGDISFYNAVDGSHIHTFLDVSFSEALYPVFRILTLEPTALTICPA

SEQ ID NO: 2993 - protein, 459 aa, Homo sapiens
MASFLAFLLLNFRVCLLLLQLLMPHSAQFSVLGPSGPILAMVGEDADLPCHLFPTMSAETMELKWVSSSLRQVVNVYADGKEVEDRQSAPYRGRTSILRDGITAGKAALRIHNVTASDSGKYLCYFQDGDFYEKALVELKVADGVGLYAVAASVIMRGSSGEGVSCTIRSSLLGLEKTASISIADPFFRSAQRWIAALAGTLPVLLLLLGGAGYFLWQQQEEKKTQFRKKKREQELREMAWSTMKQEQSTRVKLLEELRWRSIQYASRGERHSAYNEWKKALFKPADVILDPKTANPILLVSEDQRSVQRAKEPQDLPDNPERFNWHYCVLGCESFISGRHYWEVEVGDRKEWHIGVCSKNVQRKGWVKMTPENGFWTMGLTDGNKYRTLTEPRTNLKLPKPPKKVGVFLDYETGDISFYNAVDGSHIHTFLDVSFSEALYPVFRILTLEPTALTICPA

SEQ ID NO: 2994 - protein, 376 aa, Homo sapiens
MASFLAFLLLNFRVCLLLLQLLMPHSAQFSVLGPSGPILAMVGEDADLPCHLFPTMSAETMELKWVSSSLRQVVNVYADGKEVEDRQSAPYRGRTSILRDGITAGKAALRIHNVTASDSGKYLCYFQDGDFYEKALVELKVAALGSDLHVDVKGYKDGGIHLECRSTGWYPQPQIQWSNNKGENIPTVEAPVVADGVGLYAVAASVIMRGSSGEGVSCTIRSSLLGLEKTASISIADPFFRSAQRWIAALAGTLPVLLLLLGGAGYFLWQQQEEKKTQFRKKKREQELREMAWSTMKQEQSTRVKLLEELRWRSIQYASRGERHSAYNEWKKALFKPGPPIGQTQQQTRGQGSPVALSQESAQRTDSWGPEEGGES

SEQ ID NO: 2995 - protein, 350 aa, Homo sapiens
MASFLAFLLLNFRVCLLLLQLLMPHSAQFSVLGPSGPILAMVGEDADLPCHLFPTMSAETMELKWVSSSLRQVVNVYADGKEVEDRQSAPYRGRTSILRDGITAGKAALRIHNVTASDSGKYLCYFQDGDFYEKALVELKVAALGSDLHVDVKGYKDGGIHLECRSTGWYPQPQIQWSNNKGENIPTVEAPVVADGVGLYAVAASVIMRGSSGEGVSCTIRSSLLGLEKTASISIADPFFRSAQRWIAALAGTLPVLLLLLGGAGYFLWQQQEEKKTQFRKKKREQELREMAWSTMKQEQSTRVKLLEELRWRSIQYASRGERHSAYNEWKKALFKPGEEMLQMRLHFVK

SEQ ID NO: 2996 - protein, 56 aa, Homo sapiens
MLDAFAQEMDHTQSRMDGVLRKLAKVSHMTSDRRQWCAIAVLVGVLLLVLILLFSL

SEQ ID NO: 2997 - protein, 1383 aa, Homo sapiens
MHLRLFCILLAAVSGAEGWGYYGCDEELVGPLYARSLGASSYYSLLTAPRFARLHGISGWSPRIGDPNPWLQIDLMKKHRIRAVATQGSFNSWDWVTRYMLLYGDRVDSWTPFYQRGHNSTFFGNVNESAVVRHDLHFHFTARYIRIVPLAWNPRGKIGLRLGLYGCPYKADILYFDGDDAISYRFPRGVSRSLWDVFAFSFKTEEKDGLLLHAEGAQGDYVTLELEGAHLLLHMSLGSSPIQPRPGHTTVSAGGVLNDQHWHYVRVDRFGRDVNFTLDGYVQRFILNGDFERLNLDTEMFIGGLVGAARKNLAYRHNFRGCIENVIFNRVNIADLAVRRHSRITFEGKVAFRCLDPVPHPINFGGPHNFVQVPGFPRRGRLAVSFRFRTWDLTGLLLFSRLGDGLGHVELTLSEGQVNVSIAQSGRKKLQFAAGYRLNDGFWHEVNFVAQENHAVISIDDVEGAEVRVSYPLLIRTGTSYFFGGCPKPASRWDCHSNQTAFHGCMELLKVDGQLVNLTLVEGRRLGFYAEVLFDTCGITDRCSPNMCEHDGRCYQSWDDFICYCELTGYKGETCHTPLYKESCEAYRLSGKTSGNFTIDPDGSGPLKPFVVYCDIRENRAWTVVRHDRLWTTRVTGSSMERPFLGAIQYWNASWEEVSALANASQHCEQWIEFSCYNSRLLNTAGGYPYSFWIGRNEEQHFYWGGSQPGIQRCACGLDRSCVDPALYCNCDADQPQWRTDKGLLTFVDHLPVTQVVIGDTNRSTSEAQFFLRPLRCYGDRNSWNTISFHTGAALRFPPIRANHSLDVSFYFRTSAPSGVFLENMGGPYCQWRRPYVRVELNTSRDVVFAFDVGNGDENLTVHSDDFEFNDDEWHLVRAEINVKQARLRVDHRPWVLRPMPLQTYIWMEYDQPLYVGSAELKRRPFVGCLRAMRLNGVTLNLEGRANASEGTSPNCTGHCAHPRLPCFHGGRCVERYSYYTCDCDLTAFDGPYCNHDIGGFFEPGTWMRYNLQSALRSAAREFSHMLSRPVPGYEPGYIPGYDTPGYVPGYHGPGYRLPDYPRPGRPVPGYRGPVYNVTGEEVSFSFSTSSAPAVLLYVSSFVRDYMAVLIKDDGTLQLRYQLGTSPYVYQLTTRPVTDGQPHSINITRVYRNLFIQVDYFPLTEQKFSLLVDSQLDSPKALYLGRVMETGVIDPEIQRYNTPGFSGCLSGVRFNNVAPLKTHFRTPRPMTAELAEALRVQGELSESNCGAMPRLVSEVPPELDPWYLPPDFPYYHDEGWVAILLGFLVAFLLLGLVGMLVLFYLQNHRYKGSYHTNEPKAAHEYHPGSKPPLPTSGPAQVPTPTAAPNQAPASAPAPAPTPAPAPGPRDQNLPQILEESRSE

SEQ ID NO: 2998 - protein, 514 aa, Homo sapiens
MGLAGAAGRWWGLALGLTAFFLPGVHSQVVQVNDSMYGFIGTDVVLHCSFANPLPSVKITQVTWQKSTNGSKQNVAIYNPSMGVSVLAPYRERVEFLRPSFTDGTIRLSRLELEDEGVYICEFATFPTGNRESQLNLTVMAKPTNWIEGTQAVLRAKKGQDDKVLVATCTSANGKPPSVVSWETRLKGEAEYQEIRNPNGTVTVISRYRLVPSREAHQQSLACIVNYHMDRFKESLTLNVQYEPEVTIEGFDGNWYLQRMDVKLTCKADANPPATEYHWTTLNGSLPKGVEAQNRTLFFKGPINYSLAGTYICEATNPIGTRSGQVEVNITEFPYTPSPPEHGRRAGPVPTAIIGGVAGSILLVLIVVGGIVVALRRRRHTFKGDYSTKKHVYGNGYSKAGIPQHHPPMAQNLQYPDDSDDEKKAGPLGGSSYEEEEEEEEGGGGGERKVGGPHPKYDEDAKRPYFTVDEAEARQDGYGDRTLGYQYDPEQLDLAENMVSQNDGSFISKKEWYV

SEQ ID NO: 2999 - protein, 147 aa, Homo sapiens
MRAGRRPRLGPWAGGCSKMWDNLTCWPATPRGQVVVLACPLIFKLFSSIQGRNVSRSCTDEGWTHLEPGPYPIACGLDDKAASLDEVGCKAAMVFFQYCVMANFFWLLVEGLYLYTLLAVSFFSERKYFWGGTQHIHHGVDHRQDPF

SEQ ID NO: 3000 - protein, 697 aa, Homo sapiens
MENSLGPFPQHVQQIQSDAAQNYTIFYSISGPGVDKEPFNLFYIEKDTGDIFCTRSIDREKYEQFALYGYATTADGYAPEYPLPLIIKIEDDNDNAPYFEHRVTIFTVPENCRSGTSVGKVTATDLDEPDTLHTRLKYKILQQIPDHPKHFSIHPDTGVITTTTPFLDREKCDTYQLIMEVRDMGGQPFGLFNTGTITISLEDENDNPPSFTETSYVTEVEENRIDVEILRMKVQDQDLPNTPHSKAVYKILQGNENGNFIISTDPNTNEGVLCVVKPLNYEVNRQVILQVGVINEAQFSKAASSQTPTMCTTTVTVKIIDSDEGPECHPPVKVIQSQDGFPAGQELLGYKALDPEISSGEGLRYQKLGDEDNWFEINQHTGDLRTLKVLDRESKFVKNNQYNISVVAVDAVGRSCTGTLVVHLDDYNDHAPQIDKEVTICQNNEDFAVLKPVDPDGPENGPPFQFFLDNSASKNWNIEEKDGKTAILRQRQNLDYNYYSVPIQIKDRHGLVATHMLTVRVCDCSTPSECRMKDKSTRDVRPNVILGRWAILAMVLGSVLLLCILFTCFCVTAKRTVKKCFPEDIAQQNLIVSNTEGPGEEVTEANIRLPMQTSNICDTSMSVGTVGGQGIKTQQSFEMVKGGYTLDSNKGGGHQTLESVKGVGQGDTGRYAYTDWQSFTQPRLGEESIRGHTLIKN

SEQ ID NO: 3001 - protein, 41 aa, Homo sapiens
MVQGQEFWEQKPSILVVQACFLPSSGLVPSAVLIVAKKCPS

SEQ ID NO: 3002 - protein, 335 aa, Homo sapiens
MAPRTLFLLLSGALTLTETWAGSHSMRYFSAAVSRPGRGEPRFIAMGYVDDTQFVRFDSDSACPRMEPRAPWVEQEGPEYWEEETRNTKAHAQTDRMNLQTLRGYYNQSEASSHTLQWMIGCDLGSDGRLLRGYEQYAYDGKDYLALNEDLRSWTAADTAAQISKRKCEAANVAEQRRAYLEGTCVEWLHRYLENGKEMLQRADPPKTHVTHHPVFDYEATLRCWALGFYPAEIILTWQRDGEDQTQDVELVETRPAGDGTFQKWAAVVVPSGEEQRYTCHVQHEGLPEPLMLRWKQSSLPTIPIMGIVAGLVVLAAVVTGAAVAAVLWRKKSSD

SEQ ID NO: 3003 - protein, 307 aa, Homo sapiens
METLPQAGLAAGGGGGVGKGGWGCHGTSPRLWPGREGPGASGAAGAPSLRGGRRPLPTALCVVGRPTCPPVPTLPEDPVHSPHLTTPPSGPCSGSGSERKQLCTATQDTVCRCRAGTQPLDSYKPGVDCAPCPPGHFSPGDNQACKPWTNCTLAGKHTLQPASNSSDAICEDRDPPATQPQETQGPPARPITVQPTEAWPRTSQGPSTRPVEVPGGRAVAAILGLGLVLGLLGPLAILLALYLLRRDQRLPPDAHKPPGECLMALPHCSWRVRPTHQSLLFSSPGGGSFRTPIQEEQADAHSTLAKI

SEQ ID NO: 3004 - protein, 1231 aa, Homo sapiens
MRASIVPGMDTLRAVPLFSISGLFSFPYRVSHGIAGILLGEMAVCAKKRPPEEERRARANDREYNEKFQYASNCIKTSKYNILTFLPVNLFEQFQEVANTYFLFLLILQLIPQISSLSWFTTIVPLVLVLTITAVKDATDDYFRHKSDNQVNNRQSQVLINGILQQEQWMNVCVGDIIKLENNQFVAADLLLLSSSEPHGLCYIETAELDGETNMKVRQAIPVTSELGDISKLAKFDGEVICEPPNNKLDKFSGTLYWKENKFPLSNQNMLLRGCVLRNTEWCFGLVIFAGPDTKLMQNSGRTKFKRTSIDRLMNTLVLWIFGFLVCMGVILAIGNAIWEHEVGMRFQVYLPWDEAVDSAFFSGFLSFWSYIIILNTVVPISLYVSVEVIRLGHSYFINWDKKMFCMKKRTPAEARTTTLNEELGQVEYIFSDKTGTLTQNIMVFNKCSINGHSYGDVFDVLGHKAELGERPEPVDFSFNPLADKKFLFWDPSLLEAVKIGDPHTHEFFRLLSLCHTVMSEEKNEGELYYKAQSPDEGALVTAARNFGFVFRSRTPKTITVHEMGTAITYQLLAILDFNNIRKRMSVIVRNPEGKIRLYCKGADTILLDRLHHSTQELLNTTMDHLNEYAGEGLRTLVLAYKDLDEEYYEEWAERRLQASLAQDSREDRLASIYEEVENNMMLLGATAIEDKLQQGVPETIALLTLANIKIWVLTGDKQETAVNIGYSCKMLTDDMTEVFIVTGHTVLEVREELRKAREKMMDSSRSVGNGFTYQDKLSSSKLTSVLEAVAGEYALVINGHSLAHALEADMELEFLETACACKAVICCRVTPLQKAQVVELVKKYKKAVTLAIGDGANDVSMIKTAHIGVGISGQEGIQAVLASDYSFSQFKFLQRLLLVHGRWSYLRMCKFLCYFFYKNFAFTMVHFWFGFFCGFSAQTVYDQYFITLYNIVYTSLPVLAMGVFDQDVPEQRSMEYPKLYEPGQLNLLFNKREFFICIAQGIYTSVLMFFIPYGVFADATRDDGTQLADYQSFAVTVATSLVIVVSVQIGLDTGYWTAINHFFIWGSLAVYFAILFAMHSNGLFDMFPNQFRFVGNAQNTLAQPTVWLTIVLTTVVCIMPVVAFRFLRLNLKPDLSDTVRYTQLVRKKQKAQHRCMRRVGRTGSRRSGYAFSHQEGFGELIMSGKNMRLSSLALSSFTTRSSSSWIESLRRKKSDSASSPSGGADKPLKG

SEQ ID NO: 3005 - protein, 2875 aa, Homo sapiens
MKFAVLIGLIQVGEVSNRDIVETVLNLLVGGEFDLEMNFIIQDAESITCMTELLEHCDVTCQAEIWSMFTAILRKSVRNLQTSTEVGLIEQVLLKMSAVDDMIADLLVDMLGVLASYSITVKELKLLFSMLRGESGIWPRHAVKLLSVLNQMPQRHGPDTFFNFPGCSAAAIALPPIAKWPYQNGFTLNTWFRMDPLNNINVDKDKPYLYCFRTSKGVGYSAHFVGNCLIVTSLKSKGKGFQHCVKYDFQPRKWYMISIVHIYNRWRNSEIRCYVNGQLVSYGDMAWHVNTNDSYDKCFLGSSETADANRVFCGQLGAVYVFSEALNPAQIFAIHQLGPGYKSTFKFKSESDIHLAEHHKQVLYDGKLASSIAFTYNAKATDAQLCLESSPKENASIFVHSPHALMLQDVKAIVTHSIHSAIHSIGGIQVLFPLFAQLDNRQLNDSQVETTVCATLLAFLVELLKSSVAMQEQMLGGKGFLVIGYLLEKSSRVHITRAVLEQFLSFAKYLDGLSHGAPLLKQLCDHILFNPAIWIHTPAKVQLSLYTYLSAEFIGTATIYTTIRRVGTVLQLMHTLKYYYWVINPADSSGITPKGLDGPRPSQKEIISLRAFMLLFLKQLILKDRGVKEDELQSILNYLLTMHEDENIHDVLQLLVALMSEHPASMIPAFDQRNGIRVIYKLLASKSESIWVQALKVLGYFLKHLGHKRKVEIMHTHSLFTLLGERLMLHTNTVTVTTYNTLYEILTEQVCTQVVHKPHPEPDSTVKIQNPMILKVVATLLKNSTPSAELMEVRRLFLSDMIKLFSNSRENRRCLLQCSVWQDWMFSLGYINPKNSEEQKITEMVYNIFRILLYHAIKYEWGGWRVWVDTLSIAHSKVTYEAHKEYLAKMYEEYQRQEEENIKKGKKGNVSTISGLSSQTTGAKGGMEIREIEDLSQSQSPESETDYPVSTDTRDLLMSTKVSDDILGNSDRPGSGVHVEVHDLLVDIKAEKVEATEVKLDDMDLSPETLVGGENGALVEVESLLDNVYSAAVEKLQNNVHGSVGIIKKNEEKDNGPLITLADEKEDLPNSSTSFLFDKIPKQEEKLLPELSSNHIIPNIQDTQVHLGVSDDLGLLAHMTGSVDLTCTSSIIEEKEFKIHTTSDGMSSISERDLASSTKGLEYAEMTATTLETESSSSKIVPNIDAGSIISDTERSDDGKESGKEIRKIQTTTTTQAVQGRSITQQDRDLRVDLGFRGMPMTEEQRRQFSPGPRTTMFRIPEFKWSPMHQRLLTDLLFALETDVHVWRSHSTKSVMDFVNSNENIIFVHNTIHLISQMVDNIIIACGGILPLLSAATSPTGSKTELENIEVTQGMSAETAVTFLSRLMAMVDVLVFASSLNFSEIEAEKNMSSGGLMRQCLRLVCCVAVRNCLECRQRQRDRGNKSSHGSSKPQEVPQSVTATAASKTPLENVPGNLSPIKDPDRLLQDVDINRLRAVVFRDVDDSKQAQFLALAVVYFISVLMVSKYRDILEPQRETTRTGSQPGRNIRQEINSPTSTVVVIPSIPHPSLNHGFLAKLIPEQSFGHSFYKETPAAFPDTIKEKETPTPGEDIQVESSIPHTDSGIGEEQVASILNGAELETSTGPDAMSELLSTLSSEVKKSQESLTENPSETLKPATSISSISQTKGINVKEILKSLVAAPVEIAECGPEPIPYPDPALKRETQAILPMQFHSFDRSVVVPVKKPPPGSLAVTTVGATTAGSGLPTGSTSNIFAATGATPKSMINTTGAVDSGSSSSSSSSSFVNGATSKNLPAVQTVAPMPEDSAENMSITAKLERALEKVAPLLREIFVDFAPFLSRTLLGSHGQELLIEGLVCMKSSTSVVELVMLLCSQEWQNSIQKNAGLAFIELINEGRLLCHAMKDHIVRVANEAEFILNRQRAEDVHKHAEFESQCAQYAADRREEEKMCDHLISAAKHRDHVTANQLKQKILNILTNKHGAWGAVSHSQLHDFWRLDYWEDDLRRRRRFVRNAFGSTHAEALLKAAIEYGTEEDVVKSKKTFRSQAIVNQNAETELMLEGDDDAVSLLQEKEIDNLAGPVVLSTPAQLIAPVVVAKGTLSITTTEIYFEVDEDDSAFKKIDTKVLAYTEGLHGKWMFSEIRAVFSRRYLLQNTALEVFMANRTSVMFNFPDQATVKKVVYSLPRVGVGTSYGLPQARRISLATPRQLYKSSNMTQRWQRREISNFEYLMFLNTIAGRTYNDLNQYPVFPWVLTNYESEELDLTLPGNFRDLSKPIGALNPKRAVFYAERYETWEDDQSPPYHYNTHYSTATSTLSWLVRIEPFTTFFLNANDGKFDHPDRTFSSVARSWRTSQRDTSDVKELIPEFYYLPEMFVNSNGYNLGVREDEVVVNDVDLPPWAKKPEDFVRINRMALESEFVSCQLHQWIDLIFGYKQRGPEAVRALNVFHYLTYEGSVNLDSITDPVLREAMEAQIQNFGQTPSQLLIEPHPPRSSAMHLCFLPQSPLMFKDQMQQDVIMVLKFPSNSPVTHVAANTLPHLTIPAVVTVTCSRLFAVNRWHNTVGLRGAPGYSLDQAHHLPIEMDPLIANNSGVNKRQITDLVDQSIQINAHCFVVTADNRYILICGFWDKSFRVYSTETGKLTQIVFGHWDVVTCLARSESYIGGDCYIVSGSRDATLLLWYWSGRHHIIGDNPNSSDYPAPRAVLTGHDHEVVCVSVCAELGLVISGAKEGPCLVHTITGDLLRALEGPENCLFPRLISVSSEGHCIIYYERGRFSNFSINGKLLAQMEINDSTRAILLSSDGQNLVTGGDNGVVEVWQACDFKQLYIYPGCDAGIRAMDLSHDQRTLITGMASGSIVAFNIDFNRWHYEHQNRY

SEQ ID NO: 3006 - protein, 1933 aa, Homo sapiens
MGLLVVLLVGGCAAEEPPRFIKEPKDQIGVSGGVASFVCQATGDPKPRVTWNKKGKKVNSQRFETIEFDESAGAVLRIQPLRTPRDENVYECVAQNSVGEITVHAKLTVLREDQLPSGFPNIDMGPQLKVVERTRTATMLCAASGNPDPEITWFKDFLPVDPSASNGRIKQLRSETFESTPIRGALQIESSEETDQGKYECVATNSAGVRYSSPANLYVRELREVRRVAPRFSILPMSHEIMPGGNVNITCVAVGSPMPYVKWMQGAEDLTPEDDMPVGRNVLELTDVKDSANYTCVAMSSLGVIEAVAQITVKSLPKAPGTPMVTENTATSITITWDSGNPDPVSYYVIEYKSKSQDGPYQIKEDITTTRYSIGGLSPNSEYEIWVSAVNSIGQGPPSESVVTRTGEQAPASAPRNVQARMLSATTMIVQWEEPVEPNGLIRGYRVYYTMEPEHPVGNWQKHNVDDSLLTTVGSLLEDETYTVRVLAFTSVGDGPLSDPIQVKTQQGVPGQPMNLRAEARSETSITLSWSPPRQESIIKYELLFREGDHGREVGRTFDPTTSYVVEDLKPNTEYAFRLAARSPQGLGAFTPVVRQRTLQSKPSAPPQDVKCVSVRSTAILVSWRPPPPETHNGALVGYSVRYRPLGSEDPEPKEVNGIPPTTTQILLEALEKWTQYRITTVAHTEVGPGPESSPVVVRTDEDVPSAPPRKVEAEALNATAIRVLWRSPAPGRQHGQIRGYQVHYVRMEGAEARGPPRIKDVMLADAQWETDDTAEYEMVITNLQPETAYSITVAAYTMKGDGARSKPKVVVTKGAVLGRPTLSVQQTPEGSLLARWEPPAGTAEDQVLGYRLQFGREDSTPLATLEFPPSEDRYTASGVHKGATYVFRLAARSRGGLGEEAAEVLSIPEDTPRGHPQILEAAGNASAGTVLLRWLPPVPAERNGAIVKYTVAVREAGALGPARETELPAAAEPGAENALTLQGLKPDTAYDLQVRAHTRRGPGPFSPPVRYRTFLRDQVSPKNFKVKMIMKTSVLLSWEFPDNYNSPTPYKIQYNGLTLDVDGRTTKKLITHLKPHTFYNFVLTNRGSSLGGLQQTVTAWTAFNLLNGKPSVAPKPDADGFIMVYLPDGQSPVPVQSYFIVMVPLRKSRGGQFLTPLGSPEDMDLEELIQDISRLQRRSLRHSRQLEVPRPYIAARFSVLPPTFHPGDQKQYGGFDNRGLEPGHRYVLFVLAVLQKSEPTFAASPFSDPFQLDNPDPQPIVDGEEGLIWVIGPVLAVVFIICIVIAILLYKNKPDSKRKDSEPRTKCLLNNADLAPHHPKDPVEMRRINFQTPDSGLRSPLREPGFHFESMLSHPPIPIADMAEHTERLKANDSLKLSQEYESIDPGQQFTWEHSNLEVNKPKNRYANVIAYDHSRVILQPIEGIMGSDYINANYVDGYRCQNAYIATQGPLPETFGDFWRMVWEQRSATIVMMTRLEEKSRIKCDQYWPNRGTETYGFIQVTLLDTIELATFCVRTFSLHKNGSSEKREVRQFQFTAWPDHGVPEYPTPFLAFLRRVKTCNPPDAGPIVVHCSAGVGRTGCFIVIDAMLERIKPEKTVDVYGHVTLMRSQRNYMVQTEDQYSFIHEALLEAVGCGNTEVPARSLYAYIQKLAQVEPGEHVTGMELEFKRLANSKAHTSRFISANLPCNKFKNRLVNIMPYESTRVCLQPIRGVEGSDYINASFIDGYRQQKAYIATQGPLAETTEDFWRMLWENNSTIVVMLTKLREMGREKCHQYWPAERSARYQYFVVDPMAEYNMPQYILREFKVTDARDGQSRTVRQFQFTDWPEQGVPKSGEGFIDFIGQVHKTKEQFGQDGPISVHCSAGVGRTGVFITLSIVLERMRYEGVVDIFQTVKMLRTQRPAMVQTEDEYQFCYQAALEYLGSFDHYAT

SEQ ID NO: 3007 - protein, 362 aa, Homo sapiens
MRRPSLLLKDILKCTLLVFGVWILYILKLNYTTEECDMKKMHYVDPDHVKRAQKYAQQVLQKECRPKFAKTSMALLFEHRYSVDLLPFVQKAPKDSEAESKYDPPFGFRKFSSKVQTLLELLPEHDLPEHLKAKTCRRCVVIGSGGILHGLELGHTLNQFDVVIRLNSAPVEGYSEHVGNKTTIRMTYPEGAPLSDLEYYSNDLFVAVLFKSVDFNWLQAMVKKETLPFWVRLFFWKQVAEKIPLQPKHFRILNPVIIKETAFDILQYSEPQSRFWGRDKNVPTIGVIAVVLATHLCDEVSLAGFGYDLNQPRTPLHYFDSQCMAAMNFQTMHNVTTETKFLLKLVKEGVVKDLSGGIDREF

SEQ ID NO: 3008 - protein, 638 aa, Homo sapiens
MSEKDEYQFQHQGAVELLVFNFLLILTILTIWLFKNHRFRFLHETGGAMVYGLIMGLILRYATAPTDIESGTVYDCVKLTFSPSTLLVNITDQVYEYKYKREISQHNINPHQGNAILEKMTFDPEIFFNVLLPPIIFHAGYSLKKRHFFQNLGSILTYAFLGTAISCIVIGLIMYGFVKAMIHAGQLKNGDFHFTDCLFFGSLMSATDPVTVLAIFHELHVDPDLYTLLFGESVLNDAVAIVLTYSISIYSPKENPNAFDAAAFFQSVGNFLGIFAGSFAMGSAYAIITALLTKFTKLCEFPMLETGLFFLLSWSAFLSAEAAGLTGIVAVLFCGVTQAHYTYNNLSSDSKIRTKQLFEFMNFLAENVIFCYMGLALFTFQNHIFNALFILGAFLAIFVARACNIYPLSFLLNLGRKQKIPWNFQHMMMFSGLRGAIAFALAIRNTESQPKQMMFTTTLLLVFFTVWVFGGGTTPMLTWLQIRVGVDLDENLKEDPSSQHQEANNLDKNMTKAESARLFRMWYSFDHKYLKPILTHSGPPLTTTLPEWCGPISRLLTSPQAYGEQLKEDDVECIVNQDELAINYQEQASSPCSPPARLGLDQKASPQTPGKENIYEGDLGLGGYELKLEQTLGQSQLN

SEQ ID NO: 3009 - protein, 564 aa, Homo sapiens
RSQFLLGAGCPAPLETAPPRSMGTSLSPNDPWPLNPLSIQQTTLLLLLSVLATVHVGQRLLRQRRRQLRSAPPGPFAWPLIGNAAAVGQAAHLSFARLARRYGDVFQIRLGSCPIVVLNGERAIHQALVQQGSAFADRPAFASFRVVSGGRSMAFGHYSEHWKVQRRAAHSMMRNFFTRQPRSRQVLEGHVLSEARELVALLVRGSADGAFLDPRPLTVVAVANVMSAVCFGCRYSHDDPEFRELLSHNEEFGRTVGAGSLVDVMPWLQYFPNPVRTVFREFEQLNRNFSNFILDKFLRHCESLRPGAAPRDMMDAFILSAEKKAAGDSHGGGARLDLENVPATITDIFGASQDTLSTALQWLLLLFTRYPDVQTRVQAELDQVVGRDRLPCMGDQPNLPYVLAFLYEAMRFSSFVPVTIPHATTANTSVLGYHIPKDTVVFVNQWSVNHDPLKWPNPENFDPARFLDKDGLINKDLTSRVMIFSVGKRRCIGEELSKMQLFLFISILAHQCDFRANPNEPAKMNFSYGLTIKPKSFKVNVTLRESMELLDSAVQNLQAKETCQ

SEQ ID NO: 3010 - protein, 187 aa, Homo sapiens
ISLFPPPGPQLCLPDKEGQHSKSRSAIYLPVRSTNSSVRKMAGNSILLAAVSILSACQQSYFALQVGKARLKYKVTPPAVTGSPEFERVFRAQQNCVEFYPIFIITLWMAGWYFNQVFATCLGLVYIYGRHLYFWGYSEAAKKRITGFRLSLGILALLTLLGALGIANSFLDEYLDLNIAKKLRRQF

SEQ ID NO: 3011 - protein, 242 aa, Homo sapiens
VLWTTAQQCPALCLGLGPSCTCCLDPRPAWAWALVLPMTPPERLFLPRVCGTTLHLLLLGLLLVLLPGAQGLPGVGLTPSAAQTARQHPKMHLAHSTLKPAAHLIGDPSKQNSLLWRANTDRAFLQDGFSLSNNSLLVPTSGIYFVYSQVVFSGKAYSPKATSSPLYLAHEVQLFSSQYPFHVPLLSSQKMVYPGLQEPWLHSMYHGAAFQLTQGDQLSTHTDGIPHLVLSPSTVFFGAFAL

SEQ ID NO: 3012 - protein, 257 aa, Homo sapiens
KKKMAISGVPVLGFFIIAVLMSAQESWAIKEEHVIIQAEFYLNPDQSGEFMFDFDGDEIFHVDMAKKETVWRLEEFGRFASFEAQGALANIAVDKANLEIMTKRSNYTPITNVPPEVTVLTNSPVELREPNVLICFIDKFTPPVVNVTWLRNGKPVTTGVSETVFLPREDHLFRKFHYLPFLPSTEDVYDCRVEHWGLDEPLLKHWEFDAPSPLPETTENVVCALGLTVGLVGIIIGTIFIIKGLRKSNAAERRGPL

SEQ ID NO: 3013 - protein, 32 aa, Homo sapiens
LLIFVIALLSLGIAYYVSGVLPFVENQPELVH

SEQ ID NO: 3014 - protein, 103 aa, Homo sapiens
IAWSWVEWIAAVTIAAGTAAIGYLAYKRFYVKDHRNKAMINLHIQKDNPKIVHAFDMEDLGDKAVYCRCWRSKKFPFCDGAHTKHNEETGDNVGPLIIKKKET

SEQ ID NO: 3015 - protein, 454 aa, Homo sapiens
VHGASQSAGSMGKGGNQGEGAAEREVSVPTFSWEEIQKHNLRTDRWLVIDRKVYNITKWSIQHPGGQRVIGHYAGEDATDAFRAFHPDLEFVGKFLKPLLIGELAPEEPSQDHGKNSKITEDFRALRKTAEDMNLFKTNHVFFLLLLAHIIALESIAWFTVFYFGNGWIPTLITAFVLATSQAQAGWLQHDYGHLSVYRKPKWNHLVHKFVIGHLKGASANWWNHRHFQHHAKPNIFHKDPDVNMLHVFVLGEWQPIEYGKKKLKYLPYNHQHEYFFLIGPPLLIPMYFQYQIIMTMIVHKNWVDLAWAVSYYIRFFITYIPFYGILGALLFLNFIRFLESHWFVWVTQMNHIVMEIDQEAYRDWFSSQLTATCNVEQSFFNDWFSGHLNFQIEHHLFPTMPRHNLHKIAPLVKSLCAKHGIEYQEKPLLRALLDIIRSLKKSGKLWLDAYLHK

SEQ ID NO: 3016 - protein, 86 aa, Homo sapiens
IIFCVIALLVFVFQLFTMEKGNRFFLSGATTLVCWLCILVGVSIYTSHYANRDGTQYHHGYSYILGWICFCFSFIIGVLYLVLRKK

SEQ ID NO: 3017 - protein, 288 aa, Homo sapiens
ITLSETAAALDCSLPRLHARQSMRVTLATIAWMVSFVSNYSHTANILPDIENEDFIKDCVRIHNKFRSEVKPTASDMLYMTWDPALAQIAKAWASNCQFSHNTRLKPPHKLHPNFTSLGENIWTGSVPIFSVSSAITNWYDEIQDYDFKTRICKKVCGHYTQVVWADSYKVGCAVQFCPKVSGFDALSNGAHFICNYGPGGNYPTWPYKRGATCSACPNNDKCLDNLCVNRQRDQVKRYYSVVYPGWPIYPRNRYTSLFLIVNSVILILSVIITILVQHKYPNLVLLD

SEQ ID NO: 3018 - protein, 438 aa, Homo sapiens
LSLKQRSHFFWAHEAAVPCSAEHGGAMPLQLLLLLILLGPGNSLQLWDTWADEAEKALGPLLARDRRQATEYEYLDYDFLPETEPPEMLRNSTDTTPLTGPGTPESTTVEPAARRSTGLDAGGAVTELTTELANMGNLSTDSAAMEIQTTQPAATEAQTTQPVPTEAQTTPLAATEAQTTRLTATEAQTTPLAATEAQTTPPAATEAQTTQPTGLEAQTTAPAAMEAQTTAPAAMEAQTTPPAAMEAQTTQTTAMEAQTTAPEATEAQTTQPTATEAQTTPLAAMEALSTEPSATEALSMEPTTKRGLFIPFSVSSVTHKGIPMAASNLSVNYPVGAPDHISVKQCLLAILILALVATIFFVCTVVLAVRLSRKGHMYPVRNYSPTEMVCISSLLPDGGEGPSATANGGLSKAKSPGLTPEPREDREGDDLTLHSFLP

SEQ ID NO: 3019 - protein, 64 aa, Homo sapiens
IAASSIAAKMMSTAAIANGGGVAAGSLVAILQSVGAAGLSVTSKVIGGFAGTALGAWLGSPPSS

SEQ ID NO: 3020 - protein, 143 aa, Homo sapiens
RGVMSRFLNVLRSWLVMVSIIAMGNTLQSFRDHTFLYEKLYTGKPNLVNGLQARTFGIWTLLSSVIRCLCAIDIHNKTLYHITLWTFLLALGHFLSELFVYGTAAPTIGVLAPLMVASFSILGMLVGLRYLEVEPVSRQKKRN

SEQ ID NO: 3021 - protein, 186 aa, Homo sapiens
VIMLQMAGQCSQNEYFDSLLHACIPCQLRCSSNTPPLTCQRYCNASVTNSVKGTNAILWTCLGLSLIISLAVFVLMFLLRKINSEPLKDEFKNTGSGLLGMANIDLEKSRTGDEIILPRGLEYTVEECTCEDCIKSKPKVDSDHCFPLPAMEEGATILVTTKTNDYCKSLPAALSATEIEKSISAR

SEQ ID NO: 3022 - protein, 34 aa, Homo sapiens
LVPDNTFPLGYYLIPFTGIVGLLVLAMGAVMVSS

SEQ ID NO: 3023 - protein, 156 aa, Homo sapiens
RPLPPVGDVRLELSPPPPLLPVPVVSGSPVGSSGRLMASSSSLVPDRLRLPLCFLGVFVCYFYYGILQEKITRGKYGEGAKQETFTFALTLVFIQCVINAVFAKIWWIVPGAGSMLPVLSPIWVPWSPAIQHYSLSTTQLRSLVNPASQSQSCSLG

SEQ ID NO: 3024 - protein, 245 aa, Homo sapiens
RRSRAFLALLGSLLLSGVLAADRERSIHDFCLVSKVVGRCRASMPRWWYNVTDGSCQLFVYGGCDGNSNNYLTKEECLKKCATVTENATGDLATSRNAADSSVPSAPRRQDSEDHSSDMFNYEEYCTANAVTGPCRASFPRWYFDVERNSCNNFIYGGCRGNKNSYRSEEACMLRCFRQQENPPLPLGSKVVVLAGLFVMVLILFLGASMVYLIRVARRNQERALRTVWSSGDDKEQLVKNTYVL

SEQ ID NO: 3025 - protein, 42 aa, Homo sapiens
LRAVSVEARTRGGAGTAAAAAAAGGTLIPVLRTPRASPWLTS

SEQ ID NO: 3026 - protein, 105 aa, Homo sapiens
LRSPGHGSVASTPLCPRPVSALTTPALSAPTFFLQPRPPPPLLAAAMESSTFALVPVFAHLSILQSLVPAAGAASPVAISAQHLCYSHVTPGDPGAGAGQGPAPS

SEQ ID NO: 3027 - protein, 60 aa, Homo sapiens
LNDHLEPWIQENGGWDTFVELYGNNAAAESRKGQERFNRWFLTGMTVAGVVLLGSLFSRK

SEQ ID NO: 3028 - protein, 91 aa, Homo sapiens
MSAGNGTPWDATWNITVQWLAVDIACRTLMFLKLMATYSAAFLPVVIGLDRQAAVLNPLGSRSGVRKLLGAAWGLSFLLAFPQGSRTRNTI

SEQ ID NO: 3029 - protein, 114 aa, Homo sapiens
MTNICPPEERTGTRVKANLSEVLVSSVLGVNVTSTEVYGAFTCSIQNISFSSFTLQRAGPTSHVAAVLASLLVLLALLLAALLYVKCRLNVLLWYQDAYGEVEINATAPRTASS

SEQ ID NO: 3030 - protein, 733 aa, Homo sapiens
MFKNAPTPQEFREGEDAVIVCDVVSSLPPTIIWKHKGRDVILKKDVRFIVLSNNYLQIRGIKKTDEGTYRCEGRILARGEINFKDIQVIVNVPPTIQARQNIVNATANLGQSVTLVCDAEGFPEPTMSWTKDGEQIEQEEDDEKYIFSDDSSQLTIKKVDKNDEAEYICIAENKAGEQDATIHLKVFAKPKITYVENQTAMELEEQVTLTCEASGDPIPSITWRTSTRNISSEEKTLDGHMVVRSHARVSSLTLKSIQYTDAGEYICTASNTIGQDSQSMYLEVQYAPKLQGPVAVYTWEGNQVNITCEVFAYPSATISWFRDGQLLPSSNYSNIKIYNTPSASYLEVTPDSENDFGNYNCTAVNRIGQESLEFILVQADTPSSPSIDQVEPYSSTAQVQFDEPEATGGVPILKYKAEWRAVGEEVWHSKWYDAKEASMEGIVTIVGLKPETTYAVRLAALNGKGLGEISAASEFKTQPVQGEPSAPKLEGQMGEDGNSIKVNLIKQDDGGSPIRHYLVRYRALSSEWKPEIRLPSGSDHVMLKSLDWNAEYEVYVVAENQQGKSKAAHFVFRTSAQPTAIPANGSPTSGLSTGAIVGILIVIFVLLLVVVDITCYFLNKCGLFMCIAVNLCGKAGPGAKGKDMEEGKAAFSKDESKEPIVEVRTEEERTPNHDGGKHTEPNETTPLTEPELPADTTATVEDMLPSVTTVTTNSDTITETFATAQNSPTRRAP

SEQ ID NO: 3031 - protein, 1273 aa, Homo sapiens
MVSKESERLSITKSACGRNGKQFCSTLTLNTAQANHTGFYSCKYLAVPTSKKKETESAIYIFISDTGRPFVEMYSEIPEIIHMTEGRELVIPCRVTSPNITVTLKKFPLDTLIPDGKRIIWDSRKGFIISNATYKEIGLLTCEATVNGHLYKTNYLTHRQTNTIIDVQISTPRPVKLLRGHTLVLNCTATTPLNTRVQMTWSYPDEKNKRASVRRRIDQSNSHANIFYSVLTIDKMQNKDKGLYTCRVRSGPSFKSVNTSVHIYDKAFITVKHRKQQVLETVAGKRSYRLSMKVKAFPSPEVVWLKDGLPATEKSARYLTRGYSLIIKDVTEEDAGNYTILLSIKQSNVFKNLTATLIVNVKPQIYEKAVSSFPDPALYPLGSRQILTCTAYGIPQPTIKWFWHPCNHNHSEARCDFCSNNEESFILDADSNMGNRIESITQRMAIIEGKNKMASTLVVADSRISGIYICIASNKVGTVGRNISFYITDVPNGFHVNLEKMPTEGEDLKLSCTVNKFLYRDVTWILLRTVNNRTMHYSISKQKMAITKEHSITLNLTIMNVSLQDSGTYACRARNVYTGEEILQKKEITIRDQEAPYLLRNLSDHTVAISSSTTLDCHANGVPEPQITWFKNNHKIQQEPGIILGPGSSTLFIERVTEEDEGVYHCKATNQKGSVESSAYLTVQGTSDKSNLELITLTCTCVAATLFWLLLTLFIRKMKRSSSEIKTDYLSIIMDPDEVPLDEQCERLPYDASKWEFARERLKLGKSLGRGAFGKVVQASAFGIKKSPTCRTVAVKMLKEGATASEYKALMTELKILTHIGHHLNVVNLLGACTKQGGPLMVIVEYCKYGNLSNYLKSKRDLFFLNKDAALHMEPKKEKMEPGLEQGKKPRLDSVTSSESFASSGFQEDKSLSDVEEEEDSDGFYKEPITMEDLISYSFQVARGMEFLSSRKCIHRDLAARNILLSENNVVKICDFGLARDIYKNPDYVRKGDTRLPLKWMAPESIFDKIYSTKSDVWSYGVLLWEIFSLGGSPYPGVQMDEDFCSRLREGMRMRAPEYSTPEIYQIMLDCWHRDPKERPRFAELVEKLGDLLQANVQQDGKDYIPINAILTGNSGFTYSTPAFSEDFFKESISAPKFNSGSSDDVRYVNAFKFMSLERIKTFEELLPNATSMFDDYQGDSSTLLASPMLKRFTWTDSKPKASLKIDLRVTSKSKESGLSDVSRPSFCHSSCGHVSEGKRRFTYDHAELERKIACCSPPPDYNSVVLYSTPPI

SEQ ID NO: 3032 - protein, 212 aa, Homo sapiens
MSQGSPGDWAPLDPTPGPPASPNPFVHELHLSRLQRVKFCLLGALLAPIRVLLAFIVLFLLWPFAWLQVAGLSEEQLQEPITGWRKTVCHNGVLGLSRLLFFLLGFLRIRVRGQRASRLQAPVLVAAPHSTFFDPIVLLPCDLPKVVSRAENLSVPVIGALLRFNQAILVSRHDPASRRRVVEEVRRRATSGGKWPQVGKGLKTIFSLSMCS

SEQ ID NO: 3033 - protein, 1349 aa, Homo sapiens
MTFGNYVLFNLLVAILVEGFQAEGDANRSDTDEDKTSVHFEEDFHKLRELQTTELKMCSLAVTPNGHLEGRGSLSPPLIMCTAATPMPTPKSSPFLDAAPSLPDSRRGSSSSGDPPLGDQKPPASLRSSPCAPWGPSGAWSSRRSSWSSLGRAPSLKRRGQCGERESLLSGEGKGSTDDEAEDGRAAPGPRATPLRRAESLDPRPLRPAALPPTKCRDRDGQVVALPSDFFLRIDSHREDAAELDDDSEDSCCLRLHKVLEPYKPQWCRSREAWALYLFSPQNRFRVSCQKVITHKMFDHVVLVFIFLNCVTIALERPDIDPGSTERVFLSVSNYIFTAIFVAEMMVKVVALGLLSGEHAYLQSSWNLLDGLLVLVSLVDIVVAMASAGGAKILGVLRVLRLLRTLRPLRVISRAPGLKLVVETLISSLRPIGNIVLICCAFFIIFGILGVQLFKGKFYYCEGPDTRNISTKAQCRAAHYRWVRRKYNFDNLGQALMSLFVLSSKDGWVNIMYDGLDAVGVDQQPVQNHNPWMLLYFISFLLIVSFFVLNMFVGVVVENFHKCRQHQEAEEARRREEKRLRRLERRRRKAQRRPYYADYSPTRRSIHSLCTSHYLDLFITFIICVNVITMSMEHYNQPKSLDEALKYCNYVFTIVFVFEAALKLVAFGFRRFFKDRWNQLDLAIVLLSLMGITLEEIEMSAALPINPTIIRIMRVLRIARVLKLLKMATGMRALLDTVVQALPQVGNLGLLFMLLFFIYAALGVELFGRLECSEDNPCEGLSRHATFSNFGMAFLTLFRVSTGDNWNGIMKDTLRECSREDKHCLSYLPALSPVYFVTFVLVAQFVLVNVVVAVLMKHLEESNKEAREDAELDAEIELEMAQGPGSARRVDADRPPLPQESPGARDAPNLVARKVSVSRMLSLPNDSYMFRPVVPASAPHPRPLQEVEMETYGAGTPLGSVASVHSPPAESCASLQIPLAVSSPARSGEPLHALSPRGTARSPSLSRLLCRQEAVHTDSLEGKIDSPRDTLDPAEPGEKTPVRPVTQGGSLQSPPRSPRPASVRTRKHTFGQRCVSSRPAAPGGEEAEASDPADEEVSHITSSACPWQPTAEPHGPEASPVAGGERDLRRLYSVDAQGFLDKPGRADEQWRPSAELGSGEPGEAKAWGPEAEPALGARRKKKMSPPCISVEPPAEDEGSARPSAAEGGSTTLRRRTPSCEATPHRDSLEPTEGSGAGGDPAAKGERWGQASCRAEHLTVPSFAFEPLDLGVPSGDPFLDGSHSVTPESRASSSGAIVPLEPPESEPPMPVGDPPEKRRGLYLTVPQCPLEKPGSPSATPAPGGGADDPV

SEQ ID NO: 3034 - protein, 1090 aa, Homo sapiens
MSPGAIALCSARCSASYLGFQFDKKRLPVEESEGKEEELAHSCLGGCGRRKMARALCPLQALWLLEWVLLLLGPCAAPPAWALNLDPVQLTFYAGPNGSQFGFSLDFHKDSHGRVAIVVGAPRTLGPSQEETGGVFLCPWRAEGGQCPSLLFDLRDETRNVGSQTLQTFKARQGLGASVVSWSDVIVACAPWQHWNVLEKTEEAEKTPVGSCFLAQPESGRRAEYSPCRGNTLSRIYVENDFSWDKRYCEAGFSSVVTQAGELVLGAPGGYYFLGLLAQAPVADIFSSYRPGILLWHVSSQSLSFDSSNPEYFDGYWGYSVAVGEFDGDLNTTEYVVGAPTWSWTLGAVEILDSYYQRLHRLRGEQMASYFGHSVAVTDVNGDGRHDLLVGAPLYMESRADRKLAEVGRVYLFLQPRGPHALGAPSLLLTGTQLYGRFGSAIAPLGDLDRDGYNDIAVAAPYGGPSGRGQVLVFLGQSEGLRSRPSQVLDSPFPTGSAFGFSLRGAVDIDDNGYPDLIVGAYGANQVAVYRAQPVVKASVQLLVQDSLNPAVKSCVLPQTKTPVSCFNIQMCVGATGHNIPQKLSLNAELQLDRQKPRQGRRVLLLGSQQAGTTLNLDLGGKHSPICHTTMAFLRDEADFRDKLSPIVLSLNVSLPPTEAGMAPAVVLHGDTHVQEQTRIVLDCGEDDVCVPQLQLTASVTGSPLLVGADNVLELQMDAANEGEGAYEAELAVHLPQGAHYMRALSNVEGFERLICNQKKENETRVVLCELGNPMKKNAQIGIAMLVSVGNLEEAGESVSFQLQIRSKNSQNPNSKIVLLDVPVRAEAQVELRGNSFPASLVVAAEEGEREQNSLDSWGPKVEHTYELHNNGPGTVNGLHLSIHLPGQSQPSDLLYILDIQPQGGLQCFPQPPVNPLKVDWGLPIPSPSPIHPAHHKRDRRQIFLPEPEQPSRLQDPVLVSCDSAPCTVVQCDLQEMARGQRAMVTVLAFLWLPSLYQRPLDQFVLQSHAWFNVSSLPYAVPPLSLPRGEAQVWTQLLRALEERAIPIWWVLVGVLGGLLLLTILVLAMWKVGFFKRNRPPLEEDDEEGE

SEQ ID NO: 3035 - protein, 96 aa, Homo sapiens [sequence omitted]

SEQ ID NO: 3036 - protein, 46 aa, Homo sapiens
MEDAFVELYGPSMRPLFDFSWLSLKTLLSLALVGACITLGAYLGHK

SEQ ID NO: 3037 - protein, 277 aa, Homo sapiens
MVLGLLVQIWALQEASSLSVQQGPNLLQVRQGSQATLVCQVDQATAWERLRVKWTKDGAILCQPYITNGSLSLGVCGPQGRLSWQAPSHLTLQLDPVSLNHSGAYVCWAAVEIPELEEAEGNITRLFVDPDDPTQNRNRIASFPGFLFVLLGVGSMGVAAIVWGAWFWGRRSCQQRDSGNSPGNAFYSNVLYRPRGAPKKSEDCSGEGKDQRGQSIYSTSFPQPAPRQPHLASRPCPSPRPCPSPRPGHPVSMVRVSPRPSPTQQPRPKGFPKVGEE

SEQ ID NO: 3038 - protein, 106 aa, Homo sapiens
MSAAPTSLGPRTLHSSVLTIIPRPQDHGTNLICQVTFPGAGVTTERTIQLSVSWKSGTVEEVVVLAVGVVAVKILLLCLCLIILSFHKKKAVRAVEVEENVYAVMG

SEQ ID NO: 3039 - protein, 319 aa, Homo sapiens
MLHSPCVSLTMNGTYNTCGSSDLTWPPAIKLGFYAYLGVLLVLGLLLNSLALWVFCCRMQQWTETRIYMTNLAVADLCLLCTLPFVLHSLRDTSDTPLCQLSQGIYLTNRYMSISLVTAIAVDRYVAVRHPLRARGLRSPRQAAAVCAVLWVLVIGSLVARWLLGIQEGGFCFRSTRHNFNSMAFPLLGFYLPLAVVVFCSLKVVTALAQRPPTDVGQAEATRKAARMVWANLLVFVVCFLPLHVGLTVRLAVGWNACALLETIRRALYITSKLSDANCCLDAICYYYMAKEFQEASALAVAPSAKAHKSQDSLCVTLA

SEQ ID NO: 3040 - protein, 176 aa, Homo sapiens
MYFSLCHAGCPAATETNVDGQKVYRDCSCIPQNLSSGFGHATAGKCTSTCQRKPLLLVFIFVVIFFTFLSSIPALTATLRCVRDPQRSFALGIQWIVVRILGGIPGPIAFGWVIDKACLLWQDQCGQQGSCLVYQNSAMSRYILIMGLLYKFQLPEVHHSLNVLNRKFQKQTVHNL

SEQ ID NO: 3041 - protein, 265 aa, Homo sapiens [sequence omitted]

SEQ ID NO: 3042 - protein, 96 aa, Homo sapiens
MSEKDEYQFQHQGAVELLVFNFLLILTILTIWLFKNHRFRFLHETGGAMVYDKPPKFAMSREQMSQSCSHTAHNASLLTDAGPLSCGESRASCLFL

SEQ ID NO: 3043 - protein, 76 aa, Homo sapiens [sequence omitted]

SEQ ID NO: 3044 - protein, 73 aa, Homo sapiens [sequence omitted]

SEQ ID NO: 3045 - protein, 637 aa, Homo sapiens
VCWSLKSTRAAENRRDRTWAPRASPASQVGAGRQATSRPAPGMRVLLAALGLLFLGALRAFPQDRPFEDTCHGNPSHYYDKAVRRCCYRCPMGLFPTQQCPQRPTDCRKQCEPDYYLDEADRCTACVTCSRDDLVEKTPCAWNSSRVCECRPGMFCSTSAVNSCARCFFHSVCPAGMIVKFPGTAQKNTVCEPASPGVSPACASPENCKEPSSGTIPQAKPTPVSPATSSASTMPVRGGTRLAQEAASKLTRAPDSPSSVGRPSSDPGLSPTQPCPEGSGDCRKQCEPDYYLDEAGRCTACVSCSRDDLVEKTPCAWNSSRTCECRPGMICATSATNSCARCVPYPICAAETVTKPQDMAEKDTTFEAPPLGTQPDCNPTPENGEAPASTSPTQSLLVDSQASKTLPIPTSAPVALSSTGKPVLDAGPVLFWVILVLVVVVGSSAFLLCHRRACRKRIRQKLHLCYPVQTSQPKLELVDSRPRRSSTQLRSGASVTEPVAEERGLMSQPLMETCHSVGAAYLESLPLQDASPAGGPSSPRDLPEPRVSTEHTNNKIEKIYIMKADTVIVGTVKAELPEGRGLAGPAEPELEEELEADHTPHYPEQETEPPLGSCSDVMLSVEEEGKEDPLPTAASGK

SEQ ID NO: 3046 - protein, 1227 aa, Homo sapiens
IVPGMDTLRAVPLFSISGLFSFPYRVSHGIAGILLGEMAVCAKKRPPEEERRARANDREYNEKFQYASNCIKTSKYNILTFLPVNLFEQFQEVANTYFLFLLILQLIPQISSLSWFTTIVPLVLVLTITAVKDATDDYFRHKSDNQVNNRQSQVLINGILQQEQWMNVCVGDIIKLENNQFVAADLLLLSSSEPHGLCYIETAELDGETNMKVRQAIPVTSELGDISKLAKFDGEVICEPPNNKLDKFSGTLYWKENKFPLSNQNMLLRGCVLRNTEWCFGLVIFAGPDTKLMQNSGRTKFKRTSIDRLMNTLVLWIFGFLVCMGVILAIGNAIWEHEVGMRFQVYLPWDEAVDSAFFSGFLSFWSYIIILNTVVPISLYVSVEVIRLGHSYFINWDKKMFCMKKRTPAEARTTTLNEELGQVEYIFSDKTGTLTQNIMVFNKCSINGHSYGDVFDVLGHKAELGERPEPVDFSFNPLADKKFLFWDPSLLEAVKIGDPHTHEFFRLLSLCHTVMSEEKNEGELYYKAQSPDEGALVTAARNFGFVFRSRTPKTITVHEMGTAITYQLLAILDFNNIRKRMSVIVRNPEGKIRLYCKGADTILLDRLHHSTQELLNTTMDHLNEYAGEGLRTLVLAYKDLDEEYYEEWAERRLQASLAQDSREDRLASIYEEVENNMMLLGATAIEDKLQQGVPETIALLTLANIKIWVLTGDKQETAVNIGYSCKMLTDDMTEVFIVTGHTVLEVREELRKAREKMMDSSRSVGNGFTYQDKLSSSKLTSVLEAVAGEYALVINGHSLAHALEADMELEFLETACACKAVICCRVTPLQKAQVVELVKKYKKAVTLAIGDGANDVSMIKTAHIGVGISGQEGIQAVLASDYSFSQFKFLQRLLLVHGRWSYLRMCKFLCYFFYKNFAFTMVHFWFGFFCGFSAQTVYDQYFITLYNIVYTSLPVLAMGVFDQDVPEQRSMEYPKLYEPGQLNLLFNKREFFICIAQGIYTSVLMFFIPYGVFADATRDDGTQLADYQSFAVTVATSLVIVVSVQIGLDTGYWTAINHFFIWGSLAVYFAILFAMHSNGLFDMFPNQFRFVGNAQNTLAQPTVWLTIVLTTVVCIMPVVAFRFLRLNLKPDLSDTVRYTQLVRKKQKAQHRCMRRVGRTGSRRSGYAFSHQEGFGELIMSGKNMRLSSLALSSFTTRSSSSWIESLRRKKSDSASSPSGGADKPLKG

SEQ ID NO: 3047 - protein, 657 aa, Homo sapiens
IIMVAPKSHTDDWAPGPFSSKPQRSQLQIFSSVLQTSLLFLLMGLRASGKDSAPTVVSGILGGSVTLPLNISVDTEIENVIWIGPKNALAFARPKENVTIMVKSYLGRLDITKWSYSLCISNLTLNDAGSYKAQINQRNFEVTTEEEFTLFVYEQLQEPQVTMKSVKVSENFSCNITLMCSVKGAEKSVLYSWTPREPHASESNGGSILTVSRTPCDPDLPYICTAQNPVSQRSSLPVHVGQFCTDPGASRGGTTGETVVGVLGEPVTLPLALPACRDTEKVVWLFNTSIISKEREEAATADPLIKSRDPYKNRVWVSSQDCSLKISQLKIEDAGPYHAYVCSEASSVTSMTHVTLLIYRRLRKPKITWSLRHSEDGICRISLTCSVEDGGNTVMYTWTPLQKEAVVSQGESHLNVSWRSSENHPNLTCTASNPVSRSSHQFLSENICSGPERNTKLWIGLFLMVCLLCVGIFSWCIWKRKGRCSVPAFCSSQAEAPADTPEPTAGHTLYSVLSQGYEKLDTPLRPARQQPTPTSDSSSDSNLTTEEDEDRPEVHKPISGRYEVFDQVTQEGAGHDPAPEGQADYDPVTPYVTEVESVVGENTMYAQVFNLQGKTPVSQKEESSATIYCSIRKPQVVPPPQQNDLEIPESPTYENFT

SEQ ID NO: 3048 - protein, 339 aa, Homo sapiens
VEKMLQSLAGSSCVRLVERHRSAWCFGFLVLGYLLYLVFGAVVFSSVELPYEDLLRQELRKLKRRFLEEHECLSEQQLEQFLGRVLEASNYGVSVLSNASGNWNWDFTSALFFASTVLSTTGYGHTVPLSDGGKAFCIIYSVIGIPFTLLFLTAVVQRITVHVTRRPVLYFHIRWGFSKQVVAIVHAVLLGFVTVSCFFFIPAAVFSVLEDDWNFLESFYFCFISLSTIGLGDYVPGEGYNQKFRELYKIGITCYLLLGLIAMLVVLETFCELHELKKFRKMFYVKKDKDEDQVHIIEHDQLSFSSITDQAAGMKEDQKQNEPFVATQSSACVDGPANH

SEQ ID NO: 3049 - protein, 71 aa, Homo sapiens
LAVAACVLLLTSAQLGLHIWQLRSQCMWPRETQLLLEVPPSTEDARSCQFPEEERGERSAEEKGRLGDLWV

SEQ ID NO: 3050 - protein, 262 aa, Homo sapiens
LLLLGLGLSTVTGLHCVGDTYPSNDRCCHECRPGNGMVSRCSRSQNTVCRPCGPGFYNDVVSSKPCKPCTWCNLRSGSERKQLCTATQDTVCRCRAGTQPLDSYKPGVDCAPCPPGHFSPGDNQACKPWTNCTLAGKHTLQPASNSSDAICEDRDPPATQPQETQGPPARPITVQPTEAWPRTSQGPSTRPVEVPGGRAVAAILGLGLVLGLLGPLAILLALYLLRRDQRLPPDAHKPPGGGSFRTPIQEEQADAHSTLAKI

SEQ ID NO: 3051 - protein, 551 aa, Homo sapiens
LETAPPRSMGTSLSPNDPWPLNPLSIQQTTLLLLLSVLATVHVGQRLLRQRRRQLRSAPPGPFAWPLIGNAAAVGQAAHLSFARLARRYGDVFQIRLGSCPIVVLNGERAIHQALVQQGSAFADRPAFASFRVVSGGRSMAFGHYSEHWKVQRRAAHSMMRNFFTRQPRSRQVLEGHVLSEARELVALLVRGSADGAFLDPRPLTVVAVANVMSAVCFGCRYSHDDPEFRELLSHNEEFGRTVGAGSLVDVMPWLQYFPNPVRTVFREFEQLNRNFSNFILDKFLRHCESLRPGAAPRDMMDAFILSAEKKAAGDSHGGGARLDLENVPATITDIFGASQDTLSTALQWLLLLFTRYPDVQTRVQAELDQVVGRDRLPCMGDQPNLPYVLAFLYEAMRFSSFVPVTIPHATTANTSVLGYHIPKDTVVFVNQWSVNHDPLKWPNPENFDPARFLDKDGLINKDLTSRVMIFSVGKRRCIGEELSKMQLFLFISILAHQCDFRANPNEPAKMNFSYGLTIKPKSFKVNVTLRESMELLDSAVQNLQAKETCQ

SEQ ID NO: 3052 - protein, 82 aa, Homo sapiens
LARPLAPSLLPLSLLPVPSPSLTSFLPTSPLLGFLPHPLDSPLPALALSLALSAAPAMTEAGAGAVAAAAVAGGESGSQKVA

SEQ ID NO: 3053 - protein, 365 aa, Homo sapiens
ICSLVMDPEETSVYLDYYYATSPNSDIRETHSHVPYTSVFLPVFYTAVFLTGVLGNLVLMGALHFKPGSRRLIDIFIINLAASDFIFLVTLPLWVDKEASLGLWRTGSFLCKGSSYMISVNMHCSVLLLTCMSVDRYLAIVWPVVSRKFRRTDCAYVVCASIWFISCLLGLPTLLSRELTLIDDKPYCAEKKATPIKLIWSLVALIFTFFVPLLSIVTCYCCIARKLCAHYQQSGKHNKKLKKSIKIIFIVVAAFLVSWLPFNTFKFLAIVSGLRQEHYLPSAILQLGMEVSGPLAFANSCVNPFIYYIFDSYIRRAIVHCLCPCLKNYDFGSSTETSDSHLTKALSTFIHAEDFARRRKRSVSL

SEQ ID NO: 3054 - protein, 248 aa, Homo sapiens
LGRSMRWCLLLIWAQGLRQAPLASGMMTGTIETTGNISAEKGGSIILQCHLSSTTAQVTQVNWEQQDQLLAICNADLGWHISPSFKDRVAPGPGLGLTLQSLTVNDTGEYFCIYHTYPDGTYTGRIFLEVLESSVAEHGARFQIPLLGAMAATLVVICTAVIVVVALTRKKKALRIHSVEGDLRRKSAGQEEWSPSAPSPPGSCVQAEAAPAGLCGEQRGEDCAELHDYFNVLSYRSLGNCSFFTETG

SEQ ID NO: 3055 - protein, 372 aa, Homo sapiens
RSLRRYGELANTPFGLFLPPCFCVPWECCCAYASGLFLELQWTGICDSTMGLSNILFVMAFLLSGAAPLKIQAYFNETADLPCQFANSQNQSLSELVVFWQDQENLVLNEVYLGKEKFDSVHSKYMGRTSFDSDSWTLRLHNLQIKDKGLYQCIIHHKKPTGMIRIHQMNSELSVLANFSQPEIVPISNITENVYINLTCSSIHGYPEPKKMSVLLRTKNSTIEYDGVMQKSQDNVTELYDVSISLSVSFPDVTSNMTIFCILETDKTRLLSSPFSIELEDPQPPPDHIPWITAVLPTVIICVMVFCLILWKWKKKKRPRNSYKCGTNTMEREESEQTKKREKIHIPERSDEAQRVFKSSKTSSCDKSDTCF

SEQ ID NO: 3056 - protein, 901 aa, Homo sapiens
LDSPSAYPQGPLVPGSSLSPDHYEHTSVGAYGLYSGPPGQQQRTRRPKLQHSTSILRKQAEEEAIKRSRSLSESYELSSDLQDKQVEMLERKYGGRLVTRHAARTIQTAFRQYQMNKNFERLRSSMSENRMSRRIVLSNMRMQFSFEGPEKVHSSYFEGKQVSVTNDGSQLGALVSPECGDLSEPTTLKSPAPSSDFADAITELEDAFSRQVKSLAESIDDALNCRSLHTEEAPALDAARARDTEPQTALHGMDHRKLDEMTASYSDVTLYIDEEELSPPLPLSQAGDRPSSTESDLRLRAGGAAPDYWALAHKEDKADTDTSCRSTPSLERQEQRLRVEHLPLLTIEPPSDSSVDLSDRSERGSLKRQSAYERSLGGQQGSPKHGPHSGAPKSLPREEPELRPRPPRPLDSHLAINGSANRQSKSESDYSDGDNDSINSTSNSNDTINCSSESSSRDSLREQTLSKQTYHKEARNSWDSPAFSNDVIRKRHYRIGLNLFNKKPEKGVQYLIERGFVPDTPVGVAHFLLQRKGLSRQMIGEFLGNRQKQFNRDVLDCVVDEMDFSTMELDEALRKFQAHIRVQGEAQKVERLIEAFSQRYCICNPGVVRQFRNPDTIFILAFAIILLNTDMYSPNVKPERKMKLEDFIKNLRGVDDGEDIPREMLMGIYERIRKRELKTNEDHVSQVQKVEKLIVGKKPIGSLHPGLGCVLSLPHRRLVCYCRLFEVPDPNKPQKLGLHQREIFLFNDLLVVTKIFQKKKNSVTYSFRQSFSLYGMQVLLFENQYYPNGIRLTSSVPGADIKVLINFNAPNPQDRKKFTDDLRESIAEVQEMEKHRIESELEKQKGVVRPSMSQCSSLKKESGNGTLSRACLDDSYASGEGLKRSALSSSLRDLSEAGVHH

SEQ ID NO: 3057 - protein, 147 aa, Homo sapiens
VVLRRLSGAVGVGCGMCSAGELLRGGDGGERDEDGDALAEREAAGTGWDPGASPRRRGQRPKESEQDVEDSQNHTGEPVGDDYKKMGTLFGELNKNLINMGFTRMYFGERIVEPVIVIFFWVMLWFLGLQALGLVAVLCLVIIYVQQ

SEQ ID NO: 3058 - protein, 518 aa, Homo sapiens
KFCFLSLCFIFPPCVPTMVRKPVVSTISKGGYLQGNVNGRLPSLGNKEPPGQEKVQLKRKVTLLRGVSIIIGTIIGAGIFISPKGVLQNTGSVGMSLTIWTVCGVLSLFGALSYAELGTTIKKSGGHYTYILEVFGPLPAFVRVWVELLIIRPAATAVISLAFGRYILEPFFIQCEIPELAIKLITAVGITVVMVLNSMSVSWSARIQIFLTFCKLTAILIIIVPGVMQLIKGQTQNFKDAFSGRDSSITRLPLAFYYGMYAYAGWFYLNFVTEEVENPEKTIPLAICISMAIVTIGYVLTNVAYFTTINAEELLLSNAVAVTFSERLLGNFSLAVPIFVALSCFGSMNGGVFAVSRLFYVASREGHLPEILSMIHVRKHTPLPAVIVLHPLTMIMLFSGDLDSLLNFLSFARWLFIGLAVAGLIYLRYKCPDMHRPFKVPLFIPALFSFTCLFMVALSLYSDPFSTGIGFVITLTGVPAYYLFIIWDKKPRWFRIMSEKITRTLQIILEVVPEEDKL

SEQ ID NO: 3059 - protein, 81 aa, Homo sapiens
ILANSGLSSFLVSEGPFCFQGGACEKWHLERGRKRRKNRSSASDLRWLKERMYLVSAISLHPSMTLLSMSLIFLARKPSAV

SEQ ID NO: 3060 - protein, 316 aa, Homo sapiens
LCLTEVSSDFSSASSMFSHLPFDCVLLLLLLLLTRSSEVEYRAEVGQNAYLPCFYTPAAPGNLVPVCWGKGACPVFECGNVVLRTDERDVNYWTSRYWLNGDFRKGDVSLTIENVTLADSGIYCCRIQIPGIMNDEKFNLKLVIKPAKVTPAPTRQRDFTAAFPRMLTTRGHGPAETQTLGSLPDINLTQISTLANELRDSRLANDLRDSGATIRIGIYIGAGICAGLALALIFGALIFKWYSHSKEKIQNLSLISLANLPPSGLANAVAEGIRSEENIYTIEENVYEVEEPNEYYCYVSSRQQPSQPLGCRFAMP

SEQ ID NO: 3061 - protein, 458 aa, Homo sapiens
ITMTTSHQPQDRYKAVWLIFFMLGLGTLLPWNFFMTATQYFTNRLDMSQNVSLVTAELSKDAQASAAPAAPLPERNSLSAIFNNVMTLCAMLPLLLFTYLNSFLHQRIPQSVRILGSLVAILLVFLITAILVKVQLDALPFFVITMIKIVLINSFGAILQGSLFGLAGLLPASYTAPIMSGQGLAGFFASVAMICAIASGSELSESAFGYFITACAVIILTIICYLGLPRLEFYRYYQQLKLEGPGEQETKLDLISKGEEPRAGKEESGVSVSNSQPTNESHSIKAILKNISVLAFSVCFIFTITIGMFPAVTVEVKSSIAGSSTWERYFIPVSCFLTFNIFDWLGRSLTAVFMWPGKDSRWLPSLVLARLVFVPLLLLCNIKPRRYLTVVFEHDAWFIFFMAAFAFSNGYLASLCMCFGPKKVKPAEAETAGAIMAFFLCLGLALGAVFSFLFRAIV

SEQ ID NO: 3062 - protein, 267 aa, Homo sapiens
LADPAKRLGARRMRWAAATLRGKARPRGRAGVTTPAPGNRTGTCAKLRLPPQATFQVLRGNGASVGTVLMFRCPSNHQMVGSGLLTCTWKGSIAEWSSGSPVCKLVPPHETFGFKVAVIASIVSCAIILLMSMAFLTCCLLKCVKKSKRRRSNRSAQLWSQLKDEDLETVQAAYLGLKHFNKPVSGPSQAHDNHSFTTDHGESTSKLASVTRSVDKDPGIPRALSLSGSSSSPQAQVMVHMANPRQPLPASGLATGMPQQPAAYALG

SEQ ID NO: 3063 - protein, 213 aa, Homo sapiens
LELVDRAADRGADARRGRPLGTAGGAVSVAMTDQTYCDRLVQDTPFLTGHGRLSEQQVDRIILQLNRYYPQILTNKEAEKFRNPKASLRVRLCDLLSHLQRSGERDCQEFYRALYIHAQPLHSRLPSRHALQNSDCTELDSGSQSGELSNRGPMSFLAGLGLAVGLALLLYCYPPDPKGLPGTRRVLGFSPVIIDRHVSRYLLAFLADDLGGL

SEQ ID NO: 3064 - protein, 302 aa, Homo sapiens
LATRTGECDCVSGSMAEKRHTRDSEAQRLPDSFKDSPSKGLGPCGWILVAFSFLFTVITFPISIWMCIKIIKEYERAIIFRLGRILQGGAKGPGLFFILPCTDSFIKVDMRTISFDIPPQEILTKDSVTISVDGVVYYRVQNATLAVANITNADSATRLLAQTTLRNVLGTKNLSQILSDREEIAHNMQSTLDDATDAWGIKVERVEIKDVKLPVQLQRAMAAEAEASREARAKVIAAEGEMNASRALKEASMVITESPAALQLRYLQTLTTIAAEKNSTIVFPLPIDMLQGIIGAKHSHLG

SEQ ID NO: 3065 - protein, 290 aa, Homo sapiens
LQRKTSASLPRLVPRVRKMDSYLLMWGLLTFIMVPGCQAELCDDDPPEIPHATFKAMAYKEGTMLNCECKRGFRRIKSGSLYMLCTGNSSHSSWDNQCQCTSSATRNTTKQVTPQPEEQKERKTTEMQSPMQPVDQASLPGHCREPPPWENEATERIYHFVVGQMVYYQCVQGYRALHRGPAESVCKMTHGKTRWTQPQLICTGEMETSQFPGEEKPQASPEGRPESETSCLVTTTDFQIQTEMAATMETSIFTTEYQVAVAGCVFLLISVLLLSGLTWQRRQRKSRRTI

SEQ ID NO: 3066 - protein, 206 aa, Homo sapiens
LALPACCYLGDFLVWQWWSWPWGDGDAGSAAPHTPPEAAAGRLLLVLSCVGLLLTLAHPLRLRHCVLVLLLASFVWWVSFTSLGSLPSALRPLLSGLVGGAGCLLALGLDHFFQIREAPLHPRLSSAAEEKVPVIRPRRRSSCVSLGETAASYYGSCKIFRRPSLPCISREQMILWDWDLKQWYKPHYQVSIINICDEYLNNICDH

SEQ ID NO: 3067 - protein, 295 aa, Homo sapiens
VDDTWAQAEVGPVTSCTGFVEGSSRTGGMGSACIKVTKYFLFLFNLIFFILGAVILGFGVWILADKSSFISVLQTSSSSLRMGAYVFIGVGAVTMLMGFLGCIGAVNEVRCLLGLYFAFLLLILIAQVTAGALFYFNMGKLKQEMGGIVTELIRDYNSSREDSLQDAWDYVQAQVKCCGWVSFYNWTDNAELMNRPEVTYPCSCEVKGEEDNSLSVRKGFCEAPGNRTQSGNHPEDWPVYQEGCMEKVQAWLQENLGIILGVGVGVAIIELLGMVLSICLCRHVHSEDYSKVPKY

SEQ ID NO: 3068 - protein, 577 aa, Homo sapiens
LPCLVVLLAALLSLRLGSDAHGTELPSPPSVWFEAEFFHHILHWTPIPNQSESTCYEVALLRYGIESWNSISNCSQTLSYDLTAVTLDLYHSNGYRARVRAVDGSRHSNWTVTNTRFSVDEVTLTVGSVNLEIHNGFILGKIQLPRPKMAPANDTYESIFSHFREYEIAIRKVPGNFTFTHKKVKHENFSLLTSGEVGEFCVQVKPSVASRSNKGMWSKEECISLTRQYFTVTNVIIFFAFVLLLSGALAYCLALQLYVRRRKKLPSVLLFKKPSPFIFISQRPSPETQDTIHPLDEEAFLKVSPELKNLDLHGSTDSGFGSTKPSLQTEEPQFLLPDPHPQADRTLGNREPPVLGDSCSSGSSNSTDSGICLQEPSLSPSTGPTWEQQVGSNSRGQDDSGIDLVQNSEGRAGDTQGGSALGHHSPPEPEVPGEEDPAAVAFQGYLRQTRCAEEKATKTGCLEEESPLTDGLGPKFGRCLVDEAGLHPPALAKGYLKQDPLEMTLASSGAPTGQWNQPTEEWSLLALSSCSDLGISDWSFAHDLAPLGCVAAPGGLLGSFNSDLVTLPLISSLQSSE

SEQ ID NO: 3069 - protein, 2207 aa, Homo sapiens
RESRLPFLFTLVALLPPGALCEVWTQRLHGGSAPLPQDRGFLVVQGDPRELRLWARGDARGASRADEKPLRRKRSAALQPEPIKVYGQVSLNDSHNQMVVHWAGEKSNVIVALARDSLALARPKSSDVYVSYDYGKSFKKISDKLNFGLGNRSEAVIAQFYHSPADNKRYIFADAYAQYLWITFDFCNTLQGFSIPFRAADLLLHSKASNLLLGFDRSHPNKQLWKSDDFGQTWIMIQEHVKSFSWGIDPYDKPNTIYIERHEPSGYSTVFRSTDFFQSRENQEVILEEVRDFQLRDKYMFATKVVHLLGSEQQSSVQLWVSFGRKPMRAAQFVTRHPINEYYIADASEDQVFVCVSHSNNRTNLYISEAEGLKFSLSLENVLYYSPGGAGSDTLVRYFANEPFADFHRVEGLQGVYIATLINGSMNEENMRSVITFDKGGTWEFLQAPAFTGYGEKINCELSQGCSLHLAQRLSQLLNLQLRRMPILSKESAPGLIIATGSVGKNLASKTNVYISSSAGARWREALPGPHYYTWGDHGGIITAIAQGMETNELKYSTNEGETWKTFIFSEKPVFVYGLLTEPGEKSTVFTIFGSNKENVHSWLILQVNATDALGVPCTENDYKLWSPSDERGNECLLGHKTVFKRRTPHATCFNGEDFDRPVVVSNCSCTREDYECDFGFKMSEDLSLEVCVPDPEFSGKSYSPPVPCPVGSTYRRTRGYRKISGDTCSGGDVEARLEGELVPCPLAEENEFILYAVRKSIYRYDLASGATEQLPLTGLRAAVALDFDYEHNCLYWSDLALDVIQRLCLNGSTGQEVIINSGLETVEALAFEPLSQLLYWVDAGFKKIEVANPDGDFRLTIVNSSVLDRPRALVLVPQEGVMFWTDWGDLKPGIYRSNMDGSAAYHLVSEDVKWPNGISVDDQWIYWTDAYLECIERITFSGQQRSVILDNLPHPYAIAVFKNEIYWDDWSQLSIFRASKYSGSQMEILANQLTGLMDMKIFYKGKNTGSNACVPRPCSLLCLPKANNSRSCRCPEDVSSSVLPSGDLMCDCPQGYQLKNNTCVKQENTCLRNQYRCSNGNCINSIWWCDFDNDCGDMSDERNCPTTICDLDTQFRCQESGTCIPLSYKCDLEDDCGDNSDESHCEMHQCRSDEYNCSSGMCIRSSWVCDGDNDCRDWSDEANCTAIYHTCEASNFQCRNGHCIPQRWACDGDTDCQDGSDEDPVNCEKKCNGFRCPNGTCIPSSKHCDGLRDCSDGSDEQHCEPLCTHFMDFVCKNRQQCLFHSMVCDGIIQCRDGSDEDAAFAGCSQDPEFHKVCDEFGFQCQNGVCISLIWKCDGMDDCGDYSDEANCENPTEAPNCSRYFQFRCENGHCIPNRWKCDRENDCGDWSDEKDCGDSHILPFSTPGPSTCLPNYYRCSSGTCVMDTWVCDGYRDCADGSDEEACPLLANVTAASTPTQLGRCDRFEFECHQPKTCIPNWKRCDGHQDCQDGRDEANCPTHSTLTCMSREFQCEDGEACIVLSERCDGFLDCSDESDEKACSDELTVYKVQNLQWTADFSGDVTLTWMRPKKMPSASCVYNVYYRVVGESIWKTLETHSNKTNTVLKVLKPDTTYQVKVQVQCLSKAHNTNDFVTLRTPEGLPDAPRNLQLSLPREAEGVIVGHWAPPIHTHGLIREYIVEYSRSGSKMWASQRAASNFTEIKNLLVNTLYTVRVAAVTSRGIGNWSDSKSITTIKGKVIPPPDIHIDSYGENYLSFTLTMESDIKVNGYVVNLFWAFDTHKQERRTLNFRGSILSHKVGNLTAHTSYEISAWAKTDLGDSPLAFEHVMTRGVRPPAPSLKAKAINQTAVECTWTGPRNVVYGIFYATSFLDLYRNPKSLTTSLHNKTVIVSKDEQYLFLVRVVVPYQGPSSDYVVVKMIPDSRLPPRHLHVVHTGKTSVVIKWESPYDSPDQDLLYAVAVKDLIRKTDRSYKVKSRNSTVEYTLNKLEPGGKYHIIVQLGNMSKDSSIKITTVSLSAPDALKIITENDHVLLFWKSLALKEKHFNESRGYEIHMFDSAMNITAYLGNTTDNFFKISNLKMGHNYTFTVQARCLFGNQICGEPAILLYDELGSGADASATQAARSTDVAAVVVPILFLILLSLGVGFAILYTKHRRLQSSFTAFANSHYSSRLGSAIFSSGDDLGEDDEDAPMITGFSDDVPMVIA

SEQ ID NO: 3070 - protein, 443 aa, Homo sapiens
LPSSWISLLAEEPGGARGDPGAQPAPRRPRLRAMPGVCDRAPDFLSPSEDQVLRPALGSSVALNCTAWVVSGPHCSLPSVQWLKDGLPLGIGGHYSLHEYSWVKANLSEVLVSSVLGVNVTSTEVYGAFTCSIQNISFSSFTLQRAGPTSHVAAVLASLLVLLALLLAALLYVKCRLNVLLWYQDAYGEVEINDGKLYDAYVSYSDCPEDRKFVNFILKPQLERRRGYKLFLDDRDLLPRAEPSADLLVNLSRCRRLIVVLSDAFLSRAWCSHSFREGLCRLLELTRRPIFITFEGQRRDPAHPALRLLRQHRHLVTLLLWRPGSVTPSSDFWKEVQLALPRKVQYRPVEGDPQTQLQDDKDPMLILRGRVPEGRALDSEVDPDPEGDLGVRGPVFGEPSAPPHTSGVSLGESRSSEVDVSDLGSRNYSARTDFYCLVSKDDM

SEQ ID NO: 3071 - protein, 413 aa, Homo sapiens
LTASRAGILCSLCAQSPTMSANATLKPLCPILEQMSRLQSHSNTSIRYIDHAAVLLHGLASLLGLVENGVILFVVGCRMRQTVVTTWVLHLALSDLLASASLPFFTYFLAVGHSWELGTTFCKLHSSIFFLNMFASGFLLSAISLDRCLQVVRPVWAQNHRTVAAAHKVCLVLWALAVLNTVPYFVFRDTISRLDGRIMCYYNVLLLNPGPDRDATCNSRQVALAVSKFLLAFLVPLAIIASSHAAVSLRLQHRGRRRPGRFVRLVAAVVAAFALCWGPYHVFSLLEARAHANPGLRPLVWRGLPFVTSLAFFNSVANPVLYVLTCPDMLRKLRRSLRTVLESVLVDDSELGGAGSSRRRRTSSTARSASPLALCSRPEEPRGPARLLGWLLGSCAASPQTGPLNRALSSTSS

SEQ ID NO: 3072 - protein, 520 aa, Homo sapiens
TTLQKEQSTLPTGLLVAELQVLTQIRLFEKQRARKTQAQRPCHFCGLRSLLAQAPASLGKATMNRGVPFRHLLLVLQLALLPAATQGKKVVLGKKGDTVELTCTASQKKSIQFHWKNSNQIKILGNQGSFLTKGPSKLNDRADSRRSLWDQGNFPLIIKNLKIEDSDTYICEVEDQKEEVQLLVFGLTANSDTHLLQGQSLTLTLESPPGSSPSVQCRSPRGKNIQGGKTLSVSQLELQDSGTWTCTVLQNQKKVEFKIDIVVLAFQKASSIVYKKEGEQVEFSFPLAFTVEKLTGSGELWWQAERASSSKSWITFDLKNKEVSVKRVTQDPKLQMGKKLPLHLTLPQALPQYAGSGNLTLALEAKTGKLHQEVNLVVMRATQLQKNLTCEVWGPTSPKLMLSLKLENKEAKVSKREKAVWVLNPEAGMWQCLLSDSGQVLLESNIKVLPTWSTPVQPMALIVLGGVAGLLLFIGLGIFFCVRCRHRRRQAERMSQIKRLLSEKKTCQCPHRFQKTCSPI

SEQ ID NO: 3073 - protein, 258 aa, Homo sapiens
ICIQRQVPPVPAARAPQSRTRSAQAKLALTMPVKGGTKCIKYLLFGFNFIFWLAGIAVLAIGLWLRFDSQTKSIFEQETNNNNSSFYTGVYILIGAGALMMLVGFLGCCGAVQESQCMLGLFFGFLLVIFAIEIAAAIWGYSHKDEVIKEVQEFYKDTYNKLKTKDEPQRETLKAIHYALNCCGLAGGVEQFISDICPKKDVLETFTVKSCPDAIKEVFDNKFHIIGAVGIGIAVVMIFGMIFSMILCCAIRRNREMV

SEQ ID NO: 3074 - protein, 996 aa, Homo sapiens
LPCCTPLLGDPLYPSRKVESAGWRLPGEANAWPCPAPRRTMTLLLLPLLLASLLASCSCNKANKHKPWIEAEYQGIVMENDNTVLLNPPLFALDKDAPLRYAGEICGFRLHGSGVPFEAVILDKATGEGLIRAKEPVDCEAQKEHTFTIQAYDCGEGPDGANTKKSHKATVHVRVNDVNEFAPVFVERLYRAAVTEGKLYDRILRVEAIDGDCSPQYSQICYYEILTPNTPFLIDNDGNIENTEKLQYSGERLYKFTVTAYDCGKKRAADDAEVEIQVKPTCKPSWQGWNKRIEYAPGAGSLALFPGIRLETCDEPLWNIQATIELQTSHVAKGCDRDNYSERALRKLCGAATGEVDLLPMPGPNANWTAGLSVHYSQDSSLIYWFNGTQAVQVPLGGPSGLGSGPQDSLSDHFTLSFWMKHGVTPNKGKKEEETIVCNTVQNEDGFSHYSLTVHGCRIAFLYWPLLESARPVKFLWKLEQVCDDEWHHYALNLEFPTVTLYTDGISFDPALIHDNGLIHPPRREPALMIGACWTEEKNKEKEKGDNSTDTTQGDPLSIHHYFHGYLAGFSVRSGRLESREVIECLYACREGLDYRDFESLGKGMKVHVNPSQSLLTLEGDDVETFNHALQHVAYMNTLRFATPGVRPLRLTTAVKCFSEESCVSIPEVEGYVVVLQPDAPQILLSGTAHFARPAVDFEGTNGVPLFPDLQITCSISHQVEAKKDESWQGTVTDTRMSDEIVHNLDGCEISLVGDDLDPERESLLLDTTSLQQRGLELTNTSAYLTIAGVESITVYEEILRQARYRLRHGAALYTRKFRLSCSEMNGRYSSNEFIVEVNVLHSMNRVAHPSHVLSSQQFLHRGHQPPPEMAGHSLASSHRNSMIPSAATLIIVVCVGFLVLMVVLGLVRIHSLHRRVSGAGGPPGASSDPKDPDLFWDDSALTIIVNPMESYQNRQSCVTGAVGGQQEDEDSSDSEVADSPSSDERRIIETPPHRY

SEQ ID NO: 3075 - protein, 35 aa, Homo sapiens
KAQDGCLRLSTRVKLAGTVPVIFLGLFGVLLKGGD

SEQ ID NO: 3076 - protein, 340 aa, Homo sapiens
LAADKKGREREREESSEARGPSAMRRASRDYTKYLRGSEEMGGGPGAPHEGPLHAPPPPAPHQPPAASRSMFVALLGLGLGQVVCSVALFFYFRAQMDPNRISEDGTHCIYRILRLHENADFQDTTLESQDTKLIPDSCRRIKQAFQGAVQKELQHIVGSQHIRAEKAMVDGSWLDLAKRSKLEAQPFAHLTINATDIPSGSHKVSLSSWYHDRGWAKISNMTFSNGKLIVNQDGFYYLYANICFRHHETSGDLATEYLQLMVYVTKTSIKIPSSHTLMKGGSTKYWSGNSEFHFYSINVGGFFKLRSGEEISIEVSNPSLLDPDQDATYFGAFKVRDID

SEQ ID NO: 3077 - protein, 52 aa, Homo sapiens
LGFLRGRGEGVRDKSPSFLCFFFSFAFSSFIFLFVCIFFPLLVEVRFPPTRP

SEQ ID NO: 3078 - protein, 229 aa, Homo sapiens
VVAGARAGVPSLPPSPAMSQGSPGDWAPLDPTPGPPASPNPFVHELHLSRLQRVKFCLLGALLAPIRVLLAFIVLFLLWPFAWLQVAGLSEEQLQEPITGWRKTVCHNGVLGLSRLLFFLLGFLRIRVRGQRASRLQAPVLVAAPHSTFFDPIVLLPCDLPKVVSRAENLSVPVIGALLRFNQAILVSRHDPASRRRVVEEVRRRATSGGKWPQVGKGLKTIFSLSMCS

SEQ ID NO: 3079 - protein, 1159 aa, Homo sapiens
RFWLLPAMALRVLLLTALTLCHGFNLDTENAMTFQENARGFGQSVVQLQGSRVVVGAPQEIVAANQRGSLYQCDYSTGSCEPIRLQVPVEAVNMSLGLSLAATTSPPQLLACGPTVHQTCSENTYVKGLCFLFGSNLRQQPQKFPEALRGCPQEDSDIAFLIDGSGSIIPHDFRRMKEFVSTVMEQLKKSKTLFSLMQYSEEFRIHFTFKEFQNNPNPRSLVKPITQLLGRTHTATGIRKVVRELFNITNGARKNAFKILVVITDGEKFGDPLGYEDVIPEADREGVIRYVIGVGDAFRSEKSRQELNTIASKPPRDHVFQVNNFEALKTIQNQLREKIFAIEGTQTGSSSSFEHEMSQEGFSAAITSNGPLLSTVGSYDWAGGVFLYTSKEKSTFINMTRVDSDMNDAYLGYAAAIILRNRVQSLVLGAPRYQHIGLVAMFRQNTGMWESNANVKGTQIGAYFGASLCSVDVDSNGSTDLVLIGAPHYYEQTRGGQVSVCPLPRGRARWQCDAVLYGEQGQPWGRFGAALTVLGDVNGDKLTDVAIGAPGEEDNRGAVYLFHGTSGSGISPSHSQRIAGSKLSPRLQYFGQSLSGGQDLTMDGLVDLTVGAQGHVLLLRSQPVLRVKAIMEFNPREVARNVFECNDQVVKGKEAGEVRVCLHVQKSTRDRLREGQIQSVVTYDLALDSGRPHSRAVFNETKNSTRRQTQVLGLTQTCETLKLQLPNCIEDPVSPIVLRLNFSLVGTPLSAFGNLRPVLAEDAQRLFTALFPFEKNCGNDNICQDDLSITFSFMSLDCLVVGGPREFNVTVTVRNDGEDSYRTQVTFFFPLDLSYRKVSTLQNQRSQRSWRLACESASSTEVSGALKSTSCSINHPIFPENSEVTFNITFDVDSKASLGNKLLLKANVTSENNMPRTNKTEFQLELPVKYAVYMVVTSHGVSTKYLNFTASENTSRVMQHQYQVSNLGQRSLPISLVFLVPVRLNQTVIWDRPQVTFSENLSSTCHTKERLPSHSDFLAELRKAPVVNCSIAVCQRIQCDIPFFGIQEEFNATLKGNLSFDWYIKTSHNHLLIVSTAEILFNDSVFTLLPGQGAFVRSQTETKVEPFEVPNPLPLIVGSSVGGLLLLALITAALYKLGFFKRQYKDMMSEGGPPGAEPQ

SEQ ID NO: 3080 - protein, 225 aa, Homo sapiens
KMPLTPEPPSGRVEGPPAWEAAPWPSLPCGPCIPIMLVLATLAALFILTTAVLAERLFRRALRPDPSHRAPTLVWRPGGELWIEPMGTARERSEDWYGSAVPLLTDRAPEPPTQVGTLEARATAPPAPSAPNSAPSNLGPQTVLEVPARSTFWGPQPWEGRPPATGLVSWAEPEQRPEASVQFGSPQARRQRPGSPDPEWGLQPRVTLEQISAFWKREGRTSVGF

SEQ ID NO: 3081 - protein, 29 aa, Homo sapiens
KDQNAKISADSIICLLMFLLWLCLFSVLL

SEQ ID NO: 3082 - protein, 174 aa, Homo sapiens
ICRLAGRLQESLSLNFQPQRPPPLSPRAMGRVSGLVPSRFLTLLAHLVVVITLFWSRDSNIQACLPLTFTPEEYDKQDIHPLPLCRLVAALSVTLGLFAVELAGFLSGVSMFNSTQSLISIGAHCSASVALSFFIFERWECTTYWYIFVFCSALPAVTEMALFVTVFGLKKKPF

SEQ ID NO: 3083 - protein, 144 aa, Homo sapiens
LSPPPPLLPVPVVSGSPVGSSGRLMASSSSLVPDRLRLPLCFLGVFVCYFYYGILQEKITRGKYGEGAKQETFTFALTLVFIQCVINAVFAKIWWIVPGAGSMLPVLSPIWVPWSPAIQHYSLSTTQLRSLVNPASQSQSCSLG

SEQ ID NO: 3084 - protein, 184 aa, Homo sapiens
LCKLMMPSKSLVMEYLAHPSTLGLAVGVACGMCLGWSLRVCFGMLPKSKTSKTHTDTESEASILGDSGEYKMILVVRNDLKMGKGKVAAQCSHAAVSAYKQIQRRNPEMLKQWEYCGQPKVVVKAPDEETLIALLAHAKMLGLTVSLIQDAGRTQIAPGSQTVLGIGPGPADLIDKVTGHLKLY

SEQ ID NO: 3085 - protein, 122 aa, Homo sapiens
KTNVIRTAKYNFYSFLPLNLYEQFHRVSNLFFLIIIILQSIPDISTLPWFSLSTPMVCLLFIRATRDLVDDMGRHKSDRAINNRPCQILMGKSPTGTGPAFIRRLAGTRTEAEALMANPCRA

SEQ ID NO: 3086 - protein, 206 aa, Homo sapiens
IAPPALAEVIAAAMPEEGSGCSVRRRPYGCVLRAALVPLVAGLVICLVVCIQRFAQAQQQLPLESLGWDVAELQLNHTGPQQDPRLYWQGGPALGRSFLHGPELDKGQLRIHRDGIYMVHIQVTLAICSSTTASRHHPTTLAVGICSPASRSISLLRLSFHQGCTIASQRLTPLARGDTLCTNLTGTLLPSRNTDETFFGVQWVRP

SEQ ID NO: 3087 - protein, 308 aa, Homo sapiens
LQSSVLALVRLRPGCTAGTWAMSPHPTALLGLVLCLAQTIHTQEEDLPRPSISAEPGTVIPLGSHVTFVCRGPVGVQTFRLERDSRSTYNDTEDVSQASPSESEARFRIDSVREGNAGLYRCIYYKPPKWSEQSDYLELLVKESSGGPDSPDTEPGSSAGPTQRPSDNSHNEHAPASQGLKAEHLYILIGVSVVFLFCLLLLVLFCLHRQNQIKQGPPRSKDEEQKPQQRPDLAVDVLERTADKATVNGLPEKDRETDTSALAAGSSQEVTYAQLDHWALTQRTARAVSPQSTKPMAESITYAAVARH

SEQ ID NO: 3088 - protein, 235 aa, Homo sapiens
IKMSQSNRELVVDFLSYKLSQKGYSWSQFSDVEENRTEAPEGTESEMETPSAINGNPSWHLADSPAVNGATGHSSSLDAREVIPMAAVKQALREAGDEFELRYRRAFSDLTSQLHITPGTAYQSFEQVVNELFRDGVNWGRIVAFFSFGGALCVESVDKEMQVLVSRIAAWMATYLNDHLEPWIQENGGWDTFVELYGNNAAAESRKGQERFNRWFLTGMTVAGVVLLGSLFSRK

SEQ ID NO: 3089 - protein, 264 aa, Homo sapiens
RMLLAWVQAFLVSNMLLAEAYGSGGCFWDNGHLYREDQTSPAPGLRCLNWLDAQSGLASAPVSGAGNHSYCRNPDEDPRGPWCYVSGEAGVPEKRPCEDLRCPETTSQALPAFTTEIQEASEGPGADEVQVFAPANALPARSEAAAVQPVIGISQRVRMNSKEKKDLGTLGYVLGITMMVIIIAIGAGIILGYSYKRGKDLKEQHDQKVCEREMQRITLPLSAFTNPTCEIVDEKTVVVHTSQTPVDPQEGTTPLMGQAGTPGA

SEQ ID NO: 3090 - protein, 739 aa, Homo sapiens
IMSRRSQRLTRYSQGDDDGSSSSGGSSVAGSQSTLFKDSPLRTLKRKSSNMKRLSPAPQLGPSSDAHTSYYSESLVHESWFPPRSSLEELHGDANWGEDLRVRRRRGTGGSESSRASGLVGRKATEDFLGSSSGYSSEDDYVEDSEGRGSKVTETEPVSSFPAGYSDVDQQSSSSRLRSAVSRAGSLLWMVATSPGRLFRLLYWWAGTTWYRLTTAASLLDVFVLTRRFSSLKTFLWFLLPLLLLTCLTYGAWYFYPYGLQTFHPALVSWWAAKDSRRPDEGWEARDSSPHFQAEQRVMSRVHSLERRLEALAAEFSSNWQKEAMRLERLELRQGAPGQGGGGGLSHEDTLALLEGLVSRREAALKEDFRRETAARIQEELSALRAEHQQDSEDLFKKIVRASQESEARIQQLKSEWQSMTQESFQESSVKELRRLEDQLAGLQQELAALALKQSSVAEEVGLLPQQIQAVRDDVESQFPAWISQFLARGGGGRVGLLQREEMQAQLRELESKILTHVAEMQGKSAREAAASLSLTLQKEGVIGVTEEQVHHIVKQALQRYSEDRIGLADYALESGGASVISTRCSETYETKTALLSLFGIPLWYHSQSPRVILQPDVHPGNCWAFQGPQGFAVVRLSARIRPTAVTLEHVPKALSPNSTISSAPKDFAIFGFDEDLQQEGTLLGKFTYDQDGEPIQTFHFQAPTMATYQVVELRILTNWGHPEYTCIYRFRVHGEPAH

SEQ ID NO: 3091 - protein, 522 aa, Homo sapiens
VMGLGRCIWEGWTLESEALRRDMGTWLLACICICTCVCLGVSVTGEGQGPRSRTFTCLTNNILRIDCHWSAPELGQGSSPWLLFTSNQAPGGTHKCILRGSECTVVLPPEAVLVPSDNFTITFHHCMSGREQVSLVDPEYLPRRHVKLDPPSDLQSNISSGHCILTWSISPALEPMTTLLSYELAFKKQEEAWEQAQHRDHIVGVTWLILEAFELDPGFIHEARLRVQMATLEDDVVEEERYTGQWSEWSQPVCFQAPQRQGPLIPPWGWPGNTLVAVSIFLLLTGPTYLLFKLSPRVKRIFYQNVPSPAMFFQPLYSVHNGNFQTWMGAHGAGVLLSQDCAGTPQGALEPCVQEATALLTCGPARPWKSVALEEEQEGPGTRLPGNLSSEDVLPAGCTEWRVQTLAYLPQEDWAPTSLTRPAPPDSEGSRSSSSSSSSNNNNYCALGCYGGWHLSALPGNTQSSGPIPALACGLSCDHQGLETQQGVAWVLAGHCQRPGLHEDLQGMLLPSVLSKARSWTF

SEQ ID NO: 3092 - protein, 57 aa, Homo sapiens
MLEDPYAAWRLLFLGTQVSSLYCYNFFSRTAVFFACTNGTSSSAGYFSTAGVWREEG

SEQ ID NO: 3093 - protein, 558 aa, Homo sapiens
MALQLINCPDYKLRPYQHSYLRSTVILVLTLLMICLMIGMAHVLVVYRVLASALFSSSAVPFLEEQVTTAVVVTGALVHYVTIIIMTKINRCVALKLCDFEMPRTFSERESRFTIRFFTLQFFTHFSSLIYIAFILGRINGHPGKSTRLAGLWKLEECHASGCMMDLFVQMAIIMGLKQTLSNCVEYLVPWVTHKCRSLRASESGHLPRDPELRDWRRNYLLNPVNTFSLFDEFMEMMIQYGFTTIFVAAFPLAPLLALFSNLVEIRLDAIKMVWLQRRLVPRKAKDIGQTGRAQDGRELGGLRPVGFPLARPAHLEKIISRISGRRQPPALLRRPRMRVEPGWEGTRSGRGRALCRLLPQTVRISEGLDAPKGDPGSASGWGWNRAAGLCPKTGHAETDRQQGSDGSWGAGCGERERGVREAPSLGPRLQGLTLGWEPRRWSGWGAQLRSSGRWRMRIPRFLPVHVRVRGAGAQRPCSAMAGDFLVNTAALGLQGDTTHRDTAGPVLAGGGGEGRTSRGTLSQTACPLLWCRDLAAGAGDHRCAGGHCQWDGHCLHI

SEQ ID NO: 3094 - protein, 222 aa, Homo sapiens
MLVTCFFILLLGLSVATMVTLTYFGAHFAVIRRASLEKNPYQAVHQWAFSAGLSLVGLLTLGAVLSAAATVREAQGLMAGGFLCFSLAFCAQVQVVFWRLHSPTQVEDAMLDTYDLVYEQAMKGTSHVRRQELAAIQDVFLCCGKKSPFSRLGSTEADLCQGEEAAREDCLQGIRSFLRTHQQVASSLTSIGLALTVPSRLPHCPFPPPAPQPAQPPTQMEG

SEQ ID NO: 3095 - protein, 133 aa, Homo sapiens
MLPGEGRPHPGAVGQPRVSPSQVSALLFSSFLWFAIRCGCSLDRKGKYTLTPRACGRQPQEPSLLRCSQGGPTHCLHSEAVAIGPRGCSGSLRWLQESDAAPLPLSCHLAAHRALQGRSRGGLSGCPERGLSD

SEQ ID NO: 3096 - protein, 195 aa, Homo sapiens
MDTESNRRANLALPQEPSSVPAFEVLEISPQEVSSGRLLKSASSPPLHTWLTVLKKEQEFLGVTQILTAMICLCFGTVVCSVLDISHIEGDIFSSFKAGYPFWGAIFFSISGMLSIISERRNATYLVRGSLGANTASSIAGGTGITILIINLKKSLAYIHIHSCQKFFETKCFMASFSTVCIFFCVGRLRFWVLM

SEQ ID NO: 3097 - protein, 89 aa, Homo sapiens
MSAGLPLGALPEMLLPLAFVATLTAFIFSLFLYMKAQVAPVSALAPGGNSGNPIYDFFLGRELNPRICFFDFKYFCELRPGLIGWVCWA

SEQ ID NO: 3098 - protein, 336 aa, Homo sapiens
MTASPPGSLRASDWVILNCSFSRPDRPASVHWFRNRGQGRVPVRESPHHHLAESFLFLPQVSPMDSGPWGCILTYRDGFNVSIMYNLTVLGLEPPTPLTVYAGAGSRVGLPCRLPAGVGTRSFLTAKWTPPGGGPDLLVTGDNGDFTLRLEDVSQAQAGTYTCHIHLQEQQLNATVTLAIITVTPKSFGSPGSLGKLLCEVTPVSGQERFVWSSLDTPSQRSFSGPWLEAQEAQLLSQPWQCQLYQGERLLGAAVYFTELSSPGAQRSGRAPGALPAGHLLLFLILGVLSLLLLVTGAFGFHLWRRQVSQGHGNPAPQQLPLFHPQSADGTPSSGR

SEQ ID NO: 3099 - protein, 65 aa, Homo sapiens
MAFSCWHFSFSDYFTGYFNGQYWLWWIFLVLGLLLFFRGFVNYLKVRNMSESMAAAHRTRYFFLL

SEQ ID NO: 3100 - protein, 357 aa, Homo sapiens [sequence omitted]

SEQ ID NO: 3101 - protein, 162 aa, Homo sapiens
MIIVAVYCPVIAAVFIVLKMVNYRLHRALDAGEVVDRTANEFTDQRTKAEQGNCSTRRKDSNGPSDPGGGIEMSEFIREATPPVGCSSRNSYAGLDPSNQIGSGSSRLGTAATIKGDTDTAKTSDDISLSLGQSSSLCKEGSEEQGKNVILYHDVIYCGDQS

SEQ ID NO: 3102 - protein, 476 aa, Homo sapiens
MGCWGQLLVWFGAAGAILCSSPGSQETFLRSSPLPLASPSPRDPKVSAPPSILEPASPLNSPGTEGSWLFSTCGASGRHGPTQTQCDGAYAGTSVVVTVGAAGQLRGVQLWRVPGPGQYLISAYGAAGGKGAKNHLSRAHGVFVSAIFSLGLGESLYILVGQQGEDACPGGSPESQLVCLGESRAVEEHAAMDGSEGVPGSRRWAGGGGGGGGATYVFRVRAGELEPLLVAAGGGGRAYLRPRDRGRTQASPEKLENRSEAPGSGGRGGAAGGGGGWTSRAPSPQAGRSLQEGAEGGQGCSEAWATLGWAAAGGFGGGGGACTAGGGGGGYRGGDASETDNLWADGEDGVSFIHPSSELFLQPLAVTENHGEVEIRRHLNCSHCPLRDCQWQAELQLAECLCPEGMELAVDNVTCMDLHKPPGPLVLMVAVVATSTLSLLMVCGVLILGTKRLAGTVDSRLLLSSELGWVSAGSRG

SEQ ID NO: 3103 - protein, 385 aa, Homo sapiens
MLVCFRLYSWLFFLSRGIVGTGSASYSTIAPTVLGDLFVRDQRTRVLAVFYIFIPVGSGLGYVLGSAVTMLTGNWRWALRVMPCLEAVALILLILLVPDPPRGAAETQGEGAVGGFRSSWCEDVRYLGKNWSFVWSTLGVTAMAFVTGALGFWAPKFLLEARVVHGLQPPCFQEPCSNPDSLIFGALTIMTGVIGVILGAEAARRYKKVIPGAEPLICASSLLATAPCLYLALVLAPTTLLASYVFLGLGELLLSCNWAVVADILLSVVVPRCRGTAEALQITVGHILGDAGSPYLTGLISSVLRARRPDSYLQRFRSLQQSFLCCAFVIALGGGCFLLTALYLERDETRAWQPVTGTPDSNDVDSNDLERQGLLSGAGASTEEP

SEQ ID NO: 3104 - protein, 1423 aa, Homo sapiens
MEVASYLVAQYGEQRAWDLALHTWEQMGLRSLCAQAQEGAGHSPSFPYSPSEPHLGSPSQPTSTAVLMPWIHELPAGCTQGSERRVLRQLPDTSGRRWREISASLLYQALPSSPDHESPSQESPNAPTSTAVLGSWGSPPQPSLAPREQEAPGTQWPLDETSGIYYTEIREREREKSEKGRPPWAAVVGTPPQAHTSLQPHHHPWEPSVRESLCSTWPWKNEDFNQKFTQLLLLQRPHPRSQDPLVKRSWPDYVEENRGHLIEIRDLFGPGLDTQEPRIVILQGAAGIGKSTLARQVKEAWGRGQLYGDRFQHVFYFSCRELAQSKVVSLAELIGKDGTATPAPIRQILSRPERLLFILDGVDEPGWVLQEPSSELCLHWSQPQPADALLGSLLGKTILPEASFLITARTTALQNLIPSLEQARWVEVLGFSESSRKEYFYRYFTDERQAIRAFRLVKSNKELWALCLVPWVSWLACTCLMQQMKRKEKLTLTSKTTTTLCLHYLAQALQAQPLGPQLRDLCSLAAEGIWQKKTLFSPDDLRKHGLDGAIISTFLKMGILQEHPIPLSYSFIHLCFQEFFAAMSYVLEDEKGRGKHSNCIIDLEKTLEAYGIHGLFGASTTRFLLGLLSDEGEREMENIFHCRLSQGRNLMQWVPSLQLLLQPHSLESLHCLYETRNKTFLTQVMAHFEEMGMCVETDMELLVCTFCIKFSRHVKKLQLIEGRQHRSTWSPTMVVLFRWVPVTDAYWQILFSVLKVTRNLKELDLSGNSLSHSAVKSLCKTLRRPRCLLETLRLAGCGLTAEDCKDLAFGLRANQTLTELDLSFNVLTDAGAKHLCQRLRQPSCKLQRLQLVSCGLTSDCCQDLASVLSASPSLKELDLQQNNLDDVGVRLLCEGLRHPACKLIRLGLDQTTLSDEMRQELRALEQEKPQLLIFSRRKPSVMTPTEGLDTGEMSNSTSSLKRQRLGSERAASHVAQANLKLLDVSKIFPIAEIAEESSPEVVPVELLCVPSPASQGDLHTKPLGTDDDFWGPTGPVATEVVDKEKNLYRVHFPVAGSYRWPNTGLCFVMREAVTVEIEFCVWDQFLGEINPQHSWMVAGPLLDIKAEPGAVEAVHLPHFVALQGGHVDTSLFQMAHFKEEGMLLEKPARVELHHIVLENPSFSPLGVLLKMIHNALRFIPVTSVVLLYHRVHPEEVTFHLYLIPSDCSIRKAIDDLEMKFQFVRIHKPPPLTPLYMGCRYTVSGSGSGMLEILPKELELCYRSPGEDQLFSEFYVGHLGSGIRLQVKDKKDETLVWEALVKPGDLMPATTLIPPARIAVPSPLDAPQLLHFVDQYREQLIARVTSVEVVLDKLHGQVLSQEQYERVLAENTRPSQMRKLFSLSQSWDRKCKDGLYQALKETHPHLIMELWEKGSKKGLLPLSS

SEQ ID NO: 3105 - protein, 181 aa, Homo sapiens
MTGAWLGLYRGGIAWESDLQFNAHPLCMVIGLIFLQGNALLVYRVFRNEAKRTTKVLHGLLHIFALVIALVGLVAVFDYHRKKGYADLYSLHSWCGILVFVLYFVQWLVGFSFFLFPGASFSLRSRYRPQHIFFGATIFLLSVGTALLGLKEALLFNLGKSGWSQNNYSHPPWCLHITPAP

SEQ ID NO: 3106 - protein, 1209 aa, Homo sapiens
MFTGHLLFLALLMFAFSTFEESVSNYSEWAVFTDDIDQFKTQKVQDFRPNQKLKKSMLHPSLYFDAGEIQAMRQKSRASHLHLFRAIRSAVTVMLSNPTYYLPPPKHADFAAKWNEIYGNNLPPLALYCLLCPEDKVAFEFVLEYMDRMVGYKDWLVENAPGDEVPIGHSLTGFATAFDFLYNLLDNHRRQKYLEKIWVITEEMYEYSKVRSWGKQLLHNHQATNMIALLTGALVTGVDKGSKANIWKQAVVDVMEKTMFLLNHIVDGSLDEGVAYGSYTAKSVTQYVFLAQRHFNINNLDNNWLKMHFWFYYATLLPGFQRTVGIADSNYNWFYGPESQLVFLDKFILKNGAGNWLAQQIRKHRPKDGPMVPSTAQRWSTLHTEYIWYDPQLTPQPPADYGTAKIHTFPNWGVVTYGAGLPNTQTNTFVSFKSGKLGGRAVYDIVHFQPYSWIDGWRSFNPGHEHPDQNSFTFAPNGQVFVSEALYGPKLSHLNNVLVFAPSPSSQCNKPWEGQLGECAQWLKWTGEEVGDAAGEIITASQHGEMVFVSGEAVSAYSSAMRLKSVYRALLLLNSQTLLVVDHIERQEDSPINSVSAFFHNLDIDFKYIPYKFMNRYNGAMMDVWDAHYKMFWFDHHGNSPMASIQEAEQAAEFKKRWTQFVNVTFQMEPTITRIAYVFYGPYINVSSCRFIDSSNPGLQISLNVNNTEHVVSIVTDYHNLKTRFNYLGFGGFASVADQGQITRFGLGTQAIVKPVRHDRIIFPFGFKFNIAVGLILCISLVILTFQWRFYLSFRKLMRWILILVIALWFIELLDVWSTCSQPICAKWTRTEAEGSKKSLSSEGHHMDLPDVVITSLPGSGAEILKQLFFNSSDFLYIRVPTAYIDIPETELEIDSFVDACEWKVSDIRSGHFRLLRGWLQSLVQDTKLHLQNIHLHEPNRGKLAQYFAMNKDKKRKFKRRESLPEQRSQMKGAFDRDAEYIRALRRHLVYYPSARPVLSLSSGSWTLKLHFFQEVLGASMRALYIVRDPRAWIYSMLYNSKPSLYSLKNVPEHLAKLFKIEGGKGKCNLNSGYAFEYEPLRKELSKSKSNAVSLLSHLWLANTAAALRINTDLLPTSYQLVKFEDIVHFPQKTTERIFAFLGIPLSPASLNQILFATSTNLFYLPYEGEISPTNTNVWKQNLPRDEIKLIENICWTLMDRLGYPKFMD

SEQ ID NO: 3107 - protein, 122 aa, Homo sapiens
MSAAPTSLGPRTLHSSVLTIIPRPQDHGTNLICQVTFPGAGVTTERTIQLSVSYPLMNPVIEASLEDGTGKSGTVEEVVVLAVGVVAVKILLLCLCLIILSFHKKKAVRAVEVEENVYAVMG

SEQ ID NO: 3108 - protein, 100 aa, Homo sapiens
MSAAPTSLGPRTLHSSVLTIIPRPQDHGTNLICQVTFPGAGVTTERTIQLSVSWKSGTVEEVVVLAVGVVAVKILLLCLCLIILRSLSLHSMSVSTRRRR

SEQ ID NO: 3109 - protein, 277 aa, Homo sapiens
MDPNFWLQVQESVTVQEGLCVLVPCTFFHPIPYYDKNSPVHGYWFREGAIISRDSPVATNKLDQEVQEETQGRFRLLGDPSRNNCSLSIVDARRRDNGSYFFRMERGSTKYSYKSPQLSVHVTDLTHRPKILIPGTLEPGHSKNLTCSVSWACEQGTPPIFSWLSAAPTSLGPRTTHSSVLIITPRPQDHGTNLTCQVKFAGAGVTTERTIQLNVTYVPQNPTTGIFPGDGSGKQETRAGVVHGAIGGAGVTALLALCLCLIFFIPSFQAHNNGPTA

SEQ ID NO: 3110 - protein, 838 aa, Homo sapiens [sequence omitted]

SEQ ID NO: 3111 - protein, 886 aa, Homo sapiens
MLCASSTTKCTVSHEVADCSHLKLTQVPDDLPTNITVLNLTHNQLRRLPAANFTRYSQLTSLDVGFNTISKLEPELCQKLPMLKVLNLQHNELSQLSDKTFAFCTNLTELHLMSNSIQKIKNNPFVKQKNLITLDLSHNGLSSTKLGTQVQLENLQELLLSNNKIQALKSEELDIFANSSLKKLELSSNQIKEFSPGCFHAIGRLFGLFLNNVQLGPSLTEKLCLELANTSIRNLSLSNSQLSTTSNTTFLGLKWTNLTMLDLSYNNLNVVGNDSFAWLPQLEYFFLEYNNIQHLFSHSLHGLFNVRYLNLKRSFTKQSISLASLPKIDDFSFQWLKCLEHLNMEDNDIPGIKSNMFTGLINLKYLSLSNSFTSLRTLTNETFVSLAHSPLHILNLTKNKISKIESDAFSWLGHLEVLDLGLNEIGQELTGQEWRGLENIFEIYLSYNKYLQLTRNSFALVPSLQRLMLRRVALKNVDSSPSPFQPLRNLTILDLSNNNIANINDDMLEGLEKLEILDLQHNNLARLWKHANPGGPIYFLKGLSHLHILNLESNGFDEIPVEVFKDLFELKIIDLGLNNLNTLPASVFNNQVSLKSLNLQKNLITSVEKKVFGPAFRNLTELDMRFNPFDCTCESIAWFVNWINETHTNIPELSSHYLCNTPPHYHGFPVRLFDTSSCKDSAPFELFFMINTSILLIFIFIVLLIHFEGWRISFYWNVSVHRVLGFKEIDRQTEQFEYAAYIIHAYKDKDWVWEHFSSMEKEDQSLKFCLEERDFEAGVFELEAIVNSIKRSRKIIFVITHHLLKDPLCKRFKVHHAVQQAIEQNLDSIILVFLEEIPDYKLNHALCLRRGMFKSHCILNWPVQKERIGAFRHKLQVALGSKNSVH

SEQ ID NO: 3112 - protein, 1178 aa, Homo sapiens
MPKKKRLSAGRVPLILFLCQMISALEVPLDLVQPPTITQQSPKDYIIDPRENIVIQCEAKGKPPPSFSWTRNGTHFDIDKDPLVTMKPGTGTLIINIMSEGKAETYEGVYQCTARNERGAAVSNNIVVRPSRSPLWTKEKLEPITLQSGQSLVLPCRPPIGLPPPIIFWMDNSFQRLPQSERVSQGLNGDLYFSNVLPEDTREDYICYARFNHTQTIQQKQPISVKVISVDELNDTIAANLSDTEFYGAKSSRERPPTFLTPEGNASNKEELRGNVLSLECIAEGLPTPIIYWAKEDGMLPKNRTVYKNFEKTLQIIHVSEADSGNYQCIAKNALGAIHHTISVRVKAAPYWITAPQNLVLSPGEDGTLICRANGNPKPRISWLTNGVPIEIAPDDPSRKIDGDTIIFSNVQERSSAVYQCNASNEYGYLLANAFVNVLAEPPRILTPANTLYQVIANRPALLDCAFFGSPLPTIEWFKGAKGSALHEDIYVLHENGTLEIPVAQKDSTGTYTCVARNKLGMAKNEVHLEIKDPTWIVKQPEYAVVQRGSMVSFECKVKHDHTLSLTVLWLKDNRELPSDERFTVDKDHLVVADVSDDDSGTYTCVANTTLDSVSASAVLSVVDVPNPPFDLELTDQLDKSVQLSWTPGDDNNSPITKFIIEYEDAMHKPGLWHHQTEVSGTQTTAQLKLSPYVNYSFRVMAVNSIGKSLPSEASEQYLTKASEPDKNPTAVEGLGSEPDNLVITWKPLNGFESNGPGLQYKVSWRQKDGDDEWTSVVVANVSKYIVSGTPTFVPYLIKVQALNDMGFAPEPAVVMGHSGEDLPMVAPGNVRVNVVNSTLAEVHWDPVPLKSIRGHLQGYRIYYWKTQSSSKRNRRHIEKKILTFQGSKTHGMLPGLEPFSHYTLNVRVVNGKGEGPASPDRVFNTPEGVPSAPSSLKIVNPTLDSLTLEWDPPSHPNGILTEYTLKYQPINSTHELGPLVDLKIPANKTRWTLKNLNFSTRYKFYFYAQTSAGSGSQITEEAVTTVDEAMASRQVDIATQGWFIGLMCAVALLILILLIVCFIRRNKGGKYPVKEKEDAHADPEIQPMKEDDGTFGEYSDAEDHKPLKKGSRTPSDRTVKKEDSDDSLVDYGEGVNGQFNEDGSFIGQYSGKKEKEPAEGNESSEAPSPVNAMNSFV

SEQ ID NO: 3113 - protein, 221 aa, Homo sapiens
MICRLVVLVFGMLCPAYASYKAVKTKNIREYVRWMMYWIVFALFMAAEIVTDIFISWFPFYYEIKMAFVLWLLSPYTKGASLLYRKFVHPSLSRHEKEIDAYIVQAKERSYETVLSFGKRGLNIAASAAVQAATKVLWAPSPPAAPIPPLRPFGLIQLLCQGAQRWQPGSRGEKVTGGYWQKRGAGVRPSFLALALSVSSGSCSLTLVSCWCHIGAGPEAC

SEQ ID NO: 3114 - protein, 158 aa, Homo sapiens
LGSASISVALFSPSWYSPPNLGFLHARVASCSTSLSLILVSTSSPGKFPFSRLALPTRASDFHPSFSLLASDYPPPIPPRPAAQLPPPFTRTGTIIPTPLRPVWDSTCLLPNPTLISAWSLPLWPNLSSRLIGDGHSHSLVPNTSSWMDSRHPCPLFN

SEQ ID NO: 3115 - protein, 612 aa, Homo sapiens
RLGPGKVKVCLGPLGARAALRIPGQRCGPRPGRPLRSSQRASERARAADAPGRDPAARMTAPGAAGRCPPTTWLGSLLLLVCLLASRSITEEVSEYCSHMIGSGHLQSLQRLIDSQMETSCQITFEFVDQEQLKDPVCYLKKAFLLVQDIMEDTMRFRDNTPNAIAIVQLQELSLRLKSCFTKDYEEHDKACVRTFYETPLQLLEKVKNVFNETKNLLDKDWNIFSKNCNNSFAECSSQDVVTKPDCNCLYPKAIPSSDPASVSPHQPLAPSMAPVAGLTWEDSEGTEGSSLLPGEQPLHTVDPGSAKQRPPRSTCQSFEPPETPVVKDSTIGGSPQPRPSVGAFNPGMEDILDSAMGTNWVPEEASGEASEIPVPQGTELSPSRPGGGSMQTEPARPSNFLSASSPLPASAKGQQPADVTGTALPRVGPVRPTGQDWNHTPQKTDHPSALLRDPPEPGSPRISSLRPQGLSNPSTLSAQPQLSRSHSSGSVLPLGELEGRRSTRDRRSPAEPEGGPASEGAARPLPRFNSVPLTDTGHERQSEGSFSPQLQESVFHLLVPSVILVLLAVGGLLFYRWRRRSHQEPQRADSPLEQPEGSPLTQDDRQVELPV

SEQ ID NO: 3116 - protein, 209 aa, Homo sapiens
LGLQETEAKDTSRANICFKFLGLLTACRMLLEPGRGCCALAILLAIVDIQSGGCINITSSASQEGTRLNLICTVWHKKEEAEGFVVFLCKDRSGDCSPETSLKQLRLKRDPGIDGVGEISSQLMFTISQVTPLHSGTYQCCARSQKSGIRLQGHFFSILFTETGNYTVTGLKQRQHLEFSHNEGTLSSGFLQEKVWVMLVTSLVALQAL

SEQ ID NO: 3117 - protein, 1194 aa, Homo sapiens
LLGEMAVCAKKRPPEEERRARANDREYNEKFQYASNCIKTSKYNILTFLPVNLFEQFQEVANTYFLFLLILQLIPQISSLSWFTTIVPLVLVLTITAVKDATDDYFRHKSDNQVNNRQSQVLINGILQQEQWMNVCVGDIIKLENNQFVAADLLLLSSSEPHGLCYIETAELDGETNMKVRQAIPVTSELGDISKLAKFDGEVICEPPNNKLDKFSGTLYWKENKFPLSNQNMLLRGCVLRNTEWCFGLVIFAGPDTKLMQNSGRTKFKRTSIDRLMNTLVLWIFGFLVCMGVILAIGNAIWEHEVGMRFQVYLPWDEAVDSAFFSGFLSFWSYIIILNTVVPISLYVSVEVIRLGHSYFINWDKKMFCMKKRTPAEARTTTLNEELGQVEYIFSDKTGTLTQNIMVFNKCSINGHSYGDVFDVLGHKAELGERPEPVDFSFNPLADKKFLFWDPSLLEAVKIGDPHTHEFFRLLSLCHTVMSEEKNEGELYYKAQSPDEGALVTAARNFGFVFRSRTPKTITVHEMGTAITYQLLAILDFNNIRKRMSVIVRNPEGKIRLYCKGADTILLDRLHHSTQELLNTTMDHLNEYAGEGLRTLVLAYKDLDEEYYEEWAERRLQASLAQDSREDRLASIYEEVENNMMLLGATAIEDKLQQGVPETIALLTLANIKIWVLTGDKQETAVNIGYSCKMLTDDMTEVFIVTGHTVLEVREELRKAREKMMDSSRSVGNGFTYQDKLSSSKLTSVLEAVAGEYALVINGHSLAHALEADMELEFLETACACKAVICCRVTPLQKAQVVELVKKYKKAVTLAIGDGANDVSMIKTAHIGVGISGQEGIQAVLASDYSFSQFKFLQRLLLVHGRWSYLRMCKFLCYFFYKNFAFTMVHFWFGFFCGFSAQTVYDQYFITLYNIVYTSLPVLAMGVFDQDVPEQRSMEYPKLYEPGQLNLLFNKREFFICIAQGIYTSVLMFFIPYGVFADATRDDGTQLADYQSFAVTVATSLVIVVSVQIGLDTGYWTAINHFFIWGSLAVYFAILFAMHSNGLFDMFPNQFRFVGNAQNTLAQPTVWLTIVLTTVVCIMPVVAFRFLRLNLKPDLSDTVRYTQLVRKKQKAQHRCMRRVGRTGSRRSGYAFSHQEGFGELIMSGKNMRLSSLALSSFTTRSSSSWIESLRRKKSDSASSPSGGADKPLKG

SEQ ID NO: 3118 - protein, 298 aa, Homo sapiens
LRRSKTVCWGWPDSPAAMQQPFNYPYPQIYWVDSSASSPWAPPGTVLPCPTSVPRRPGQRRPPPPPPPPPLPPPPPPPPLPPLPLPPLKKRGNHSTGLCLLVMFFMVLVALVGLGLGMFQLFHLQKELAELRESTSQMHTASSLEKQIGHPSPPPEKKELRKVAHLTGKSNSRSMPLEWEDTYGIVLLSGVKYKKGGLVINETGLYFVYSKVYFRGQSCNNLPLSHKVYMRNSKYPQDLVMMEGKMMSYCTTGQMWARSSYLGAVFNLTSADHLYVNVSELSLVNFEESQTFFGLYKL

SEQ ID NO: 3119 - protein, 229 aa, Homo sapiens
LCGLALLCALSLGQRPTGGPGCGPGRLLLGTGTDARCCRVHTTRCCRDYPGEECCSEWDCMCVQPEFHCGDPCCTTCRHHPCPPGQGVQSQGKFSFGFQCIDCASGTFSGGHEGHCKPWTDCTQFGFLTVFPGNKTHNAVCVPGSPPAEPLGWLTVVLLAVAACVLLLTSAQLGLHIWQLRSQCMWPRETQLLLEVPPSTEDARSCQFPEEERGERSAEEKGRLGDLWV

SEQ ID NO: 3120 - protein, 263 aa, Homo sapiens
IIPVPDFIMGNSCYNIVATLLLVLNFERTRSLQDPCSNCPAGTFCDNNRNQICSPCPPNSFSSAGGQRTCDICRQCKGVFRTRKECSSTSNAECDCTPGFHCLGAGCSMCEQDCKQGQELTKKGCKDCCFGTFNDQKRGICRPWTNCSLDGKSVLVNGTKERDVVCGPSPADLSPGASSVTPPAPAREPGHSPQIISFFLALTSTALLFLLFFLTLRFSVVKRGRKKLLYIFKQPFMRPVQTTQEEDGCSCRFPEEEEGGCEL

SEQ ID NO: 3121 - protein, 648 aa, Homo sapiens
IQAQEDRAMGERTLHAAVPTPGYPESESIMMAPICLVENQEEQLTVNSKALEILDKISQPVVVVAIVGLYRTGKSYLMNRLAGKRNGFPLGSTVQSETKGIWMWCVPHLSKPNHTLVLLDTEGLGDVEKSNPKNDSWIFALAVLLSSSFVYNSVSTINHQALEQLHYVTELAELIRAKSCPRPDEAEDSSEFASFFPDFIWTVRDFTLELKLDGNPITEDEYLENALKLIPGKNPKIQNSNMPRECIRHFFRKRKCFVFDRPTNDKQYLNHMDEVPEENLERHFLMQSDNFCSYIFTHAKTKTLREGIIVTGKRLGTLVVTYVDAINSGAVPCLENAVTALAQLENPAAVQRAADHYSQQMAQQLRLPTDTLQELLDVHAACEREAIAVFMEHSFKDENHEFQKKLVDTIEKKKGDFVLQNEEASAKYCQAELKRLSEHLTESILRGIFSVPGGHNLYLEEKKQVEWDYKLVPRKGVKANEVLQNFLQSQVVVEESILQSDKALTAGEKAIAAERAMKEAAEKEQELLREKQKEQQQMMEAQERSFQEYMAQMEKKLEEERENLLREHERLLKHKLKVQEEMLKEEFQKKSEQLNKEINQLKEKIESTKNEQLRLLKILDMASNIMIVTLPGASKLLGVGTKYLGSRI

SEQ ID NO: 3122 - protein, 26 aa, Homo sapiens
IAGLTIFGMIFSMVLCCAIRNSRDVI

SEQ ID NO: 3123 - protein, 50 aa, Homo sapiens
TLAFLSPGWERGWCAEWFAFFSLELVSLFFFFFFFSFFRLSAVRAGLPGP

SEQ ID NO: 3124 - protein, 655 aa, Homo sapiens
LPYPRALEQQLAADHRHSEDMSVGVSTSAPLSPTSGTSVGMSTFSIMDYVVFVLLLVLSLAIGLYHACRGWGRHTVGELLMADRKMGCLPVALSLLATFQSAVAILGVPSEIYRFGTQYWFLGCCYFLGLLIPAHIFIPVFYRLHLTSAYEYLELRFNKTVRVCGTVTFIFQMVIYMGVVLYAPSLALNAVTGFDLWLSVLALGIVCTVYTALGGLKAVIWTDVFQTLVMFLGQLAVIIVGSAKVGGLGRVWAVASQHGRISGFELDPDPFVRHTFWTLAFGGVFMMLSLYGVNQAQVQRYLSSRTEKAAVLSCYAVFPFQQVSLCVGCLIGLVMFAYYQEYPMSIQQAQAAPDQFVLYFVMDLLKGLPGLPGLFIACLFSGSLSTISSAFNSLATVTMEDLIRPWFPEFSEARAIMLSRGLAFGYGLLCLGMAYISSQMGPVLQAAISIFGMVGGPLLGLFCLGMFFPCANPPGAVVGLLAGLVMAFWIGIGSIVTSMGSSMPPSPSNGSSFSLPTNLTVATVTTLMPLTTFSKPTGLQRFYSLSYLWYSAHNSTTVIVVGLIVSLLTGRMRGRSLNPATIYPVLPKLLSLLPLSCQKRLHCRSYGQDHLDTGLFPEKPRNGVLGDSRDKEAMALDGTAYQGSSSTCILQETSL

SEQ ID NO: 3125 - protein, 591 aa, Homo sapiens
VGVKASSEGSRCPGRACGFLLTSCPRQRSQFLLGAGCPAPLETAPPRSMGTSLSPNDPWPLNPLSIQQTTLLLLLSVLATVHVGQRLLRQRRRQLRSAPPGPFAWPLIGNAAAVGQAAHLSFARLARRYGDVFQIRLGSCPIVVLNGERAIHQALVQQGSAFADRPAFASFRVVSGGRSMAFGHYSEHWKVQRRAAHSMMRNFFTRQPRSRQVLEGHVLSEARELVALLVRGSADGAFLDPRPLTVVAVANVMSAVCFGCRYSHDDPEFRELLSHNEEFGRTVGAGSLVDVMPWLQYFPNPVRTVFREFEQLNRNFSNFILDKFLRHCESLRPGAAPRDMMDAFILSAEKKAAGDSHGGGARLDLENVPATITDIFGASQDTLSTALQWLLLLFTRYPDVQTRVQAELDQVVGRDRLPCMGDQPNLPYVLAFLYEAMRFSSFVPVTIPHATTANTSVLGYHIPKDTVVFVNQWSVNHDPLKWPNPENFDPARFLDKDGLINKDLTSRVMIFSVGKRRCIGEELSKMQLFLFISILAHQCDFRANPNEPAKMNFSYGLTIKPKSFKVNVTLRESMELLDSAVQNLQAKETCQ

SEQ ID NO: 3126 - protein, 362 aa, Homo sapiens
LVMDPEETSVYLDYYYATSPNSDIRETHSHVPYTSVFLPVFYTAVFLTGVLGNLVLMGALHFKPGSRRLIDIFIINLAASDFIFLVTLPLWVDKEASLGLWRTGSFLCKGSSYMISVNMHCSVLLLTCMSVDRYLAIVWPVVSRKFRRTDCAYVVCASIWFISCLLGLPTLLSRELTLIDDKPYCAEKKATPIKLIWSLVALIFTFFVPLLSIVTCYCCIARKLCAHYQQSGKHNKKLKKSIKIIFIVVAAFLVSWLPFNTFKFLAIVSGLRQEHYLPSAILQLGMEVSGPLAFANSCVNPFIYYIFDSYIRRAIVHCLCPCLKNYDFGSSTETSDSHLTKALSTFIHAEDFARRRKRSVSL

SEQ ID NO: 3127 - protein, 473 aa, Homo sapiens
VSAGLGALLLELPRDCLGTGTAVALGPPLRTSPEWVRRVMEGAELAGKILSTWLTLVLGFILLPSVFGVSLGISEIYMKILVKTLEWATIRIEKGTPKESILKNSASVGIIQRDESPMEKGLSGLRGRDFELSDVFYFSKKGLEAIVEDEVTQRFSSEELVSWNLLTRTNVNFQYISLRLTMVWVLGVIVRYCVLLPLRVTLAFIGISLLVIGTTLVGQLPDSSLKNWLSELVHLTCCRICVRALSGTIHYHNKQYRPQKGGICVANHTSPIDVLILTTDGCYAMVGQVHGGLMGIIQRAMVKACPHVWFERSEMKDRHLVTKRLKEHIADKKKLPILIFPEGTCINNTSVMMFKKGSFEIGGTIHPVAIKYNPQFGDAFWNSSKYNMVSYLLRMMTSWAIVCDVWYMPPMTREEGEDAVQFANRVKSAIAIQGGLTELPWDGGLKRAKVKDIFKEEQQKNYSKMIVGNGSLS

SEQ ID NO: 3128 - protein, 552 aa, Homo sapiens
VRPAPPRTTPPRARTFPECTPRPPAGAMAGLWLGLVWQKLLLWGAASALSLAGASLVLSLLQRVASYARKWQQMRPIPTVARAYPLVGHALLMKPDGREFFQQIIEYTEEYRHMPLLKLWVGPVPMVALYNAENVEVILTSSKQIDKSSMYKFLEPWLGLGLLTSTGNKWRSRRKMLTPTFHFTILEDFLDIMNEQANILVKKLEKHINQEAFNCFFYITLCALDIICETAMGKNIGAQSNDDSEYVRAVYRMSEMIFRRIKMPWLWLDLWYLMFKEGWEHKKSLQILHTFTNSVIAERANEMNANEDCRGDGRGSAPSKNKRRAFLDLLLSVTDDEGNRLSHEDIREEVDTFMFEGHDTTAAAINWSLYLLGSNPEVQKKVDHELDDVFGKSDRPATVEDLKKLRYLECVIKETLRLFPSVPLFARSVSEDCEVAGYRVLKGTEAVIIPYALHRDPRYFPNPEEFQPERFFPENAQGRHPYAYVPFSAGPRNCIGQKFAVMEEKTILSCILRHFWIESNQKREELGLEGQLILRPSNGIWIKLKRRNADER

SEQ ID NO: 3129 - protein, 219 aa, Homo sapiens
LDPRPAWAWALVLPMTPPERLFLPRVCGTTLHLLLLGLLLVLLPGAQGLPGVGLTPSAAQTARQHPKMHLAHSTLKPAAHLIGDPSKQNSLLWRANTDRAFLQDGFSLSNNSLLVPTSGIYFVYSQVVFSGKAYSPKATSSPLYLAHEVQLFSSQYPFHVPLLSSQKMVYPGLQEPWLHSMYHGAAFQLTQGDQLSTHTDGIPHLVLSPSTVFFGAFAL

SEQ ID NO: 3130 - protein, 271 aa, Homo sapiens
LPHSRALLTPNRAPKKKMAISGVPVLGFFIIAVLMSAQESWAIKEEHVIIQAEFYLNPDQSGEFMFDFDGDEIFHVDMAKKETVWRLEEFGRFASFEAQGALANIAVDKANLEIMTKRSNYTPITNVPPEVTVLTNSPVELREPNVLICFIDKFTPPVVNVTWLRNGKPVTTGVSETVFLPREDHLFRKFHYLPFLPSTEDVYDCRVEHWGLDEPLLKHWEFDAPSPLPETTENVVCALGLTVGLVGIIIGTIFIIKGLRKSNAAERRGPL

SEQ ID NO: 3131 - protein, 483 aa, Homo sapiens
KDFKSSCQTPGREKERRLATMHGSCSFLMLLLPLLLLLVATTGPVGALTDEEKRLMVELHNLYRAQVSPTASDMLHMRWDEELAAFAKAYARQCVWGHNKERGRRGENLFAITDEGMDVPLAMEEWHHEREHYNLSAATCSPGQMCGHYTQVVWAKTERIGCGSHFCEKLQGVEETNIELLVCNYEPPGNVKGKRPYQEGTPCSQCPSGYHCKNSLCEPIGSPEDAQDLPYLVTEAPSFRATEASDSRKMGTPSSLATGIPAFLVTEVSGSLATKALPAVETQAPTSLATKDPPSMATEAPPCVTTEVPSILAAHSLPSLDEEPVTFPKSTHVPIPKSADKVTDKTKVPSRSPENSLDPKMSLTGARELLPHAQEEAEAEAELPPSSEVLASVFPAQDKPGELQATLDHTGHTSSKSLPNFPNTSATANATGGRALALQSSLPGAEGPDKPSVVSGLNSGPGHVWGPLLGLLLLPPLVLAGIF

SEQ ID NO: 3132 - protein, 389 aa, Homo sapiens
IHSFFYNQLAFFLPTMSGESMNFSDVFDSSEDYFVSVNTSYYSVDSEMLLCSLQEVRQFSRLFVPIAYSLICVFGLLGNILVVITFAFYKKARSMTDVYLLNMAIADILFVLTLPFWAVSHATGAWVFSNATCKLLKGIYAINFNCGMLLLTCISMDRYIAIVQATKSFRLRSRTLPRSKIICLVVWGLSVIISSSTFVFNQKYNTQGSDVCEPKYQTVSEPIRWKLLMLGLELLFGFFIPLMFMIFCYTFIVKTLVQAQNSKRHKAIRVIIAVVLVFLACQIPHNMVLLVTAANLGKMNRSCQSEKLIGYTKTVTEVLAFLHCCLNPVLYAFIGQKFRNYFLKILKDLWCVRRKYKSSGFSCAGRYSENISRQTSETADNDNASSFTM

SEQ ID NO: 3133 - protein, 558 aa, Homo sapiens
LRLESLRLESLRRFAFPGLPFAPPRTRRPCASRGNHPRAPGREDAEQGVLRAGTGAATSRRCRMAAEPQPSSLSYRTTGSTYLHPLSELLGIPLDQVNFVVCQLVALFAAFWFRIYLRPGTTSSDVRHAVATIFGIYFVIFCFGWYSVHLFVLVLMCYAIMVTASVSNIHRYSFFVAMGYLTICHISRIYIFHYGILTTDFSGPLMIVTQKITTLAFQVHDGLGRRAEDLSAEQHRLAIKVKPSFLEYLSYLLNFMSVIAGPCNNFKDYIAFIEGKHIHMKLLEVNWKRKGFHSLPEPSPTGAVIHKLGITLVSLLLFLTLTKTFPVTCLVDDWFVHKASFPARLCYLYVVMQASKPKYYFAWTLADAVNNAAGFGFSGVDKNGNFCWDLLSNLNIWKIETATSFKMYLENWNIQTATWLKCVCYQRVPWYPTVLTFILSALWHGVYPGYYFTFLTGILVTLAARAVRNNYRHYFLSSRALKAVYDAGTWAVTQLAVSYTVAPFVMLAVEPTISLYKSMYFYLHIISLLIILFLPMKPQAHTQRRPQTLNSINKRKTD

SEQ ID NO: 3134 - protein, 272 aa, Homo sapiens
LTTTAFPFVSVMSWKKALRIPGDLRVATVTLMLAMLSSLLAEGRDSPEDFVFQFKGMCYFTNGTERVRLVTRYIYNREEYARFDSDVGVYRAVTPQGRPDAEYWNSQKEVLEGTRAELDTVCRHNYEVAFRGILQRRVEPTVTISPSRTEALNHHNLLVCSVTDFYPGQIKVRWFRNDQEETAGVVSTPLIRNGDWTFQILVMLEMTPQRGDVYTCHVEHPSLQSPITVEWRAQSESAQSKMLSGVGGFVLGLIFLGLGLIIRQRSQKGLLH

SEQ ID NO: 3135 - protein, 42 aa, Homo sapiens
MINMEVMKMLFTLEPLMIDLMFLLFITMLNAIVLYLELSITH

SEQ ID NO: 3136 - protein, 277 aa, Homo sapiens
VLASAWAGVRAQDGAAVVRNPGLSASQEATPGANMSSGTELLWPGAALLVLLGVAASLCVRCSRPGAKRSEKIYQQRSLREDQQSFTGSRTYSLVGQAWPGPLADMAPTRKDKLLQFYPSLEDPASSRYQNFSKGSRHGSEEAYIDPIAMEYYNWGRFSKPPEDDDANSYENVLICKQKTTETGAQQEGIGGLCRGDLSLSLALKTGPTSGLCPSASPEEDEESEDYQNSASIHQWRESRKVMGQLQREASPGPVGSPDEEDGEPDYVNGEVAATEA

SEQ ID NO: 3137 - protein, 203 aa, Homo sapiens
VFLWSLHLLSVPRQRAVEMAGPRPRWRDQLLFMSIIVLVIVVICLMFYALLWEAGNLTDLPNLRIGFYNFCLWNEDTSTLQCHQFPELEALGVPRVGLGLARLGVYGSLVLTLFAPQPLLLAQCNSDERAWRLAVGFLAVSSVLLAGGLGLFLSYVWKWVRLSLPGPGFLALGSAQALLILLLIAMAVFPLRAERAESKLESC

SEQ ID NO: 3138 - protein, 354 aa, Homo sapiens
TQALGSCGAPGVAMNIVVEFFVVTFKVLWAFVLAAARWLVRPKEKSVAGQVCLITGAGSGLGRLFALEFARRRALLVLWDINTQSNEETAGMVRHIYRDLEAADAAALQAGNGEEEILPHCNLQVFTYTCDVGKRENVYLTAERVRKEVGEVSVLVNNAGVVSGHHLLECPDELIERTMMVNCHAHFWTTKAFLPTMLEINHGHIVTVASSLGLFSTAGVEDYCASKFGVVGFHESLSHELKAAEKDGIKTTLVCPYLVDTGMFRGCRIRKEIEPFLPPLKPDYCVKQAMKAILTDQPMICTPRLMYIVTFMKSILPFEAVVCMYRFLGADKCMYPFIAQRKQATNNNEAKNGI

SEQ ID NO: 3139 - protein, 653 aa, Homo sapiens
RTMKDYDELLKYYELHETIGTGGFAKVKLACHILTGEMVAIKIMDKNTLGSDLPRIKTEIEALKNLRHQHICQLYHVLETANKIFMVLEYCPGGELFDYIISQDRLSEEETRVVFRQIVSAVAYVHSQGYAHRDLKPENLLFDEYHKLKLIDFGLCAKPKGNKDYHLQTCCGSLAYAAPELIQGKSYLGSEADVWSMGILLYVLMCGFLPFDDDNVMALYKKIMRGKYDVPKWLSPSSILLLQQMLQVDPKKRISMKNLLNHPWIMQDYNYPVEWQSKNPFIHLDDDCVTELSVHHRNNRQTMEDLISLWQYDHLTATYLLLLAKKARGKPVRLRLSSFSCGQASATPFTDIKSNNWSLEDVTASDKNYVAGLIDYDWCEDDLSTGAATPRTSQFTKYWTESNGVESKSLTPALCRTPANKLKNKENVYTPKSAVKNEEYFMFPEPKTPVNKNQHKREILTTPNRYTTPSKARNQCLKETPIKIPVNSTGTDKLMTGVISPERRCRSVELDLNQAHMEETPKRKGAKVFGSLERGLDKVITVLTRSKRKGSARDGPRRLKLHYNVTTTRLVNPDQLLNEIMSILPKKHVDFVQKGYTLKCQTQSDFGKVTMQFELEVCQLQKPDVVGIRRQRLKGDAWVYKRLVEDILSSCKV

SEQ ID NO: 3140 - protein, 282 aa, Homo sapiens
LPRLVPRVRKMDSYLLMWGLLTFIMVPGCQAELCDDDPPEIPHATFKAMAYKEGTMLNCECKRGFRRIKSGSLYMLCTGNSSHSSWDNQCQCTSSATRNTTKQVTPQPEEQKERKTTEMQSPMQPVDQASLPGHCREPPPWENEATERIYHFVVGQMVYYQCVQGYRALHRGPAESVCKMTHGKTRWTQPQLICTGEMETSQFPGEEKPQASPEGRPESETSCLVTTTDFQIQTEMAATMETSIFTTEYQVAVAGCVFLLISVLLLSGLTWQRRQRKSRRTI

SEQ ID NO: 3141 - protein, 292 aa, Homo sapiens
TWAQAEVGPVTSCTGFVEGSSRTGGMGSACIKVTKYFLFLFNLIFFILGAVILGFGVWILADKSSFISVLQTSSSSLRMGAYVFIGVGAVTMLMGFLGCIGAVNEVRCLLGLYFAFLLLILIAQVTAGALFYFNMGKLKQEMGGIVTELIRDYNSSREDSLQDAWDYVQAQVKCCGWVSFYNWTDNAELMNRPEVTYPCSCEVKGEEDNSLSVRKGFCEAPGNRTQSGNHPEDWPVYQEGCMEKVQAWLQENLGIILGVGVGVAIIELLGMVLSICLCRHVHSEDYSKVPKY

SEQ ID NO: 3142 - protein, 579 aa, Homo sapiens
RMLPCLVVLLAALLSLRLGSDAHGTELPSPPSVWFEAEFFHHILHWTPIPNQSESTCYEVALLRYGIESWNSISNCSQTLSYDLTAVTLDLYHSNGYRARVRAVDGSRHSNWTVTNTRFSVDEVTLTVGSVNLEIHNGFILGKIQLPRPKMAPANDTYESIFSHFREYEIAIRKVPGNFTFTHKKVKHENFSLLTSGEVGEFCVQVKPSVASRSNKGMWSKEECISLTRQYFTVTNVIIFFAFVLLLSGALAYCLALQLYVRRRKKLPSVLLFKKPSPFIFISQRPSPETQDTIHPLDEEAFLKVSPELKNLDLHGSTDSGFGSTKPSLQTEEPQFLLPDPHPQADRTLGNREPPVLGDSCSSGSSNSTDSGICLQEPSLSPSTGPTWEQQVGSNSRGQDDSGIDLVQNSEGRAGDTQGGSALGHHSPPEPEVPGEEDPAAVAFQGYLRQTRCAEEKATKTGCLEEESPLTDGLGPKFGRCLVDEAGLHPPALAKGYLKQDPLEMTLASSGAPTGQWNQPTEEWSLLALSSCSDLGISDWSFAHDLAPLGCVAAPGGLLGSFNSDLVTLPLISSLQSSE

SEQ ID NO: 3143 - protein, 176 aa, Homo sapiens
LAVLILAIILLQGTLAQSIKGNHLVKVYDYQEDGSVLLTCDAEAKNITWFKDGKMIGFLTEDKKKWNLGSNAKDPRGMYQCKGSQNKSKPLQVYYRMCQNCIELNAATISGFLFAEIVSIFVLAVGVYFIAGQDGVRQSRASDKQTLLPNDQLYQPLKDREDDQYSHLQGNQLRRN

SEQ ID NO: 3144 - protein, 420 aa, Homo sapiens
LSSCCQELTASRAGILCSLCAQSPTMSANATLKPLCPILEQMSRLQSHSNTSIRYIDHAAVLLHGLASLLGLVENGVILFVVGCRMRQTVVTTWVLHLALSDLLASASLPFFTYFLAVGHSWELGTTFCKLHSSIFFLNMFASGFLLSAISLDRCLQVVRPVWAQNHRTVAAAHKVCLVLWALAVLNTVPYFVFRDTISRLDGRIMCYYNVLLLNPGPDRDATCNSRQVALAVSKFLLAFLVPLAIIASSHAAVSLRLQHRGRRRPGRFVRLVAAVVAAFALCWGPYHVFSLLEARAHANPGLRPLVWRGLPFVTSLAFFNSVANPVLYVLTCPDMLRKLRRSLRTVLESVLVDDSELGGAGSSRRRRTSSTARSASPLALCSRPEEPRGPARLLGWLLGSCAASPQTGPLNRALSSTSS

SEQ ID NO: 3145 - protein, 490 aa, Homo sapiens
IIAFTSAGSAVLLFLAMPMLTIGGILFLITNLQIGNLFGQHRSTIITLYNGAFDSSSAVFLIIKLLYEKGISLRASFIFISVCSTWHVARTFLLMPRGHIPYPLPPNYSYGLCPGNGTTKEEKETAEHENRELQSKEFLSAKEETPGAGQKQELRSFWSYAFSRRFAWHLVWLSVIQLWHYLFIGTLNSLLTNMAGGDMARVSTYTNAFAFTQFGVLCAPWNGLLMDRLKQKYQKEARKTGSFNIRGPHSLCFPNHHLPHATYRDKAKMKLPLLLALLFGAVSALHLRSETSTFETPLGAKTLPEDEETPEQEMEETPCRELEEEEEWGSGSEDASKKDGAVESISVPDMVDKNLTCPEEEDTVKVVGIPGCQTCRYLLVRSLQTFSQAWFTCRRCYRGNLVSIHNFNINYRIQCSVSALNQGQVWIGGRITGSGRCRRFQWVDGSRWNFAYWAAHQPWSRGGHCVALCTRGGHWRRAHCLRRLPFICSY

SEQ ID NO: 3146 - protein, 528 aa, Homo sapiens
IGEMWEAQFLGLLFLQPLWVAPVKPLQPGAEVPVVWAQEGAPAQLPCSPTIPLQDLSLLRRAGVTWQHQPDSGPPAAAPGHPLAPGPHPAAPSSWGPRPRRYTVLSVGPGGLRSGRLPLQPRVQLDERGRQRGDFSLWLRPARRADAGEYRAAVHLRDRALSCRLRLRLGQASMTASPPGSLRASDWVILNCSFSRPDRPASVHWFRNRGQGRVPVRESPHHHLAESFLFLPQVSPMDSGPWGCILTYRDGFNVSIMYNLTVLGLEPPTPLTVYAGAGSRVGLPCRLPAGVGTRSFLTAKWTPPGGGPDLLVTGDNGDFTLRLEDVSQAQAGTYTCHIHLQEQQLNATVTLAIITVTPKSFGSPGSLGKLLCEVTPVSGQERFVWSSLDTPSQRSFSGPWLEAQEAQLLSQPWQCQLYQGERLLGAAVYFTELSSPGAQRSGRAPGALPAGHLLLFLILGVLSLLLLVTGAFGFHLWRRQWRPRRFSALEQGIHPPQAQSKIEELEQEPEPEPEPEPEPEPEPEPEQL

SEQ ID NO: 3147 - protein, 190 aa, Homo sapiens
KMLGSRAVMLLLLLPWTAQGRAVPGGSSPAWTQCQQLSQKLCTLAWSAHPLVGHMDLREEGDEETTNDVPHIQCGDGCDPQGLRDNSQFCLQRIHQGLIFYEKLLGSDIFTGEPSLLPDSPVGQLHASLLGLSQLLQPEGHHWETQQIPSLSPSQPWQRLLLRFKILRSLQAFVAVAARVFAHGAATLSP

SEQ ID NO: 3148 - protein, 720 aa, Homo sapiens
LFPAAAVADPARQALLTVASSGPRSPALASAPAPGPQPSSQPRPPAAAMSKEERPGREEILECQVMWEPDSKKNTQMDRFRAAVGAACGLALESYDDLYHWSVESYSDFWAEFWKFSGIVFSRVYDEVVDTSKGIADVPEWFKGSRLNYAENLLRHKENDRVALYIAREGKEEIVKVTFEELRQEVALFAAAMRKMGVKKGDRVVGYLPNSEHAVEAMLAAASIGAIWSSTSPDFGVNGVLDRFSQIQPKLIFSVEAVVYNGKEHNHMEKLQQVVKGLPDLKKVVVIPYVSSRENIDLSKIPNSVFLDDFLATGTSEQAPQLEFEQLPFSHPLFIMFSSGTTGAPKCMVHSAGGTLIQHLKEHLLHGNMTSSDILLCYTTVGWMMWNWMVSLLATGAAMVLYDGSPLVPTPNVLWDLVDRIGITVLVTGAKWLSVLEEKAMKPVETHSLQMLHTILSTGSPLKAQSYEYVYRCIKSSILLGSISGGTDIISCFMGHNFSLPVYKGEIQARNLGMAVEAWNEEGKAVWGESGELVCTKPIPCQPTHFWNDENGNKYRKAYFSKFPGIWAHGDYCRINPKTGGIVMLGRSDGTLNPNGVRFGSSEIYNIVESFEEVEDSLCVPQYNKYREERVILFLKMASGHAFQPDLVKRIRDAIRMGLSARHVPSLILETKGIPYTLNGKKVEVAVKQIIAGKAVEQGGAFSNPETLDLYRDIPELQGF

SEQ ID NO: 3149 - protein, 536 aa, Homo sapiens
LCRLCRRPRLLPGAEPCEPRVGPRRADMGCSAKARWAAGALGVAGLLCAVLGAVMIVMVPSLIKQQVLKNVRIDPSSLSFNMWKEIPIPFYLSVYFFDVMNPSEILKGEKPQVRERGPYVYREFRHKSNITFNNNDTVSFLEYRTFQFQPSKSHGSESDYIVMPNILVLGAAVMMENKPMTLKLIMTLAFTTLGERAFMNRTVGEIMWGYKDPLVNLINKYFPGMFPFKDKFGLFAELNNSDSGLFTVFTGVQNISRIHLVDKWNGLSKVDFWHSDQCNMINGTSGQMWPPFMTPESSLEFYSPEACRSMKLMYKESGVFEGIPTYRFVAPKTLFANGSIYPPNEGFCPCLESGIQNVSTCRFSAPLFLSHPHFLNADPVLAEAVTGLHPNQEAHSLFLDIHPVTGIPMNCSVKLQLSLYMKSVAGIGQTGKIEPVVLPLLWFAESGAMEGETLHTFYTQLVLMPKVMHYAQYVLLALGCVLLLVPVICQIRSQEKCYLFWSSSKKGSKDKEAIQAYSESLMTSAPKGSVLQEAKL

SEQ ID NO: 3150 - protein, 227 aa, Homo sapiens
KMDWGTLQTILGGVNKHSTSIGKIWLTVLFIFRIMILVVAAKEVWGDEQADFVCNTLQPGCKNVCYDHYFPISHIRLWALQLIFVSTPALLVAMHVAYRRHEKKRKFIKGEIKSEFKDIEEIKTQKVRIEGSLWWTYTSSIFFRVIFEAAFMYVFYVMYDGFSMQRLVKCNAWPCPNTVDCFVSRPTEKTVFTVFMIAVSGICILLNVTELCYLLIRYCSGKSKKPV

SEQ ID NO: 3151 - protein, 240 aa, Homo sapiens
KVWITVIFIFRVMILVVAAQEVWGDEQEDFVCNTLQPGCKNVCYDHFFPVSHIRLWALQLIFVSTPALLVAMHVAYYRHETTRKFRRGEKRNDFKDIEDIKKQKVRIEGSLWWTYTSSIFFRIIFEAAFMYVFYFLYNGYHLPWVLKCGIDPCPNLVDCFISRPTEKTVFTIFMISASVICMLLNVAELCYLLLKVCFRRSKRAQTQKNHPNHALKESKQNEMNELISDSGQNAITGFPS

SEQ ID NO: 3152 - protein, 41 aa, Homo sapiens
LCSALMTIFTIKMGTGIMLINLVMPMTGTRTEVCFGLSVPG

SEQ ID NO: 3153 - protein, 542 aa, Homo sapiens
LILVIPGSKSPPFPAQLSTSAATSKIPTLIMLFPISMSATEFLLASVIFCLVFWVIRASRPQVPKGLKNPPGPWGWPLIGHMLTLGKNPHLALSRMSQQYGDVLQIRIGSTPVVVLSGLDTIRQALVRQGDDFKGRPDLYTFTLISNGQSMSFSPDSGPVWAARRRLAQNGLKSFSIASDPASSTSCYLEEHVSKEAEVLISTLQELMAGPGHFNPYRYVVVSVTNVICAICFGRRYDHNHQELLSLVNLNNNFGEVVGSGNPADFIPILRYLPNPSLNAFKDLNEKFYSFMQKMVKEHYKTFEKGHIRDITDSLIEHCQEKQLDENANVQLSDEKIINIVLDLFGAGFDTVTTAISWSLMYLVMNPRVQRKIQEELDTVIGRSRRPRLSDRSHLPYMEAFILETFRHSSFVPFTIPHSTTRDTSLKGFYIPKGRCVFVNQWQINHDQKLWVNPSEFLPERFLTPDGAIDKVLSEKVIIFGMGKRKCIGETIARWEVFLFLAILLQRVEFSVPLGVKVDMTPIYGLTMKHACCEHFQMQLRS

SEQ ID NO: 3154 - protein, 655 aa, Homo sapiens
IQTSAAPAPSQPSWDSRAHPTQRRDPGPPGPSADSTAHFPGPPHTSQPSGRSLPTRCRVPPALSRPGSPPPGPRGGPSQAPFEPRRRPGLGRTMRLRLRLLALLLLLLAPPARAPKPSAQDVSLGVDWLTRYGYLPPPHPAQAQLQSPEKLRDAIKVMQRFAGLPETGRMDPGTVATMRKPRCSLPDVLGVAGLVRRRRRYALSGSVWKKRTLTWRVRSFPQSSQLSQETVRVLMSYALMAWGMESGLTFHEVDSPQGQEPDILIDFARAFHQDSYPFDGLGGTLAHAFFPGEHPISGDTHFDDEETWTFGSKDGEGTDLFAVAVHEFGHALGLGHSSAPNSIMRPFYQGPVGDPDKYRLSQDDRDGLQQLYGKAPQTPYDKPTRKPLAPPPQPPASPTHSPSFPIPDRCEGNFDAIANIRGETFFFKGPWFWRLQPSGQLVSPRPARLHRFWEGLPAQVRVVQAAYARHRDGRILLFSGPQFWVFQDRQLEGGARPLTELGLPPGEEVDAVFSWPQNGKTYLVRGRQYWRYDEAAARPDPGYPRDLSLWEGAPPSPDDVTVSNAGDTYFFKGAHYWRFPKNSIKTEPDAPQPMGPNWLDCPAPSSGPRAPRPPKATPVSETCDCQCELNQAAGRWPAPIPLLLLPLLVGGVASR

SEQ ID NO: 3155 - protein, 23 aa, Homo sapiens
ISADSIICLLMFLLWLCLFSVLL

SEQ ID NO: 3156 - protein, 1465 aa, Homo sapiens
LLRCVLLLGCLHLGRPGAPGDAALPEPNVFLIFSHGLQGCLEAQGGQVRVTPACNTSLPAQRWKWVSRNRLFNLGTMQCLGTGWPGTNTTASLGMYECDREALNLRWHCRTLGDQLSLLLGARTSNISKPGTLERGDQTRSGQWRIYGSEEDLCALPYHEVYTIQGNSHGKPCTIPFKYDNQWFHGCTSTGREDGHLWCATTQDYGKDERWGFCPIKSNDCETFWDKDQLTDSCYQFNFQSTLSWREAWASCEQQGADLLSITEIHEQTYINGLLTGYSSTLWIGLNDLDTSGGWQWSDNSPLKYLNWESDQPDNPSEENCGVIRTESSGGWQNRDCSIALPYVCKKKPNATAEPTPPDRWANVKVECEPSWQPFQGHCYRLQAEKRSWQESKKACLRGGGDLVSIHSMAELEFITKQIKQEVEELWIGLNDLKLQMNFEWSDGSLVSFTHWHPFEPNNFRDSLEDCVTIWGPEGRWNDSPCNQSLPSICKKAGQLSQGAAEEDHGCRKGWTWHSPSCYWLGEDQVTYSEARRLCTDHGSQLVTITNRFEQAFVSSLIYNWEGEYFWTALQDLNSTGSFFWLSGDEVMYTHWNRDQPGYSRGGCVALATGSAMGLWEVKNCTSFRARYICRQSLGTPVTPELPGPDPTPSLTGSCPQGWASDTKLRYCYKVFSSERLQDKKSWVQAQGACQELGAQLLSLASYEEEHFVANMLNKIFGESEPEIHEQHWFWIGLNRRDPRGGQSWRWSDGVGFSYHNFDRSRHDDDDIRGCAVLDLASLQWVAMQCDTQLDWICKIPRGTDVREPDDSPQGRREWLRFQEAEYKFFEHHSTWAQAQRICTWFQAELTSVHSQAELDFLSHNLQKFSRAQEQHWWIGLHTSESDGRFRWTDGSIINFISWAPGKPRPVGKDKKCVYMTASREDWGDQRCLTALPYICKRSNVTKETQPPDLPTTALGGCPSDWIQFLNKCFQVQGQEPQSRVKWSEAQFSCEQQEAQLVTITNPLEQAFITASLPNVTFDLWIGLHASQRDFQWVEQEPLMYANWAPGEPSGPSPAPSGNKPTSCAVVLHSPSAHFTGRWDDRSCTEETHGFICQKGTDPSLSPSPAALPPAPGTELSYLNGTFRLLQKPLRWHDALLLCESRNASLAYVPDPYTQAFLTQAARGLRTPLWIGLAGEEGSRRYSWVSEEPLNYVGWQDGEPQQPGGCTYVDVDGAWRTTSCDTKLQGAVCGVSSGPPPPRRISYHGSCPQGLADSAWIPFREHCYSFHMELLLGHKEARQRCQRAGGAVLSILDEMENVFVWEHLQSYEGQSRGAWLGMNFNPKGGTLVWQDNTAVNYSNWGPPGLGPSMLSHNSCYWIQSNSGLWRPGACTNITMGVVCKLPRAEQSSFSPSALPENPAALVVVLMAVLLLLALLTAALILYRRRQSIERGAFEGARYSRSSSSPTEATEKNILVSDMEMNEQQE

SEQ ID NO: 3157 - protein, 730 aa, Homo sapiens
VPAEMLLPRSVSSERAPGVPEPEELWEAEMERLRGSGTPVRGLPYAMMDKRLIWQLREPAGVQTLRWQRWQRRRQTVERRLREAAQRLARGLGLWEGALYEIGGLFGTGIRSYFTFLRFLLLLNLLSLLLTASFVLLPLVWLRPPDPGPTLNLTLQCPGSRQSPPGVLRFHNQLWHVLTGRAFTNTYLFYGAYRVGPESSSVYSIRLAYLLSPLACLLLCFCGTLRRMVKGLPQKTLLGQGYQAPLSAKVFSSWDFCIRVQEAATIKKHEISNEFKVELEEGRRFQLMQQQTRAQTACRLLSYLRVNVLNGLLVVGAISAIFWATKYSQDNKEESLFLLLQYLPPGVIALVNFLGPLLFTFLVQLENYPPNTEVNLTLIWCVVLKLASLGMFSVSLGQTILCIGRDKSSCESYGYNVCDYQCWENSVGEELYKLSIFNFLLTVAFAFLVTLPRRLLVDRFSGRFWAWLEREEFLVPKNVLDIVAGQTVTWMGLFYCPLLPLLNSVFLFLTFYIKKYTLLKNSRASSRPFRASSSTFFFQLVLLLGLLLAAVPLGYVVSSIHSSWDCGLFTNYSAPWQVVPELVALGLPPIGQRALHYLGSHAFSFPLLIMLSLVLTVCVSQTQANARAIHRLRKQLVWQVQEKWHLVEDLSRLLPEPGPSDSPGPKYPASQASRPQSFCPGCPCPGSPGHQAPRPGPSVVDAAGLRSPCPGQHGAPASARRFRFPSGAEL

SEQ ID NO: 3158 - protein, 151 aa, Homo sapiens
LSPRAMGRVSGLVPSRFLTLLAHLVVVITLFWSRDSNIQACLPLTFTPEEYDKQDIHPLPLCRLVAALSVTLGLFAVELAGFLSGVSMFNSTQSLISIGAHCSASVALSFFIFERWECTTYWYIFVFCSALPAVTEMALFVTVFGLKKKPF

SEQ ID NO: 3159 - protein, 158 aa, Homo sapiens
TSPAPLRTPPRLDGWAHASHWGPGSRRWAPTLGPRGAANHTGLRPSYPAPSPSTSTFTSPPFHFFLYVFFLLETDSIHIEYNIFVYLTGRGRGGDRGGAGPAAWYSSPRGHWEGDPRPLPSPLCTVLWKRNTHLVSKEFILRRVCVCVCLFFLLNLFK

SEQ ID NO: 3160 - protein, 106 aa, Homo sapiens
IGPSCFQLLQRAFAAKASSSPLLRPSMATPTQTPTKAPEEPDPFYYDYNTVQTVGMTLATILFLLGILIVISKKVKCRKADSRSESPTCKSCKSELPSSAPGGGGV

SEQ ID NO: 3161 - protein, 118 aa, Homo sapiens
ILIPEFLKSGHPSNLTCSVPWVCEQGTPPIFSWMSAAPTSLGPRTLHSSVLTIIPRPQDHGTNLICQVTFPGAGVTTERTIQLSVSWKSGTVEEVVVLAVGVVAVKILLLCLCLIILR

SEQ ID NO: 3162 - protein, 387 aa, Homo sapiens
RAAAPPICLASPLATLPPTPHQADMLLLASTEPSSLCYVETVDIDGETNLKFRQALMVTHKELATIKKMASFQGTVTCEAPNSRMHHFVGCLEWNDKKYSLDIGNLLLRGCRIRNTDTCYGLVIYAGFDTKIMKNCGKIHLKRTKLDLLMNKLVVVIFISVVLVCLVLAFGFGFSVKEFKDHHYYLSGVHGSSVAAESFFVFWSFLILLSVTIPMSMFILSEFIYLGNSVFIDWDVQMYYKPQDVPAKARSTSLNDHLGQVEYIFSDKTGTLTQNILTFNKCCISGRVYGAAPTPELPAGSSIFKGLRVPENQSHVWPHAQHLRPNLNQGTVARWPGFLWRGPGKFFFFFEAESHSVYPGRNAVVQSWLTAISTSQVQAILLAQPPE

SEQ ID NO: 3163 - protein, 242 aa, Homo sapiens
LGMEESVVRPSVFVVDGQTDIPFTRLGRSHRRQSCSVARVGLGLLLLLMGAGLAVQGWFLLQLHWRLGEMVTRLPDGPAGSWEQLIQERRSHEVNPAAHLTGANSSLTGSGGPLLWETQLGLAFLRGLSYHDGALVVTKAGYYYIYSKVQLGGVGCPLGLASTITHGLYKRTPRYPEELELLVSQQSPCGRATSSSRVWWDSSFLGGVVHLEAGEKVVVRVLDERLVRLRDGTRSYFGAFMV

SEQ ID NO: 3164 - protein, 301 aa, Homo sapiens
LVRLRPGCTAGTWAMSPHPTALLGLVLCLAQTIHTQEEDLPRPSISAEPGTVIPLGSHVTFVCRGPVGVQTFRLERDSRSTYNDTEDVSQASPSESEARFRIDSVREGNAGLYRCIYYKPPKWSEQSDYLELLVKESSGGPDSPDTEPGSSAGPTQRPSDNSHNEHAPASQGLKAEHLYILIGVSVVFLFCLLLLVLFCLHRQNQIKQGPPRSKDEEQKPQQRPDLAVDVLERTADKATVNGLPEKDRETDTSALAAGSSQEVTYAQLDHWALTQRTARAVSPQSTKPMAESITYAAVARH

SEQ ID NO: 3165 - protein, 236 aa, Homo sapiens
IIKMSQSNRELVVDFLSYKLSQKGYSWSQFSDVEENRTEAPEGTESEMETPSAINGNPSWHLADSPAVNGATGHSSSLDAREVIPMAAVKQALREAGDEFELRYRRAFSDLTSQLHITPGTAYQSFEQVVNELFRDGVNWGRIVAFFSFGGALCVESVDKEMQVLVSRIAAWMATYLNDHLEPWIQENGGWDTFVELYGNNAAAESRKGQERFNRWFLTGMTVAGVVLLGSLFSRK

SEQ ID NO: 3166 - protein, 554 aa, Homo sapiens
VCGSRWAHAVVMSRESDVEAQQSHGSSACSQPHGSVTQSQGSSSQSQGISSSSTSTMPNSSQSSHSSSGTLSSLETVSTQELYSIPEDQEPEDQEPEEPTPAPWARLWALQDGFANLECVNDNYWFGRDKSCEYCFDEPLLKRTDKYRTYSKKHFRIFREVGPKNSYIAYIEDHSGNGTFVNTELVGKGKRRPLNNNSEIALSLSRNKVFVFFDLTVDDQSVYPKALRDEYIMSKTLGSGACGEVKLAFERKTCKKVAIKIISKRKFAIGSAREADPALNVETEIEILKKLNHPCIIKIKNFFDAEDYYIVLELMEGGELFDKVVGNKRLKEATCKLYFYQMLLAVQYLHENGIIHRDLKPENVLLSSQEEDCLIKITDFGHSKILGETSLMRTLCGTPTYLAPEVLVSVGTAGYNRAVDCWSLGVILFICLSGYPPFSEHRTQVSLKDQITSGKYNFIPEVWAEVSEKALDLVKKLLVVDPKARFTTEEALRHPWLQDEDMKRKFQDLLSEENESTALPQVLAQPSTSRKRPREGEAEGAETTKRPAVCAAVL

SEQ ID NO: 3167 - protein, 267 aa, Homo sapiens
KEARMLLAWVQAFLVSNMLLAEAYGSGGCFWDNGHLYREDQTSPAPGLRCLNWLDAQSGLASAPVSGAGNHSYCRNPDEDPRGPWCYVSGEAGVPEKRPCEDLRCPETTSQALPAFTTEIQEASEGPGADEVQVFAPANALPARSEAAAVQPVIGISQRVRMNSKEKKDLGTLGYVLGITMMVIIIAIGAGIILGYSYKRGKDLKEQHDQKVCEREMQRITLPLSAFTNPTCEIVDEKTVVVHTSQTPVDPQEGTTPLMGQAGTPGA

SEQ ID NO: 3168 - protein, 383 aa, Homo sapiens
VVSPSAMTQEPFREELAYDRMPTLERGRQDPASYAPDAKPSDLQLSKRLPPCFSHKTWVFSVLMGSCLLVTSGFSLYLGNVFPAEMDYLRCAAGSCIPSAIVSFTVSRRNANVIPNFQILFVSTFAVTTTCLIWFGCKLVLNPSAININFNLILLLLLELLMAATVIIAARSSEEDCKKKKGSMSDSANILDEVPFPARVLKSYSVVEVIAGISAVLGGIIALNVDDSVSGPHLSVTFFWILVACFPSAIASHVAAECPSKCLVEVLIAISSLTSPLLFTASGYLSFSIMRIVEMFKDYPPAIKPSYDVLLLLLLLVLLLQAGLNTGTAIQCVRFKVSARLQGASWDTQNGPQERLAGEVARSPLKEFDKEKAWRAVVVQMAQ

SEQ ID NO: 3169 - protein, 282 aa, Homo sapiens
VLGPLTRGPAARSIRSMLLLTRSPTAWHRLSQLKPRVLPGTLGGQALHLRSWLLSRQGPAETGGQGQPQGPGLRTRLLITGLFGAGLGGAWLALRAEKERLQQQKRTEALRQAAVGQGDFHLLDHRGRARCKADFRGQWVLMYFGFTHCPDICPDELEKLVQVVRQLEAEPGLPPVQPVFITVDPERDDVEAMARYVQDFHPRLLGLTGSTKQVAQASHSYRVYYNAGPKDEDQDYIVDHSIAIYLLNPDGLFTDYYGRSRSAEQISDSVRRHMAAFRSVLS

SEQ ID NO: 3170 - protein, 334 aa, Homo sapiens
IMPANYTCTRPDGDNTDFRYFIYAVTYTVILVPGLIGNILALWVFYGYMKETKRAVIFMINLAIADLLQVLSLPLRIFYYLNHDWPFGPGLCMFCFYLKYVNMYASIYFLVCISVRRFWFLMYPFRFHDCKQKYDLYISIAGWLIICLACVLFPLLRTSDDTSGNRTKCFVDLPTRNVNLAQSVVMMTIGELIGFVTPLLIVLYCTWKTVLSLQDKYPMAQDLGEKQKALKMILTCAGVFLICFAPYHFSFPLDFLVKSNEIKSCLARRVILIFHSVALCLASLNSCLDPVIYYFSTNEFRRRLSRQDLHDSIQLHAKSFVSNHTASTMTPELC

SEQ ID NO: 3171 - protein, 264 aa, Homo sapiens
LTPNRAPKKKMAISGVPVLGFFIIAVLMSAQESWAIKEEHVIIQAEFYLNPDQSGEFMFDFDGDEIFHVDMAKKETVWRLEEFGRFASFEAQGALANIAVDKANLEIMTKRSNYTPITNVPPEVTVLTNSPVELREPNVLICFIDKFTPPVVNVTWLRNGKPVTTGVSETVFLPREDHLFRKFHYLPFLPSTEDVYDCRVEHWGLDEPLLKHWEFDAPSPLPETTENVVCALGLTVGLVGIIIGTIFIIKGLRKSNAAERRGPL

SEQ ID NO: 3172 - protein, 513 aa, Homo sapiens
VGGTAEPGHEEVSWMNGWLSCQAQDEMLNLAFTVGSFLLSAITLPLGIVMDKYGPRKLRLLGSACFAVSCLLIAYGASKPNALSVLIFIALALNGFGGMCMTFTSLTLPNMFGDLRSTFIALMIGSYASSAVTFPGIKLIYDAGVSFIVVLVVWAGCSGLVFLNCFFNWPLEPFPGPEDMDYSVKIKFSWLGFDHKITGKQFYKQVTTVGRRLSVGSSMRSAKEQVALQEGHKLCLSTVDLEVKCQPDAAVAPSFMHSVFSPILLLSLVTMCVTQLRLIFYMGAMNNILKFLVSGDQKTVMATVGLYTSIFGVLQLLCLLTAPVIGYIMDWRLKECEDASEEPEEKDANQGEKKKKKRDRQIQKITNAMRAFAFTNLLLVGFGVTCLIPNLPLQILSFILHTIVRGFIHSAVGGLYAAVYPSTQFGSLTGLQSLISALFALLQQPLFLAMMGPLQGDPLWVNVGLLLLSLLGFCLPLYLICYRRQLERQLQQRQEDDKLFLKINGSSNQEAFV

SEQ ID NO: 3173 - protein, 352 aa, Homo sapiens
LAVLFSGALLGLLAAQGTGNDCPHKKSATLLPSFTVTPTVTESTGTTSHRTTKSHKTTTHRTTTTGTTSHGPTTATHNPTTTSHGNVTVHPTSNSTATSQGPSTATHSPATTSHGNATVHPTSNSTATSPGFTSSAHPEPPPPSPSPSPTSKETIGDYTWTNGSQPCVHLQAQIQIRVMYTTQGGGEAWGISVLNPNKTKVQGSCEGAHPHLLLSFPYGHLSFGFMQDLQQKVVYLSYMAVEYNVSFPHAAQWTFSAQNASLRDLQAPLGQSFSCSNSSIILSPAVHLDLLSLRLQAAQLPHTGVFGQSFSCPSDRSILLPLIIGLILLGLLALVLIAFCIIRRRPSAYQAL

SEQ ID NO: 3174 - protein, 979 aa, Homo sapiens
MNKNFERLRSSMSENRMSRRIVLSNMRMQFSFEGPEKVHSSYFEGKQVSVTNDGSQLGALVSPECGDLSEPTTLKSPAPSSDFADAITELEDAFSRQVKSLAESIDDALNCRSLHTEEAPALDAARARDTEPQTALHGMDHRKLDEMTASYSDVTLYIDEEELSPPLPLSQAGDRPSSTESDLRLRAGGAAPDYWALAHKEDKADTDTSCRSTPSLERQEQRLRVEHLPLLTIEPPSDSSVDLSDRSERGSLKRQSAYERSLGGQQGSPKHGPHSGAPKSLPREEPELRPRPPRPLDSHLAINGSANRQSKSESDYSDGDNDSINSTSNSNDTINCSSESSSRDSLREQTLSKQTYHKEARNSWDSPAFSNDVIRKRHYRIGLNLFNKKPEKGVQYLIERGFVPDTPVGVAHFLLQRKGLSRQMIGEFLGNRQKQFNRDVLDCVVDEMDFSTMELDEALRKFQAHIRVQGEAQKVERLIEAFSQRYCICNPGVVRQFRNPDTIFILAFAIILLNTDMYSPNVKPERKMKLEDFIKNLRGVDDGEDIPREMLMGIYERIRKRELKTNEDHVSQVQKVEKLIVGKKPIGSLHPGLGCVLSLPHRRLVCYCRLFEVPDPNKPQKLGLHQREIFLFNDLLVVTKIFQKKKNSVTYSFRQSFSLYGMQVLLFENQYYPNGIRLTSSVPGADIKVLINFNAPNPQDRKKFTDDLRESIAEVQEMEKHRIESELEKQKGVVRPSMSQCSSLKKESGNGTLSRACLDDSYASGEGLKRSALSSSLRDLSEAGKRGRRSSAGSLESNVEGSIISSPHMRRRATSTRECPSRPHQTMPNSSSLLGSLFGSKRGKPPPQAHLPSAPALPPPHPPVVLPHLQHSVAGHHLGPPEGLPQAAMHGHHTQYCHMQNPPPYHHHHHHHPPQHIQHAHQYHHGPHGGHPAYGAHAHGHPPLPSAHVGHTVHHHGQPPAPPPPTSSKAKPSGISTIV

SEQ ID NO: 3175 - protein, 562 aa, Homo sapiens
LRGRGASRLPGPKRRGPRVMAKGEGAESGSAAGLLPTSILQSTERPAQVKKEPKKKKQQLSVCNKLCYALGGAPYQVTGCALGFFLQIYLLDVAQKDEEVVFCFSSFQVGPFSASIILFVGRAWDAITDPLVGLCISKSPWTCLGRLMPWIIFSTPLAVIAYFLIWFVPDFPHGQTYWYLLFYCLFETMVTCFHVPYSALTMFISTEQTERDSATAYRMTVEVLGTVLGTAIQGQIVGQADTPCFQDLNSSTVASQSANHTHGTTSHRETQKAYLLAAGVIVCIYIICAVILILGVREQREPYEAQQSEPIAYFRGLRLVMSHGPYIKLITGFLFTSLAFMLVEGNFVLFCTYTLGFRNEFQNLLLAIMLSATLTIPIWQWFLTRFGKKTAVYVGISSAVPFLILVALMESNLIITYAVAVAAGISVAAAFLLPWSMLPDVIDDFHLKQPHFHGTEPIFFSFYVFFTKFASGVSLGISTLSLDFAGYQTRGCSQPERVKFTLNMLVTMAPIVLILLGLLLFKMYPIDEERRRQNKKALQALRDEASSSGCSETDSTELASIL

SEQ ID NO: 3176 - protein, 150 aa, Homo sapiens
VRKMAGNSILLAAVSILSACQQSYFALQVGKARLKYKVTPPAVTGSPEFERVFRAQQNCVEFYPIFIITLWMAGWYFNQVFATCLGLVYIYGRHLYFWGYSEAAKKRITGFRLSLGILALLTLLGALGIANSFLDEYLDLNIAKKLRRQF

SEQ ID NO: 3177 - protein, 485 aa, Homo sapiens
TQAQRPCHFCGLRSLLAQAPASLGKATMNRGVPFRHLLLVLQLALLPAATQGKKVVLGKKGDTVELTCTASQKKSIQFHWKNSNQIKILGNQGSFLTKGPSKLNDRADSRRSLWDQGNFPLIIKNLKIEDSDTYICEVEDQKEEVQLLVFGLTANSDTHLLQGQSLTLTLESPPGSSPSVQCRSPRGKNIQGGKTLSVSQLELQDSGTWTCTVLQNQKKVEFKIDIVVLAFQKASSIVYKKEGEQVEFSFPLAFTVEKLTGSGELWWQAERASSSKSWITFDLKNKEVSVKRVTQDPKLQMGKKLPLHLTLPQALPQYAGSGNLTLALEAKTGKLHQEVNLVVMRATQLQKNLTCEVWGPTSPKLMLSLKLENKEAKVSKREKAVWVLNPEAGMWQCLLSDSGQVLLESNIKVLPTWSTPVQPMALIVLGGVAGLLLFIGLGIFFCVRCRHRRRQAERMSQIKRLLSEKKTCQCPHRFQKTCSPI

SEQ ID NO: 3178 - protein, 353 aa, Homo sapiens
RLAVLFSGALLGLLAAQGTGNDCPHKKSATLLPSFTVTPTVTESTGTTSHRTTKSHKTTTHRTTTTGTTSHGPTTATHNPTTTSHGNVTVHPTSNSTATSQGPSTATHSPATTSHGNATVHPTSNSTATSPGFTSSAHPEPPPPSPSPSPTSKETIGDYTWTNGSQPCVHLQAQIQIRVMYTTQGGGEAWGISVLNPNKTKVQGSCEGAHPHLLLSFPYGHLSFGFMQDLQQKVVYLSYMAVEYNVSFPHAAQWTFSAQNASLRDLQAPLGQSFSCSNSSIILSPAVHLDLLSLRLQAAQLPHTGVFGQSFSCPSDRSILLPLIIGLILLGLLALVLIAFCIIRRRPSAYQAL

SEQ ID NO: 3179 - protein, 36 aa, Homo sapiens
LYHWKTCSPVTRYILGYFLTYWLLGLLLHCNFLPWT

SEQ ID NO: 3180 - protein, 390 aa, Homo sapiens
KSRGSMGCRRTREGPSKAMIFPWKCQSTQRDLWNIFKLWGWTMLCCDFLAHHGTDCWTYHYSEKPMNWQRARRFCRDNYTDLVAIQNKAEIEYLEKTLPFSRSYYWIGIRKIGGIWTWVGTNKSLTEEAENWGDGEPNNKKNKEDCVEIYIKRNKDAGKWNDDACHKLKAALCYTASCQPWSCSGHGECVEIINNYTCNCDVGYYGPQCQFVIQCEPLEAPELGTMDCTHPLGNFSFSSQCAFSCSEGTNLTGIEETTCGPFGNWSSPEPTCQVIQCEPLSAPDLGIMNCSHPLASFSFTSACTFICSEGTELIGKKKTICESSGIWSNPSPICQKLDKSFSMIKEGDYNPLFIPVAVMVTAFSGLAFIIWLARRLKKGKKSKRSMNDPY

SEQ ID NO: 3181 - protein, 385 aa, Homo sapiens
LPETSHKLNRESGLNKDAFPQYIHNMLSTSRSRFIRNTNESGEEVTTFFDYDYGAPCHKFDVKQIGAQLLPPLYSLVFIFGFVGNMLVVLILINCKKLKCLTDIYLLNLAISDLLFLITLPLWAHSAANEWVFGNAMCKLFTGLYHIGYFGGIFFIILLTIDRYLAIVHAVFALKARTVTFGVVTSVITWLVAVFASVPGIIFTKCQKEDSVYVCGPYFPRGWNNFHTIMRNILGLVLPLLIMVICYSGILKTLLRCRNEKKRHRAVRVIFTIMIVYFLFWTPYNIVILLNTFQEFFGLSNCESTSQLDQATQVTETLGMTHCCINPIIYAFVGEKFRRYLSVFFRKHITKRFCKQCPVFYRETVDGVTSTNTPSTGEQEVSAGL

SEQ ID NO: 3182 - protein, 900 aa, Homo sapiens
VRSGGSKDSVATMLSRLFRMHGLFVASHPWEVIVGTVTLTICMMSMNMFTGNNKICGWNYECPKFEEDVLSSDIIILTITRCIAILYIYFQFQNLRQLGSKYILGIAGLFTIFSSFVFSTVVIHFLDKELTGLNEALPFFLLLIDLSRASTLAKFALSSNSQDEVRENIARGMAILGPTFTLDALVECLVIGVGTMSGVRQLEIMCCFGCMSVLANYFVFMTFFPACVSLVLELSRESREGRPIWQLSHFARVLEEEENKPNPVTQRVKMIMSLGLVLVHAHSRWIADPSPQNSTADTSKVSLGLDENVSKRIEPSVSLWQFYLSKMISMDIEQVITLSLALLLAVKYIFFEQTETESTLSLKNPITSPVVTQKKVPDNCCRREPMLVRNNQKCDSVEEETGINRERKVEVIKPLVAETDTPNRATFVVGNSSLLDTSSVLVTQEPEIELPREPRPNEECLQILGNAEKGAKFLSDAEIIQLVNAKHIPAYKLETLMETHERGVSIRRQLLSKKLSEPSSLQYLPYRDYNYSLVMGACCENVIGYMPIPVGVAGPLCLDEKEFQVPMATTEGCLVASTNRGCRAIGLGGGASSRVLADGMTRGPVVRLPRACDSAEVKAWLETSEGFAVIKEAFDSTSRFARLQKLHTSIAGRNLYIRFQSRSGDAMGMNMISKGTEKALSKLHEYFPEMQILAVSGNYCTDKKPAAINWIEGRGKSVVCEAVIPAKVVREVLKTTTEAMIEVNINKNLVGSAMAGSIGGYNAHAANIVTAIYIACGQDAAQNVGSSNCITLMEASGPTNEDLYISCTMPSIEIGTVGGGTNLLPQQACLQMLGVQGACKDNPGENARQLARIVCGTVMAGELSLMAALAAGHLVKSHMIHNRSKINLQDLQGACTKKTA

SEQ ID NO: 3183 - protein, 468 aa, Homo sapiens
VGTLRSACREDRLPDPQKSGERVKRSSPRRGSLPEQRRAEPGTMGPRRLLLVAACFSLCGPLLSARTRARRPESKATNATLDPRSFLLRNPNDKYEPFWEDEEKNESGLTEYRLVSINKSSPLQKQLPAFISEDASGYLTSSWLTLFVPSVYTGVFVVSLPLNIMAIVVFILKMKVKKPAVVYMLHLATADVLFVSVLPFKISYYFSGSDWQFGSELCRFVTAAFYCNMYASILLMTVISIDRFLAVVYPMQSLSWRTLGRASFTCLAIWALAIAGVVPLLLKEQTIQVPGLNITTCHDVLNETLLEGYYAYYFSAFSAVFFFVPLIISTVCYVSIIRCLSSSAVANRSKKSRALFLSAAVFCIFIICFGPTNVLLIAHYSFLSHTSTTEAAYFAYLLCVCVSSISCCIDPLIYYYASSECQRYVYSILCCKESSDPSSYNSSGQLMASKMDTCSSNLNNSIYKKLLT

SEQ ID NO: 3184 - protein, 311 aa, Homo sapiens
VSSDFSSASSMFSHLPFDCVLLLLLLLLTRSSEVEYRAEVGQNAYLPCFYTPAAPGNLVPVCWGKGACPVFECGNVVLRTDERDVNYWTSRYWLNGDFRKGDVSLTIENVTLADSGIYCCRIQIPGIMNDEKFNLKLVIKPAKVTPAPTRQRDFTAAFPRMLTTRGHGPAETQTLGSLPDINLTQISTLANELRDSRLANDLRDSGATIRIGIYIGAGICAGLALALIFGALIFKWYSHSKEKIQNLSLISLANLPPSGLANAVAEGIRSEENIYTIEENVYEVEEPNEYYCYVSSRQQPSQPLGCRFAMP

SEQ ID NO: 3185 - protein, 36 aa, Homo sapiens
MKMLFTLEPLMIDLMFLLFITMLNAIVLYLELSITH

SEQ ID NO: 3186 - protein, 204 aa, Homo sapiens
KCCGNRQAMNQADPRLRAVCLWTLTSAAMSRGDNCTDLLALGIPSITQAWGLWVLLGAVTLLFLISLAAHLSQWTRGRSRSHPGQGRSGESVEEVPLYGNLHYLQTGRLSQDPEPDQQDPTLGGPARAAEEVMCYTSLQLRPPQGRIPGPGTPVKYSEVVLDSEPKSQASGPEPELYASVCAQTRRARASFPDQAYANSQPAAS

SEQ ID NO: 3187 - protein, 405 aa, Homo sapiens
LCSLCAQSPTMSANATLKPLCPILEQMSRLQSHSNTSIRYIDHAAVLLHGLASLLGLVENGVILFVVGCRMRQTVVTTWVLHLALSDLLASASLPFFTYFLAVGHSWELGTTFCKLHSSIFFLNMFASGFLLSAISLDRCLQVVRPVWAQNHRTVAAAHKVCLVLWALAVLNTVPYFVFRDTISRLDGRIMCYYNVLLLNPGPDRDATCNSRQVALAVSKFLLAFLVPLAIIASSHAAVSLRLQHRGRRRPGRFVRLVAAVVAAFALCWGPYHVFSLLEARAHANPGLRPLVWRGLPFVTSLAFFNSVANPVLYVLTCPDMLRKLRRSLRTVLESVLVDDSELGGAGSSRRRRTSSTARSASPLALCSRPEEPRGPARLLGWLLGSCAASPQTGPLNRALSSTSS

SEQ ID NO: 3188 - protein, 35 aa, Homo sapiens
LDEFQILLACFLILICLYTYTLCTKCRVIIMLTWT

SEQ ID NO: 3189 - protein, 55 aa, Homo sapiens
RGAASLLRAPLQMEEAILVPCVLGLLLLPILAMLMALCVHCHRLPGSYDSTSSDR

SEQ ID NO: 3190 - protein, 798 aa, Homo sapiens
VPARPGPGRCVALSGAPPAGSPRGKGARPGGGLASDAPGRARSRRGSRFSSGEESTSHLIMSRRSQRLTRYSQGDDDGSSSSGGSSVAGSQSTLFKDSPLRTLKRKSSNMKRLSPAPQLGPSSDAHTSYYSESLVHESWFPPRSSLEELHGDANWGEDLRVRRRRGTGGSESSRASGLVGRKATEDFLGSSSGYSSEDDYVEDSEGRGSKVTETEPVSSFPAGYSDVDQQSSSSRLRSAVSRAGSLLWMVATSPGRLFRLLYWWAGTTWYRLTTAASLLDVFVLTRRFSSLKTFLWFLLPLLLLTCLTYGAWYFYPYGLQTFHPALVSWWAAKDSRRPDEGWEARDSSPHFQAEQRVMSRVHSLERRLEALAAEFSSNWQKEAMRLERLELRQGAPGQGGGGGLSHEDTLALLEGLVSRREAALKEDFRRETAARIQEELSALRAEHQQDSEDLFKKIVRASQESEARIQQLKSEWQSMTQESFQESSVKELRRLEDQLAGLQQELAALALKQSSVAEEVGLLPQQIQAVRDDVESQFPAWISQFLARGGGGRVGLLQREEMQAQLRELESKILTHVAEMQGKSAREAAASLSLTLQKEGVIGVTEEQVHHIVKQALQRYSEDRIGLADYALESGGASVISTRCSETYETKTALLSLFGIPLWYHSQSPRVILQPDVHPGNCWAFQGPQGFAVVRLSARIRPTAVTLEHVPKALSPNSTISSAPKDFAIFGFDEDLQQEGTLLGKFTYDQDGEPIQTFHFQAPTMATYQVVELRILTNWGHPEYTCIYRFRVHGEPAH

SEQ ID NO: 3191 - protein, 235 aa, Homo sapiens
MGAFRALCGLALLCALSLGQRPTGGPGCGPGRLLLGTGTDARCCRVHTTRCCRDYPGEECCSEWDCMCVQPEFHCGDPCCTTCRHHPCPPGQGVQSQGKFSFGFQCIDCASGTFSGGHEGHCKPWTDCTQFGFLTVFPGNKTHNAVCVPGSPPAEPLGWLTVVLLAVAACVLLLTSAQLGLHIWQLRSQCMWPRETQLLLEVPPSTEDARSCQFPEEERGERSAEEKGRLGDLWV

SEQ ID NO: 3192 - protein, 553 aa, Homo sapiens [sequence omitted]

SEQ ID NO: 3193 - protein, 612 aa, Homo sapiens
MEKIRNVFHCEAHRILYICESQFLRNFIRKEFLRGNGLAAGKMNISIDLDTNYAELVLNVGRVTLGENNRKKMKDCQLRKQQNENVSRAVCALLNSGGGVIKAEVENKGYSYKKDGIGLDLENSFSNMLPFVPNFLDFMQNGNYFHIFVKSWSLETSGPQIATLSSSLYKRDVTSAKVMNASAALEFLKDMEKTGGRAYLRPEFPAKRACVDVQEESNMEALAADFFNRTELGYKEKLTFTESTHVEIKNFSTEKLLQRITEILPQYVSAFANTDGGYLFVGLNEDKEVIGFKAEKSYLTKLEEVTKNSIGKLPVHHFCVEKGTINYLCKFLGVYDKGRLCGYVYALRVERFCCAVFAKKPDSWHVKDNRVKQLTEKEWIQFMVDSEPVCEELPSPASTSSPVSQSYPLREYINFKIQPLRYHLPGLSEKITCAPKTFCRNLFSQHEGLKQLICEEMGSVNKGSLIFSRSWSLDLGLQENHKVLCDALLISQDKPPVLYTFHMVQDEEFKDYSTQTAQTLKQKLAKIGGYTKKVCVMTKIFYLSPEGKTSCQYDLNSQVIYPESYYWTTAQTMKDLEKALSNILPKENQIFLFVCLFRFCLFVCWFVCFFLR

SEQ ID NO: 3194 - protein, 183 aa, Homo sapiens [sequence omitted]

SEQ ID NO: 3195 - protein, 224 aa, Homo sapiens
MAFWTQLMLLLWKNFMYRRRQPVQLLVELLWPLFLFFILVAVRHSHPPLEHHECHFPNKPLPSAGTVPWLQGLICNVNNTCFPQLTPGEEPGRLSNFNDSLVSRLLADARTVLGGASAHRTLAGLGKLIATLRAARSTAQPQPTKQSPLEPPMLDVAELLTSLLRTVGCRGGTALTSWDTALGMSWHCPTPGQGPPVPGIQAVPGLCGDAACPSGPPDRVCLTQ

SEQ ID NO: 3196 - protein, 221 aa, Homo sapiens
MLLAEAYGSGGCFWDNGHLYREDQTSPAPGLRCLNWLDAQSGLASAPVSGAGNHSYCRNPDEDPRGPWCYVSGEAGVPEKRPCEDLRCPETTSQALPAFTTEIQEASEGPGADEVQVFAPANALPARSEAAAVQPVIGISQRVRMNSKEKKDLGTLGYVLGITMMVIIIAIGAGIILGYSYKRSVASLLGPLRRRGGRYTKSNFVAFLPKRKQDVENQLKM

SEQ ID NO: 3197 - protein, 104 aa, Homo sapiens
LLLTILVCLAHTCFGCFKHLSPLNYKTEEPASDKGSEAEAHMPPPFTPYVPRILNGLASERTALSPQQQQQQTYGAIHNISGTIPGQCLAQSATGSVAAAPQEA

SEQ ID NO: 3198 - protein, 378 aa, Homo sapiens
LNRESGLNKDAFPQYIHNMLSTSRSRFIRNTNESGEEVTTFFDYDYGAPCHKFDVKQIGAQLLPPLYSLVFIFGFVGNMLVVLILINCKKLKCLTDIYLLNLAISDLLFLITLPLWAHSAANEWVFGNAMCKLFTGLYHIGYFGGIFFIILLTIDRYLAIVHAVFALKARTVTFGVVTSVITWLVAVFASVPGIIFTKCQKEDSVYVCGPYFPRGWNNFHTIMRNILGLVLPLLIMVICYSGILKTLLRCRNEKKRHRAVRVIFTIMIVYFLFWTPYNIVILLNTFQEFFGLSNCESTSQLDQATQVTETLGMTHCCINPIIYAFVGEKFRRYLSVFFRKHITKRFCKQCPVFYRETVDGVTSTNTPSTGEQEVSAGL

SEQ ID NO: 3199 - protein, 228 aa, Homo sapiens [sequence omitted]

SEQ ID NO: 3200 - protein, 37 aa, Homo sapiens
KRWIWLRKQMFPQLLAFLDFFFKNFLNLLSLAVYIFT

SEQ ID NO: 3201 - protein, 125 aa, Homo sapiens
KKSNTILGSQEGNTMKTNDTYMKFSWLTVPEKSLDKEHRCIVRHENNKNGVDQEIIFPPIKTDVITMDPKDNCSKDANDTLLLQLTNTSAYYMYLLLLLKSVVYFAIITCCLLRRTAFCCNGEKS

SEQ ID NO: 3202 - protein, 885 aa, Homo sapiens
ISASTQPASAGRAARHCGAMSGARGEGPEAGAGGAGGRAAPENPGGVLSVELPGLLAQLARSFALLLPVYALGYLGLSFSWVLLALALLAWCRRSRGLKALRLCRALALLEDEERVVRLGVRACDLPAWVHFPDTERAEWLNKTVKHMWPFICQFIEKLFRETIEPAVRGANTHLSTFSFTKVDVGQQPLRINGVKVYTENVDKRQIILDLQISFVGNCEIDLEIKRYFCRAGVKSIQIHGTMRVILEPLIGDMPLVGALSIFFLRKPLLEINWTGLTNLLDVPGLNGLSDTIILDIISNYLVLPNRITVPLVSEVQIAQLRFPVPKGVLRIHFIEAQDLQGKDTYLKGLVKGKSDPYGIIRVGNQIFQSRVIKENLSPKWNEVYEALVYEHPGQELEIELFDEDPDKDDFLGSLMIDLIEVEKERLLDEWFTLDEVPKGKLHLRLEWLTLMPNASNLDKVLTDIKADKDQANDGLSSALLILYLDSARNLPSNPLEFNPDVLKKTAVQRALKSGKKISSNPNPVVQMSVGHKAQESKIRYKTNEPVWEENFTFFIHNPKRQDLEVEVRDEQHQCSLGNLKVPLSQLLTSEDMTVSQRFQLSNSGPNSTIKMKIALRVLHLEKRERPPDHQHSAQVKRPSVSKEGRKTSIKSHMSGSPGPGGSNTAPSTPVIGGSDKPGMEEKAQPPEAGPQGLHDLGRSSSSLLASPGHISVKEPTPSIASDISLPIATQELRQRLRQLENGTTLGQSPLGQIQLTIRHSSQRNKLIVVVHACRNLIAFSEDGSDPYVRMYLLPDKRRSGRRKTHVSKKTLNPVFDQSFDFSVSLPEVQRRTLDVAVKNSGGFLSKDKGLLGKVLVALASEELAKGWTQWYDLTEDGTRPQAMT

SEQ ID NO: 3203 - protein, 854 aa, Homo sapiens
LSCPGSARAWGEARRARTRSMAVEDEGLRVFQSVKIKIGEAKNLPSYPGPSKMRDCYCTVNLDQEEVFRTKIVEKSLCPFYGEDFYCEIPRSFRHLSFYIFDRDVFRRDSIIGKVAIQKEDLQKYHNRDTWFQLQHVDADSEVQGKVHLELRLSEVITDTGVVCHKLATRIVECQGLPIVNGQCDPYATVTLAGPFRSEAKKTKVKRKTNNPQFDEVFYFEVTRPCSYSKKSHFDFEEEDVDKLEIRVDLWNASNLKFGDEFLGELRIPLKVLRQSSSYEAWYFLQPRDNGSKSLKPDDLGSLRLNVVYTEDHVFSSDYYSPLRDLLLKSADVEPVSASAAHILGEVCREKQEAAVPLVRLFLHYGRVVPFISAIASAEVKRTQDPNTIFRGNSLASKCIDETMKLAGMHYLHVTLKPAIEEICQSHKPCEIDPVKLKDGENLENNMENLRQYVDRVFHAITESGVSCPTVMCDIFFSLREAAAKRFQDDPDVRYTAVSSFIFLRFFAPAILSPNLFQLTPHHTDPQTSRTLTLISKTVQTLGSLSKSKSASFKESYMATFYEFFNEQKYADAVKNFLDLISSSGRRDPKSVEQPIVLKEGFMIKRAQGRKRFGMKNFKKRWFRLTNHEFTYHKSKGDQPLYSIPIENILAVEKLEEESFKMKNMFQVIQPERALYIQANNCVEAKDWIDILTKVSQCNQKRLTVYHPSAYLSGHWLCCRAPSDSAPGCSPCTGGLPANIQLDIDGDRETERIYSLFNLYMSKLEKMQEACGSKSVYDGPEQEEYSTFVIDDPQETYKTLKQVIAGVGALEQEHAQYKRDKFKKTKYGSQEHPIGDKSFQNYIRQQSETSTHSI

SEQ ID NO: 3204 - protein, 323 aa, Homo sapiens
IPAAAACLPECAPAPAAGDMLQKPRNRGRSGGQAERDRDWSHSGNPGASRAGEDARVLRDGFAEEAPSTSRGPGGSQGSQGPSPQGARRAQAAPAVGPRSQKQLELKVSELVQFLLIKDQKKIPIKRADILKHVIGDYKDIFPDLFKRAAERLQYVFGYKLVELEPKSNTYILINTLEPVEEDAEMRGDQGTPTTGLLMIVLGLIFMKGNTIKETEAWDFLRRLGVYPTKKHLIFGDPKKLITEDFVRQRYLEYRRIPHTDPVDYEFQWGPRTNLETSKMKVLKFVAKVHNQDPKDWPAQYCEALADEENRARPQPSGPAPSS

SEQ ID NO: 3205 - protein, 55 aa, Homo sapiens
VTGARERYGPNELPSEEGKSLWELVLEQFEDLLVRILLLAALVSFVSRALPAILW

SEQ ID NO: 3206 - protein, 145 aa, Homo sapiens
LSPRAMGRVSGLVPSRFLTLLAHLVVVITLFWSRDSNIQACLPLTFTPEEYDKQDIQLVAALSVTLGLFAVELAGFLSGVSMFNSTQSLISIGAHCSASVALSFFIFERWECTTYWYIFVFCSALPAVTEMALFVTVFGLKKKPF

SEQ ID NO: 3207 - protein, 44 aa, Homo sapiens
IVGILFAVFLILLLMYRMKKKDEGSYDLGKKPIYKKAPTNEFYA

SEQ ID NO: 3208 - protein, 69 aa, Homo sapiens
IALGTLLALVCVFVICRRYLVMQRLFPRIPHMKDPIGDSFQNDKLVVWEAGKAGLEECLVTEVQVVQKT

SEQ ID NO: 3209 - protein, 129 aa, Homo sapiens
IQSSGQPVPLVVESCIRFINLNGLQHEGIFRVSGAQLRVSEIRDAFERGEDPLVEGCTAHDLDSVAGVLKLYFRSLEPPLFPPDLFGELLASSELEATAERVEHVSRLLWRLPAPVLVVLRYLFTFLNQ

SEQ ID NO: 3210 - protein, 178 aa, Homo sapiens
MGPWSRVRVAKCQMLVTCFFILLLGLSVATMVTLTYFGAHFAVIRRASLEKNPYQAVHQWGTQQRLIQHPESGSEGQSLLGPLRAFSAGLSLVGLLTLGAVLSAAATVREAQGLMAGGFLCFSLAFCAQVQVVFWRLHSPTQVEDAMLDTYDLVYEQAMKVSVLWEEVSFQPSGEHRG

SEQ ID NO: 3211 - protein, 282 aa, Homo sapiens
MQPADSGIYICDVNNPPDFLGQNQGILNVSVLVKPSKPLCSVQGRPETGHTISLSCLSALGTPSPVYYWHKLEGRDIVPVKENFNPTTGILVIGNLTNFEQGYYQCTAINRLGNSSCEIDLTSSHPEVGIIVGALIGSLVGAAIIISVVCFARNKAKAKAKERNSKTIAELEPMTKINPRGESEAMPREDATQLEVTLPSSIHETGPDTIQEPDYEPKPTQEPAPEPAPGSEPMAVPDLDIELELEPETQSELEPEPEPEPESEPGVVVEPLSEDEKGVVKA

SEQ ID NO: 3212 - protein, 328 aa, Homo sapiens
ICDSTMGLSNILFVMAFLLSGAAPLKIQAYFNETADLPCQFANSQNQSLSELVVFWQDQENLVLNEVYLGKEKFDSVHSKYMGRTSFDSDSWTLRLHNLQIKDKGLYQCIIHHKKPTGMIRIHQMNSELSVLANFSQPEIVPISNITENVYINLTCSSIHGYPEPKKMSVLLRTKNSTIEYDGVMQKSQDNVTELYDVSISLSVSFPDVTSNMTIFCILETDKTRLLSSPFSIELEDPQPPPDHIPWITAVLPTVIICVMVFCLILWKWKKKKRPRNSYKCGTNTMEREESEQTKKREKIHIPERSDEAQRVFKSSKTSSCDKSDTCF

SEQ ID NO: 3213 - protein, 266 aa, Homo sapiens
LVLAGLSHFCSGVIHVTKEVKEVATLSCGHNVSVEELAQTRIYWQKEKKMVLTMMSGDMNIWPEYKNRTIFDITNNLSIVILALRPSDEGTYECVVLKYEKDAFKREHLAEVTLSVKADFPTPSISDFEIPTSNIRRIICSTSGGFPEPHLSWLENGEELNAINTTVSQDPETELYAVSSKLDFNMTTNHSFMCLIKYGHLRVNQTFNWNTTKQEHFPDNLLPSWAITLISVNGIFVICCLTYCFAPRCRERRRNERLRRESVRPV

SEQ ID NO: 3214 - protein, 1157 aa, Homo sapiens
RTTDEFKMWFCAKIRVLSLETYPVSSPKSMSNKLSNGHAVCLIENPTEENRHRISKYSQTESQQIRYFTHHSVKYFWNDTIHNFDFLKKLLYGVNEIAVKVPSVFKLLIKEVLNPFYIFQLFSVILWSTDEYYYYALAIVVMSIVSIVSSLYSIRKQYVMLHDMVATHSTVRVSVCRVNEEIEEIFSTDLVPGDVMVIPLNGTIMPCDAVLINGTCIVNESMLTGESVPVTKTNLPNPSVDVKGIGDELYNPETHKRHTLFCGTTVIQTRFYTGELVKAIVVRTGFSTSKGQLVRSILYPKPTDFKLYRDAYLFLLCLVAVAGIGFIYTIINSILNEVQVGVIIIESLDIITITVPPALPAAMTAGIVYAQRRLKKIGIFCISPQRINICGQLNLVCFDKTGTLTEDGLDLWGIQRVENARFLSPEENVCNEMLVKSQFVACMATCHSLTKIEGVLSGDPLDLKMFEAIGWILEEATEEETALHNRIMPTVVRPPKQLLPESTPAGNQEMELFELPATYEIGIVRQFPFSSALQRMSVVARVLGDRKMDAYMKGAPEAIAGLCKPETVPVDFQNVLEDFTKQGFRVIALAHRKLESKLTWHKVQNISRDAIENNMDFMGLIIMQNKLKQETPAVLEDLHKANIRTVMVTGDSMLTAVSVARDCGMILPQDKVIIAEALPPKDGKVAKINWHYADSLTQCSHPSAIDPEAIPVKLVHDSLEDLQMTRYHFAMNGKSFSVILEHFQDLVPKLMLHGTVFARMAPDQKTQLIEALQNVDYFVGMCGDGANDCGALKRAHGGISLSELEASVASPFTSKTPSISCVPNLIREGRAALITSFCVFKFMALYSIIQYFSVTLLYSILSNLGDFQFLFIDLAIILVVVFTMSLNPAWKELVAQRPPSGLISGALLFSVLSQIIICIGFQSLGFFWVKQQPWYEVWHPKSDACNTTGSGFWNSSHVDNETELDEHNIQNYENTTVFFISSFQYLIVAIAFSKGKPFRQPCYKNYFFVFSVIFLYIFILFIMLYPVASVDQVLQIVCVPYQWRVTMLIIVLVNAFVSITVENFFLDMVLWKVVFNRDKQGEYRFSTTQPPQESVDRWGKCCLPWALGCRKKTPKAKYMYLAQELLVDPEWPPKPQTTTEAKALVKENGSCQIITIT

SEQ ID NO: 3215 - protein, 256 aa, Homo sapiens
KKMAISGVPVLGFFIIAVLMSAQESWAIKEEHVIIQAEFYLNPDQSGEFMFDFDGDEIFHVDMAKKETVWRLEEFGRFASFEAQGALANIAVDKANLEIMTKRSNYTPITNVPPEVTVLTNSPVELREPNVLICFIDKFTPPVVNVTWLRNGKPVTTGVSETVFLPREDHLFRKFHYLPFLPSTEDVYDCRVEHWGLDEPLLKHWEFDAPSPLPETTENVVCALGLTVGLVGIIIGTIFIIKGLRKSNAAERRGPL

SEQ ID NO: 3216 - protein, 39 aa, Homo sapiens
MEVMKMLFTLEPLMIDLMFLLFITMLNAIVLYLELSITH

SEQ ID NO: 3217 - protein, 496 aa, Homo sapiens
IRLFEKQRARKTQAQRPCHFCGLRSLLAQAPASLGKATMNRGVPFRHLLLVLQLALLPAATQGKKVVLGKKGDTVELTCTASQKKSIQFHWKNSNQIKILGNQGSFLTKGPSKLNDRADSRRSLWDQGNFPLIIKNLKIEDSDTYICEVEDQKEEVQLLVFGLTANSDTHLLQGQSLTLTLESPPGSSPSVQCRSPRGKNIQGGKTLSVSQLELQDSGTWTCTVLQNQKKVEFKIDIVVLAFQKASSIVYKKEGEQVEFSFPLAFTVEKLTGSGELWWQAERASSSKSWITFDLKNKEVSVKRVTQDPKLQMGKKLPLHLTLPQALPQYAGSGNLTLALEAKTGKLHQEVNLVVMRATQLQKNLTCEVWGPTSPKLMLSLKLENKEAKVSKREKAVWVLNPEAGMWQCLLSDSGQVLLESNIKVLPTWSTPVQPMALIVLGGVAGLLLFIGLGIFFCVRCRHRRRQAERMSQIKRLLSEKKTCQCPHRFQKTCSPI

SEQ ID NO: 3218 - protein, 1016 aa, Homo sapiens
IGICPGPLYGLVWAAGSFPSLPCCTPLLGDPLYPSRKVESAGWRLPGEANAWPCPAPRRTMTLLLLPLLLASLLASCSCNKANKHKPWIEAEYQGIVMENDNTVLLNPPLFALDKDAPLRYAGEICGFRLHGSGVPFEAVILDKATGEGLIRAKEPVDCEAQKEHTFTIQAYDCGEGPDGANTKKSHKATVHVRVNDVNEFAPVFVERLYRAAVTEGKLYDRILRVEAIDGDCSPQYSQICYYEILTPNTPFLIDNDGNIENTEKLQYSGERLYKFTVTAYDCGKKRAADDAEVEIQVKPTCKPSWQGWNKRIEYAPGAGSLALFPGIRLETCDEPLWNIQATIELQTSHVAKGCDRDNYSERALRKLCGAATGEVDLLPMPGPNANWTAGLSVHYSQDSSLIYWFNGTQAVQVPLGGPSGLGSGPQDSLSDHFTLSFWMKHGVTPNKGKKEEETIVCNTVQNEDGFSHYSLTVHGCRIAFLYWPLLESARPVKFLWKLEQVCDDEWHHYALNLEFPTVTLYTDGISFDPALIHDNGLIHPPRREPALMIGACWTEEKNKEKEKGDNSTDTTQGDPLSIHHYFHGYLAGFSVRSGRLESREVIECLYACREGLDYRDFESLGKGMKVHVNPSQSLLTLEGDDVETFNHALQHVAYMNTLRFATPGVRPLRLTTAVKCFSEESCVSIPEVEGYVVVLQPDAPQILLSGTAHFARPAVDFEGTNGVPLFPDLQITCSISHQVEAKKDESWQGTVTDTRMSDEIVHNLDGCEISLVGDDLDPERESLLLDTTSLQQRGLELTNTSAYLTIAGVESITVYEEILRQARYRLRHGAALYTRKFRLSCSEMNGRYSSNEFIVEVNVLHSMNRVAHPSHVLSSQQFLHRGHQPPPEMAGHSLASSHRNSMIPSAATLIIVVCVGFLVLMVVLGLVRIHSLHRRVSGAGGPPGASSDPKDPDLFWDDSALTIIVNPMESYQNRQSCVTGAVGGQQEDEDSSDSEVADSPSSDERRIIETPPHRY

SEQ ID NO: 3219 - protein, 85 aa, Homo sapiens
MSAAPTSLGPRTLHSSVLTIIPRPQDHGTNLICQVTFPGAGVTTERTIQLSVSWKSGTVEEVVVLAVGVVAVKILLLCLCLIILR

SEQ ID NO: 3220 - protein, 125 aa, Homo sapiens
KKYKTNVIRTAKYNFYSFLPLNLYEQFHRVSNLFFLIIIILQSIPDISTLPWFSLSTPMVCLLFIRATRDLVDDMGRHKSDRAINNRPCQILMGKSPTGTGPAFIRRLAGTRTEAEALMANPCRA

SEQ ID NO: 3221 - protein, 240 aa, Homo sapiens
IHTQPSAHKDMTTNAGPLHPYWPQHLRLDNFVPNDRPTWHILAGLFSVTGVLVVTTWLLSGRAAVVPLGTWRRLSLCWFAVCGFIHLVIEGWFVLYYEDLLGDQAFLSQLWKEYAKGDSRYILGDNFTVCMETITACLWGPLSLWVVIAFLRQHPLRFILQLVVSVGQIYGDVLYFLTEHRDGFQHGELGHPLYFWFYFVFMNALWLVLPGVLVLDAVKHLTHAQSTLDAKATKAKSKKN

SEQ ID NO: 3222 - protein, 454 aa, Homo sapiens
LPQGVPQQCLAAWAGTLSLKQRSHFFWAHEAAVPCSAEHGGAMPLQLLLLLILLGPGNSLQLWDTWADEAEKALGPLLARDRRQATEYEYLDYDFLPETEPPEMLRNSTDTTPLTGPGTPESTTVEPAARRSTGLDAGGAVTELTTELANMGNLSTDSAAMEIQTTQPAATEAQTTQPVPTEAQTTPLAATEAQTTRLTATEAQTTPLAATEAQTTPPAATEAQTTQPTGLEAQTTAPAAMEAQTTAPAAMEAQTTPPAAMEAQTTQTTAMEAQTTAPEATEAQTTQPTATEAQTTPLAAMEALSTEPSATEALSMEPTTKRGLFIPFSVSSVTHKGIPMAASNLSVNYPVGAPDHISVKQCLLAILILALVATIFFVCTVVLAVRLSRKGHMYPVRNYSPTEMVCISSLLPDGGEGPSATANGGLSKAKSPGLTPEPREDREGDDLTLHSFLP

SEQ ID NO: 3223 - protein, 449 aa, Homo sapiens
LLLVLQLALLPAATQGKKVVLGKKGDTVELTCTASQKKSIQFHWKNSNQIKILGNQGSFLTKGPSKLNDRADSRRSLWDQGNFPLIIKNLKIEDSDTYICEVEDQKEEVQLLVFGLTANSDTHLLQGQSLTLTLESPPGSSPSVQCRSPRGKNIQGGKTLSVSQLELQDSGTWTCTVLQNQKKVEFKIDIVVLAFQKASSIVYKKEGEQVEFSFPLAFTVEKLTGSGELWWQAERASSSKSWITFDLKNKEVSVKRVTQDPKLQMGKKLPLHLTLPQALPQYAGSGNLTLALEAKTGKLHQEVNLVVMRATQLQKNLTCEVWGPTSPKLMLSLKLENKEAKVSKREKAVWVLNPEAGMWQCLLSDSGQVLLESNIKVLPTWSTPVQPMALIVLGGVAGLLLFIGLGIFFCVRCRHRRRQAERMSQIKRLLSEKKTCQCPHRFQKTCSPI

SEQ ID NO: 3224 - protein, 1100 aa, Homo sapiens
MPALALKGELLLLSLLLLLEPQISQGLVVTPPGPELVLNVSSTFVLTCSGSAPVVWERMSQEPPQEMAKAQDGTFSSVLTLTNLTGLDTGEYFCTHNDSRGLETDERKRLYIFVPDPTVGFLPNDAEELFIFLTEITEITIPCRVTDPQLVVTLHEKKGDVALPVPYDHQRGFSGIFEDRSYICKTTIGDREVDSDAYYVYRLQVSSINVSVNAVQTVVRQGENITLMCIVIGNEVVNFEWTYPRKESGRLVEPVTDFLLDMPYHIRSILHIPSAELEDSGTYTCNVTESVNDHQDEKAINITVVESGYVRLLGEVGTLQFAELHRSRTLQVVFEAYPPPTVLWFKDNRTLGDSSAGEIALSTRNVSETRYVSELTLVRVKVAEAGHYTMRAFHEDAEVQLSFQLQINVPVRVLELSESHPDSGEQTVRCRGRGMPQPNIIWSACRDLKRCPRELPPTLLGNSSEEESQLETNVTYWEEEQEFEVVSTLRLQHVDRPLSVRCTLRNAVGQDTQEVIVVPHSLPFKVVVISAILALVVLTIISLIILIMLWQKKPRYEIRWKVIESVSSDGHEYIYVDPMQLPYDSTWELPRDQLVLGRTLGSGAFGQVVEATAHGLSHSQATMKVAVKMLKSTARSSEKQALMSELKIMSHLGPHLNVVNLLGACTKGGPIYIITEYCRYGDLVDYLHRNKHTFLQHHSDKRRPPSAELYSNALPVGLPLPSHVSLTGESDGGYMDMSKDESVDYVPMLDMKGDVKYADIESSNYMAPYDNYVPSAPERTCRATLINESPVLSYMDLVGFSYQVANGMEFLASKNCVHRDLAARNVLICEGKLVKICDFGLARDIMRDSNYISKGSTFLPLKWMAPESIFNSLYTTLSDVWSFGILLWEIFTLGGTPYPELPMNEQFYNAIKRGYRMAQPAHASDEIYEIMQKCWEEKFEIRPPFSQLVLLLERLLGEGYKKKYQQVDEEFLRSDHPAILRSQARLPGFHGLRSPLDTSSVLYTAVQPNEGDNDYIIPLPDPKPEVADEGPLEGSPSLASSTLNEVNTSSTISCDSPLEPQDEPEPEPQLELQVEPEPELEQLPDSGCPAPRAEAEDSFL

SEQ ID NO: 3225 - protein, 569 aa, Homo sapiens
MDKNTLGSDLPRIKTEIEALKNLRHQHICQLYHVLETANKIFMVLEYCPGGELFDYIISQDRLSEEETRVVFRQIVSAVAYVHSQGYAHRDLKPENLLFDEYHKLKLIDFGLCAKPKGNKDYHLQTCCGSLAYAAPELIQGKSYLGSEADVWSMGILLYVLMCGFLPFDDDNVMALYKKIMRGKYDVPKWLSPSSILLLQQMLQVDPKKRISMKNLLNHPWIMQDYNYPVEWQSKNPFIHLDDDCVTELSVHHRNNRQTMEDLISLWQYDHLTATYLLLLAKKARGKPVRLRLSSFSCGQASATPFTDIKFTKYWTESNGVESKSLTPALCRTPANKLKNKENVYTPKSAVKNEEYFMFPEPKTPVNKNQHKREILTTPNRYTTPSKARNQCLKETPIKIPVNSTGTDKLMTGVISPERRCRSVELDLNQAHMEETPKRKGAKVFGSLERGLDKVITVLTRSKRKGSARDGPRRLKLHYNVTTTRLVNPDQLLNEIMSILPKKHVDFVQKGYTLKCQTQSDFGKVTMQFELEVCQLQKPDVVGIRRQRLKGDAWVYKRLVEDILSSCKV

SEQ ID NO: 3226 - protein, 35 aa, Homo sapiens
IRVTLTPRFPPLDWFYCGSGLISMSCCGAFTAFGL

SEQ ID NO: 3227 - protein, 59 aa, Homo sapiens
LVLLWLFVSTCSRCFLFGINLLLMSQKLLVRAGFKSMLQILVEACVELFRDLAVSSFPE

SEQ ID NO: 3228 - protein, 421 aa, Homo sapiens
ISAFTFCRKLYFLLLHAKFLPLDLFGSVAEKPDIPGLPETSHKLNRESGLNKDAFPQYIHNMLSTSRSRFIRNTNESGEEVTTFFDYDYGAPCHKFDVKQIGAQLLPPLYSLVFIFGFVGNMLVVLILINCKKLKCLTDIYLLNLAISDLLFLITLPLWAHSAANEWVFGNAMCKLFTGLYHIGYFGGIFFIILLTIDRYLAIVHAVFALKARTVTFGVVTSVITWLVAVFASVPGIIFTKCQKEDSVYVCGPYFPRGWNNFHTIMRNILGLVLPLLIMVICYSGILKTLLRCRNEKKRHRAVRVIFTIMIVYFLFWTPYNIVILLNTFQEFFGLSNCESTSQLDQATQVTETLGMTHCCINPIIYAFVGEKFRRYLSVFFRKHITKRFCKQCPVFYRETVDGVTSTNTPSTGEQEVSAGL

SEQ ID NO: 3229 - protein, 160 aa, Homo sapiens
IAVVGFAIAISLGKIFALRHGYRVDSNQELVALGLSNLIGGIFQCFPVSCSMSRSLVQESTGGNSQVAGAISSLFILLIIVKLGELFHDLPKAVLAAIIIVNLKGMLRQLSDMRSLWKANRADLLIWLVTFTATILLNLDLGLVVAVIFSLLLVVVRTQM

SEQ ID NO: 3230 - protein, 923 aa, Homo sapiens
RAAATMPGGAGAARLCLLAFALQPLRPRAAREPGWTRGSEEGSPKLQHELIIPQWKTSESPVREKHPLKAELRVMAEGRELILDLEKNEQLFAPSYTETHYTSSGNPQTTTRKLEDHCFYHGTVRETELSSVTLSTCRGIRGLITVSSNLSYVIEPLPDSKGQHLIYRSEHLKPPPGNCGFEHSKPTTRDWALQFTQQTKKRPRRMKREDLNSMKYVELYLVADYLEFQKNRRDQDATKHKLIEIANYVDKFYRSLNIRIALVGLEVWTHGNMCEVSENPYSTLWSFLSWRRKLLAQKYHDNAQLITGMSFHGTTIGLAPLMAMCSVYQSGGVNMDHSENAIGVAATMAHEMGHNFGMTHDSADCCSASAADGGCIMAAATGHPFPKVFNGCNRRELDRYLQSGGGMCLSNMPDTRMLYGGRRCGNGYLEDGEECDCGEEEECNNPCCNASNCTLRPGAECAHGSCCHQCKLLAPGTLCREQARQCDLPEFCTGKSPHCPTNFYQMDGTPCEGGQAYCYNGMCLTYQEQCQQLWGPGARPAPDLCFEKVNVAGDTFGNCGKDMNGEHRKCNMRDAKCGKIQCQSSEARPLESNAVPIDTTIIMNGRQIQCRGTHVYRGPEEEGDMLDPGLVMTGTKCGYNHICFEGQCRNTSFFETEGCGKKCNGHGVCNNNQNCHCLPGWAPPFCNTPGHGGSIDSGPMPPESVGPVVAGVLVAILVLAVLMLMYYCCRQNNKLGQLKPSALPSKLRQQFSCPFRVSQNSGTGHANPTFKLQTPQGKRKVINTPEILRKPSQPPPRPPPDYLRGGSPPAPLPAHLSRAARNSPGPGSQIERTESSRRPPPSRPIPPAPNCIVSQDFSRPRPPQKALPANPVPGRRSLPRPGGASPLRPPGAGPQQSRPLAALAPKFPEYRSQRAGGMISSKI

SEQ ID NO: 3231 - protein, 58 aa, Homo sapiens
VIPSSNVSITTSTIRALIKNFSIASFFPAFITLLFFQHNRTAYDIVAGTIVVKRNGVR

SEQ ID NO: 3232 - protein, 74 aa, Homo sapiens [sequence omitted]

SEQ ID NO: 3233 - protein, 331 aa, Homo sapiens
IHPATTIAMAALIAENFRFLSLFFKSKDVMIFNGLVALGTVGSQELFSVVAFHCPCSPARNYLYGLAAIGVPALVLFIIGIILNNHTWNLVAECQHRRTKNCSAAPTFLLLSSILGRAAVAPVTWSVISLLRGEAYVCALSEFVDPSSLTAREEHFPSAHATEILARFPCKENPDNLSDFREEVSRRLRYESQLFGWLLIGVVAILVFLTKCLKHYCSPLSYRQEAYWAQYRANEDQLFQRTAEVHSRVLAANNVRRFFGFVALNKDDEELIANFPVEGTQPRPQWNAITGVYLYRENQGLPLYSRLHKWAQGLAGNGAAPDNVEMALLPS

SEQ ID NO: 3234 - protein, 40 aa, Homo sapiens
KTLMQQLKHIIFFLRGGLLMLRPLSSMLVPTAHNFLAVFF

SEQ ID NO: 3235 - protein, 38 aa, Homo sapiens
LYKLCFLIFPSALFWGGGYSSFGITFPPPMCFPSFEIF

SEQ ID NO: 3236 - protein, 61 aa, Homo sapiens
TTARRAFPIPFGSKSNMATLKDQLIYNLLKEEQTPQNKITVVGVGAVGMACAISILMKTIM

SEQ ID NO: 3237 - protein, 203 aa, Homo sapiens
LRIKMSSENCFVAENSSLHPESGQENDATSPHFSTRHEGSFQVPVLCAVMNVVFITILIIALIALSVGQYNCPGQYTFSMPSDSHVSSCSEDWVGYQRKCYFISTVKRSWTSAQNACSEHGATLAVIDSEKDMNFLKRYAGREEHWVGLKKEPGHPWKWSNGKEFNNWFNVTGSDKCVFLKNTEVSSMECEKNLYWICNKPYK

SEQ ID NO: 3238 - protein, 38 aa, Homo sapiens
KKYIVFFFSRRGGKLSHYRGPAMLCIWACCMSCCRCLH

SEQ ID NO: 3239 - protein, 187 aa, Homo sapiens
VHELHLSRLQRVKFCLLGALLAPIRVLLAFIVLFLLWPFAWLQVAGLSEEQLQEPITGWRKTVCHNGVLGLSRLLFFLLGFLRIRVRGQRASRLQAPVLVAAPHSTFFDPIVLLPCDLPKVVSRAENLSVPVIGALLRFNQAILVSRHDPASRRRVVEEVRRRATSGGKWPQVGKGLKTIFSLSMCS

SEQ ID NO: 3240 - protein, 157 aa, Homo sapiens
LSLNFQPQRPPPLSPRAMGRVSGLVPSRFLTLLAHLVVVITLFWSRDSNIQACLPLTFTPEEYDKQDIQLVAALSVTLGLFAVELAGFLSGVSMFNSTQSLISIGAHCSASVALSFFIFERWECTTYWYIFVFCSALPAVTEMALFVTVFGLKKKPF

SEQ ID NO: 3241 - protein, 85 aa, Homo sapiens
LLRPSMATPTQTPTKAPEEPDPFYYDYNTVQTVGMTLATILFLLGILIVISKKVKCRKADSRSESPTCKSCKSELPSSAPGGGGV

SEQ ID NO: 3242 - protein, 79 aa, Homo sapiens
RMGLPVSWAPPALWVLGCCALLLSLWALCTACRRPEDAVAPRKRARRQRARLQGSATAAEAQVGHQTARAAPGPAQQQG

SEQ ID NO: 3243 - protein, 296 aa, Homo sapiens
RMGLPVSWAPPALWVLGCCALLLSLWALCTACRRPEDAVAPRKRARRQRARLQGSATAAEASLLRRTHLCSLSKSDTRLHELHRGPRSSRALRPASMDLLRPHWLEVSRDITGPQAAPSAFPHQELPRALPAAAATAGCAGLEATYSNVGLAALPGVSLAASPVVAEYARVQKRKGTHRSPQEPQQGKTEVTPAAQVDVLYSRVCKPKRRDPGPTTDPLDPKGQGAILALAGDLAYQTLPLRALDVDSGPLENVYESIRELGDPAGRSSTCGAGTPPASSCPSLGRGWRPLPASLP

SEQ ID NO: 3244 - protein, 242 aa, Homo sapiens
LVEPIPIIKMSQSNRELVVDFLSYKLSQKGYSWSQFSDVEENRTEAPEGTESEMETPSAINGNPSWHLADSPAVNGATGHSSSLDAREVIPMAAVKQALREAGDEFELRYRRAFSDLTSQLHITPGTAYQSFEQVVNELFRDGVNWGRIVAFFSFGGALCVESVDKEMQVLVSRIAAWMATYLNDHLEPWIQENGGWDTFVELYGNNAAAESRKGQERFNRWFLTGMTVAGVVLLGSLFSRK

SEQ ID NO: 3245 - protein, 594 aa, Homo sapiens [sequence omitted]

SEQ ID NO: 3246 - protein, 420 aa, Homo sapiens [sequence omitted]

SEQ ID NO: 3247 - protein, 526 aa, Homo sapiens
MIVMVPSLIKQQVLKNVRIDPSSLSFNMWKEIPIPFYLSVYFFDVMNPSEILKGEKPQVRERGPYVYREFRHKSNITFNNNDTVSFLEYRTFQFQPSKSHGSESDYIVMPNILVLGAAVMMENKPMTLKLIMTLAFTTLGERAFMNRTVGEIMWGYKDPLVNLINKYFPGMFPFKDKFGLFAELNNSDSGLFTVFTGVQNISRIHLVDKWNGLSKVDFWHSDQCNMINGTSGQMWPPFMTPESSLEFYSPEACRSMKLMYKESGVFEGIPTYRFVAPKTLFANGSIYPPNEGFCPCLESGIQNVSTCRFSAPLFLSHPHFLNADPVLAEAVTGLHPNQEAHSLFLDIHPVTGIPMNCSVKLQLSLYMKSVAGIGQTGKIEPVVLPLLWFAESGAMEGETLHTFYTQLVLMPKVMHYAQYVLLALGCVLLLVPVICQIRSQVGAGQRAARADSHSLACWGKGASDRTLWPTAAWSPPPAAVLRLCRSGSGHCWGLRSTLASFACRVATTLPVLEGLGPSLGGGTGGL

SEQ ID NO: 3248 - protein, 446 aa, Homo sapiens
MKLKGIDANEPTEGSILLKSSEKKLQETPTEANHVQRLRQMLACPPHGLLDRVITNGMLLAGFLIRNIPVINDNVQIKHKWSSSLRSIALSIILVRAGLGLDSKALKKLKGVCVRLSMGPCIVEACTSALLAHYLLGLPWQWGFILGFVLGAVSPAVVVPSMLLLQGGGYGVEKGVPTLLMAAGSFDDILAITGFNTCLGIAFSTGSTVFNVLRGVLEVVIGVATGSVLGFFIQYFPSRDQDKLVCKRTFLVLGLSVLAVFSSVHFGFPGSGGLCTLVMAFLAGMGWTSEKAEVEKIIAVAWDIFQPLLFGLIGAEVSIASLRPETVGLCVATVGIAVLIRILTTFLMVCFAGFNLKEKIFISFAWLPKATVQAAIGSVALDTARSHGEKQLEDYGMDVLTVAFLSILITAPIGSLLIGLLGPRLLQKVEHQNKDEEVQGETSVQV

SEQ ID NO: 3249 - protein, 367 aa, Homo sapiens
VEMLGQVVTLILLLLLKVYQGKGCQGSADHVVSISGVPLQLQPNSIQTKVDSIAWKKLLPSQNGFHHILKWENGSLPSNTSNDRFSFIVKNLSLLIKAAQQQDSGLYCLEVTSISGKVQTATFQVFVFDKVEKPRLQGQGKILDRGRCQVALSCLVSRDGNVSYAWYRGSKLIQTAGNLTYLDEEVDINGTHTYTCNVSNPVSWESHTLNLTQDCQNAHQEFRFWPFLVIIVILSALFLGTLACFCVWRRKRKEKQSETSPKEFLTIYEDVKDLKTRRNHEQEQTFPGGGSTIYSMIQSQSSAPTSQEPAYTLYSLIQPSRKSGSRKRNHSPSFNSTIYEVIGKSQPKAQNPARLSRKELENFDVYS

SEQ ID NO: 3250 - protein, 186 aa, Homo sapiens
IVKMERVQPLEENVGNAARPRFERNKLLLVASVIQGLGLLLCFTYICLHFSALQVSHRYPRIQSIKVQFTEYKKEKGFILTSQKEDEIMKVQNNSVIINCDGFYLISLKGYFSQEVNISLHYQKDEEPLFQLKKVRSVNSLMVASLTYKDKVYLNVTTDNTSLDDFHVNGGELILIHQNPGEFCVL

SEQ ID NO: 3251 - protein, 445 aa, Homo sapiens
LRTSPEWVRRVMEGAELAGKILSTWLTLVLGFILLPSVFGVSLGISEIYMKILVKTLEWATIRIEKGTPKESILKNSASVGIIQRDESPMEKGLSGLRGRDFELSDVFYFSKKGLEAIVEDEVTQRFSSEELVSWNLLTRTNVNFQYISLRLTMVWVLGVIVRYCVLLPLRVTLAFIGISLLVIGTTLVGQLPDSSLKNWLSELVHLTCCRICVRALSGTIHYHNKQYRPQKGGICVANHTSPIDVLILTTDGCYAMVGQVHGGLMGIIQRAMVKACPHVWFERSEMKDRHLVTKRLKEHIADKKKLPILIFPEGTCINNTSVMMFKKGSFEIGGTIHPVAIKYNPQFGDAFWNSSKYNMVSYLLRMMTSWAIVCDVWYMPPMTREEGEDAVQFANRVKSAIAIQGGLTELPWDGGLKRAKVKDIFKEEQQKNYSKMIVGNGSLS

SEQ ID NO: 3252 - protein, 931 aa, Homo sapiens
RACERRALRAAATMPGGAGAARLCLLAFALQPLRPRAAREPGWTRGSEEGSPKLQHELIIPQWKTSESPVREKHPLKAELRVMAEGRELILDLEKNEQLFAPSYTETHYTSSGNPQTTTRKLEDHCFYHGTVRETELSSVTLSTCRGIRGLITVSSNLSYVIEPLPDSKGQHLIYRSEHLKPPPGNCGFEHSKPTTRDWALQFTQQTKKRPRRMKREDLNSMKYVELYLVADYLEFQKNRRDQDATKHKLIEIANYVDKFYRSLNIRIALVGLEVWTHGNMCEVSENPYSTLWSFLSWRRKLLAQKYHDNAQLITGMSFHGTTIGLAPLMAMCSVYQSGGVNMDHSENAIGVAATMAHEMGHNFGMTHDSADCCSASAADGGCIMAAATGHPFPKVFNGCNRRELDRYLQSGGGMCLSNMPDTRMLYGGRRCGNGYLEDGEECDCGEEEECNNPCCNASNCTLRPGAECAHGSCCHQCKLLAPGTLCREQARQCDLPEFCTGKSPHCPTNFYQMDGTPCEGGQAYCYNGMCLTYQEQCQQLWGPGARPAPDLCFEKVNVAGDTFGNCGKDMNGEHRKCNMRDAKCGKIQCQSSEARPLESNAVPIDTTIIMNGRQIQCRGTHVYRGPEEEGDMLDPGLVMTGTKCGYNHICFEGQCRNTSFFETEGCGKKCNGHGVCNNNQNCHCLPGWAPPFCNTPGHGGSIDSGPMPPESVGPVVAGVLVAILVLAVLMLMYYCCRQNNKLGQLKPSALPSKLRQQFSCPFRVSQNSGTGHANPTFKLQTPQGKRKVINTPEILRKPSQPPPRPPPDYLRGGSPPAPLPAHLSRAARNSPGPGSQIERTESSRRPPPSRPIPPAPNCIVSQDFSRPRPPQKALPANPVPGRRSLPRPGGASPLRPPGAGPQQSRPLAALAPKFPEYRSQRAGGMISSKI

SEQ ID NO: 3253 - protein, 488 aa, Homo sapiens
LLCSDPSAGQSGHLQAPEGGSCQPGKTENTITMTTSHQPQDRYKAVWLIFFMLGLGTLLPWNFFMTATQYFTNRLDMSQNVSLVTAELSKDAQASAAPAAPLPERNSLSAIFNNVMTLCAMLPLLLFTYLNSFLHQRIPQSVRILGSLVAILLVFLITAILVKVQLDALPFFVITMIKIVLINSFGAILQGSLFGLAGLLPASYTAPIMSGQGLAGFFASVAMICAIASGSELSESAFGYFITACAVIILTIICYLGLPRLEFYRYYQQLKLEGPGEQETKLDLISKGEEPRAGKEESGVSVSNSQPTNESHSIKAILKNISVLAFSVCFIFTITIGMFPAVTVEVKSSIAGSSTWERYFIPVSCFLTFNIFDWLGRSLTAVFMWPGKDSRWLPSLVLARLVFVPLLLLCNIKPRRYLTVVFEHDAWFIFFMAAFAFSNGYLASLCMCFGPKKVKPAEAETAGAIMAFFLCLGLALGAVFSFLFRAIV

SEQ ID NO: 3254 - protein, 260 aa, Homo sapiens
VRNPGLSASQEATPGANMSSGTELLWPGAALLVLLGVAASLCVRCSRPGAKRSEKIYQQRSLREDQQSFTGSRTYSLVGQAWPGPLADMAPTRKDKLLQFYPSLEDPASSRYQNFSKGSRHGSEEAYIDPIAMEYYNWGRFSKPPEDDDANSYENVLICKQKTTETGAQQEGIGGLCRGDLSLSLALKTGPTSGLCPSASPEEDEESEDYQNSASIHQWRESRKVMGQLQREASPGPVGSPDEEDGEPDYVNGEVAATEA

SEQ ID NO: 3255 - protein, 94 aa, Homo sapiens
LEGSGASSPCANTTFCCKFASFPEGSWEACGSLPPSSDPGLSVPPTPAPILRADLAGILGVSGVLLFDCGYLLHLLCRQKHRPAPRLQPSHTSS

SEQ ID NO: 3256 - protein, 251 aa, Homo sapiens
IELTVEYPWRCGALSPTSNCRTGMWSWKCLLFWAVLVTATLCTARPSPTLPEQDALPSSEDDDDDDDSSSEEKETDNTKPNPVAPYWTSPEKMEKKLHAVPAAKTVKFKCPSSGTPNPTLRWLKNGKEFKPDHRIGGYKVRYATWSIIMDSVVPSDKGNYTCIVENEYGSINHTYQLDVVERSPHRPILQAGLPANKTVALGSNVEFMCKVYSDPQPHIQWLKHIEVNGSKIGPDNLPYVQILKPWKRGRQ

SEQ ID NO: 3257 - protein, 39 aa, Homo sapiens
LGNGRGDHPGRPLSPLAGFPVAVRCAAGFLVNFWMKPLN

SEQ ID NO: 3258 - protein, 172 aa, Homo sapiens
LWRLISGTLGIICLSLMSTLGILLKNSFTKLSIEPAFTPGPNIELQKDSDCCSCQEKWVGYRCNCYFISSEQKTWNESRHLCASQKSSLLQLQNTDELDFMSSSQQFYWIGLSYSEEHTAWLWENGSALSQYLFPSFETFNTKNCIAYNPNGNALDESCEDKNRYICKQQLI

SEQ ID NO: 3259 - protein, 538 aa, Homo sapiens
IPGSKSPPFPAQLSTSAATSKIPTLIMLFPISMSATEFLLASVIFCLVFWVIRASRPQVPKGLKNPPGPWGWPLIGHMLTLGKNPHLALSRMSQQYGDVLQIRIGSTPVVVLSGLDTIRQALVRQGDDFKGRPDLYTFTLISNGQSMSFSPDSGPVWAARRRLAQNGLKSFSIASDPASSTSCYLEEHVSKEAEVLISTLQELMAGPGHFNPYRYVVVSVTNVICAICFGRRYDHNHQELLSLVNLNNNFGEVVGSGNPADFIPILRYLPNPSLNAFKDLNEKFYSFMQKMVKEHYKTFEKGHIRDITDSLIEHCQEKQLDENANVQLSDEKIINIVLDLFGAGFDTVTTAISWSLMYLVMNPRVQRKIQEELDTVIGRSRRPRLSDRSHLPYMEAFILETFRHSSFVPFTIPHSTTRDTSLKGFYIPKGRCVFVNQWQINHDQKLWVNPSEFLPERFLTPDGAIDKVLSEKVIIFGMGKRKCIGETIARWEVFLFLAILLQRVEFSVPLGVKVDMTPIYGLTMKHACCEHFQMQLRS

SEQ ID NO: 3260 - protein, 743 aa, Homo sapiens
IPPTGSPAPQPLPVPAEMLLPRSVSSERAPGVPEPEELWEAEMERLRGSGTPVRGLPYAMMDKRLIWQLREPAGVQTLRWQRWQRRRQTVERRLREAAQRLARGLGLWEGALYEIGGLFGTGIRSYFTFLRFLLLLNLLSLLLTASFVLLPLVWLRPPDPGPTLNLTLQCPGSRQSPPGVLRFHNQLWHVLTGRAFTNTYLFYGAYRVGPESSSVYSIRLAYLLSPLACLLLCFCGTLRRMVKGLPQKTLLGQGYQAPLSAKVFSSWDFCIRVQEAATIKKHEISNEFKVELEEGRRFQLMQQQTRAQTACRLLSYLRVNVLNGLLVVGAISAIFWATKYSQDNKEESLFLLLQYLPPGVIALVNFLGPLLFTFLVQLENYPPNTEVNLTLIWCVVLKLASLGMFSVSLGQTILCIGRDKSSCESYGYNVCDYQCWENSVGEELYKLSIFNFLLTVAFAFLVTLPRRLLVDRFSGRFWAWLEREEFLVPKNVLDIVAGQTVTWMGLFYCPLLPLLNSVFLFLTFYIKKYTLLKNSRASSRPFRASSSTFFFQLVLLLGLLLAAVPLGYVVSSIHSSWDCGLFTNYSAPWQVVPELVALGLPPIGQRALHYLGSHAFSFPLLIMLSLVLTVCVSQTQANARAIHRLRKQLVWQVQEKWHLVEDLSRLLPEPGPSDSPGPKYPASQASRPQSFCPGCPCPGSPGHQAPRPGPSVVDAAGLRSPCPGQHGAPASARRFRFPSGAEL

SEQ ID NO: 3261 - protein, 766 aa, Homo sapiens
LASDAPGRARSRRGSRFSSGEESTSHLIMSRRSQRLTRYSQGDDDGSSSSGGSSVAGSQSTLFKDSPLRTLKRKSSNMKRLSPAPQLGPSSDAHTSYYSESLVHESWFPPRSSLEELHGDANWGEDLRVRRRRGTGGSESSRASGLVGRKATEDFLGSSSGYSSEDDYVEDSEGRGSKVTETEPVSSFPAGYSDVDQQSSSSRLRSAVSRAGSLLWMVATSPGRLFRLLYWWAGTTWYRLTTAASLLDVFVLTRRFSSLKTFLWFLLPLLLLTCLTYGAWYFYPYGLQTFHPALVSWWAAKDSRRPDEGWEARDSSPHFQAEQRVMSRVHSLERRLEALAAEFSSNWQKEAMRLERLELRQGAPGQGGGGGLSHEDTLALLEGLVSRREAALKEDFRRETAARIQEELSALRAEHQQDSEDLFKKIVRASQESEARIQQLKSEWQSMTQESFQESSVKELRRLEDQLAGLQQELAALALKQSSVAEEVGLLPQQIQAVRDDVESQFPAWISQFLARGGGGRVGLLQREEMQAQLRELESKILTHVAEMQGKSAREAAASLSLTLQKEGVIGVTEEQVHHIVKQALQRYSEDRIGLADYALESGGASVISTRCSETYETKTALLSLFGIPLWYHSQSPRVILQPDVHPGNCWAFQGPQGFAVVRLSARIRPTAVTLEHVPKALSPNSTISSAPKDFAIFGFDEDLQQEGTLLGKFTYDQDGEPIQTFHFQAPTMATYQVVELRILTNWGHPEYTCIYRFRVHGEPAH

SEQ ID NO: 3262 - protein, 241 aa, Homo sapiens
MEVLAWLLIYLLGPGWVPSALAAFILAISQAQSWCLQHDLGHASIFKKSWWNHVAQKFVMGQLKGFSAHWWNFRHFQHHAKPNIFHKDPDVTVAPVFLLGESSVEYGKKKRRYLPYNQQHLYFFLIGPPLLTLVNFEVENLAYMLVCMQWADLLWAASFYARFFLSYLPFYGVPGVLLFFVAVRYGREWRGHTQATGDPHCSPPPELPFSRLQNGASGTASLACWWNHINTSVAGAQGRWV

SEQ ID NO: 3263 - protein, 68 aa, Homo sapiens
MSEFHNYNLDLKKSDFSTRWQKQRCPVVKSKCRENASPFFFCCFIAVAMGIRFIIMVTIWSAVFLNCK

SEQ ID NO: 3264 - protein, 1312 aa, Homo sapiens
MPWIHELPAGCTQGSERRVLRQLPDTSGRRWREISASLLYQALPSSPDHESPSQESPNAPTSTAVLGSWGSPPQPSLAPREQEAPGTQWPLDETSGIYYTEIREREREKSEKGRPPWAAVVGTPPQAHTSLQPHHHPWEPSVRESLCSTWPWKNEDFNQKFTQLLLLQRPHPRSQDPLVKRSWPDYVEENRGHLIEIRDLFGPGLDTQEPRIVILQGAAGIGKSTLARQVKEAWGRGQLYGDRFQHVFYFSCRELAQSKVVSLAELIGKDGTATPAPIRQILSRPERLLFILDGVDEPGWVLQEPSSELCLHWSQPQPADALLGSLLGKTILPEASFLITARTTALQNLIPSLEQARWVEVLGFSESSRKEYFYRYFTDERQAIRAFRLVKSNKELWALCLVPWVSWLACTCLMQQMKRKEKLTLTSKTTTTLCLHYLAQALQAQPLGPQLRDLCSLAAEGIWQKKTLFSPDDLRKHGLDGAIISTFLKMGILQEHPIPLSYSFIHLCFQEFFAAMSYVLEDEKGRGKHSNCIIDLEKTLEAYGIHGLFGASTTRFLLGLLSDEGEREMENIFHCRLSQGRNLMQWVPSLQLLLQPHSLESLHCLYETRNKTFLTQVMAHFEEMGMCVETDMELLVCTFCIKFSRHVKKLQLIEGRQHRSTWSPTMVVLFRWVPVTDAYWQILFSVLKVTRNLKELDLSGNSLSHSAVKSLCKTLRRPRCLLETLRLAGCGLTAEDCKDLAFGLRANQTLTELDLSFNVLTDAGAKHLCQRLRQPSCKLQRLQLVSCGLTSDCCQDLASVLSASPSLKELDLQQNNLDDVGVRLLCEGLRHPACKLIRLGLDQTTLSDEMRQELRALEQEKPQLLIFSRRKPSVMTPTEGLDTGEMSNSTSSLKRQRLGSERAASHVAQANLKLLDVSKIFPIAEIAEESSPEVVPVELLCVPSPASQGDLHTKPLGTDDDFWGPTGPVATEVVDKEKNLYRVHFPVAGSYRWPNTGLCFVMREAVTVEIEFCVWDQFLGEINPQHSWMVAGPLLDIKAEPGAVEAVHLPHFVALQGGHVDTSLFQMAHFKEEGMLLEKPARVELHHIVLENPSFSPLGVLLKMIHNALRFIPVTSVVLLYHRVHPEEVTFHLYLIPSDCSIRKELELCYRSPGEDQLFSEFYVGHLGSGIRLQVKDKKDETLVWEALVKPGDLMPATTLIPPARIAVPSPLDAPQLLHFVDQYREQLIARVTSVEVVLDKLHGQVLSQEQYERVLAENTRPSQMRKLFSLSQSWDRKCKDGLYQALKETHPHLIMELWEKGSKKGLLPLSS

SEQ ID NO: 3265 - protein, 360 aa, Homo sapiens
RPSLLLKDILKCTLLVFGVWILYILKLNYTTEECDMKKMHYVDPDHVKRAQKYAQQVLQKECRPKFAKTSMALLFEHRYSVDLLPFVQKAPKDSEAESKYDPPFGFRKFSSKVQTLLELLPEHDLPEHLKAKTCRRCVVIGSGGILHGLELGHTLNQFDVVIRLNSAPVEGYSEHVGNKTTIRMTYPEGAPLSDLEYYSNDLFVAVLFKSVDFNWLQAMVKKETLPFWVRLFFWKQVAEKIPLQPKHFRILNPVIIKETAFDILQYSEPQSRFWGRDKNVPTIGVIAVVLATHLCDEVSLAGFGYDLNQPRTPLHYFDSQCMAAMNFQTMHNVTTETKFLLKLVKEGVVKDLSGGIDREF

SEQ ID NO: 3266 - protein, 51 aa, Homo sapiens
MKVSPSLAPKKASRHLGSSSCPHCIPWFLYLVCLEILWWFWSCSNTSGSGP

SEQ ID NO: 3267 - protein, 263 aa, Homo sapiens
RMPFSHLSTYSLVWVMAAVVLCTAQVQVVTQDEREQLYTPASLKCSLQNAQEALIVTWQKKKAVSPENMVTFSENHGVVIQPAYKDKINITQLGLQNSTITFWNITLEDEGCYMCLFNTFGFGKISGTACLTVYVQPIVSLHYKFSEDHLNITCSATARPAPMVFWKVPRSGIENSTVTLSHPNGTTSVTSILHIKDPKNQVGKEVICQVLHLGTVTDFKQTVNKGYWFSVPLLLSIVSLVILLVLISILLYWKRHRNQDREP

SEQ ID NO: 3268 - protein, 837 aa, Homo sapiens
IKRSRSLSESYELSSDLQDKQVEMLERKYGGRLVTRHAARTIQTAFRQYQMNKNFERLRSSMSENRMSRRIVLSNMRMQFSFEGPEKVHSSYFEGKQVSVTNDGSQLGALVSPECGDLSEPTTLKSPAPSSDFADAITELEDAFSRQVKSLAESIDDALNCRSLHTEEAPALDAARARDTEPQTALHGMDHRKLDEMTASYSDVTLYIDEEELSPPLPLSQAGDRPSSTESDLRLRAGGAAPDYWALAHKEDKADTDTSCRSTPSLERQEQRLRVEHLPLLTIEPPSDSSVDLSDRSERGSLKRQSAYERSLGGQQGSPKHGPHSGAPKSLPREEPELRPRPPRPLDSHLAINGSANRQSKSESDYSDGDNDSINSTSNSNDTINCSSESSSRDSLREQTLSKQTYHKEARNSWDSPAFSNDVIRKRHYRIGLNLFNKKPEKGVQYLIERGFVPDTPVGVAHFLLQRKGLSRQMIGEFLGNRQKQFNRDVLDCVVDEMDFSTMELDEALRKFQAHIRVQGEAQKVERLIEAFSQRYCICNPGVVRQFRNPDTIFILAFAIILLNTDMYSPNVKPERKMKLEDFIKNLRGVDDGEDIPREMLMGIYERIRKRELKTNEDHVSQVQKVEKLIVGKKPIGSLHPGLGCVLSLPHRRLVCYCRLFEVPDPNKPQKLGLHQREIFLFNDLLVVTKIFQKKKNSVTYSFRQSFSLYGMQVLLFENQYYPNGIRLTSSVPGADIKVLINFNAPNPQDRKKFTDDLRESIAEVQEMEKHRIESELEKQKGVVRPSMSQCSSLKKESGNGTLSRACLDDSYASGEGLKRSALSSSLRDLSEAGVHH

SEQ ID NO: 3269 - protein, 32 aa, Homo sapiens
LDCLLQQFLGSKIVSCTSICLCLLLPTLSKTQ

SEQ ID NO: 3270 - protein, 276 aa, Homo sapiens
KCPYLNFFQLLVLAGLSHFCSGVIHVTKEVKEVATLSCGHNVSVEELAQTRIYWQKEKKMVLTMMSGDMNIWPEYKNRTIFDITNNLSIVILALRPSDEGTYECVVLKYEKDAFKREHLAEVTLSVKADFPTPSISDFEIPTSNIRRIICSTSGGFPEPHLSWLENGEELNAINTTVSQDPETELYAVSSKLDFNMTTNHSFMCLIKYGHLRVNQTFNWNTTKQEHFPDNLLPSWAITLISVNGIFVICCLTYCFAPRCRERRRNERLRRESVRPV

SEQ ID NO: 3271 - protein, 451 aa, Homo sapiens
VALGPPLRTSPEWVRRVMEGAELAGKILSTWLTLVLGFILLPSVFGVSLGISEIYMKILVKTLEWATIRIEKGTPKESILKNSASVGIIQRDESPMEKGLSGLRGRDFELSDVFYFSKKGLEAIVEDEVTQRFSSEELVSWNLLTRTNVNFQYISLRLTMVWVLGVIVRYCVLLPLRVTLAFIGISLLVIGTTLVGQLPDSSLKNWLSELVHLTCCRICVRALSGTIHYHNKQYRPQKGGICVANHTSPIDVLILTTDGCYAMVGQVHGGLMGIIQRAMVKACPHVWFERSEMKDRHLVTKRLKEHIADKKKLPILIFPEGTCINNTSVMMFKKGSFEIGGTIHPVAIKYNPQFGDAFWNSSKYNMVSYLLRMMTSWAIVCDVWYMPPMTREEGEDAVQFANRVKSAIAIQGGLTELPWDGGLKRAKVKDIFKEEQQKNYSKMIVGNGSLS

SEQ ID NO: 3272 - protein, 229 aa, Homo sapiens
LGLGPSCTCCLDPRPAWAWALVLPMTPPERLFLPRVCGTTLHLLLLGLLLVLLPGAQGLPGVGLTPSAAQTARQHPKMHLAHSTLKPAAHLIGDPSKQNSLLWRANTDRAFLQDGFSLSNNSLLVPTSGIYFVYSQVVFSGKAYSPKATSSPLYLAHEVQLFSSQYPFHVPLLSSQKMVYPGLQEPWLHSMYHGAAFQLTQGDQLSTHTDGIPHLVLSPSTVFFGAFAL

SEQ ID NO: 3273 - protein, 377 aa, Homo sapiens
LPTMSGESMNFSDVFDSSEDYFVSVNTSYYSVDSEMLLCSLQEVRQFSRLFVPIAYSLICVFGLLGNILVVITFAFYKKARSMTDVYLLNMAIADILFVLTLPFWAVSHATGAWVFSNATCKLLKGIYAINFNCGMLLLTCISMDRYIAIVQATKSFRLRSRTLPRSKIICLVVWGLSVIISSSTFVFNQKYNTQGSDVCEPKYQTVSEPIRWKLLMLGLELLFGFFIPLMFMIFCYTFIVKTLVQAQNSKRHKAIRVIIAVVLVFLACQIPHNMVLLVTAANLGKMNRSCQSEKLIGYTKTVTEVLAFLHCCLNPVLYAFIGQKFRNYFLKILKDLWCVRRKYKSSGFSCAGRYSENISRQTSETADNDNASSFTM

SEQ ID NO: 3274 - protein, 325 aa, Homo sapiens
LDGTMAPAFLLLLLLWPQGCVSGPSADSVYTKVRLLEGETLSVQCSYKGYKNRVEGKVWCKIRKKKCEPGFARVWVKGPRYLLQDDAQAKVVNITMVALKLQDSGRYWCMRNTSGILYPLMGFQLDVSPAPQTERNIPFTHLDNILKSGTVTTGQAPTSGPDAPFTTGVMVFTPGLITLPRLLASTRPASKTGYSFTATSTTSQGPRRTMGSQTVTASPSNARDSSAGPESISTKSGDLSTRSPTTGLCLTSRSLLNRLPSMPSIRHQDVYSTVLGVVLTLLVLMLIMVYGFWKKRHMASYSMCSDPSTRDPPGRPEPYVEVYLI

SEQ ID NO: 3275 - protein, 98 aa, Homo sapiens
ISLILEGSGASSPCANTTFCCKFASFPEGSWEACGSLPPSSDPGLSVPPTPAPILRADLAGILGVSGVLLFDCGYLLHLLCRQKHRPAPRLQPSHTSS

SEQ ID NO: 3276 - protein, 47 aa, Homo sapiens
LLWKNVTLKRRSPWVLAFEIFIPLVLFFILLGLRQKKPTISVKEVCK

SEQ ID NO: 3277 - protein, 112 aa, Homo sapiens
LGLFLYLHIVVLYTIAKVGLLSTLLCLKLQRFCPDVSWNNAEDCLSGSRPIQFTSSRKYLTPALDPAALLRAEEGGNPMCLLPELPQPIFPQLGTWKKEPRTRLCFSFGPSW

SEQ ID NO: 3278 - protein, 53 aa, Homo sapiens
RPDDAAWIAEPRAALGNGRGDHPGRPLSPLAGFPVAVRCAAGFLVNFWMKPLN

SEQ ID NO: 3279 - protein, 263 aa, Homo sapiens
ILLQTSQRWLSRWSTMEGDCLSCMKYLMFVFNFFIFLGGACLLAIGIWVMVDPTGFREIVAANPLLLTGAYILLAMGGLLFLLGFLGCCGAVRENKCLLLFFFLFILIIFLAELSAAILAFIFRENLTREFFTKELTKHYQGNNDTDVFSATWNSVMITFGCCGVNGPEDFKFASVFRLLTLDSEEVPEACCRREPQSRDGVLLSREECLLGRSLFLNKQGCYTVILNTFETYVYLAGALAIGVLAIELFAMIFAMCLFRGIQ

SEQ ID NO: 3280 - protein, 87 aa, Homo sapiens
IQAPGKQHLPALLHSWTQPAAPAMDRWYLGGSPKGDVDPFYYDYETVRNGGLIFAGLAFIVGLLILLSRRFRCGGNKKRRQINEDEP

SEQ ID NO: 3281 - protein, 1029 aa, Homo sapiens
TGSRCKSTASATQIGICPGPLYGLVWAAGSFPSLPCCTPLLGDPLYPSRKVESAGWRLPGEANAWPCPAPRRTMTLLLLPLLLASLLASCSCNKANKHKPWIEAEYQGIVMENDNTVLLNPPLFALDKDAPLRYAGEICGFRLHGSGVPFEAVILDKATGEGLIRAKEPVDCEAQKEHTFTIQAYDCGEGPDGANTKKSHKATVHVRVNDVNEFAPVFVERLYRAAVTEGKLYDRILRVEAIDGDCSPQYSQICYYEILTPNTPFLIDNDGNIENTEKLQYSGERLYKFTVTAYDCGKKRAADDAEVEIQVKPTCKPSWQGWNKRIEYAPGAGSLALFPGIRLETCDEPLWNIQATIELQTSHVAKGCDRDNYSERALRKLCGAATGEVDLLPMPGPNANWTAGLSVHYSQDSSLIYWFNGTQAVQVPLGGPSGLGSGPQDSLSDHFTLSFWMKHGVTPNKGKKEEETIVCNTVQNEDGFSHYSLTVHGCRIAFLYWPLLESARPVKFLWKLEQVCDDEWHHYALNLEFPTVTLYTDGISFDPALIHDNGLIHPPRREPALMIGACWTEEKNKEKEKGDNSTDTTQGDPLSIHHYFHGYLAGFSVRSGRLESREVIECLYACREGLDYRDFESLGKGMKVHVNPSQSLLTLEGDDVETFNHALQHVAYMNTLRFATPGVRPLRLTTAVKCFSEESCVSIPEVEGYVVVLQPDAPQILLSGTAHFARPAVDFEGTNGVPLFPDLQITCSISHQVEAKKDESWQGTVTDTRMSDEIVHNLDGCEISLVGDDLDPERESLLLDTTSLQQRGLELTNTSAYLTIAGVESITVYEEILRQARYRLRHGAALYTRKFRLSCSEMNGRYSSNEFIVEVNVLHSMNRVAHPSHVLSSQQFLHRGHQPPPEMAGHSLASSHRNSMIPSAATLIIVVCVGFLVLMVVLGLVRIHSLHRRVSGAGGPPGASSDPKDPDLFWDDSALTIIVNPMESYQNRQSCVTGAVGGQQEDEDSSDSEVADSPSSDERRIIETPPHRY

SEQ ID NO: 3282 - protein, 239 aa, Homo sapiens
VWITVIFIFRVMILVVAAQEVWGDEQEDFVCNTLQPGCKNVCYDHFFPVSHIRLWALQLIFVSTPALLVAMHVAYYRHETTRKFRRGEKRNDFKDIEDIKKQKVRIEGSLWWTYTSSIFFRIIFEAAFMYVFYFLYNGYHLPWVLKCGIDPCPNLVDCFISRPTEKTVFTIFMISASVICMLLNVAELCYLLLKVCFRRSKRAQTQKNHPNHALKESKQNEMNELISDSGQNAITGFPS

SEQ ID NO: 3283 - protein, 43 aa, Homo sapiens
MALCSALMTIFTIKMGTGIMLINLVMPMTGTRTEVCFGLSVPG

SEQ ID NO: 3284 - protein, 1465 aa, Homo sapiens
LACYLEFLKKEELKEFQLLLANKAHSRSSSGETPAQPEKTSGMEVASYLVAQYGEQRAWDLALHTWEQMGLRSLCAQAQEGAGHSPSFPYSPSEPHLGSPSQPTSTAVLMPWIHELPAGCTQGSERRVLRQLPDTSGRRWREISASLLYQALPSSPDHESPSQESPNAPTSTAVLGSWGSPPQPSLAPREQEAPGTQWPLDETSGIYYTEIREREREKSEKGRPPWAAVVGTPPQAHTSLQPHHHPWEPSVRESLCSTWPWKNEDFNQKFTQLLLLQRPHPRSQDPLVKRSWPDYVEENRGHLIEIRDLFGPGLDTQEPRIVILQGAAGIGKSTLARQVKEAWGRGQLYGDRFQHVFYFSCRELAQSKVVSLAELIGKDGTATPAPIRQILSRPERLLFILDGVDEPGWVLQEPSSELCLHWSQPQPADALLGSLLGKTILPEASFLITARTTALQNLIPSLEQARWVEVLGFSESSRKEYFYRYFTDERQAIRAFRLVKSNKELWALCLVPWVSWLACTCLMQQMKRKEKLTLTSKTTTTLCLHYLAQALQAQPLGPQLRDLCSLAAEGIWQKKTLFSPDDLRKHGLDGAIISTFLKMGILQEHPIPLSYSFIHLCFQEFFAAMSYVLEDEKGRGKHSNCIIDLEKTLEAYGIHGLFGASTTRFLLGLLSDEGEREMENIFHCRLSQGRNLMQWVPSLQLLLQPHSLESLHCLYETRNKTFLTQVMAHFEEMGMCVETDMELLVCTFCIKFSRHVKKLQLIEGRQHRSTWSPTMVVLFRWVPVTDAYWQILFSVLKVTRNLKELDLSGNSLSHSAVKSLCKTLRRPRCLLETLRLAGCGLTAEDCKDLAFGLRANQTLTELDLSFNVLTDAGAKHLCQRLRQPSCKLQRLQLVSCGLTSDCCQDLASVLSASPSLKELDLQQNNLDDVGVRLLCEGLRHPACKLIRLGLDQTTLSDEMRQELRALEQEKPQLLIFSRRKPSVMTPTEGLDTGEMSNSTSSLKRQRLGSERAASHVAQANLKLLDVSKIFPIAEIAEESSPEVVPVELLCVPSPASQGDLHTKPLGTDDDFWGPTGPVATEVVDKEKNLYRVHFPVAGSYRWPNTGLCFVMREAVTVEIEFCVWDQFLGEINPQHSWMVAGPLLDIKAEPGAVEAVHLPHFVALQGGHVDTSLFQMAHFKEEGMLLEKPARVELHHIVLENPSFSPLGVLLKMIHNALRFIPVTSVVLLYHRVHPEEVTFHLYLIPSDCSIRKAIDDLEMKFQFVRIHKPPPLTPLYMGCRYTVSGSGSGMLEILPKELELCYRSPGEDQLFSEFYVGHLGSGIRLQVKDKKDETLVWEALVKPGDLMPATTLIPPARIAVPSPLDAPQLLHFVDQYREQLIARVTSVEVVLDKLHGQVLSQEQYERVLAENTRPSQMRKLFSLSQSWDRKCKDGLYQALKETHPHLIMELWEKGSKKGLLPLSS

SEQ ID NO: 3285 - protein, 190 aa, Homo sapiens
LRTPGRGLGPRLHRMGLPVSWAPPALWVLGCCALLLSLWALCTACRRPEDAVAPRKRARRQRARLQGSATAAEAQVGHQTARAAPGPAQQQGPAACQHGSPAPTLAGGVQGHHRTAGSPLCLPTPGAAPGSAGSCSHRRVRWPRGHLFQRGAGGPSRGQPGGQPCGGRVCPRPEAQRDPSQSPRATAGED

SEQ ID NO: 3286 - protein, 597 aa, Homo sapiens
VCGSRWAHAVVMSRESDVEAQQSHGSSACSQPHGSVTQSQGSSSQSQGISSSSTSTMPNSSQSSHSSSGTLSSLETVSTQELYSIPEDQEPEDQEPEEPTPAPWARLWALQDGFANLETESGHVTQSDLELLLSSDPPASASQSAGIRGVRHHPRPVCSLKCVNDNYWFGRDKSCEYCFDEPLLKRTDKYRTYSKKHFRIFREVGPKNSYIAYIEDHSGNGTFVNTELVGKGKRRPLNNNSEIALSLSRNKVFVFFDLTVDDQSVYPKALRDEYIMSKTLGSGACGEVKLAFERKTCKKVAIKIISKRKFAIGSAREADPALNVETEIEILKKLNHPCIIKIKNFFDAEDYYIVLELMEGGELFDKVVGNKRLKEATCKLYFYQMLLAVQYLHENGIIHRDLKPENVLLSSQEEDCLIKITDFGHSKILGETSLMRTLCGTPTYLAPEVLVSVGTAGYNRAVDCWSLGVILFICLSGYPPFSEHRTQVSLKDQITSGKYNFIPEVWAEVSEKALDLVKKLLVVDPKARFTTEEALRHPWLQDEDMKRKFQDLLSEENESTALPQVLAQPSTSRKRPREGEAEGAETTKRPAVCAAVL

SEQ ID NO: 3287 - protein, 481 aa, Homo sapiens
RPCHFCGLRSLLAQAPASLGKATMNRGVPFRHLLLVLQLALLPAATQGKKVVLGKKGDTVELTCTASQKKSIQFHWKNSNQIKILGNQGSFLTKGPSKLNDRADSRRSLWDQGNFPLIIKNLKIEDSDTYICEVEDQKEEVQLLVFGLTANSDTHLLQGQSLTLTLESPPGSSPSVQCRSPRGKNIQGGKTLSVSQLELQDSGTWTCTVLQNQKKVEFKIDIVVLAFQKASSIVYKKEGEQVEFSFPLAFTVEKLTGSGELWWQAERASSSKSWITFDLKNKEVSVKRVTQDPKLQMGKKLPLHLTLPQALPQYAGSGNLTLALEAKTGKLHQEVNLVVMRATQLQKNLTCEVWGPTSPKLMLSLKLENKEAKVSKREKAVWVLNPEAGMWQCLLSDSGQVLLESNIKVLPTWSTPVQPMALIVLGGVAGLLLFIGLGIFFCVRCRHRRRQAERMSQIKRLLSEKKTCQCPHRFQKTCSPI

SEQ ID NO: 3288 - protein, 482 aa, Homo sapiens
MDLLTKNCKAAAGKSPSLIFTNRHEVRRIDLVKRNYSRLIPMLKNVVALDVEVATNRIYWCDLSYRKIYSAYMDKASDPKEQEVLIDEQLHSPEGLAVDWVHKHIYWTDSGNKTISVATVDGGRRRTLFSRNLSEPRAIAVDPLRGFMYWSDWGDQAKIEKSGLNGVDRQTLVSDNIEWPNGITLDLLSQRLYWVDSKLHQLSSIDFSGGNRKTLISSTDFLSHPFGIAVFEDKVFWTDLENEAIFSANRLNGLEISILAENLNNPHDIVIFHELKQPRAPDACELSVQPNGGCEYLCLPAPQISSHSPKYTCACPDTMWLGPDMKRCYRDANEDSKMGSTVTAAVIGIIVPIVVIALLCMSGYLIWRNWKRKNTKSMNFDNPVYRKTTEEEDEDELHIGRTAQIGHVYPAAISSFDRPLWAEPCLGETREPEDPAPALKELFVLPGEPRSQLHQLPKNPLSELPVVKSKRVALSLEDDGLP

SEQ ID NO: 3289 - protein, 3285 aa, Homo sapiens
MKSPRPHLLLPLLLLLLLLLGAGVPGAWGQAGSLDLQIDEEQPAGTLIGDISAGLPAGTAAPLMYFISAQEGSGVGTDLAIDEHSGVVRTARVLDREQRDRYRFTAVTPDGATVEVTVRVADINDHAPAFPQARAALQVPEHTAFGTRYPLEPARDADAGRLGTQGYALSGDGAGETFRLETRPGPDGTPVPELVVTGELDRENRSHYMLQLEAYDGGSPPRRAQALLDVTLLDINDHAPAFNQSRYHAVVSESLAPGSPVLQVFASDADAGVNGAVTYEINRRQSEGDGPFSIDAHTGLLQLERPLDFEQRRVHELVVQARDGGAHPELGSAFVTVHVRDANDNQPSMTVIFLSADGSPQVSEAAPPGQLVARISVSDPDDGDFAHVNVSLEGGEGHFALSTQDSVIYLVCVARRLDREERDAYNLRVTATDSGSPPLRAEAAFVLHVTDVNDNAPAFDRQLYRPEPLPEVALPGSFVVRVTARDPDQGTNGQVTYSLAPGAHTHWFSIDPTSGIITTAASLDYELEPQPQLIVVATDGGLPPLASSATVSVALQDVNDNEPQFQRTFYNASLPEGTQPGTCFLQVTATDADSGPFGLLSYSLGAGLGSSGSPPFRIDAHSGDVCTTRTLDRDQGPSSFDFTVTAVDGGGLKSMVYVKVFLSDENDNPPQFYPREYAASISAQSPPGTAVLRLRAHDPDQGSHGRLSYHILAGNSPPLFTLDEQSGLLTVAWPLARRANSVVQLEIGAEDGGGLQAEPSARVDISIVPGTPTPPIFEQLQYVFSVPEDVAPGTSVGIVQAHNPPGRLAPVTLSLSGGDPRGLFSLDAVSGLLQTLRPLDRELLGPVLELEVRAGSGVPPAFAVARVRVLLDDVNDNSPAFPAPEDTVLLPPNTAPGTPIYTLRALDPDSGVNSRVTFTLLAGGGGAFTVDPTTGHVRLMRPLGPSGGPAHELELEARDGGSPPRTSHFRLRVVVQDVGTRGLAPRFNSPTYRVDLPSGTTAGTQVLQVQAQAPDGGPITYHLAAEGASSPFGLEPQSGWLWVRAALDREAQELYILKVMAVSGSKAELGQQTGTATVRVSILNQNEHSPRLSEDPTFLAVAENQPPGTSVGRVFATDRDSGPNGRLTYSLQQLSEDSKAFRIHPQTGEVTTLQTLDREQQSSYQLLVQVQDGGSPPRSTTGTVHVAVLDLNDNSPTFLQASGAAGGGLPIQVPDRVPPGTLVTTLQAKDPDEGENGTILYTLTGPGSELFSLHPHSGELLTAAPLIRAERPHYVLTLSAHDQGSPPRSASLQLLVQVLPSARLAEPPPDLAERDPAAPVPVVLTVTAAEGLRPGSLLGSVAAPEPAGVGALTYTLVGGADPEGTFALDAASGRLYLARPLDFEAGPPWRALTVRAEGPGGAGARLLRVQVQVQDENEHAPAFARDPLALALPENPEPGAALYTFRASDADGPGPNSDVRYRLLRQEPPVPALRLDARTGALSAPRGLDRETTPALLLLVEATDRPANASRRRAARVSARVFVTDENDNAPVFASPSRVRLPEDQPPGPAALHVVARDPDLGEAARVSYRLASGGDGHFRLHSSTGALSVVRPLDREQRAEHVLTVVASDHGSPPRSATQVLTVSVADVNDEAPTFQQQEYSVLLRENNPPGTSLLTLRATDPDVGANGQVTYGGVSSESFSLDPDTGVLTTLRALDREEQEEINLTVYAQDRGSPPQLTHVTVRVAVEDENDHAPTFGSAHLSLEVPEGQDPQTLTMLRASDPDVGANGQLQYRILDGDPSGAFVLDLASGEFGTMRPLDREVEPAFQLRIEARDGGQPALSATLLLTVTVLDANDHAPAFPVPAYSVEVPEDVPAGTLLLQLQAHDPDAGANGHVTYYLGAGTAGAFLLEPSSGELRTAAALDREQCPSYTFSVSAVDGAAAGPLSTTVSVTITVRDVNDHAPTFPTSPLRLRLPRPGPSFSTPTLALATLRAEDRDAGANASILYRLAGTPPPGTTVDSYTGEIRVARSPVALGPRDRVLFIVATDLGRPARSATGVIIVGLQGEAERGPRFPRASSEATIRENAPPGTPIVSPRAVHAGGTNGPITYSILSGNEKGTFSIQPSTGAITVRSAEGLDFEVSPRLRLVLQAESGGAFAFTVLTLTLQDANDNAPRFLRPHYVAFLPESRPLEGPLLQVEADDLDQGSGGQISYSLAASQPARGLFHVDPTTGTITTTAILDREIWAETRLVLMATDRGSPALVGSATLTVMVIDTNDNRPTIPQPWELRVSEDALLGSEIAQVTGNDVDSGPVLWYVLSPSGPQDPFSVGRYGGRVSLTGPLDFEQCDRYQLQLLAHDGPHEGRANLTVLVEDVNDNAPAFSQSLYQVMLLEHTPPGSAILSVSATDRDSGANGHISYHLASPADGFSVDPNNGTLFTIVGTVALGHDGSGAVDVVLEARDHGAPGRAARATVHVQLQDQNDHAPSFTLSHYRVAVTEDLPPGSTLLTLEATDADGSRSHAAVDYSIISGNWGRVFQLEPRLAEAGESAGPGPRALGCLVLLEPLDFESLTQYNLTVAAADRGQPPQSSVVPVTVTVLDVNDNPPVFTRASYRVTVPEDTPVGAELLHVEASDADPGPHGLVRFTVSSGDPSGLFELDESSGTLRLAHALDCETQARHQLVVQAADPAGAHFALAPVTIEVQDVNDHGPAFPLNLLSTSVAENQPPGTLVTTLHAIDGDAGAFGRLRYSLLEAGPGPEGREAFALNSSTGELRARVPFDYEHTESFRLLVGAADAGNLSASVTVSVLVTGEDEYDPVFLAPAFHFQVPEGARRGHSLGHVQATDEDGGADGLVLYSLATSSPYFGINQTTGALYLRVDSRAPGSGTATSGGGGRTRREAPRELRLEVIARGPLPGSRSATVPVTVDITHTALGLAPDLNLLLVGAVAASLGVVVVLALAALVLGLVRARSRKAEAAPGPMSQAAPLASDSLQKLGREPPSPPPSEHLYHQTLPSYGGPGAGGPYPRGGSLDPSHSSGRGSAEAAEDDEIRMINEFPRVASVASSLAARGPDSGIQQDADGLSDTSCEPPAPDTWYKGRKAGLLLPGAGATLYREEGPPATATAFLGGCGLSPAPTGDYGFPADGKPCVAGALTAIVAGEEELRGSYNWDYLLSWCPQFQPLASVFTEIARLKDEARPCPPAPRIDPPPLITAVAHPGAKSVPPKPANTAAARAIFPPASHRSPISHEGSLSSAAMSPSFSPSLSPLAARSPVVSPFGVAQGPSASALSAESGLEPPDDTELHI

SEQ ID NO: 3290 - protein, 118 aa, Homo sapiens
MKHTQSGQSTSPLVIDYTCRVCQMAFVFSSLIPLLLMTPVFCLGNTSECFQNFSQSHKCILMHSPPSAMAELPPSANTSVCSTLYFYGIAIFLGSFVLSLLTIMVWYHPTFLCGEMRK

SEQ ID NO: 3291 - protein, 281 aa, Homo sapiens [sequence omitted]

SEQ ID NO: 3292 - protein, 1765 aa, Homo sapiens
MEPKVEWIQQQVVKKRTKRDYDFSRAQSTYFNDPKWPSMWYMHCSDNTHPCQSDMNIEGAWKRGYTGKNIVVTILDDGIERTHPDLMQNYDALASCDVNGNDLDPMPRYDASNENKHGTRCAGEVAAAANNSHCTVGIAFNAKIGGVRMLDGDVTDMVEAKSVSFNPQHVHIYSASWGPDDDGKTVDGPAPLTRQAFENGVRMGRRGLGSVFVWASGNGGRSKDHCSCDGYTNSIYTISISSTAESGKKPWYLEECSSTLATTYSSGESYDKKIITTDLRQRCTDNHTGTSASAPMAAGIIALALEANPFLTWRDVQHVIVRTSRAGHLNANDWKTNAAGFKVSHLYGFGLMDAEAMVMEAEKWTTVPRQHVCVESTDRQIKTIRPNSAVRSIYKASGCSDNPNRHVNYLEHVVVRITITHPRRGDLAIYLTSPSGTRSQLLANRLFDHSMEGFKNWEFMTIHCWGERAAGDWVLEVYDTPSQLRNFKTPGKLKEWSLVLYGTSVQPYSPTNEFPKVERFRYSRVEDPTDDYGTEDYAGPCDPECSEVGCDGPGPDHCNDCLHYYYKLKNNTRICVSSCPPGHYHADKKRCRKCAPNCESCFGSHGDQCMSCKYGYFLNEETNSCVTHCPDGSYQDTKKNLCRKCSENCKTCTEFHNCTECRDGLSLQGSRCSVSCEDGRYFNGQDCQPCHRFCATCAGAGADGCINCTEGYFMEDGRCVQSCSISYYFDHSSENGYKSCKKCDISCLTCNGPGFKNCTSCPSGYLLDLGMCQMGAICKDGEYVDEHGHCQTCEASCAKCQGPTQEDCTTCPMTRIFDDGRCVSNCPSWKFEFENQCHPCHHTCQRCQGSGPTHCTSCGADNYGREHFLYQGECGDSCPEGHYATEGNTCLPCPDNCELCHSVHVCTRCMKGYFIAPTNHTCQKLECGQGEVQDPDYEECVPCEEGCLGCSLDDPGTCTSCAMGYYRFDHHCYKTCPEKTYSEEVECKACDSNCGSCDQNGCYWCEEGFFLLGGSCVRKCGPGFYGDQEMGECESCHRACETCTGPGHDECSSCQEGLQLLRGMCVHATKTQEEGKFWNDILRKLQPCHSSCKTCNGSATLCTSCPKGAYLLAQACVSSCPQGTWPSVRSGSCENCTEACAICSGADLCKKCQMQPGHPLFLHEGRCYSKCPEGSYAEDGICERCSSPCRTCEGNATNCHSCEGGHVLHHGVCQENCPERHVAVKGVCKHCPEMCQDCIHEKTCKECTPEFFLHDDMCHQSCPRGFYADSRHCVPCHKDCLECSGPKADDCELCLESSWVLYDGLCLEECPAGTYYEKETKECRDCHKSCLTCSSSGTCTTCQKGLIMNPRGSCMANEKCSPSEYWDEDAPGCKPCHVKCFHCMGPAEDQCQTCPMNSLLLNTTCVKDCPEGYYADEDSNRCAHCHSSCRTCEGRHSRQCHSCRPGWFQLGKECLLQCREGYYADNSTGRCERCNRSCKGCQGPRPTDCLSCDRFFFLLRSKGECHRSCPDHYYVEQSTQTCERCHPTCDQCKGKGALNCLSCVWSYHLMGGICTSDCLVGEYRVGEGEKFNCEKCHESCMECKGPGAKNCTLCPANLVLHMDDSHCLHCCNTSDPPSAQECCDCQDTTDECILRTSKVRPATEHFKTALFITSSMMLVLLLGAAVVVWKKSRGRVQPAAKAGYEKLADPNKSYSSYKSSYRESTSFEEDQVIEYRDRDYDEDDDDDIVYMGQDGTVYRKFKYGLLDDDDIDELEYDDESYSYYQ

SEQ ID NO: 3293 - protein, 573 aa, Homo sapiens
LLRSELGRSSGLRGRGASRLPGPKRRGPRVMAKGEGAESGSAAGLLPTSILQSTERPAQVKKEPKKKKQQLSVCNKLCYALGGAPYQVTGCALGFFLQIYLLDVAQKDEEVVFCFSSFQVGPFSASIILFVGRAWDAITDPLVGLCISKSPWTCLGRLMPWIIFSTPLAVIAYFLIWFVPDFPHGQTYWYLLFYCLFETMVTCFHVPYSALTMFISTEQTERDSATAYRMTVEVLGTVLGTAIQGQIVGQADTPCFQDLNSSTVASQSANHTHGTTSHRETQKAYLLAAGVIVCIYIICAVILILGVREQREPYEAQQSEPIAYFRGLRLVMSHGPYIKLITGFLFTSLAFMLVEGNFVLFCTYTLGFRNEFQNLLLAIMLSATLTIPIWQWFLTRFGKKTAVYVGISSAVPFLILVALMESNLIITYAVAVAAGISVAAAFLLPWSMLPDVIDDFHLKQPHFHGTEPIFFSFYVFFTKFASGVSLGISTLSLDFAGYQTRGCSQPERVKFTLNMLVTMAPIVLILLGLLLFKMYPIDEERRRQNKKALQALRDEASSSGCSETDSTELASIL

SEQ ID NO: 3294 - protein, 531 aa, Homo sapiens
KRKPSIAMDTESTYSGYSYYSSHSKKSHRQGERTRERHKSPRNKDGRGSEKSVTIQPPTGEPLLGNDSTRTEEVQDDNWGETTTAITGTSEHSISQEDIARISKDMEDSVGLDCKRYLGLTVASFLGLLVFLTPIAFILLPPILWRDELEPCGTICEGLFISMAFKLLILLIGTWALFFRKRRADMPRVFVFRALLLVLIFLFVVSYWLFYGVRILDSRDRNYQGIVQYAVSLVDALLFIHYLAIVLLELRQLQPMFTLQVVRSTDGESRFYSLGHLSIQRAALVVLENYYKDFTIYNPNLLTASKFRAAKHMAGLKVYNVDGPSNNATGQSRAMIAAAARRRDSSHNELYYEEAEHERRVKKRKARLVVAVEEAFIHIQRLQAEEQQKAPGEVMDPREAAQAIFPSMARALQKYLRITRQQNYHSMESILQHLAFCITNGMTPKAFLERYLSAGPTLQYDKDRWLSTQWRLVSDEAVTNGLRDGIVFVLKCLDFSLVVNVKKIPFIILSEEFIDPKSHKFVLRLQSETSV

SEQ ID NO: 3295 - protein, 298 aa, Homo sapiens
KPLPQAEPTSAGTRAQGRGGGGGDCSGWTMAASAGAGAVIAAPDSRRWLWSVLAAALGLLTAGVSALEVYTPKEIFVANGTQGKLTCKFKSTSTTGGLTSVSWSFQPEGADTTVSFFHYSQGQVYLGNYPPFKDRISWAGDLDKKDASINIENMQFIHNGTYICDVKNPPDIVVQPGHIRLYVVEKENLPVFPVWVVVGIVTAVVLGLTLLISMILAVLYRRKNSKRDYTGCSTSESLSPVKQAPRKSPSDTEGLVKSLPSGSHQGPVIYAQLDHSGGHHSDKINKSESVVYADIRKN

SEQ ID NO: 3296 - protein, 58 aa, Homo sapiens
IFFILLIIFLSWIILKHRKGNNAHENPKEVAIHLHSQGGSSVHPRTLQTNEENSRVLP

SEQ ID NO: 3297 - protein, 176 aa, Homo sapiens
TAGRGAAPQSSMDAPRRDMELLSNSLAAYAHIRANPESFGLYFVLGVCFGLLLTLCLLVISISWAPRPRPRGPAQRRDPRSSTLEPEDDDEDEEDTVTRLGPDDTLPGPELSAEPDGPLNVNVFTSAEELERAQRLEERERILREIWRTGQPDLLGTGTLGPSPTATGTLGRMHYY

SEQ ID NO: 3298 - protein, 580 aa, Homo sapiens
LLESLADSPCALAADTGAAAAPRCPPEMADPEVVVSSCSSHEEENRCNFNQQTSPSEELLLEDQMRRKLKFFFMNPCEKFWARGRKPWKLAIQILKIAMVTIQLVLFGLSNQMVVAFKEENTIAFKHLFLKGYMDRMDDTYAVYTQSDVYDQLIFAVNQYLQLYNVSVGNHAYENKGTKQSAMAICQHFYKRGNIYPGNDTFDIDPEIETECFFVEPDEPFHIGTPAENKLNLTLDFHRLLTVELQFKLKAINLQTVRHQELPDCYDFTLTITFDNKAHSGRIKISLDNDISIRECKDWHVSGSIQKNTHYMMIFDAFVILTCLVSLILCIRSVIRGLQLQQEFVNFFLLHYKKEVSVSDQMEFVNGWYIMIIISDILTIIGSILKMEIQAKSLTSYDVCSILLGTSTMLVWLGVIRYLGFFAKYNLLILTLQAALPNVIRFCCCAAMIYLGYCFCGWIVLGPYHDKFRSLNMVSECLFSLINGDDMFATFAKMQQKSYLVWLFSRIYLYSFISLFIYMILSLFIALITDTYETIKQYQQDGFPETELRTFISECKDLPNSGKYRLEDDPPVSLFCCCKK

SEQ ID NO: 3299 - protein, 92 aa, Homo sapiens
LCPGVNNQPYLCESGHCCGETGCCTYYYELWWFWLLWTVLILFSCCCAFRHRRAKLRLQQQQRQREINLLAYHGACHGAGPFPTGSLLDLRE

SEQ ID NO: 3300 - protein, 420 aa, Homo sapiens
ISMRTKAAGCAERRPLQPRTEAAAAPAGRAMPSEYTYVKLRSDCSRPSLQWYTRAQSKMRRPSLLLKDILKCTLLVFGVWILYILKLNYTTEECDMKKMHYVDPDHVKRAQKYAQQVLQKECRPKFAKTSMALLFEHRYSVDLLPFVQKAPKDSEAESKYDPPFGFRKFSSKVQTLLELLPEHDLPEHLKAKTCRRCVVIGSGGILHGLELGHTLNQFDVVIRLNSAPVEGYSEHVGNKTTIRMTYPEGAPLSDLEYYSNDLFVAVLFKSVDFNWLQAMVKKETLPFWVRLFFWKQVAEKIPLQPKHFRILNPVIIKETAFDILQYSEPQSRFWGRDKNVPTIGVIAVVLATHLCDEVSLAGFGYDLNQPRTPLHYFDSQCMAAMNFQTMHNVTTETKFLLKLVKEGVVKDLSGGIDREF

SEQ ID NO: 3301 - protein, 841 aa, Homo sapiens
RRPGVMAGLNCGVSIALLGVLLLGAARLPRGAEAFEIALPRESNITVLIKLGTPTLLAKPCYIVISKRHITMLSIKSGERIVFTFSCQSPENHFVIEIQKNIDCMSGPCPFGEVQLQPSTSLLPTLNRTFIWDVKAHKSIGLELQFSIPRLRQIGPGESCPDGVTHSISGRIDATVVRIGTFCSNGTVSRIKMQEGVKMALHLPWFHPRNVSGFSIANRSSIKRLCIIESVFEGEGSATLMSANYPEGFPEDELMTWQFVVPAHLRASVSFLNFNLSNCERKEERVEYYIPGSTTNPEVFKLEDKQPGNMAGNFNLSLQGCDQDAQSPGILRLQFQVLVQHPQNESNKIYVVDLSNERAMSLTIEPRPVKQSRKFVPGCFVCLESRTCSSNLTLTSGSKHKISFLCDDLTRLWMNVEKTISCTDHRYCQRKSYSLQVPSDILHLPVELHDFSWKLLVPKDRLSLVLVPAQKLQQHTHEKPCNTSFSYLVASAIPSQDLYFGSFCPGGSIKQIQVKQNISVTLRTFAPSFQQEASRQGLTVSFIPYFKEEGVFTVTPDTKSKVYLRTPNWDRGLPSLTSVSWNISVPRDQVACLTFFKERSGVVCQTGRAFMIIQEQRTRAEEIFSLDEDVLPKPSFHHHSFWVNISNCSPTSGKQLDLLFSVTLTPRTVDLTVILIAAVGGGVLLLSALGLIICCVKKKKKKTNKGPAVGIYNDNINTEMPRQPKKFQKGRKDNDSHVYAVIEDTMVYGHLLQDSSGSFLQPEVDTYRPFQGTMGVCPPSPPTICSRAPTAKLATEEPPPRSPPESESEPYTFSHPNNGDVSSKDTDIPLLNTQEPMEPAE

SEQ ID NO: 3302 - protein, 151 aa, Homo sapiens
VRRGVVLRRLSGAVGVGCGMCSAGELLRGGDGGERDEDGDALAEREAAGTGWDPGASPRRRGQRPKESEQDVEDSQNHTGEPVGDDYKKMGTLFGELNKNLINMGFTRMYFGERIVEPVIVIFFWVMLWFLGLQALGLVAVLCLVIIYVQQ

SEQ ID NO: 3303 - protein, 525 aa, Homo sapiens
LRWFTTLMLCASFLGLGLSVAIVGPTFQDLATNVNRNISSLSFIFVGRALGYLSGSVIGGFLVDVMNYFLLLGISMSATTVGLYLVPFCKTAILLTVMMSIFGVSIGILDTGGNVLILAIWGDKGAPHMQALHFSFALGAFLAPLLAKLALGPTASAENHTESDFHPALNQSSDADSEALFGVPNDKNLLWAYAVIGTYMFLVSVIFFCLFLKNSSKQEKARASAETFRRAKYHNALLCLLFLFFFFYVGAEVTYGSYVFSFATTHAGMKESEAAGLNSIFWGTFAACRGLAIFFATCLQPGTMIVLSNIGSLTSSLFLVLFDKNPICLWIATSVYGASMATTFPSGVSWIEQYTTIHGKSAAFFVIGASLGEMAIPAVIGILQGKYPDLPVVLYTSLGASIATGILFPVLYKLATSPLDRQRKEDRKSEDQKALLSSSGLNEYEEENEEEDAEKWNEMDFEMIETNDTMRHSIIETSRSSLTEPTAEVYNQYPSNALVFESSPFNTGSAHVKHLPETRTKGTNV

SEQ ID NO: 3304 - protein, 510 aa, Homo sapiens
RLSLGGGRSGAMVDRGPLLTSAIIFYLAIGAAIFEVLEEPHWKEAKKNYYTQKLHLLKEFPCLGQEGLDKILEVVSDAAGQGVAITGNQTFNNWNWPNAMIFAATVITTIGYGNVAPKTPAGRLFCVFYGLFGVPLCLTWISALGKFFGGRAKRLGQFLTKRGVSLRKAQITCTVIFIVWGVLVHLVIPPFVFMVTEGWNYIEGLYYSFITISTIGFGDFVAGVNPSANYHALYRYFVELWIYLGLAWLSLFVNWKVSMFVEVHKAIKKRRRRRKESFESSPHSRKALQVKGSTASKDVNIFSFLSKKEETYNDLIKQIGKKAMKTSGGGETGPGPGLGPQGGGLPALPPSLVPLVVYSKNRVPTLEEVSQTLRSKGHVSRSPDEEAVARAPEDSSPAPEVFMNQLDRISEECEPWDAQDYHPLIFQDASITFVNTEAGLSDEETSKSSLEDNLAGEESPQQGAEAKAPLNMGEFPSSSESTFTSTESELSVPYEQLMNEYNKANSPKGT

SEQ ID NO: 3305 - protein, 760 aa, Homo sapiens
VPAAEGTPLCPVLGTRDGRHAPRSIVSLIWVPGRCGRRAGSARVTPAAGAPGPAGAGRGVPGRAAAMKHLKRWWSAGGGLLHLTLLLSLAGLRVDLDLYLLLPPPTLLQDELLFLGGPASSAYALSPFSASGGWGRAGHLHPKGRELDPAAPPEGQLLREVRALGVPFVPRTSVDAWLVHSVAAGSADEAHGLLGAAAASSTGGAGASVDGGSQAVQGGGGDPRAARSGPLDAGEEEKAPAEPTAQVPDAGGCASEENGVLREKHEAVDHSSQHEENEERVSAQKENSLQQNDDDENKIAEKPDWEAEKTTESRNERHLNGTDTSFSLEDLFQLLSSQPENSLEGISLGDIPLPGSISDGMNSSAHYHVNFSQAISQDVNLHEAILLCPNNTFRRDPTARTSQSQEPFLQLNSHTTNPEQTLPGTNLTGFLSPVDNHMRNLTSQDLLYDLDINIFDEINLMSLATEDNFDPIDVSQLFDEPDSDSGLSLDSSHNNTSVIKSNSSHSVCDEGAIGYCTDHESSSHHDLEGAVGGYYPEPSKLCHLDQSDSDFHGDLTFQHVFHNHTYHLQPTAPESTSEPFPWPGKSQKIRSRYLEDTDRNLSRDEQRAKALHIPFSVDEIVGMPVDSFNSMLSRYYLTDLQVSLIRDIRRRGKNKVAAQNCRKRKLDIILNLEDDVCNLQAKKETLKREQAQCNKAINIMKQKLHDLYHDIFSRLRDDQGRPVNPNHYALQCTHDGSILIVPKELVASGHKKETQKGKRK

SEQ ID NO: 3306 - protein, 60 aa, Homo sapiens
LPLCPGLSVPPTPAPILRADLAGILGVSGVLLFDCGYLLHLLCRQKHRPAPRLQPSHTSS

SEQ ID NO: 3307 - protein, 198 aa, Homo sapiens
LHLLSVPRQRAVEMAGPRPRWRDQLLFMSIIVLVIVVICLMFYALLWEAGNLTDLPNLRIGFYNFCLWNEDTSTLQCHQFPELEALGVPRVGLGLARLGVYGSLVLTLFAPQPLLLAQCNSDERAWRLAVGFLAVSSVLLAGGLGLFLSYVWKWVRLSLPGPGFLALGSAQALLILLLIAMAVFPLRAERAESKLESC

SEQ ID NO: 3308 - protein, 804 aa, Homo sapiens
LRPRQDPNRARGRRAGAGDAGTRPLAQATADSPEAEPPRRARVSLKRRIELTVEYPWRCGALSPTSNCRTGMWSWKCLLFWAVLVTATLCTARPSPTLPEQDALPSSEDDDDDDDSSSEEKETDNTKPNRMPVAPYWTSPEKMEKKLHAVPAAKTVKFKCPSSGTPNPTLRWLKNGKEFKPDHRIGGYKVRYATWSIIMDSVVPSDKGNYTCIVENEYGSINHTYQLDVVERSPHRPILQAGLPANKTVALGSNVEFMCKVYSDPQPHIQWLKHIEVNGSKIGPDNLPYVQILKTAGVNTTDKEMEVLHLRNVSFEDAGEYTCLAGNSIGLSHHSAWLTVLEALEERPAVMTSPLYLEIIIYCTGAFLISCMVGSVIVYKMKSGTKKSDFHSQMAVHKLAKSIPLRRQVTVSADSSASMNSGVLLVRPSRLSSSGTPMLAGVSEYELPEDPRWELPRDRLVLGKPLGEGCFGQVVLAEAIGLDKDKPNRVTKVAVKMLKSDATEKDLSDLISEMEMMKMIGKHKNIINLLGACTQDGPLYVIVEYASKGNLREYLQARRPPGLEYCYNPSHNPEEQLSSKDLVSCAYQVARGMEYLASKKCIHRDLAARNVLVTEDNVMKIADFGLARDIHHIDYYKKTTNGRLPVKWMAPEALFDRIYTHQSDVWSFGVLLWEIFTLGGSPYPGVPVEELFKLLKEGHRMDKPSNCTNELYMMMRDCWHAVPSQRPTFKQLVEDLDRIVALTSNQEYLDLSMPLDQYSPSFPDTRSSTCSSGEDSVFSHEPLPEEPCLPRHPAQLANGGLKRR

SEQ ID NO: 3309 - protein, 231 aa, Homo sapiens
IRTMSYVFVNDSSQTNVPLLQACIDGDFNYSKRLLESGFDPNIRDSRGRTGLHLAAARGNVDICQLLHKFGADLLATDYQGNTALHLCGHVDTIQFLVSNGLKIDICNHQGATPLVLAKRRGVNKDVIRLLESLEEQEVKGFNRGTHSKLETMQTAESESAMESHSLLNPNLQQGEGVLSSFRTTWQEFVEDLGFWRVLLLIFVIALLSLGIAYYVSGVLPFVENQPELVH

SEQ ID NO: 3310 - protein, 53 aa, Homo sapiens
LHQLQLLLWKNVTLKRRSPWVLAFEIFIPLVLFFILLGLRQKKPTISVKEVCK

SEQ ID NO: 3311 - protein, 271 aa, Homo sapiens
LISGDASIILLQTSQRWLSRWSTMEGDCLSCMKYLMFVFNFFIFLGGACLLAIGIWVMVDPTGFREIVAANPLLLTGAYILLAMGGLLFLLGFLGCCGAVRENKCLLLFFFLFILIIFLAELSAAILAFIFRENLTREFFTKELTKHYQGNNDTDVFSATWNSVMITFGCCGVNGPEDFKFASVFRLLTLDSEEVPEACCRREPQSRDGVLLSREECLLGRSLFLNKQGCYTVILNTFETYVYLAGALAIGVLAIELFAMIFAMCLFRGIQ

SEQ ID NO: 3312 - protein, 1603 aa, Homo sapiens
LLLLLLLLALCGCPAPAAASPLLLFANRRDVRLVDAGGVKLESTIVVSGLEDAAAVDFQFSKGAVYWTDVSEEAIKQTYLNQTGAAVQNVVISGLVSPDGLACDWVGKKLYWTDSETNRIEVANLNGTSRKVLFWQDLDQPRAIALDPAHGYMYWTDWGETPRIERAGMDGSTRKIIVDSDIYWPNGLTIDLEEQKLYWADAKLSFIHRANLDGSFRQKVVEGSLTHPFALTLSGDTLYWTDWQTRSIHACNKRTGGKRKEILSALYSPMDIQVLSQERQPFFHTRCEEDNGGCSHLCLLSPSEPFYTCACPTGVQLQDNGRTCKAGAEEVLLLARRTDLRRISLDTPDFTDIVLQVDDIRHAIAIDYDPLEGYVYWTDDEVRAIRRAYLDGSGAQTLVNTEINDPDGIAVDWVARNLYWTDTGTDRIEVTRLNGTSRKILVSEDLDEPRAIALHPVMGLMYWTDWGENPKIECANLDGQERRVLVNASLGWPNGLALDLQEGKLYWGDAKTDKIEVINVDGTKRRTLLEDKLPHIFGFTLLGDFIYWTDWQRRSIERVHKVKASRDVIIDQLPDLMGLKAVNVAKVVGTNPCADRNGGCSHLCFFTPHATRCGCPIGLELLSDMKTCIVPEAFLVFTSRAAIHRISLETNNNDVAIPLTGVKEASALDFDVSNNHIYWTDVSLKTISRAFMNGSSVEHVVEFGLDYPEGMAVDWMGKNLYWADTGTNRIEVARLDGQFRQVLVWRDLDNPRSLALDPTKGYIYWTEWGGKPRIVRAFMDGTNCMTLVDKVGRANDLTIDYADQRLYWTDLDTNMIESSNMLGQERVVIADDLPHPFGLTQYSDYIYWTDWNLHSIERADKTSGRNRTLIQGHLDFVMDILVFHSSRQDGLNDCMHNNGQCGQLCLAIPGGHRCGCASHYTLDPSSRNCSPPTTFLLFSQKSAISRMIPDDQHSPDLILPLHGLRNVKAIDYDPLDKFIYWVDGRQNIKRAKDDGTQPFVLTSLSQGQNPDRQPHDLSIDIYSRTLFWTCEATNTINVHRLSGEAMGVVLRGDRDKPRAIVVNAERGYLYFTNMQDRAAKIERAALDGTEREVLFTTGLIRPVALVVDNTLGKLFWVDADLKRIESCDLSGANRLTLEDANIVQPLGLTILGKHLYWIDRQQQMIERVEKTTGDKRTRIQGRVAHLTGIHAVEEVSLEEFSAHPCARDNGGCSHICIAKGDGTPRCSCPVHLVLLQNLLTCGEPPTCSPDQFACATGEIDCIPGAWRCDGFPECDDQSDEEGCPVCSAAQFPCARGQCVDLRLRCDGEADCQDRSDEADCDAICLPNQFRCASGQCVLIKQQCDSFPDCIDGSDELMCEITKPPSDDSPAHSSAIGPVIGIILSLFVMGGVYFVCQRVVCQRYAGANGPFPHEYVSGTPHVPLNFIAPGGSQHGPFTGIACGKSMMSSVSLMGGRGGVPLYDRNHVTGASSSSSSSTKATLYPPILNPPPSPATDPSLYNMDMFYSSNIPATARPYRPYIIRGMAPPTTPCSTDVCDSDYSASRWKASKYYLDLNSDSDPYPPPPTPHSQYLSAEDSCPPSPATERSYFHLFPPPPSPCTDSS

SEQ ID NO: 3313 - protein, 462 aa, Homo sapiens
ITNLQIGNLFGQHRSTIITLYNGAFDSSSAVFLIIKLLYEKGISLRASFIFISVCSTWHVARTFLLMPRGHIPYPLPPNYSYGLCPGNGTTKEEKETAEHENRELQSKEFLSAKEETPGAGQKQELRSFWSYAFSRRFAWHLVWLSVIQLWHYLFIGTLNSLLTNMAGGDMARVSTYTNAFAFTQFGVLCAPWNGLLMDRLKQKYQKEARKTGSFNIRGPHSLCFPNHHLPHATYRDKAKMKLPLLLALLFGAVSALHLRSETSTFETPLGAKTLPEDEETPEQEMEETPCRELEEEEEWGSGSEDASKKDGAVESISVPDMVDKNLTCPEEEDTVKVVGIPGCQTCRYLLVRSLQTFSQAWFTCRRCYRGNLVSIHNFNINYRIQCSVSALNQGQVWIGGRITGSGRCRRFQWVDGSRWNFAYWAAHQPWSRGGHCVALCTRGGHWRRAHCLRRLPFICSY

SEQ ID NO: 3314 - protein, 239 aa, Homo sapiens
VALAGCWSPRSAPSGLWGQGWVSLMYGKSSTRAVLLLLGIQLTALWPIAAVEIYTSRVLEAVNGTDARLKCTFSSFAPVGDALTVTWNFRPLDGGPEQFVFYYHIDPFQPMSGRFKDRVSWDGNPERYDASILLWKLQFDDNGTYTCQVKNPPDVDGVIGEIRLSVVHTVRFSEIHFLALAIGSACALMIIIVIVVVLFQHYRKKRWAERAHKVVEIKSKEEERLNQEKKVSVYLEDTD

SEQ ID NO: 3315 - protein, 200 aa, Homo sapiens
KMSSENCFVAENSSLHPESGQENDATSPHFSTRHEGSFQVPVLCAVMNVVFITILIIALIALSVGQYNCPGQYTFSMPSDSHVSSCSEDWVGYQRKCYFISTVKRSWTSAQNACSEHGATLAVIDSEKDMNFLKRYAGREEHWVGLKKEPGHPWKWSNGKEFNNWFNVTGSDKCVFLKNTEVSSMECEKNLYWICNKPYK

SEQ ID NO: 3316 - protein, 436 aa, Homo sapiens
ILCGPSREGDSPVAMGMTRMLLECSLSDKLCVIQEKQYEVIIVPTLLVTIFLILLGVILWLFIREQRTQQQRSGPQGIAPVPPPRDLSWEAGHGGNVALPLKETSVENFLGATTPALAKLQVPREQLSEVLEQICSGSCGPIFRANMNTGDPSKPKSVILKALKEPAGLHEVQDFLGRIQFHQYLGKHKNLVQLEGCCTEKLPLYMVLEDVAQGDLLSFLWTCRRDVMTMDGLLYDLTEKQVYHIGKQVLLALEFLQEKHLFHGDVAARNILMQSDLTAKLCGLGLAYEVYTRGAISSTQTIPLKWLAPERLLLRPASIRADVWSFGILLYEMVTLGAPPYPEVPPTSILEHLQRRKIMKRPSSCTHTMYSIMKSCWRWREADRPSPRELRLRLEAAIKTADDEAVLQVPELVVPELYAAVAGIRVESLFYNYSML

SEQ ID NO: 3317 - protein, 829 aa, Homo sapiens
LQLIMFSGFNVFRVGISFVIMCIFYMPTVNSLPELSPQKYFSTLQPGKASLAYFCQADSPRTSVFLEELNEAVRPLQDYGISVAKVNCVKEEISRYCGKEKDLMKAYLFKGNILLREFPTDTLFDVNAIVAHVLFALLFSEVKYITNLEDLQNIENALKGKANIIFSYVRAIGIPEHRAVMEAAFVYGTTYQFVLTTEIALLESIGSEDVEYAHLYFFHCKLVLDLTQQCRRTLMEQPLTTLNIHLFIKTMKAPLLTEVAEDPQQVSTVHLQLGLPLVFIVSQQATYEADRRTAEWVAWRLLGKAGVLLLLRDSLEVNIPQDANVVFKRAEEGVPVEFLVLHDVDLIISHVENNMHIEEIQEDEDNDMEGPDIDVQDDEVAETVFRDRKRKLPLELTVELTEETFNATVMASDSIVLFYAGWQAVSMAFLQSYIDVAVKLKGTSTMLLTRINCADWSDVCTKQNVTEFPIIKMYKKGENPVSYAGMLGTEDLLKFIQLNRISYPVNITSIQEAEEYLSGELYKDLILYSSVSVLGLFSPTMKTAKEDFSEAGNYLKGYVITGIYSEEDVLLLSTKYAASLPALLLARHTEGKIESIPLASTHAQDIVQIITDALLEMFPEITVENLPSYFRLQKPLLILFSDGTVNPQYKKAILTLVKQKYLDSFTPCWLNLKNTPVGRGILRAYFDPLPPLPLLVLVNLHSGGQVFAFPSDQAIIEENLVLWLKKLEAGLENHITILPAQEWKPPLPAYDFLSMIDAATSQRGTRKVPKCMKETDVQENDKEQHEDKSAVRKEPIETLRIKHWNRSNWFKEAEKSFRRDKELGCSKVN

SEQ ID NO: 3318 - protein, 642 aa, Homo sapiens
LGLPLRLRLLLLLWAAAASAQGHLRSGPRIFAVWKGHVGQDRVDFGQTEPHTVLFHEPGSSSVWVGGRGKVYLFDFPEGKNASVRTVNIGSTKGSCLDKRDCENYITLLERRSEGLLACGTNARHPSCWNLVNGTVVPLGEMRGYAPFSPDENSLVLFEGDEVYSTIRKQEYNGKIPRFRRIRGESELYTSDTVMQNPQFIKATIVHQDQAYDDKIYYFFREDNPDKNPEAPLNVSRVAQLCRGDQGGESSLSVSKWNTFLKAMLVCSDAATNKNFNRLQDVFLLPDPSGQWRDTRVYGVFSNPWNYSAVCVYSLGDIDKVFRTSSLKGYHSSLPNPRPGKCLPDQQPIPTETFQVADRHPEVAQRVEPMGPLKTPLFHSKYHYQKVAVHRMQASHGETFHVLYLTTDRGTIHKVVEPGEQEHSFAFNIMEIQPFRRAAAIQTMSLDAERRKLYVSSQWEVSQVPLDLCEVYGGGCHGCLMSRDPYCGWDQGRCISIYSSERSVLQSINPAEPHKECPNPKPDKAPLQKVSLAPNSRYYLSCPMESRHATYSWRHKENVEQSCEPGHQSPNCILFIENLTAQQYGHYFCEAQEGSYFREAQHWQLLPEDGIMAEHLLGHACALAASLWLGVLPTLTLGLLVH

SEQ ID NO: 3319 - protein, 495 aa, Homo sapiens
LPACPALHNMQPSGLEGPGTFGRWPLLSLLLLLLLLQPVTCAYTTPGPPRALTTLGAPRAHTMPGTYAPSTTLSSPSTQGLQEQARALMRDFPLVDGHNDLPLVLRQVYQKGLQDVNLRNFSYGQTSLDRLRDGLVGAQFWSAYVPCQTQDRDALRLTLEQIDLIRRMCASYSELELVTSAKALNDTQKLACLIGVEGGHSLDNSLSILRTFYMLGVRYLTLTHTCNTPWAESSAKGVHSFYNNISGLTDFGEKVVAEMNRLGMMVDLSHVSDAVARRALEVSQAPVIFSHSAARGVCNSARNVPDDILQLLKKNGGVVMVSLSMGVIQCNPSANVSTVADHFDHIKAVIGSKFIGIGGDYDGAGKFPQGLEDVSTYPVLIEELLSRGWSEEELQGVLRGNLLRVFRQVEKVQEENKWQSPLEDKFPDEQLSSSCHSDLSRLRQRQSLTSGQELTEIPIHWTAKLPAKWSVSESSPHMAPVLAVVATFPVLILWL

SEQ ID NO: 3320 - protein, 58 aa, Homo sapiens [sequence omitted]

SEQ ID NO: 3321 - protein, 297 aa, Homo sapiens
LPWALLLLWVPGCFALSKCRTVAGPVGGSLSVQCPYEKEHRTLNKYWCRPPQIFLCDKIVETKGSAGKRNGRVSIRDSPANLSFTVTLENLTEEDAGTYWCGVDTPWLRDFHDPVVEVEVSVFPASTSMTPASITAAKTSTITTAFPPVSSTTLFAVGATHSASIQEETEEVVNSQLPLLLSLLALLLLLLVGASLLAWRMFQKWIKAGDHSELSQNPKQAATQSELHYANLELLMWPLQEKPAPPREVEVEYSTVASPREELHYASVVFDSNTNRIAAQRPREEEPDSDYSVIRKT

SEQ ID NO: 3322 - protein, 268 aa, Homo sapiens
TKEARMLLAWVQAFLVSNMLLAEAYGSGGCFWDNGHLYREDQTSPAPGLRCLNWLDAQSGLASAPVSGAGNHSYCRNPDEDPRGPWCYVSGEAGVPEKRPCEDLRCPETTSQALPAFTTEIQEASEGPGADEVQVFAPANALPARSEAAAVQPVIGISQRVRMNSKEKKDLGTLGYVLGITMMVIIIAIGAGIILGYSYKRGKDLKEQHDQKVCEREMQRITLPLSAFTNPTCEIVDEKTVVVHTSQTPVDPQEGTTPLMGQAGTPGA

SEQ ID NO: 3323 - protein, 284 aa, Homo sapiens
LATAETRMCVGARRLGRGPCAALLLLGLGLSTVTGLHCVGDTYPSNDRCCHECRPGNGMVSRCSRSQNTVCRPCGPGFYNDVVSSKPCKPCTWCNLRSGSERKQLCTATQDTVCRCRAGTQPLDSYKPGVDCAPCPPGHFSPGDNQACKPWTNCTLAGKHTLQPASNSSDAICEDRDPPATQPQETQGPPARPITVQPTEAWPRTSQGPSTRPVEVPGGRAVAAILGLGLVLGLLGPLAILLALYLLRRDQRLPPDAHKPPGGGSFRTPIQEEQADAHSTLAKI

SEQ ID NO: 3324 - protein, 568 aa, Homo sapiens
VELRGAGPPAAGQRLLQAEAPAENEPEPEVVVVSWQSGGTGSKLRWFTTLMLCASFLGLGLSVAIVGPTFQDLATNVNRNISSLSFIFVGRALGYLSGSVIGGFLVDVMNYFLLLGISMSATTVGLYLVPFCKTAILLTVMMSIFGVSIGILDTGGNVLILAIWGDKGAPHMQALHFSFALGAFLAPLLAKLALGPTASAENHTESDFHPALNQSSDADSEALFGVPNDKNLLWAYAVIGTYMFLVSVIFFCLFLKNSSKQEKARASAETFRRAKYHNALLCLLFLFFFFYVGAEVTYGSYVFSFATTHAGMKESEAAGLNSIFWGTFAACRGLAIFFATCLQPGTMIVLSNIGSLTSSLFLVLFDKNPICLWIATSVYGASMATTFPSGVSWIEQYTTIHGKSAAFFVIGASLGEMAIPAVIGILQGKYPDLPVVLYTSLGASIATGILFPVLYKLATSPLDRQRKEDRKSEDQKALLSSSGLNEYEEENEEEDAEKWNEMDFEMIETNDTMRHSIIETSRSSLTEPTAEVYNQYPSNALVFESSPFNTGSAHVKHLPETRTKGTNV

SEQ ID NO: 3325 - protein, 333 aa, Homo sapiens
ISRPDTAQLDGTMAPAFLLLLLLWPQGCVSGPSADSVYTKVRLLEGETLSVQCSYKGYKNRVEGKVWCKIRKKKCEPGFARVWVKGPRYLLQDDAQAKVVNITMVALKLQDSGRYWCMRNTSGILYPLMGFQLDVSPAPQTERNIPFTHLDNILKSGTVTTGQAPTSGPDAPFTTGVMVFTPGLITLPRLLASTRPASKTGYSFTATSTTSQGPRRTMGSQTVTASPSNARDSSAGPESISTKSGDLSTRSPTTGLCLTSRSLLNRLPSMPSIRHQDVYSTVLGVVLTLLVLMLIMVYGFWKKRHMASYSMCSDPSTRDPPGRPEPYVEVYLI

SEQ ID NO: 3326 - protein, 56 aa, Homo sapiens
RTMQISPTASSRPPACSVTGYSHLLKKHFHTVSLSISLILTAWFINMDLNFMDTLS

SEQ ID NO: 3327 - protein, 30 aa, Homo sapiens
TWGEIISLSRPCYAVYLGVLYVLLPMPSLK

SEQ ID NO: 3328 - protein, 616 aa, Homo sapiens
LDSSLQGLHSVSVCIGFTRAFRMVWQNTENALLETVIVSTVHLISSTDIWWNRSLDTGLRLLLFAVTVLLTSWTEKKQRRKTTATLCILNIVFSPFVLVIIVFSTLLSSPLLPLFTLPVFLVGFPRPIQSWPGAAGTTACVCADTVYYYQMVPRLTAVLQTAMAAGSLGLLLPGSHYLGRFQDRLMWIMILECGYTYCSINIKGLELQETSCHTAEARRVDEVFEDAFEQEYTRVCSLNEHFGNVLTPCTVLPVKLYSDARNVLSGIIDSHENLKEFKGDLIKVLVWILVQYCSKRPGMKENVHNTENKGKAPLMLPALNTLPPPKSPEDIDSLNSETFNDWSDDNIFDDEPTIKKVIEEKHQLKDLPGTNLFIPGSVESQRVGDHSTGTVPENDLYKAVLLGYPAVDKGKQEDMPYIPLMEFSCSHSHLVCLPAEWRTSCMPSSKMKEMSSLFPEDWYQFVLRQLECYHSEEKASNVLEEIAKDKVLKDFYVHTVMTCYFSLFGIDNMAPSPGHILRVYGGVLPWSVALDWLTEKPELFQLALKAFRYTLKLMIDKASLGPIEDFRELIKYLEEYERDWYIGLVSDEKWKEAILQEKPYLFSLGYDSNMVRLKNF

SEQ ID NO: 3329 - protein, 253 aa, Homo sapiens [sequence omitted]

SEQ ID NO: 3330 - protein, 253 aa, Homo sapiens
MWQLLLPTALLLLVSAGMRTDLPKAVVFLEPQWYRVLEKDSVTLKCQGAYSPEDNSTQWFHNESLISSQASSYFIDAATVDDSGEYRCQTNLSTLSDPVQLEVHIGWLLLQAPRWVFKEEDPIHLRCHSWKNTALHKVTYLQNGKGRKYFHHNSDFYIPKATLKDSGSYFCRGLFGSKNVSSETVNITITQGLAVSTISSFFPPGYQVSFCLVMVLLFAVDTGLYFSVKTNIRSSTRDWKDHKFKWRKDPQDK

SEQ ID NO: 3331 - protein, 1123 aa, Homo sapiens
MLLFAWEGWHNAAGIPLKPLYEDFTALSNEAYKQDGFTDTGAYWRSWYNSPTFEDDLEHLYQQLEPLYLNLHAFVRRALHRRYGDRYINLRGPIPAHLLGDMWAQSWENIYDMVVPFPDKPNLDVTSTMLQQGWNATHMFRVAEEFFTSLELSPMPPEFWEGSMLEKPADGREVVCHASAWDFYNRKDFRIKQCTRVTMDQLSTVHHEMGHIQYYLQYKDLPVSLRRGANPGFHEAIGDVLALSVSTPEHLHKIGLLDRVTNDTESDINYLLKMALEKIAFLPFGYLVDQWRWGVFSGRTPPSRYNFDWWYLRTKYQGICPPVTRNETHFDAGAKFHVPNVTPYIRYFVSFVLQFQFHEALCKEAGYEGPLHQCDIYRSTKAGAKLRKVLQAGSSRPWQEVLKDMVGLDALDAQPLLKYFQPVTQWLQEQNQQNGEVLGWPEYQWHPPLPDNYPEGIDLVTDEAEASKFVEEYDRTSQVVWNEYAEANWNYNTNITTETSKILLQKNMQIANHTLKYGTQARKFDVNQLQNTTIKRIIKKVQDLERAALPAQELEEYNKILLDMETTYSVATVCHPNGSCLQLEPDLTNVMATSRKYEDLLWAWEGWRDKAGRAILQFYPKYVELINQAARLNGYVDAGDSWRSMYETPSLEQDLERLFQELQPLYLNLHAYVRRALHRHYGAQHINLEGPIPAHLLGNMWAQTWSNIYDLVVPFPSAPSMDTTEAMLKQGWTPRRMFKEADDFFTSLGLLPVPPEFWNKSMLEKPTDGREVVCHASAWDFYNGKDFRIKQCTTVNLEDLVVAHHEMGHIQYFMQYKDLPVALREGANPGFHEAIGDVLALSVSTPKHLHSLNLLSSEGGSDEHDINFLMKMALDKIAFIPFSYLVDQWRWRVFDGSITKENYNQEWWSLRLKYQGLCPPVPRTQGDFDPGAKFHIPSSVPYIRYFVSFIIQFQFHEALCQAAGHTGPLHKCDIYQSKEAGQRLATAMKLGFSRPWPEAMQLITGQPNMSASAMLSYFKPLLDWLRTENELHGEKLGWPQYNWTPNSARSEGPLPDSGRVSFLGLDLDAQQARVGQWLLLFLGIALLVATLGLSQRLFSIRHRSLHRHSHGPQFGSEVELRHS

SEQ ID NO: 3332 - protein, 1902 aa, Homo sapiens
MVSVVGPMGLLVVLLVGGCAAEEPPRFIKEPKDQIGVSGGVASFVCQATGDPKPRVTWNKKGKKVNSQRFETIEFDESAGAVLRIQPLRTPRDENVYECVAQNSVGEITVHAKLTVLREDQLPSGFPNIDMGPQLKVVERTRTATMLCAASGNPDPEITWFKDFLPVDPSASNGRIKQLRSGALQIESSEETDQGKYECVATNSAGVRYSSPANLYVRVRRVAPRFSILPMSHEIMPGGNVNITCVAVGSPMPYVKWMQGAEDLTPEDDMPVGRNVLELTDVKDSANYTCVAMSSLGVIEAVAQITVKSLPKAPGTPMVTENTATSITITWDSGNPDPVSYYVIEYKSKSQDGPYQIKEDITTTRYSIGGLSPNSEYEIWVSAVNSIGQGPPSESVVTRTGEQAPASAPRNVQARMLSATTMIVQWEEPVEPNGLIRGYRVYYTMEPEHPVGNWQKHNVDDSLLTTVGSLLEDETYTVRVLAFTSVGDGPLSDPIQVKTQQGVPGQPMNLRAEARSETSITLSWSPPRQESIIKYELLFREGDHGREVGRTFDPTTSYVVEDLKPNTEYAFRLAARSPQGLGAFTPVVRQRTLQSKPSAPPQDVKCVSVRSTAILVSWRPPPPETHNGALVGYSVRYRPLGSEDPEPKEVNGIPPTTTQILLEALEKWTQYRITTVAHTEVGPGPESSPVVVRTDEDVPSAPPRKVEAEALNATAIRVLWRSPAPGRQHGQIRGYQVHYVRMEGAEARGPPRIKDVMLADAQEMVITNLQPETAYSITVAAYTMKGDGARSKPKVVVTKGAVLGRPTLSVQQTPEGSLLARWEPPAGTAEDQVLGYRLQFGREDSTPLATLEFPPSEDRYTASGVHKGATYVFRLAARSRGGLGEEAAEVLSIPEDTPRGHPQILEAAGNASAGTVLLRWLPPVPAERNGAIVKYTVAVREAGALGPARETELPAAAEPGAENALTLQGLKPDTAYDLQVRAHTRRGPGPFSPPVRYRTFLRDQVSPKNFKVKMIMKTSVLLSWEFPDNYNSPTPYKIQYNGLTLDVDGRTTKKLITHLKPHTFYNFVLTNRGSSLGGLQQTVTAWTAFNLLNGKPSVAPKPDADGFIMVYLPDGQSPVPVQSYFIVMVPLRKSRGGQFLTPLGSPEDMDLEELIQDISRLQRRSLRHSRQLEVPRPYIAARFSVLPPTFHPGDQKQYGGFDNRGLEPGHRYVLFVLAVLQKSEPTFAASPFSDPFQLDNPDPQPIVDGEEGLIWVIGPVLAVVFIICIVIAILLYKNKPDSKRKDSEPRTKCLLNNADLAPHHPKDPVEMRRINFQTPGMLSHPPIPIADMAEHTERLKANDSLKLSQEYESIDPGQQFTWEHSNLEVNKPKNRYANVIAYDHSRVILQPIEGIMGSDYINANYVDGYRCQNAYIATQGPLPETFGDFWRMVWEQRSATIVMMTRLEEKSRIKCDQYWPNRGTETYGFIQVTLLDTIELATFCVRTFSLHKNGSSEKREVRQFQFTAWPDHGVPEYPTPFLAFLRRVKTCNPPDAGPIVVHCSAGVGRTGCFIVIDAMLERIKPEKTVDVYGHVTLMRSQRNYMVQTEDQYSFIHEALLEAVGCGNTEVPARSLYAYIQKLAQVEPGEHVTGMELEFKRLANSKAHTSRFISANLPCNKFKNRLVNIMPYESTRVCLQPIRGVEGSDYINASFIDGYRQQKAYIATQGPLAETTEDFWRMLWENNSTIVVMLTKLREMGREKCHQYWPAERSARYQYFVVDPMAEYNMPQYILREFKVTDARDGQSRTVRQFQFTDWPEQGVPKSGEGFIDFIGQVHKTKEQFGQDGPISVHCSAGVGRTGVFITLSIVLERMRYEGVVDIFQTVKMLRTQRPAMVQTEDEYQFCYQAALEYLGSFDHYAT

SEQ ID NO: 3333 - protein, 809 aa, Homo sapiens
MPWSACPHPRCVPRRCVIPCQSFVVTDVDYFSFQPDRPLGTRLTVTLTQHVQPPEPRDLQISTDQDHFLLTWSVALGSPQSHWLSPGDLEFEVVYKRLQDSWEDAAILLSNTSQATLGPEHLMPSSTYVARVRTRLAPGSRLSGRPSKWSPEVCWDSQPGDEAQPQNLECFFDGAAVLSCSWEVRKEVASSVSFGLFYKPSPDAGEEECSPVLREGLGSLHTRHHCQIPVPDPATHGQYIVSVQPRRAEKHIKSSVNIQMAPPSLNVTKDGDSYSLRWETMKMRYEHIDHTFEIQYRKDTATWKDSKTETLQNAHSMALPALEPSTRYWARVRVRTSRTGYNGIWSEWSEARSWDTESVLPMWVLALIVIFLTIAVLLALRFCGIYGYRLRRKWEEKIPNPSKSHLFQNGSAELWPPGSMSAFTSGSPPHQGPWGSRFPELEGVFPVGFGDSEVSPLTIEDPKHVCDPPSGPDTTPAASDLPTEQPPSPQPGPPAASHTPEKQASSFDFNGPYLGPPHSRSLPDILGQPEPPQEGGSQKSPPPGSLEYLCLPAGGQVQLVPLAQAMGPGQAVEVERRPSQGAAGSPSLESGGGPAPPALGPRVGGQDQKDSPVAIPMSSGDTEDPGVASGYVSSADLVFTPNSGASSVSLVPSLGLPSDQTPSLCPGLASGPPGAPGPVKSGFEGYVELPPIEGRSPRSPRNNPVPPEAKSPVLNPGERPADVSPTSPQPEGLLVLQQVGDYCFLPGLGPGPLSLRSKPSSPGPGPEIKNLDQAFQVKKPPGQAVPQVPVIQLFKALVVSVMSVGPPVP

SEQ ID NO: 3334 - protein, 1196 aa, Homo sapiens [sequence omitted]

SEQ ID NO: 3335 - protein, 197 aa, Homo sapiens
MMTFYRTTPAVLFWQWINQSFNAVVNYTNRSGDAPLTVNELGTAYVSATTGAVATALGLNALTKHVSPLIGRFVPFAAVAAANCINIPLMRQRELKVGIPVTDENGNRLGESANAAKQAITQVVVSRILMAAPGMAIPPFIMNTLEKKAFLKRFPWMSAPIQVGLVGFCLVFATPLCCALFPQKRYVFVIRQNHHEY

SEQ ID NO: 3336 - protein, 65 aa, Homo sapiens
LVIAVAIATVIVISLVMLRKRQYGTISHGIVEVDPMLTPEERHLNKMQNHGYENPTYKYLEQMQI

SEQ ID NO: 3337 - protein, 1101 aa, Homo sapiens
TGGLYQCGYSTGACEPIGLQVPPEAVNMSLGLSLASTTSPSQLLACGPTVHHECGRNMYLTGLCFLLGPTQLTQRLPVSRQECPRQEQDIVFLIDGSGSISSRNFATMMNFVRAVISQFQRPSTQFSLMQFSNKFQTHFTFEEFRRSSNPLSLLASVHQLQGFTYTATAIQNVVHRLFHASYGARRDAAKILIVITDGKKEGDSLDYKDVIPMADAAGIIRYAIGVGLAFQNRNSWKELNDIASKPSQEHIFKVEDFDALKDIQNQLKEKIFAIEGTETTSSSSFELEMAQEGFSAVFTPDGPVLGAVGSFTWSGGAFLYPPNMSPTFINMSQENVDMRDSYLGYSTELALWKGVQSLVLGAPRYQHTGKAVIFTQVSRQWRMKAEVTGTQIGSYFGASLCSVDVDSDGSTDLVLIGAPHYYEQTRGGQVSVCPLPRGWRRWWCDAVLYGEQGHPWGRFGAALTVLGDVNGDKLTDVVIGAPGEEENRGAVYLFHGVLGPSISPSHSQRIAGSQLSSRLQYFGQALSGGQDLTQDGLVDLAVGARGQVLLLRTRPVLWVGVSMQFIPAEIPRSAFECREQVVSEQTLVQSNICLYIDKRSKNLLGSRDLQSSVTLDLALDPGRLSPRATFQETKNRSLSRVRVLGLKAHCENFNLLLPSCVEDSVTPITLRLNFTLVGKPLLAFRNLRPMLAADAQRYFTASLPFEKNCGADHICQDNLGISFSFPGLKSLLVGSNLELNAEVMVWNDGEDSYGTTITFSHPAGLSYRYVAEGQKQGQLRSLHLTCDSAPVGSQGTWSTSCRINHLIFRGGAQITFLATFDVSPKAVLGDRLLLTANVSSENNTPRTSKTTFQLELPVKYAVYTVVSSHEQFTKYLNFSESEEKESHVAMHRYQVNNLGQRDLPVSINFWVPVELNQEAVWMDVEVSHPQNPSLRCSSEKIAPPASDFLAHIQKNPVLDCSIAGCLRFRCDVPSFSVQEELDFTLKGNLSFGWVRQILQKKVSVVSVAEITFDTSVYSQLPGQEAFMRAQTTTVLEKYKVHNPTPLIVGSSIGGLLLLALITAVLYKVGFFKRQYKEMMEEANGQIAPENGTQTPSPPSEK

SEQ ID NO: 3338 - protein, 27 aa, Homo sapiens
LGVLFMAVSLGFMFANWATGQSRMSGH

SEQ ID NO: 3339 - protein, 209 aa, Homo sapiens
MALSELALVRWLQESRRSRKLILFIVFLALLLDNMLLTVVVPIIPSYLYSIKHEKNATEIQTARPVHTASISDSFQSIFSYYDNSTMVTGNATRDLTLHQTATQHMVTNASAVPSDCPSEDKDLLNENVQVGLLFASKATVQLITNPFIGLLTNRIGYPIPIFAGFCIMFVSTIMFAFSSSYAFLLIARSLQGIGSSCSSVAGRCGMPE

SEQ ID NO: 3340 - protein, 451 aa, Homo sapiens
MSFFLFSEFTTDLSVLIKHGIQKTTKNLSFNFIWNSTVFLAPWTRLTCWLFPLAALSRGALRLLTPSVKSCCSVAQAGVQWQDLSSLQSPSLRFKQFSCLSLPSRWDYRTFGSRASELLWMASALWTVLPSRMSLRSLKWSLLLLSLLSFFVMWYLSLPHYNVIERVNWMYFYEYEPIYRQDFHFTLREHSNCSHQNPFLVILVTSHPSDVKARQAIRVTWGEKKSWWGYEVLTFFLLGQEAEKEDKMLALSLEDEHLLYGDIIRQDFLDTYNNLTLKTIMAFRWVTEFCPNAKYVMKTDTDVFINTGNLVKYLLNLNHSEKFFTGYPLIDNYSYRGFYQKTHISYQEYPFKVFPPYCSGLGYIMSRDLVPRIYEMMGHVKPIKFEDVYVGICLNLLKVNIHIPEDTNLFFLYRIHLDVCQLRRVIAAHGFSSKEIITFWQVMLRNTTCHY

SEQ ID NO: 3341 - protein, 1215 aa, Homo sapiens
MEHLRHSPGPGGQRLLLPSMLLALLLLLAPSPGHATRVVYKVPEEQPPNTLIGSLAADYGFPDVGHLYKLEVGAPYLRVDGKTGDIFTTETSIDREGLRECQNQLPGDPCILEFEVSITDLVQNGSPRLLEGQIEVQDINDNTPNFASPVITLAIPENTNIGSLFPIPLASDRDAGPNGVASYELQAGPEAQELFGLQVAEDQEEKQPQLIVMGNLDRERWDSYDLTIKVQDGGSPPRASSALLRVTVLDTNDNAPKFERPSYEAELSENSPIGHSVIQVKANDSDQGANAEIEYTFHQAPEVVRRLLRLDRNTGLITVQGPVDREDLSTLRFSVLAKDRGTNPKSARAQVVVTVKDMNDNAPTIEIRGIGLVTHQDGMANISEDVAEETAVALVQVSDRDEGENAAVTCVVAGDVPFQLRQASETGSDSKKKYFLQTTTPLDYEKVKDYTIEIVAVDSGNPPLSSTNSLKVQVVDVNDNAPVFTQSVTEVAFPENNKPGEVIAEITASDADSGSNAELVYSLEPEPAAKGLFTISPETGEIQVKTSLDREQRESYELKVVAADRGSPSLQGTATVLVNVLDCNDNDPKFMLSGYNFSVMENMPALSPVGMVTVIDGDKGENAQVQLSVEQDNGDFVIQNGTGTILSSLSFDREQQSTYTFQLKAVDGGVPPRSAYVGVTINVLDENDNAPYITAPSNTSHKLLTPQTRLGETVSQVAAEDFDSGVNAELIYSIAGGNPYGLFQIGSHSGAITLEKEIERRHHGLHRLVVKVSDRGKPPRYGTALVHLYVNETLANRTLLETLLGHSLDTPLDIDIAGDPEYERSKQRGNILFGVVAGVVAVALLIALAVLVRYCRQREAKSGYQAGKKETKDLYAPKPSGKASKGNKSKGKKSKSPKPVKPVEDEDEAGLQKSLKFNLMSDAPGDSPRIHLPLNYPPGSPDLGRHYRSNSPLPSIQLQPQSPSASKKHQVVQDLPPANTFVGTGDTTSTGSEQYSDYSYRTNPPKYPSKQLPHRRVTFSATSQAQELQDPSQHSYYDSGLEESETPSSKSSSGPRLGPLALPEDHYERTTPDGSIGEMEHPENDLRPLPDVAMTGTCTRECSEFGHSDTCWMPGQSSPSRRTKSSALKLSTFVPYQDRGGQEPAGAGSPSPPEDRNTKTAPVRLLPSYSAFSHSSHDSCKDSATLEEIPLTQTSDFPPAATPASAQTAKREIYL

SEQ ID NO: 3342 - protein, 475 aa, Homo sapiens [sequence omitted]

SEQ ID NO: 3343 - protein, 597 aa, Homo sapiens [sequence omitted]

SEQ ID NO: 3344 - protein, 805 aa, Homo sapiens
MATLSLARPSFSLVEDTTLEPEEPPTKYQISQPEVYVAAPGESLEVRCLLKDAAVISWTKDGVHLGPNNRTVLIGEYLQIKGATPRDSGLYACTASRTVDSETWYFMVNVTDAISSGDDEDDTDGAEDFVSENSNNKRAPYWTNTEKMEKRLHAVPAANTVKFRCPAGGNPMPTMRWLKNGKEFKQEHRIGGYKVRNQHWSLIMESVVPSDKGNYTCVVENEYGSINHTYHLDVVERSPHRPILQAGLPANASTVVGGDVEFVCKVYSDAQPHIQWIKHVEKNGSKYGPDGLPYLKVLKAAGVNTTDKEIEVLYIRNVTFEDAGEYTCLAGNSIGISFHSAWLTVLPAPGREKEITASPDYLEIAIYCIGVFLIACMVVTVILCRMKNTTKKPDFSSQPAVHKLTKRIPLRRQVSAESSSSMNSNTPLVRITTRLSSTADTPMLAGVSEYELPEDPKWEFPRDKLTLGKPLGEGCFGQVVMAEAVGIDKDKPKEAVTVAVKMLKDDATEKDLSDLVSEMEMMKMIGKHKNIINLLGACTQDGPLYVIVEYASKGNLREYLRARRPPGMEYSYDINRVPEEQMTFKDLVSCTYQLARGMEYLASQKCIHRDLAARNVLVTENNVMKIADFGLARDINNIDYYKKTTNGRLPVKWMAPEALFDRVYTHQSDVWSFGVLMWEIFTLGGSPYPGIPVEELFKLLKEGHRMDKPANCTNELYMMMRDCWHAVPSQRPTFKQLVEDLDRILTLTTNEEYLDLSQPLEQYSPSYPDTRSSCSSGDDSVFSPDPMPYEPCLPQYPHINGSVKT

SEQ ID NO: 3345 - protein, 723 aa, Homo sapiens
MGLTSTWRYGRGPGIGTVTMVSWGRFICLVVVTMATLSLARPSFSLVEDTTLEPEGAPYWTNTEKMEKRLHAVPAANTVKFRCPAGGNPMPTMRWLKNGKEFKQEHRIGGYKVRNQHWSLIMESVVPSDKGNYTCVVENEYGSINHTYHLDVVERSPHRPILQAGLPANASTVVGGDVEFVCKVYSDAQPHIQWIKHVEKNGSKYGPDGLPYLKVLKAAGVNTTDKEIEVLYIRNVTFEDAGEYTCLAGNSIGISFHSAWLTVLPAPGREKEITASPDYLEIAIYCIGVFLIACMVVTVILCRMKNTTKKPDFSSQPAVHKLTKRIPLRRQVSAESSSSMNSNTPLVRITTRLSSTADTPMLAGVSEYELPEDPKWEFPRDKLTLGKPLGEGCFGQVVMAEAVGIDKDKPKEAVTVAVKMLKDDATEKDLSDLVSEMEMMKMIGKHKNIINLLGACTQDGPLYVIVEYASKGNLREYLRARRPPGMEYSYDINRVPEEQMTFKDLVSCTYQLARGMEYLASQKCIHRDLAARNVLVTENNVMKIADFGLARDINNIDYYKKTTNGRLPVKWMAPEALFDRVYTHQSDVWSFGVLMWEIFTLGGSPYPGIPVEELFKLLKEGHRMDKPANCTNELYMMMRDCWHAVPSQRPTFKQLVEDLDRILTLTTNEEYLDLSQPLEQYSPSYPDTRSSCSSGDDSVFSPDPMPYEPCLPQYPHINGSVKT

SEQ ID NO: 3346 - protein, 726 aa, Homo sapiens
MGLTSTWRYGRGPGIGTVTMVSWGRFICLVVVTMATLSLARPSFSLVEDTTLEPEGAPYWTNTEKMEKRLHAVPAANTVKFRCPAGGNPMPTMRWLKNGKEFKQEHRIGGYKVRNQHWSLIMESVVPSDKGNYTCVVENEYGSINHTYHLDVVERSPHRPILQAGLPANASTVVGGDVEFVCKVYSDAQPHIQWIKHVEKNGSKYGPDGLPYLKVLKHSGINSSNAEVLALFNVTEADAGEYICKVSNYIGQANQSAWLTVLPKQQAPGREKEITASPDYLEIAIYCIGVFLIACMVVTVILCRMKNTTKKPDFSSQPAVHKLTKRIPLRRQVTVSAESSSSMNSNTPLVRITTRLSSTADTPMLAGVSEYELPEDPKWEFPRDKLTLGKPLGEGCFGQVVMAEAVGIDKDKPKEAVTVAVKMLKDDATEKDLSDLVSEMEMMKMIGKHKNIINLLGACTQDGPLYVIVEYASKGNLREYLRARRPPGMEYSYDINRVPEEQMTFKDLVSCTYQLARGMEYLASQKCIHRDLAARNVLVTENNVMKIADFGLARDINNIDYYKKTTNGRLPVKWMAPEALFDRVYTHQSDVWSFGVLMWEIFTLGGSPYPGIPVEELFKLLKEGHRMDKPANCTNELYMMMRDCWHAVPSQRPTFKQLVEDLDRILTLTTNEEYLDLSQPLEQYSPSYPDTRSSCSSGDDSVFSPDPMPYEPCLPQYPHINGSVKT

SEQ ID NO: 3347 - protein, 841 aa, Homo sapiens [sequence omitted]

SEQ ID NO: 3348 - protein, 699 aa, Homo sapiens
MGLTSTWRYGRGPGIGTVTMVSWGRFICLVVVTMATLSLARPSFSLVEDTTLEPEDAISSGDDEDDTDGAEDFVSENSNNKRAPYWTNTEKMEKRLHAVPAANTVKFRCPAGGNPMPTMRWLKNGKEFKQEHRIGGYKVRNQHWSLIMESVVPSDKGNYTCVVENEYGSINHTYHLDVVERSPHRPILQAGLPANASTVVGGDVEFVCKVYSDAQPHIQWIKHVEKNGSKYGPDGLPYLKVLKHSGINSSNAEVLALFNVTEADAGEYICKVSNYIGQANQSAWLTVLPKQQAPGREKEITASPDYLEIAIYCIGVFLIACMVVTVILCRMKNTTKKPDFSSQPAVHKLTKRIPLRRQVTVSAESSSSMNSNTPLVRITTRLSSTADTPMLAGVSEYELPEDPKWEFPRDKLTLGKPLGEGCFGQVVMAEAVGIDKDKPKEAVTVAVKMLKDDATEKDLSDLVSEMEMMKMIGKHKNIINLLGACTQDGPLYVIVEYASKGNLREYLRARRPPGMEYSYDINRVPEEQMTFKDLVSCTYQLARGMEYLASQKCIHRDLAARNVLVTENNVMKIADFGLARDINNIDYYKKTTNGRLPVKWMAPEALFDRVYTHQSDVWSFGVLMWEIFTLGGSPYPGIPVEELFKLLKEGHRMDKPANCTNELYMMMRDCWHAVPSQRPTFKQLVEDLDRILTLTTNEI

SEQ ID NO: 3349 - protein, 209 aa, Homo sapiens
MTWDPALAQIAKAWASNCQFSHNTRLKPPHKLHPNFTSLGENIWTGSVPIFSVSSAITNWYDEIQDYDFKTRICKKVCGHYTQVVWADSYKVGCAVQFCPKVSGFDALSNGAHFICNYGPGGNYPTWPYKRGATCSACPNNDKCLDNLCVNRQRDQVKRYYSVVYPGWPIYPRNRYTSLFLIVNSVILILSVIITILVQHKYPNLVLLD

SEQ ID NO: 3350 - protein, 681 aa, Homo sapiens
MGLEERRTESSGTLEDALCLRRSFCLPVLMPLLLLLLLLPSPLHPHPICEVSKVASHLEVNCDKRNLTALPPDLPKDTTILHLSENLLYTFSLATLMPYTRLTQLNLDRCELTKLQVDGTLPVLGTLDLSHNQLQSLPLLGQTLPALTVLDVSFNRLTSLPLGALRGLGELQELYLKGNELKTLPPGLLTPTPKLEKLSLANNNLTELPAGLLNGLENLDTLLLQENSLYTIPKGFFGSHLLPFAFLHGNPWLCNCEILYFRRWLQDNAENVYVWKQGVDVKAMTSNVASVQCDNSDKFPVYKYPGKGCPTLGDEGDTDLYDYYPEEDTEGDKVRATRTVVKFPTKAHTTPWGLFYSWSTASLDSQMPSSLHPTQESTKEQTTFPPRWTPNFTLHMESITFSKTPKSTTEPTPSPTTSEPVPEPAPNMTTLEPTPSPTTPEPTSEPAPSPTTPEPTSEPAPSPTTPEPTSEPAPSPTTPEPTPIPTIATSPTILVSATSLITPKSTFLTTTKPVSLLESTKKTIPELDQPPKLRGVLQGHLESSRNDPFLHPDFCCLLPLGFYVLGLFWLLFASVVLILLLSWVGHVKPQALDSGQGAALTTATQTTHLELQRGRQVTVPRAWLLFLRGSLPTFRSSLFLWVRPNGRVGPLVAGRRPSALSQGRGQDLLSTVSIRYSGHSL

SEQ ID NO: 3351 - protein, 995 aa, Homo sapiens
MEWKESARWIKFEEKVEEGGERWSKPHVSTLSLHSLFELRTCLQTGTVLLDLDSGSLPQIIDDVIEKQIEDGLLRPELRERVSYVLLRRHRHQTKKPIHRSLADIGKSVSTTNRSPARSPGAGPSLHHSTEDLRMRQSANYGRLCHAQSRSMNDISLTPNTDQRKNKFMKKIPKDSEASNVLVGEVDFLDQPFIAFVRLIQSAMLGGVTEVPVPTRFLFILLGPSGRAKSYNEIGRAIATLMVDDLFSDVAYKARNREDLIAGIDEFLDEVIVLPPGEWDPNIRIEPPKKVPSADKRKSVFSLAELGQMNGSVGGGGGAPGGGNGGGGGGGSGGGAGSGGAGGTSSGDDGEMPAMHEIGEELIWTGRFFGGLCLDIKRKLPWFPSDFYDGFHIQSISAILFIYLGCITNAITFGGLLGDATDNYQGVMESFLGTAMAGSLFCLFSGQPLIILSSTGPILIFEKLLFDFSKGNGLDYMEFRLWIGLHSAVQCLILVATDASFIIKYITRFTEEGFSTLISFIFIYDAIKKMIGAFKYYPINMDFKPNFITTYKCECVAPDTVNTTVFNASAPLAPDTNASLYNLLNLTALDWSLLSKKECLSYGGRLLGNSCKFIPDLALMSFILFFGTYSMTLTLKKFKFSRYFPTKVRALVADFSIVFSILMFCGIDACFGLETPKLHVPSVIKPTRPDRGWFVAPFGKNPWWVYPASILPALLVTILIFMDQQITAVIVNRKENKLKKAAGYHLDLFWVGILMALCSFMGLPWYVAATVISIAHIDSLKMETETSAPGEQPQFLGVREQRVTGIIVFILTGISVFLAPILKCIPLPVLYGVFLYMGVASLNGIQFWERCKLFLMPAKHQPDHAFLRHVPLRRIHLFTLVQILCLAVLWILKSTVAAIIFPVMILGLIIVRRLLDFIFSQHDLAWIDNILPEKEKKETDKKRKRKKGAHEDCDEEPQFPPPSVIKIPMESVQSDPQNGIHCIARKRSSSWSYSL

SEQ ID NO: 3352 - protein, 948 aa, Homo sapiens
MEWKESARWIKFEEKVEEGGERWSKPHVSTLSLHSLFELRTCLQTGTVLLDLDSGSLPQIIDDVIEKQIEDGLLRPELRERVSYVLLRRHRHQTKKPIHRSLADIGKSVSTTNRSPARSPGAGPSLHHSTEDLRMRQSANYGRLCHAQSRSMNDISLTPNTDQRKNKFMKKIPKDSEASNVLVGEVDFLDQPFIAFVRLIQSAMLGGVTEVPVPTRFLFILLGPSGRAKSYNEIGRAIATLMVDDLFSDVAYKARNREDLIAGIDEFLDEVIVLPPGEWDPNIRIEPPKKVPSADKRKSVFSLAELGQMNGSVGGGGGAPGGGNGGGGGGGSGGGAGSGGAGGTSSGDDGEMPAMHEIGEELIWTGRFFGGLCLDIKRKLPWFPSDFYDGFHIQSISAILFIYLGCITNAITFGGLLGDATDNYQGVMESFLGTAMAGSLFCLFSGQPLIILSSTGPILIFEKLLFDFSKGNGLDYMEFRLWIGLHSAVQCLILVATDASFIIKYITRFTEEGFSTLISFIFIYDAIKKMIGAFKYYPINMDFKPNFITTYKCECVAPDTVNTTVFNASAPLAPDTNASLYNLLNLTALDWSLLSKKECLSYGGRLLGNSCKFIPDLALMSFILFFGTYSMTLTLKKFKFSRYFPTKVRALVADFSIVFSILMFCGIDACFGLETPKLHVPSVIKPTRPDRGWFVAPFGKNPWWVYPASILPALLVTILIFMDQQITAVIVNRKENKLKKAAGYHLDLFWVGILMALCSFMGLPWYVAATVISIAHIDSLKMETETSAPGEQPQFLGVREQRVTGIIVFILTGISVFLAPILKCIPLPVLYGVFLYMGVASLNGIQMGTGGSEFKIQKKLTPFWERCKLFLMPAKHQPDHAFLRHVPLRRIHLFTLVQILCLAVLWILKSTVAAIIFPVMSLSTTDPGPHHRSKASGFHLFPARPGLD

SEQ ID NO: 3353 - protein, 251 aa, Homo sapiens
MTNLAVADLCLLCTLPFVLHSLRDTSDTPLCQLSQGIYLTNRYMSISLVTAIAVDRYVAVRHPLRARGLRSPRQAAAVCAVLWVLVIGSLVARWLLGIQEGGFCFRSTRHNFNSMAFPLLGFYLPLAVVVFCSLKVVTALAQRPPTDVGQAEATRKAARMVWANLLVFVVCFLPLHVGLTVRLAVGWNACALLETIRRALYITSKLSDANCCLDAICYYYMAKEFQEASALAVAPSAKAHKSQDSLCVTLA

SEQ ID NO: 3354 - protein, 635 aa, Homo sapiens
MCIEKEANKTYNCENLGLSEIPDTLPNTTEFLEFSFNFLPTIHNRTFSRLMNLTFLDLTRCQINWIHEDTFQSHHQLSTLVLTGNPLIFMAETSLNGPKSLKHLFLIQTGISNLEFIPVHNLENLESLYLGSNHISSIKFPKDFPARNLKVLDFQNNAIHYISREDMRSLEQAINLSLNFNGNNVKGIELGAFDSTIFQSLNFGGTPNLSVIFNGLQNSTTQSLWLGTFEDIDDEDISSAMLKGLCEMSVESLNLQEHRFSDISSTTFQCFTQLQELDLTATHLKGLPSGMKGLNLLKKLVLSVNHFDQLCQISAANFPSLTHLYIRGNVKKLHLGVGCLEKLGNLQTLDLSHNDIEASDCCSLQLKNLSHLQTLNLSHNEPLGLQSQAFKECPQLELLDLAFTRLHINAPQSPFQNLHFLQVLNLTYCFLDTSNQHLLAGLPVLRHLNLKGNHFQDGTITKTNLLQTVGSLEVLILSSCGLLSIDQQAFHSLGKMSHVDLSHNSLTCDSIDSLSHLKGIYLNLAANSINIISPRLLPILSQQSTINLSHNPLDCTCSNIHFLTWYKENLHKLEGSEETTCANPPSLRGVKLSDVKLSCGITAIGIFFLIVFLLLLAILLFFAVKYLLRWKYQHI

SEQ ID NO: 3355 - protein, 1038 aa, Homo sapiens
MEHLRHSPGPGGQRLLLPSMLLALLLLLAPSPGHATRVVYKVPEEQPPNTLIGSLAADYGFPDVGHLYKLEVGAPYLRVDGKTGDIFTTETSIDREGLRECQNQLPGDPCILEFEVSITDLVQNGSPRLLEGQIEVQDINDNTPNFASPVITLAIPENTNIGSLFPIPLASDRDAGPNGVASYELQAGPEAQELFGLQVAEDQEEKQPQLIVMGNLDRERWDSYDLTIKVQDGGSPPRASSALLRVTVLDTNDNAPKFERPSYEAELSENSPIGHSVIQVKANDSDQGANAEIEYTFHQAPEVVRRLLRLDRNTGLITVQGPVDREDLSTLRFSVLAKDRGTNPKSARAQVVVTVKDMNDNAPTIEIRGIGLVTHQDGMANISEDVAEETAVALVQVSDRDEGENAAVTCVVAGDVPFQLRQASETGSDSKKKYFLQTTTPLDYEKVKDYTIEIVAVDSGNPPLSSTNSLKVQVVDVNDNAPVFTQSVTEVAFPENNKPGEVIAEITASDADSGSNAELVYSLEPEPAAKGLFTISPETGEIQVKTSLDREQRESYELKVVAADRGSPSLQGTATVLVNVLDCNDNDPKFMLSGYNFSVMENMPALSPVGMVTVIDGDKGENAQVQLSVEQDNGDFVIQNGTGTILSSLSFDREQQSTYTFQLKAVDGGVPPRSAYVGVTINVLDENDNAPYITAPSNTSHKLLTPQTRLGETVSQVAAEDFDSGVNAELIYSIAGGNPYGLFQIGSHSGAITLEKEIERRHHGLHRLVVKVSDRGKPPRYGTALVHLYVNETLANRTLLETLLGHSLDTPLDIDIAGDPEYERSKQRGNILFGVVAGVVAVALLIALAVLVRYCRQREAKSGYQAGKKETKDLYAPKPSGKASKGNKSKGKKSKSPKPVKPVEDEDEAGLQKSLKFNLMSDAPGDSPRIHLPLNYPPGSPDLGRHYRSNSPLPSIQLQPQSPSASKKHQVVQDLPPANTFVGTGDTTSTGSEQYSDYSYRTNPPKYPSKQVGQPFQLSTPQPLPHPYHGAIWTEVWE

SEQ ID NO: 3356 - protein, 481 aa, Homo sapiens
MLTPKSQQAPEGGSCQPGKTENTITMTTSHQPQDRYKAVWLIFFMLGLGTLLPWNFFMTATQYFTNRLDMSQNVSLVTAELSKDAQASAAPAAPLPERNSLSAIFNNVMTLCAMLPLLLFTYLNSFLHQRIPQSVRILGSLVAILLVFLITAILVKVQLDALPFFVITMIKIVLINSFGAILQGSLFGLAGLLPASYTAPIMSGQGLAGFFASVAMICAIASGSELSESAFGYFITACAVIILTIICYLGLPRLEFYRYYQQLKLEGPGEQETKLDLISKGEEPRAGKEESGVSVSNSQPTNESHSIKAILKNISVLAFSVCFIFTITIGMFPAVTVEVKSSIAGSSTWERYFIPVSCFLTFNIFDWLGRSLTAVFMWPGKDSRWLPSLVLARLVFVPLLLLCNIKPRRYLTVVFEHDAWFIFFMAAFAFSNGYLASLCMCFGPKKVKPAEAETAGAIMAFFLCLGLALGAVFSFLFRAIV

SEQ ID NO: 3357 - protein, 1187 aa, Homo sapiens
MPKKKRLSAGRVPLILFLCQMISALEVPLDPKLLEDLVQPPTITQQSPKDYIIDPRENIVIQCEAKGKPPPSFSWTRNGTHFDIDKDPLVTMKPGTGTLIINIMSEGKAETYEGVYQCTARNERGAAVSNNIVVRPSRSPLWTKEKLEPITLQSGQSLVLPCRPPIGLPPPIIFWMDNSFQRLPQSERVSQGLNGDLYFSNVLPEDTREDYICYARFNHTQTIQQKQPISVKVISAKSSRERPPTFLTPEGNASNKEELRGNVLSLECIAEGLPTPIIYWAKEDGMLPKNRTVYKNFEKTLQIIHVSEADSGNYQCIAKNALGAIHHTISVRVKAAPYWITAPQNLVLSPGEDGTLICRANGNPKPRISWLTNGVPIEIAPDDPSRKIDGDTIIFSNVQERSSAVYQCNASNEYGYLLANAFVNVLAEPPRILTPANTLYQVIANRPALLDCAFFGSPLPTIEWFKGAKGSALHEDIYVLHENGTLEIPVAQKDSTGTYTCVARNKLGMAKNEVHLEIKDPTWIVKQPEYAVVQRGSMVSFECKVKHDHTLSLTVLWLKDNRELPSDERFTVDKDHLVVADVSDDDSGTYTCVANTTLDSVSASAVLSVVAPTPTPAPVYDVPNPPFDLELTDQLDKSVQLSWTPGDDNNSPITKFIIEYEDAMHKPGLWHHQTEVSGTQTTAQLKLSPYVNYSFRVMAVNSIGKSLPSEASEQYLTKASEPDKNPTAVEGLGSEPDNLVITWKPLNGFESNGPGLQYKVSWRQKDGDDEWTSVVVANVSKYIVSGTPTFVPYLIKVQALNDMGFAPEPAVVMGHSGEDLPMVAPGNVRVNVVNSTLAEVHWDPVPLKSIRGHLQGYRIYYWKTQSSSKRNRRHIEKKILTFQGSKTHGMLPGLEPFSHYTLNVRVVNGKGEGPASPDRVFNTPEGVPSAPSSLKIVNPTLDSLTLEWDPPSHPNGILTEYTLKYQPINSTHELGPLVDLKIPANKTRWTLKNLNFSTRYKFYFYAQTSAGSGSQITEEAVTTVDEAGILPPDVGAGKAMASRQVDIATQGWFIGLMCAVALLILILLIVCFIRRNKGGKYPVKEKEDAHADPEIQPMKEDDGTFGEYSDAEDHKPLKKGSRTPSDRTVKKEDSDDSLVDYGEGVNGQFNEDGSFIGQYSGKKEKEPAEGNESSEAPSPVNAMNSFV

SEQ ID NO: 3358 - protein, 401 aa, Homo sapiens
MVFFGYMVFSILFGLLADRYGRWKILLISFLWGAYFSLLTSFAPSYIWFVFLRTMVGCGVSGHSQGLIIKTEFLPTKYRGYMLPLSQVFWLAGSLLIIGLASVIIPTIGWRWLIRVASIPGIILIVAFKFIPESARFNVSTGNTRAALATLERVAKMNRSVMPEGKLVEPVLEKRGRFADLLDAKYLRTTLQIWVIWLGISFAYYGVILASAELLERDLVCGSKSDSAVVVTGGDSGESQSPCYCHMFAPSDYRTMIISTIGEIALNPLNILGINFLGRRLSLSITMGCTALFFLLLNICTSSAGLIGFLFMLRALVAANFNTVYIYTAEVYPTTMRALGMGTSGSLCRIGAMVAPFISQVLMSASILGALCLFSSVCVVCAISAFTLPIETKGRALQQIK

SEQ ID NO: 3359 - protein, 749 aa, Homo sapiens
KQELVQVAATAASGTSATMASCPDSDNSWVLAGSESLPVETLGPASRMDPESERALQAPHSPSKTDGKELAGTMDGEGTLFQTESPQSGSILTEETEVKGTLEGDVCGVEPPGPGDTVVQGDLQETTVVTGLGPDTQDLEGQSPPQSLPSTPKAAWIREEGRCSSSDDDTDVDMEGLRRRRGREAGPPQPMVPLAVENQAGGEGAGGELGISLNMCLLGALVLLGLGVLLFSGGLSESETGPMEEVERQVLPDPEVLEAVGDRQDGLREQLQAPVPPDSVPSLQNMGLLLDKLAKENQDIRLLQAQLQAQKEELQSLMHQPKGLEEENAQLRGALQQGEAFQRALESELQQLRARLQGLEADCVRGPDGVCLSGGRGPQGDKAIREQGPREQEPELSFLKQKEQLEAEAQALRQELERQRRLLGSVQQDLERSLQDASRGDPAHAGLAELGHRLAQKLQGLENWGQDPGVSANASKAWHQKSHFQNSREWSGKEKWWDGQRDRKAEHWKHKKEESGRERKKNWGGQEDREPAGRWKEGRPRVEESGSKKEGKRQGPKEPPRKSGSFHSSGEKQKQPRWREGTKDSHDPLPSWAELLRPKYRAPQGCSGVDECARQEGLTFFGTELAPVRQQELASLLRTYLARLPWAGQLTKELPLSPAFFGEDGIFRHDRLRFRDFVDALEDSLEEVAVQQTGDDDEVDDFEDFIFSHFFGDKALKKRSGKKDKHSQSPRAAGPREGHSHSHHHHHRG

SEQ ID NO: 3360 - protein, 225 aa, Homo sapiens
LGILTMLRPNMYFMAPLQEKVVFGMFFLGAVLCLSFSWLFHTVYCHSEKVSRTFSKLDYSGIALLIMGSFVPWLYYSFYCSPQPRLIYLSIVCVLGISAIIVAQWDRFATPKHRQTRAGVFLGLGLSGVVPTMHFTIAEGFVKATTVGQMGWFFLMAVMYITGAGLYAARIPERFFPGKFDIWFQSHQIFHVLVVAAAFVHFYGVSNLQEFRYGLEGGCTDDTLL

SEQ ID NO: 3361 - protein, 982 aa, Homo sapiens
IVQGVCGCCYTCASQRNESCGGTFGIYGTCDRGLRCVIRPPLNGDSLTEYEAGVCEDENWTDDQLLGFKPCNENLIAGCNIINGKCECNTIRTCSNPFEFPSQDMCLSALKRIEEEKPDCSKARCEVQFSPRCPEDSVLIEGYAPPGECCPLPSRCVCNPAGCLRKVCQPGNLNILVSKASGKPGECCDLYECKPVFGVDCRTVECPPVQQTACPPDSYETQVRLTADGCCTLPTRCECLSGLCGFPVCEVGSTPRIVSRGDGTPGKCCDVFECVNDTKPACVFNNVEYYDGDMFRMDNCRFCRCQGGVAICFTAQCGEINCERYYVPEGECCPVCEDPVYPFNNPAGCYANGLILAHGDRWREDDCTFCQCVNGERHCVATVCGQTCTNPVKVPGECCPVCEEPTIITVDPPACGELSNCTLTGKDCINGFKRDHNGCRTCQCINTEELCSERKQGCTLNCPFGFLTDAQNCEICECRPRPKKCRPIICDKYCPLGLLKNKHGCDICRCKKCPELSCSKICPLGFQQDSHGCLICKCREASASAGPPILSGTCLTVDGHHHKNEESWHDGCRECYCLNGREMCALITCPVPACGNPTIHPGQCCPSCADDFVVQKPELSTPSICHAPGGEYFVEGETWNIDSCTQCTCHSGRVLCETEVCPPLLCQNPSRTQDSCCPQCTDQPFRPSLSRNNSVPNYCKNDEGDIFLAAESWKPDVCTSCICIDSVISCFSESCPSVSCERPVLRKGQCCPYCIEDTIPKKVVCHFSGKAYADEERWDLDSCTHCYCLQGQTLCSTVSCPPLPCVEPINVEGSCCPMCPEMYVPEPTNIPIEKTNHRGEVDLEVPLWPTPSENDIVHLPRDMGHLQVDYRDNRLHPSEDSSLDSIASVVVPIIICLSIIIAFLFINQKKQWIPLLCWYRTPTKPSSLNNQLVSVDCKKGTRVQVDSSQRMLRIAEPDARFSGFYSMQKQNHLQADNFYQTV

SEQ ID NO: 3362 - protein, 1134 aa, Homo sapiens
VGPGAAARGGEGGCGSSSAAASDPARSAGRPLQVPAPLPVRPPMAAAGQLCLLYLSAGLLSRLGAAFNLDTREDNVIRKYGDPGSLFGFSLAMHWQLQPEDKRLLLVGAPRAEALPLQRANRTGGLYSCDITARGPCTRIEFDNDADPTSESKEDQWMGVTVQSQGPGGKVVTCAHRYEKRQHVNTKQESRDIFGRCYVLSQNLRIEDDMDGGDWSFCDGRLRGHEKFGSCQQGVAATFTKDFHYIVFGAPGTYNWKGIVRVEQKNNTFFDMNIFEDGPYEVGGETEHDESLVPVPANSYLGFSLDSGKGIVSKDEITFVSGAPRANHSGAVVLLKRDMKSAHLLPEHIFDGEGLASSFGYDVAVVDLNKDGWQDIVIGAPQYFDRDGEVGGAVYVYMNQQGRWNNVKPIRLNGTKDSMFGIAVKNIGDINQDGYPDIAVGAPYDDLGKVFIYHGSANGINTKPTQVLKGISPYFGYSIAGNMDLDRNSYPDVAVGSLSDSVTIFRSRPVINIQKTITVTPNRIDLRQKTACGAPSGICLQVKSCFEYTANPAGYNPSISIVGTLEAEKERRKSGLSSRVQFRNQGSEPKYTQELTLKRQKQKVCMEETLWLQDNIRDKLRPIPITASVEIQEPSSRRRVNSLPEVLPILNSDEPKTAHIDVHFLKEGCGDDNVCNSNLKLEYKFCTREGNQDKFSYLPIQKGVPELVLKDQKDIALEITVTNSPSNPRNPTKDGDDAHEAKLIATFPDTLTYSAYRELRAFPEKQLSCVANQNGSQADCELGNPFKRNSNVTFYLVLSTTEVTFDTPDLDINLKLETTSNQDNLAPITAKAKVVIELLLSVSGVAKPSQVYFGGTVVGEQAMKSEDEVGSLIEYEFRVINLGKPLTNLGTATLNIQWPKEISNGKWLLYLVKVESKGLEKVTCEPQKEINSLNLTESHNSRKKREITEKQIDDNRKFSLFAERKYQTLNCSVNVNCVNIRCPLRGLDSKASLILRSRLWNSTFLEEYSKLNYLDILMRAFIDVTAAAENIRLPNAGTQVRVTVFPSKTVAQYSGVPWWIILVAILAGILMLALLVFILWKCGFFKRSRYDDSVPRYHAVRIRKEEREIKDEKYIDNLEKKQWITKWNENESYS

SEQ ID NO: 3363 - protein, 265 aa, Homo sapiens
VIRMPFSHLSTYSLVWVMAAVVLCTAQVQVVTQDEREQLYTPASLKCSLQNAQEALIVTWQKKKAVSPENMVTFSENHGVVIQPAYKDKINITQLGLQNSTITFWNITLEDEGCYMCLFNTFGFGKISGTACLTVYVQPIVSLHYKFSEDHLNITCSATARPAPMVFWKVPRSGIENSTVTLSHPNGTTSVTSILHIKDPKNQVGKEVICQVLHLGTVTDFKQTVNKGYWFSVPLLLSIVSLVILLVLISILLYWKRHRNQDREP

SEQ ID NO: 3364 - protein, 166 aa, Homo sapiens
KSRSAIYLPVRSTNSSVRKMAGNSILLAAVSILSACQQSYFALQVGKARLKYKVTPPAVTGSPEFERVFRAQQNCVEFYPIFIITLWMAGWYFNQVFATCLGLVYIYGRHLYFWGYSEAAKKRITGFRLSLGILALLTLLGALGIANSFLDEYLDLNIAKKLRRQF

SEQ ID NO: 3365 - protein, 346 aa, Homo sapiens
LLKSWREENTSHPASGKGPLLDMSPAAAAEPDGDQQDRHVSKLIFCFFVFGAVLLCVGVLLSIFGFQACQYKPLPDCPMVLKVAGPACAVVGLGAVILARSRAQLQLRAGLQRGQQMDPDRAFICGESRQFAQCLIFGFLFLTSGMLISVLGIWVPGCGSNWAQEPLNETDTGDSEPRMCGFLSLQIMGPLIVLVGLCFFVVAHVKKRNTLNAGQDASEREEGQIQIMEPVQVTVGDSVIIFPPPPPPYFPESSASAVAESPGTNSLLPNENPPSYYSIFNYGRTPTSEGAASERDCESIYTISGTNSSSEASHTPHLPSELPPRYEEKENAAATFLPLSSEPSPP

SEQ ID NO: 3366 - protein, 477 aa, Homo sapiens
KSQQAPEGGSCQPGKTENTITMTTSHQPQDRYKAVWLIFFMLGLGTLLPWNFFMTATQYFTNRLDMSQNVSLVTAELSKDAQASAAPAAPLPERNSLSAIFNNVMTLCAMLPLLLFTYLNSFLHQRIPQSVRILGSLVAILLVFLITAILVKVQLDALPFFVITMIKIVLINSFGAILQGSLFGLAGLLPASYTAPIMSGQGLAGFFASVAMICAIASGSELSESAFGYFITACAVIILTIICYLGLPRLEFYRYYQQLKLEGPGEQETKLDLISKGEEPRAGKEESGVSVSNSQPTNESHSIKAILKNISVLAFSVCFIFTITIGMFPAVTVEVKSSIAGSSTWERYFIPVSCFLTFNIFDWLGRSLTAVFMWPGKDSRWLPSLVLARLVFVPLLLLCNIKPRRYLTVVFEHDAWFIFFMAAFAFSNGYLASLCMCFGPKKVKPAEAETAGAIMAFFLCLGLALGAVFSFLFRAIV

SEQ ID NO: 3367 - protein, 273 aa, Homo sapiens
RPPKGQEALWSRPHSRHSAERAGGSHSDPGRLSAPLGLGLPSGRGRLTAMPGRAPLRTVPGALGAWLLGGLWAWTLCGLCSLGAVGAPRPCQAPQQWEGRQVMYQQSSGRNSRALLSYDGLNQRVRVLDERKALIPCKRLFEYILLYKDGVMFQIDQATKQCSKMTLTQPWDPLDIPQNSTFEDQYSIGGPQEQITVQEWSDRKSARSYETWIGIYTVKDCYPVQETFTINYSVILSTRFFDIQLGIKDPSVFTPPSTCQMAQLEKMSEDCSW

SEQ ID NO: 3368 - protein, 135 aa, Homo sapiens
LHFTPASQSPCSLTQILHTPRQLALTHSPLACLCSPSMALLLALSLLVLWTSPAPTLSGTNDAEDCCLSVTQKPIPGYIVRNFHYLLIKDGCRVPAVVFTTLRGRQLCAPPDQPWVERIIQRLQRTSAKMKRRSS

SEQ ID NO: 3369 - protein, 300 aa, Homo sapiens
TRTGECDCVSGSMAEKRHTRDSEAQRLPDSFKDSPSKGLGPCGWILVAFSFLFTVITFPISIWMCIKIIKEYERAIIFRLGRILQGGAKGPGLFFILPCTDSFIKVDMRTISFDIPPQEILTKDSVTISVDGVVYYRVQNATLAVANITNADSATRLLAQTTLRNVLGTKNLSQILSDREEIAHNMQSTLDDATDAWGIKVERVEIKDVKLPVQLQRAMAAEAEASREARAKVIAAEGEMNASRALKEASMVITESPAALQLRYLQTLTTIAAEKNSTIVFPLPIDMLQGIIGAKHSHLG

SEQ ID NO: 3370 - protein, 261 aa, Homo sapiens
LQTSQRWLSRWSTMEGDCLSCMKYLMFVFNFFIFLGGACLLAIGIWVMVDPTGFREIVAANPLLLTGAYILLAMGGLLFLLGFLGCCGAVRENKCLLLFFFLFILIIFLAELSAAILAFIFRENLTREFFTKELTKHYQGNNDTDVFSATWNSVMITFGCCGVNGPEDFKFASVFRLLTLDSEEVPEACCRREPQSRDGVLLSREECLLGRSLFLNKQGCYTVILNTFETYVYLAGALAIGVLAIELFAMIFAMCLFRGIQ

SEQ ID NO: 3371 - protein, 323 aa, Homo sapiens
KQLQVISVLQWVLSFLVLGVACSAILMYIFCTDCWLIAVLYFTWLVFDWNTPKKGGRRSQWVRNWAVWRYFRDYFPIQLVKTHNLLTTRNYIFGYHPHGIMGLGAFCNFSTEATEVSKKFPGIRPYLATLAGNFRMPVLREYLMSGGICPVSRDTIDYLLSKNGSGNAIIIVVGGAAESLSSMPGKNAVTLRNRKGFVKLALRHGADLVPIYSFGENEVYKQVIFEEGSWGRWVQKKFQKYIGFAPCIFHGRGLFSSDTWGLVPYSKPITTVVGEPITIPKLEHPTQQDIDLYHTMYMEALVKLFDKHKTKFGLPETEVLEVN

SEQ ID NO: 3372 - protein, 878 aa, Homo sapiens
LSLSRRPHSLQGGGHRIYRGKNIPPSQQITMLQTKDLIWTLFFLGTAVSLQVDIVPSQGEISVGESKFFLCQVAGDAKDKDISWFSPNGEKLTPNQQRISVVWNDDSSSTLTIYNANIDDAGIYKCVVTGEDGSESEATVNVKIFQKLMFKNAPTPQEFREGEDAVIVCDVVSSLPPTIIWKHKGRDVILKKDVRFIVLSNNYLQIRGIKKTDEGTYRCEGRILARGEINFKDIQVIVNVPPTIQARQNIVNATANLGQSVTLVCDAEGFPEPTMSWTKDGEQIEQEEDDEKYIFSDDSSQLTIKKVDKNDEAEYICIAENKAGEQDATIHLKVFAKPKITYVENQTAMELEEQVTLTCEASGDPIPSITWRTSTRNISSEEKTLDGHMVVRSHARVSSLTLKSIQYTDAGEYICTASNTIGQDSQSMYLEVQYAPKLQGPVAVYTWEGNQVNITCEVFAYPSATISWFRDGQLLPSSNYSNIKIYNTPSASYLEVTPDSENDFGNYNCTAVNRIGQESLEFILVQADTPSSPSIDQVEPYSSTAQVQFDEPEATGGVPILKYKAEWRAVGEEVWHSKWYDAKEASMEGIVTIVGLKPETTYAVRLAALNGKGLGEISAASEFKTQPVQGEPSAPKLEGQMGEDGNSIKVNLIKQDDGGSPIRHYLVRYRALSSEWKPEIRLPSGSDHVMLKSLDWNAEYEVYVVAENQQGKSKAAHFVFRTSAQPTAIPANGSPTSGLSTGAIVGILIVIFVLLLVVVDITCYFLNKCGLFMCIAVNLCGKAGPGAKGKDMEEGKAAFSKDESKEPIVEVRTEEERTPNHDGGKHTEPNETTPLTEPEKGPVEAKPECQETETKPAPAEVKTVPNDATQTKENESKA

SEQ ID NO: 3373 - protein, 162 aa, Homo sapiens
VPIFSVSSAITNWYDEIQDYDFKTRICKKVCGHYTQVVWADSYKVGCAVQFCPKVSGFDALSNGAHFICNYGPGGNYPTWPYKRGATCSACPNNDKCLDNLCVNRQRDQVKRYYSVVYPGWPIYPRNRYTSLFLIVNSVILILSVIITILVQHKYPNLVLLD

SEQ ID NO: 3374 - protein, 34 aa, Homo sapiens
VDHLHGVFACVFWSIFCSVVLQKTVFCLRVHSHR

SEQ ID NO: 3375 - protein, 1940 aa, Homo sapiens
MVSVVGPMGLLVVLLVGGCAAEEPPRFIKEPKDQIGVSGGVASFVCQATGDPKPRVTWNKKGKKVNSQRFETIEFDESAGAVLRIQPLRTPRDENVYECVAQNSVGEITVHAKLTVLREDQLPSGFPNIDMGPQLKVVERTRTATMLCAASGNPDPEITWFKDFLPVDPSASNGRIKQLRSETFESTPIRGALQIESSEETDQGKYECVATNSAGVRYSSPANLYVRELREVRRVAPRFSILPMSHEIMPGGNVNITCVAVGSPMPYVKWMQGAEDLTPEDDMPVGRNVLELTDVKDSANYTCVAMSSLGVIEAVAQITVKSLPKAPGTPMVTENTATSITITWDSGNPDPVSYYVIEYKSKSQDGPYQIKEDITTTRYSIGGLSPNSEYEIWVSAVNSIGQGPPSESVVTRTGEQAPASAPRNVQARMLSATTMIVQWEEPVEPNGLIRGYRVYYTMEPEHPVGNWQKHNVDDSLLTTVGSLLEDETYTVRVLAFTSVGDGPLSDPIQVKTQQGVPGQPMNLRAEARSETSITLSWSPPRQESIIKYELLFREGDHGREVGRTFDPTTSYVVEDLKPNTEYAFRLAARSPQGLGAFTPVVRQRTLQSKPSAPPQDVKCVSVRSTAILVSWRPPPPETHNGALVGYSVRYRPLGSEDPEPKEVNGIPPTTTQILLEALEKWTQYRITTVAHTEVGPGPESSPVVVRTDEDVPSAPPRKVEAEALNATAIRVLWRSPAPGRQHGQIRGYQVHYVRMEGAEARGPPRIKDVMLADAQWETDDTAEYEMVITNLQPETAYSITVAAYTMKGDGARSKPKVVVTKGAVLGRPTLSVQQTPEGSLLARWEPPAGTAEDQVLGYRLQFGREDSTPLATLEFPPSEDRYTASGVHKGATYVFRLAARSRGGLGEEAAEVLSIPEDTPRGHPQILEAAGNASAGTVLLRWLPPVPAERNGAIVKYTVAVREAGALGPARETELPAAAEPGAENALTLQGLKPDTAYDLQVRAHTRRGPGPFSPPVRYRTFLRDQVSPKNFKVKMIMKTSVLLSWEFPDNYNSPTPYKIQYNGLTLDVDGRTTKKLITHLKPHTFYNFVLTNRGSSLGGLQQTVTAWTAFNLLNGKPSVAPKPDADGFIMVYLPDGQSPVPVQSYFIVMVPLRKSRGGQFLTPLGSPEDMDLEELIQDISRLQRRSLRHSRQLEVPRPYIAARFSVLPPTFHPGDQKQYGGFDNRGLEPGHRYVLFVLAVLQKSEPTFAASPFSDPFQLDNPDPQPIVDGEEGLIWVIGPVLAVVFIICIVIAILLYKNKPDSKRKDSEPRTKCLLNNADLAPHHPKDPVEMRRINFQTPDSGLRSPLREPGFHFESMLSHPPIPIADMAEHTERLKANDSLKLSQEYESIDPGQQFTWEHSNLEVNKPKNRYANVIAYDHSRVILQPIEGIMGSDYINANYVDGYRCQNAYIATQGPLPETFGDFWRMVWEQRSATIVMMTRLEEKSRIKCDQYWPNRGTETYGFIQVTLLDTIELATFCVRTFSLHKNGSSEKREVRQFQFTAWPDHGVPEYPTPFLAFLRRVKTCNPPDAGPIVVHCSAGVGRTGCFIVIDAMLERIKPEKTVDVYGHVTLMRSQRNYMVQTEDQYSFIHEALLEAVGCGNTEVPARSLYAYIQKLAQVEPGEHVTGMELEFKRLANSKAHTSRFISANLPCNKFKNRLVNIMPYESTRVCLQPIRGVEGSDYINASFIDGYRQQKAYIATQGPLAETTEDFWRMLWENNSTIVVMLTKLREMGREKCHQYWPAERSARYQYFVVDPMAEYNMPQYILREFKVTDARDGQSRTVRQFQFTDWPEQGVPKSGEGFIDFIGQVHKTKEQFGQDGPISVHCSAGVGRTGVFITLSIVLERMRYEGVVDIFQTVKMLRTQRPAMVQTEDEYQFCYQAALEYLGSFDHYAT

SEQ ID NO: 3376 - protein, 1206 aa, Homo sapiens
MPKKKRLSAGRVPLILFLCQMISALEVPLDPKLLEDLVQPPTITQQSPKDYIIDPRENIVIQCEAKGKPPPSFSWTRNGTHFDIDKDPLVTMKPGTGTLIINIMSEGKAETYEGVYQCTARNERGAAVSNNIVVRPSRSPLWTKEKLEPITLQSGQSLVLPCRPPIGLPPPIIFWMDNSFQRLPQSERVSQGLNGDLYFSNVLPEDTREDYICYARFNHTQTIQQKQPISVKVISVDELNDTIAANLSDTEFYGAKSSRERPPTFLTPEGNASNKEELRGNVLSLECIAEGLPTPIIYWAKEDGMLPKNRTVYKNFEKTLQIIHVSEADSGNYQCIAKNALGAIHHTISVRVKAAPYWITAPQNLVLSPGEDGTLICRANGNPKPRISWLTNGVPIEIAPDDPSRKIDGDTIIFSNVQERSSAVYQCNASNEYGYLLANAFVNVLAEPPRILTPANTLYQVIANRPALLDCAFFGSPLPTIEWFKGAKGSALHEDIYVLHENGTLEIPVAQKDSTGTYTCVARNKLGMAKNEVHLEIKDPTWIVKQPEYAVVQRGSMVSFECKVKHDHTLSLTVLWLKDNRELPSDERFTVDKDHLVVADVSDDDSGTYTCVANTTLDSVSASAVLSVVAPTPTPAPVYDVPNPPFDLELTDQLDKSVQLSWTPGDDNNSPITKFIIEYEDAMHKPGLWHHQTEVSGTQTTAQLKLSPYVNYSFRVMAVNSIGKSLPSEASEQYLTKASEPDKNPTAVEGLGSEPDNLVITWKPLNGFESNGPGLQYKVSWRQKDGDDEWTSVVVANVSKYIVSGTPTFVPYLIKVQALNDMGFAPEPAVVMGHSGEDLPMVAPGNVRVNVVNSTLAEVHWDPVPLKSIRGHLQGYRIYYWKTQSSSKRNRRHIEKKILTFQGSKTHGMLPGLEPFSHYTLNVRVVNGKGEGPASPDRVFNTPEGVPSAPSSLKIVNPTLDSLTLEWDPPSHPNGILTEYTLKYQPINSTHELGPLVDLKIPANKTRWTLKNLNFSTRYKFYFYAQTSAGSGSQITEEAVTTVDEAGILPPDVGAGKAMASRQVDIATQGWFIGLMCAVALLILILLIVCFIRRNKGGKYPVKEKEDAHADPEIQPMKEDDGTFGEYSDAEDHKPLKKGSRTPSDRTVKKEDSDDSLVDYGEGVNGQFNEDGSFIGQYSGKKEKEPAEGNESSEAPSPVNAMNSFV

SEQ ID NO: 3377 - protein, 2024 aa, Homo sapiens
MGRKTSRVQQGPPRSPACSAHGERSWGLEFPPFRWLLGIAGRTHLAALPPFQWVLAFEIFIPLVLFFILLGLRQKKPTISVKEAFYTAAPLTSAGILPVMQSLCPDGQRDEFGFLQYANSTVTQLLERLDRVVEEGNLFDPARPSLGSELEALRQHLEALSAGPGTSGSHLDRSTVSSFSLDSVARNPQELWRFLTQNLSLPNSTAQALLAARVDPPEVYHLLFGPSSALDSQSGLHKGQEPWSRLGGNPLFRMEELLLAPALLEQLTCTPGSGELGRILTVPESQKGALQGYRDAVCSGQAAARARRFSGLSAELRNQLDVAKVSQQLGLDAPNGSDSSPQAPPPRRLQALLGDLLDAQKVLQDVDVLSALALLLPQGACTGRTPGPPASGAGGAANGTGAGAVMGPNATAEEGAPSAAALATPDTLQGQCSAFVQLWAGLQPILCGNNRTIEPEALRRGNMSSLGFTSKEQRNLGLLVHLMTSNPKILYAPAGSEVDRVILKANETFAFVGNVTHYAQVWLNISAEIRSFLEQGRLQQHLRWLQQYVAELRLHPEALNLSLDELPPALRQDNFSLPSGMALLQQLDTIDNAACGWIQFMSKVSVDIFKGFPDEESIVNYTLNQAYQDNVTVFASVIFQTRKDGSLPPHVHYKIRQNSSFTEKTNEIRRAYWRPGPNTGGRFYFLYGFVWIQDMMERAIIDTFVGHDVVEPGSYVQMFPYPCYTRDDFLFVIEHMMPLCMVISWVYSVAMTIQHIVAEKEHRLKEVMKTMGLNNAVHWVAWFITGFVQLSISVTALTAILKYGQVLMHSHVVIIWLFLAVYAVATIMFCFLVSVLYSKAKLASACGGIIYFLSYVPYMYVAIREEVAHDKITAFEKCIASLMSTTAFGLGSKYFALYEVAGVGIQWHTFSQSPVEGDDFNLLLAVTMLMVDAVVYGILTWYIEAVHPGMYGLPRPWYFPLQKSYWLGSGRTEAWEWSWPWARTPRLSVMEEDQACAMESRRFEETRGMEEEPTHLPLVVCVDKLTKVYKDDKKLALNKLSLNLYENQVVSFLGHNGAGKTTTMSILTGLFPPTSGSATIYGHDIRTEMDEIRKNLGMCPQHNVLFDRLTVEEHLWFYSRLKSMAQEEIRREMDKMIEDLELSNKRHSLVQTLSGGMKRKLSVAIAFVGGSRAIILDEPTAGVDPYARRAIWDLILKYKPGRTILLSTHHMDEADLLGDRIAIISHGKLKCCGSPLFLKGTYGDGYRLTLVKRPAEPGGPQEPGLASSPPGRAPLSSCSELQVSQFIRKHVASCLLVSDTSTELSYILPSEAAKKGAFERLFQHLERSLDALHLSSFGLMDTTLEEVFLKVSEEDQSLENSEADVKESRKDVLPGAEGPASGEGHAGNLARCSELTQSQASLQSASSVGSARGDEGAGYTDVYGDYRPLFDNPQDPDNVSLQEVEAEALSRVGQGSRKLDGGWLKVRQFHGLLVKRFHCARRNSKALFSQILLPAFFVCVAMTVALSVPEIGDLPPLVLSPSQYHNYTQPRGNFIPYANEERREYRLRLSPDASPQQLVSTFRLPSGVGATCVLKSPANGSLGPTLNLSSGESRLLAARFFDSMCLESFTQGLPLSNFVPPPPSPAPSDSPASPDEDLQAWNVSLPPTAGPEMWTSAPSLPRLVREPVRCTCSAQGTGFSCPSSVGGHPPQMRVVTGDILTDITGHNVSEYLLFTSDRFRLHRYGAITFGNVLKSIPASFGTRAPPMVRKIAVRRAAQVFYNNKGYHSMPTYLNSLNNAILRANLPKSKGNPAAYGITVTNHPMNKTSASLSLDYLLQGTDVVIAIFIIVAMSFVPASFVVFLVAEKSTKAKHLQFVSGCNPIIYWLANYVWDMLNYLVPATCCVIILFVFDLPAYTSPTNFPAVLSLFLLYGWSITPIMYPASFWFEVPSSAYVFLIVINLFIGITATVATFLLQLFEHDKDLKVVNSYLKSCFLIFPNYNLGHGLMEMAYNEYINEYYAKIGEGARGAGKAVGAPQGPEHRP

SEQ ID NO: 3378 - protein, 262 aa, Homo sapiens
MQSGPKPLFRRMSSLVGPTQSFFMRESKTLGAVQIMNGLFHIALGGLLMIPAGIYAPICVTVWYPLWGGIMYIISGSLLAATEKNSRKCLVKGKMIMNSLSLFAAISGMILSIMDILNIKISHFLKMESLNFIRAHTPYINIYNCEPANPSEKNSPSTQYCYSIQSLFLELVIAGIVENEWKRTCSRPKSNIVLLSAEEKKEQTIEIKEEVVGLTETSSQPKNEEDIEIIPIQEEEEEETETNFPEPPQDQESSPIENDSSP

SEQ ID NO: 3379 - protein, 1486 aa, Homo sapiens
MGLLVVLLVGGCAAEEPPRFIKEPKDQIGVSGGVASFVCQATGDPKPRVTWNKKGKKVNSQRFETIEFDESAGAVLRIQPLRTPRDENVYECVAQNSVGEITVHAKLTVLREDQLPSGFPNIDMGPQLKVVERTRTATMLCAASGNPDPEITWFKDFLPVDPSASNGRIKQLRSGALQIESSEETDQGKYECVATNSAGVRYSSPANLYVRVRRVAPRFSILPMSHEIMPGGNVNITCVAVGSPMPYVKWMQGAEDLTPEDDMPVGRNVLELTDVKDSANYTCVAMSSLGVIEAVAQITVKSLPKAPGTPMVTENTATSITITWDSGNPDPVSYYVIEYKSKSQDGPYQIKEDITTTRYSIGGLSPNSEYEIWVSAVNSIGQGPPSESVVTRTGEQAPASAPRNVQARMLSATTMIVQWEEPVEPNGLIRGYRVYYTMEPEHPVGNWQKHNVDDSLLTTVGSLLEDETYTVRVLAFTSVGDGPLSDPIQVKTQQGVPGQPMNLRAEARSETSITLSWSPPRQESIIKYELLFREGDHGREVGRTFDPTTSYVVEDLKPNTEYAFRLAARSPQGLGAFTPVVRQRTLQSISPKNFKVKMIMKTSVLLSWEFPDNYNSPTPYKIQYNGLTLDVDGRTTKKLITHLKPHTFYNFVLTNRGSSLGGLQQTVTAWTAFNLLNGKPSVAPKPDADGFIMVYLPDGQSPVPVQSYFIVMVPLRKSRGGQFLTPLGSPEDMDLEELIQDISRLQRRSLRHSRQLEVPRPYIAARFSVLPPTFHPGDQKQYGGFDNRGLEPGHRYVLFVLAVLQKSEPTFAASPFSDPFQLDNPDPQPIVDGEEGLIWVIGPVLAVVFIICIVIAILLYKKKPHSKRKDSEPRTKCLLNNADLAPHHPKDPVEMRRINFQTPGMLSHPPIPIADMAEHTERLKANDSLKLSQEYESIDPGQQFTWEHSNLEVNKPKNRYANVIAYDHSRVILQPIEGIMGSDYINANYVDGYRCQNAYIATQGPLPETFGDFWRMVWEQRSATIVMMTRLEEKSRIKCDQYWPNRGTETYGFIQVTLLDTIELATFCVRTFSLHKNGSSEKREVRQFQFTAWPDHGVPEYPTPFLAFLRRVKTCNPPDAGPIVVHCSAGVGRTGCFIVIDAMLERIKPEKTVDVYGHVTLMRSQRNYMVQTEDQYSFIHEALLEAVGCGNTEVPARSLYAYIQKLAQVEPGEHVTGMELEFKRLANSKAHTSRFISANLPCNKFKNRLVNIMPYESTRVCLQPIRGVEGSDYINASFIDGYRQQKAYIATQGPLAETTEDFWRMLWENNSTIVVMLTKLREMGREKCHQYWPAERSARYQYFVVDPMAEYNMPQYILREFKVTDARDGQSRTVRQFQFTDWPEQGVPKSGEGFIDFIGQVHKTKEQFGQDGPISVHCSAGVGRTGVFITLSIVLERMRYEGVVDIFQTVKMLRTQRPAMVQTEDEYQFCYQAALEYLGSFDHYAT

SEQ ID NO: 3380 - protein, 1895 aa, Homo sapiens
MGLLVVLLVGGCAAEEPPRFIKEPKDQIGVSGGVASFVCQATGDPKPRVTWNKKGKKVNSQRFETIEFDESAGAVLRIQPLRTPRDENVYECVAQNSVGEITVHAKLTVLREDQLPSGFPNIDMGPQLKVVERTRTATMLCAASGNPDPEITWFKDFLPVDPSASNGRIKQLRSGALQIESSEETDQGKYECVATNSAGVRYSSPANLYVRVRRVAPRFSILPMSHEIMPGGNVNITCVAVGSPMPYVKWMQGAEDLTPEDDMPVGRNVLELTDVKDSANYTCVAMSSLGVIEAVAQITVKSLPKAPGTPMVTENTATSITITWDSGNPDPVSYYVIEYKSKSQDGPYQIKEDITTTRYSIGGLSPNSEYEIWVSAVNSIGQGPPSESVVTRTGEQAPASAPRNVQARMLSATTMIVQWEEPVEPNGLIRGYRVYYTMEPEHPVGNWQKHNVDDSLLTTVGSLLEDETYTVRVLAFTSVGDGPLSDPIQVKTQQGVPGQPMNLRAEARSETSITLSWSPPRQESIIKYELLFREGDHGREVGRTFDPTTSYVVEDLKPNTEYAFRLAARSPQGLGAFTPVVRQRTLQSKPSAPPQDVKCVSVRSTAILVSWRPPPPETHNGALVGYSVRYRPLGSEDPEPKEVNGIPPTTTQILLEALEKWTQYRITTVAHTEVGPGPESSPVVVRTDEDVPSAPPRKVEAEALNATAIRVLWRSPAPGRQHGQIRGYQVHYVRMEGAEARGPPRIKDVMLADAQEMVITNLQPETAYSITVAAYTMKGDGARSKPKVVVTKGAVLGRPTLSVQQTPEGSLLARWEPPAGTAEDQVLGYRLQFGREDSTPLATLEFPPSEDRYTASGVHKGATYVFRLAARSRGGLGEEAAEVLSIPEDTPRGHPQILEAAGNASAGTVLLRWLPPVPAERNGAIVKYTVAVREAGALGPARETELPAAAEPGAENALTLQGLKPDTAYDLQVRAHTRRGPGPFSPPVRYRTFLRDQVSPKNFKVKMIMKTSVLLSWEFPDNYNSPTPYKIQYNGLTLDVDGRTTKKLITHLKPHTFYNFVLTNRGSSLGGLQQTVTAWTAFNLLNGKPSVAPKPDADGFIMVYLPDGQSPVPVQSYFIVMVPLRKSRGGQFLTPLGSPEDMDLEELIQDISRLQRRSLRHSRQLEVPRPYIAARFSVLPPTFHPGDQKQYGGFDNRGLEPGHRYVLFVLAVLQKSEPTFAASPFSDPFQLDNPDPQPIVDGEEGLIWVIGPVLAVVFIICIVIAILLYKNKPDSKRKDSEPRTKCLLNNADLAPHHPKDPVEMRRINFQTPGMLSHPPIPIADMAEHTERLKANDSLKLSQEYESIDPGQQFTWEHSNLEVNKPKNRYANVIAYDHSRVILQPIEGIMGSDYINANYVDGYRCQNAYIATQGPLPETFGDFWRMVWEQRSATIVMMTRLEEKSRIKCDQYWPNRGTETYGFIQVTLLDTIELATFCVRTFSLHKNGSSEKREVRQFQFTAWPDHGVPEYPTPFLAFLRRVKTCNPPDAGPIVVHCSAGVGRTGCFIVIDAMLERIKPEKTVDVYGHVTLMRSQRNYMVQTEDQYSFIHEALLEAVGCGNTEVPARSLYAYIQKLAQVEPGEHVTGMELEFKRLANSKAHTSRFISANLPCNKFKNRLVNIMPYESTRVCLQPIRGVEGSDYINASFIDGYRQQKAYIATQGPLAETTEDFWRMLWENNSTIVVMLTKLREMGREKCHQYWPAERSARYQYFVVDPMAEYNMPQYILREFKVTDARDGQSRTVRQFQFTDWPEQGVPKSGEGFIDFIGQVHKTKEQFGQDGPISVHCSAGVGRTGVFITLSIVLERMRYEGVVDIFQTVKMLRTQRPAMVQTEDEYQFCYQAALEYLGSFDHYAT

SEQ ID NO: 3381 - protein, 297 aa, Homo sapiens
MYKKAEASFWTAEEVDLSKDIQHWESLKPEERYFISHVLAFFAASDGIVNENLVERFSQEVQITEARCFYGFQIAMENIHSEMYSLLIDTYIKDPKEREFLFNAIETMPCVKKKADWALRWIGDKEATYGERVVAFAAVEGIFFSGSFASIFWLKKRGLMPGLTFSNELISRDEGLHCDFACLMFKHLVHKPSEERVREIIINAVRIEQEFLTEALPVKLIGMNCTLMKQYIEFVADRLMLELGFSKVFRVENPFDFMENISLEGKTNFFEKRVGEYQRMGVMSSPTENSFTLDADF

SEQ ID NO: 3382 - protein, 383 aa, Homo sapiens
MENKKERNLSIKVIHLQILFTVICLFWALIFDQGGLFLVNVFLTSRIRSFSLIFLLVSFWEFHNPGLHGACGEVKLAFERKTCKKVAIKIISKRKFAIGSAREADPALNVETEIEILKKLNHPCIIKIKNFFDAEDYYIVLELMEGGELFDKVVGNKRLKEATCKLYFYQMLLAVQYLHENGIIHRDLKPENVLLSSQEEDCLIKITDFGHSKILGETSLMRTLCGTPTYLAPEVLVSVGTAGYNRAVDCWSLGVILFICLSGYPPFSEHRTQVSLKDQITSGKYNFIPEVWAEVSEKALDLVKKLLVVDPKARFTTEEALRHPWLQDEDMKRKFQDLLSEENESTALPQVLAQPSTSRKRPREGEAEGAETTKRPAVCAAVL

SEQ ID NO: 3383 - protein, 8715 aa, Homo sapiens
MKRIHAVANIGTALKFLEGRKIKLVNINSTDIADGRPSIVLGLMWTIILYFQIEELTSNLPQLQSLSSSASSVDSIVSSETPSPPSKRKVTTKIQGNAKKALLKWVQYTAGKQTGIEVKDFGKSWRSGVAFHSVIHAIRPELVDLETVKGRSNRENLEDAFTIAETELGIPRLLDPEDVDVDKPDEKSIMTYVAQFLKHYPDIHNASTDGQEDDEILPGFPSFANSVQNFKREDRVIFKEMKVWIEQFERDLTRAQMVESNLQDKYQSFKHFRVQYEMKRKQIEHLIQPLHRDGKLSLDQALVKQSWDRVTSRLFDWHIQLDKSLPAPLGTIGAWLYRAEVALREEITVQQVHEETANTIQRKLEQHKDLLQNTDAHKRAFHEIYRTRSVNGIPVPPDQLEDMAERFHFVSSTSELHLMKMEFLELKYRLLSLLVLAESKLKSWIIKYGRRESVEQLLQNYVSFIENSKFFEQYEVTYQILKQTAEMYVKADGSVEEAENVMKFMNETTAQWRNLSVEVRSVRSMLEEVISNWDRYGNTVASLQAWLEDAEKMLNQSENAKKDFFRNLPHWIQQHTAMNDAGNFLIETCDEMVSRDLKQQLLLLNGRWRELFMEVKQYAQADEMDRMKKEYTDCVVTLSAFATEAHKKLSEPLEVSFMNVKLLIQDLEDIEQRVPVMDAQYKIITKTAHLITKESPQEEGKEMFATMSKLKEQLTKVKECYSPLLYESQQLLIPLEELEKQMTSFYDSLGKINEIITVLEREAQSSALFKQKHQELLACQENCKKTLTLIEKGSQSVQKFVTLSNVLKHFDQTRLQRQIADIHVAFQSMVKKTGDWKKHVETNSRLMKKFEESRAELEKVLRIAQEGLEEKGDPEELLRRHTEFFSQLDQRVLNAFLKACDELTDILPEQEQQGLQEAVRKLHKQWKDLQGEAPYHLLHLKIDVEKNRFLASVEECRTELDRETKLMPQEGSEKIIKEHRVFFSDKGPHHLCEKRLQLIEELCVKLPVRDPVRDTPGTCHVTLKELRAAIDSTYRKLMEDPDKWKDYTSRFSEFSSWISTNETQLKGIKGEAIDTANHGEVKRAVEEIRNGVTKRGETLSWLKSRLKVLTEVSSENEAQKQGDELAKLSSSFKALVTLLSEVEKMLSNFGDCVQYKEIVKNSLEELISGSKEVQEQAEKILDTENLFEAQQLLLHHQQKTKRISAKKRDVQQQIAQAQQGEGGLPDRGHEELRKLESTLDGLERSRERQERRIQVTLRKWERFETNKETVVRYLFQTGSSHERFLSFSSLESLSSELEQTKEFSKRTESIAVQAENLVKEASEIPLGPQNKQLLQQQAKSIKEQVKKLEDTLEEDIKTMEMVKTKWDHFGSNFETLSVWITEKEKELNALETSSSAMDMQISQIKVTIQEIESKLSSIVGLEEEAQSFAQFVTTGESARIKAKLTQIRRYGEELREHAQCLEGTILGHLSQQQKFEENLRKIQQSVSEFEDKLAVPIKICSSATETYKVLQEHMDLCQALESLSSAITAFSASARKVVNRDSCVQEAAALQQQYEDILRRAKERQTALENLLAHWQRLEKELSSFLTWLERGEAKASSPEMDISADRVKVEGELQLIQALQNEVVSQASFYSKLLQLKESLFSVASKDDVKMMKLHLEQLDERWRDLPQIINKRINFLQSVVAEHQQFDELLLSFSVWIKLFLSELQTTSEISIMDHQVALTRHKDHAAEVESKKGELQSLQGHLAKLGSLGRAEDLHLLQGKAEDCFQLFEEASQVVERRQLALSHLAEFLQSHASLSGILRQLRQTVEATNSMNKNESDLIEKDLNDALQNAKALESAAVSLDGILSKAQYHLKIGSSEQRTSCRATADQLCGEVERIQNLLGTKQSEADALAVLKKAFQDQKEELLKSIEDIEERTDKERLKEPTRQALQQRLRVFNQLEDELNSHEHELCWLKDKAKQIAQKDVAFAPEVDREINRLEVTWDDTKRLIHENQGQCCGLIDLMREYQNLKSAVSKVLENASSVIVTRTTIKDQEDLKWAFSKHETAKNKMNYKQKDLDNFTSKGKHLLSELKKIHSSDFSLVKTDMESTVDKWLDVSEKLEENMDRLRVSLSIWDDVLSTRDEIEGWSNNCVPQMAENISNLDNHLRAEELLKEFESEVKNKALRLEELHSKVNDLKELTKNLETPPDLQFIEADLMQKLEHAKEITEVAKGTLKDFTAQSTQVEKFINDITTWFTKVEESLMNCAQNETCEALKKVKDIQKELQSQQSNISSTQENLNSLCRKYHSAELESLGRAMTGLIKKHEAVSQLCSKTQASLQESLEKHFSESMQEFQEWFLGAKAAAKESSDRTGDSKVLEAKLHDLQNILDSVSDGQSKLDAVTQEGQTLYAHLSKQIVSSIQEQITKANEEFQAFLKQCLKDKQALQDCASELGSFEDQHRKLNLWIHEMEERFNTENLGESKQHIPEKKNEVHKVEMFLGELLAARESLDKLSQRGQLLSEEGHGAGQEGRLCSQLLTSHQNLLRMTKEKLRSCQVALQEHEALEEALQSMWFWVKAIQDRLACAESTLGSKDTLEKRLSQIQDILLMKGEGEVKLNMAIGKGEQALRSSNKEGQRVIQTQLETLKEVWADIMSSSVHAQSTLESVISQWNDYVERKNQLEQWMESVDQKIEHPLQPQPGLKEKFVLLDHLQSILSEAEDHTRALHRLIAKSRELYEKTEDESFKDTAQEELKTQFNDIMTVAKEKMRKVEEIVKDHLMYLDAVHEFTDWLHSAKEELHRWSDMSGDSSATQKKLSKIKELIDSREIGASRLSRVESLAPEVKQNTTASGCELMHTEMQALRADWKQWEDSVFQTQSCLENLVSQMALSEQEFSGQVAQLEQALEQFSALLKTWAQQLTLLEGKNTDEEIVECWHKGQEILDALQKAEPRTEDLKSQLNELCRFSRDLSTYSGKVSGLIKEYNCLCLQASKGCQNKEQILQQRFRKAFRDFQQWLVNAKITTAKCFDIPQNISEVSTSLQKIQEFLSESENGQHKLNMMLSKGELLSTLLTKEKAKGIQAKVTAAKEDWKNFHSNLHQKESALENLKIQMKDFEVSAEPIQDWLSKTEKMVHESSNRLYDLPAKRREQQKLQSVLEEIHCYEPQLNRLKEKAQQLWEGQAASKSFRHRVSQLSSQYLALSNLTKEKVSRLDRIVAEHNQFSLGIKELQDWMTDAIHMLDSYCHPTSDKSVLDSRTLKLEALLSVKQEKEIQMKMIVTRGESVLQNTSPEGIPTIQQQLQSVKDMWASLLSAGIRCKSQLEGALSKWTSYQDGVRQFSGWMDSMEANLNESERQHAELRDKTTMLGKAKLLNEEVLSYSSLLETIEVKGAGMTEHYVTQLELQDLQERYRAIQERAKEAVTKSEKLVRLHQEYQRDLKAFEVWLGQEQEKLDQYSVLEGDAHTHETTLRDLQELQVHCAEGQALLNSVLHTREDVIPSGIPQAEDRALESLRQDWQAYQHRLSETRTQFNNVVNKLRLMEQKFQQVDEWLKTAEEKVSPRTRRQSNRATKEIQLHQMKKWHEEVTAYRDEVEEVGARAQEILDESHVNSRMGCQATQLTSRYQALLLQVLEQIKFLEEEIQSLEESESSLSSYSDWYGSTHKNFKNVATKIDKVDTVMMGKKLKTLEVLLKDMEKGHSLLKSAREKGERAVKYLEEGEAERLRKEIHDHMEQLKELTSTVRKEHMTLEKGLHLAKEFSDKCKALTQWIAEYQEILHVPEEPKMELYEKKAQLSKYKSLQQTVLSHEPSVKSVREKGEALLELVQDVTLKDKIDQLQSDYQDLCSIGKEHVFSLEAKVKDHEDYNSELQEVEKWLLQMSGRLVAPDLLETSSLETITQQLAHHKAMMEEIAGFEDRLNNLQMKGDTLIGQCADHLQAKLKQNVHAHLQGTKDSYSAICSTAQRMYQSLEHELQKHVSRQDTLQQCQAWLSAVQPDLEPSPQPPLSRAEAIKQVKHFRALQEQARTYLDLLCSMCDLSNASVKTTAKDIQQTEQTIEQKLVQAQNLTQGWEEIKHLKSELWIYLQDADQQLQNMKRRHSELELNIAQNMVSQVKDFVKKLQSKQASVNTIIEKVNKLTKKEESPEHKEINHLNDQWLDLCRQSNNLCLQREEDLQRTRDYHDCMNVVEVFLEKFTTEWDNLARSDAESTAVHLEALKKLALALQERKYAIEDLKDQKQKMIEHLNLDDKELVKEQTSHLEQRWFQLEDLIKRKIQVSVTNLEELNVVQSRFQELMEWAEEQQPNIAEALKQSPPPDMAQNLLMDHLAICSELEAKQMLLKSLIKDADRVMADLGLNERQVIQKALSDAQSHVNCLSDLVGQRRKYLNKALSEKTQFLMAVFQATSQIQQHERKIMFREHICLLPDDVSKQVKTCKSAQASLKTYQNEVTGLWAQGRELMKEVTEQEKSEVLGKLQELQSVYDSVLQKCSHRLQELEKNLVSRKHFKEDFDKACHWLKQADIVTFPEINLMNESSELHTQLAKYQNILEQSPEYENLLLTLQRTGQTILPSLNEVDHSYLSEKLNALPRQFNVIVALAKDKFYKVQEAILARKEYASLIELTTQSLSELEAQFLRMSKVPTDLAVEEALSLQDGCRAILDEVAGLGEAVDELNQKKEGFRSTGQPWQPDKMLHLVTLYHRLKRQTEQRVSLLEDTTSAYQEHEKMCQQLERQLKSVKEEQSKVNEETLPAEEKLKMYHSLAGSLQDSGIVLKRVTIHLEDLAPHLDPLAYEKARHQIQSWQGELKLLTSAIGETVTECESRMVQSIDFQTEMSRSLDWLRRVKAELSGPVYLDLNLQDIQEEIRKIQIHQEEVQSSLRIMNALSHKEKEKFTKAKELISADLEHSLAELSELDGDIQEALRTRQATLTEIYSQCQRYYQVFQAANDWLEDAQELLQLAGNGLDVESAEENLKSHMEFFSTEDQFHSNLEELHSLVATLDPLIKPTGKEDLEQKVASLELRSQRMSRDSGAQVDLLQRCTAQWHDYQKAREEVIELMNDTEKKLSEFSLLKTSSSHEAEEKLSEHKALVSVVNSFHEKIVALEEKASQLEKTGNDASKATLSRSMTTVWQRWTRLRAVAQDQEKILEDAVDEWTGFNNKVKKATEMIDQLQDKLPGSSAEKASKAELLTLLEYHDTFVLELEQQQSALGMLRQQTLSMLQDGAAPTPGEEPPLMQEITAMQDRCLNMQEKVKTNGKLVKQELKDREMVETQINSVKCWVQETKEYLGNPTIEIDAQLEELQILLTEATNHRQNIEKMAEEQKEKYLGLYTILPSELSLQLAEVALDLKIRDQIQDKIKEVEQSKATSQELSRQIQKLAKDLTTILTKLKAKTDNVVQAKTDQKVLGEELDGCNSKLMELDAAVQKFLEQNGQLGKPLAKKIGKLTELHQQTIRQAENRLSKLNQAASHLEEYNEMLELILKWIEKAKVLAHGTIAWNSASQLREQYILHQTLLEESKEIDSELEAMTEKLQYLTSVYCTEKMSQQVAELGRETEELRQMIKIRLQNLQDAAKDMKKFEAELKKLQAALEQAQATLTSPEVGRLSLKEQLSHRQHLLSEMESLKPKVQAVQLCQSALRIPEDVVASLPLCHAALRLQEEASRLQHTAIQQCNIMQEAVVQYEQYEQEMKHLQQLIEGAHREIEDKPVATSNIQELQAQISRHEELAQKIKGYQEQIASLNSKCKMLTMKAKHATMLLTVTEVEGLAEGTEDLDGELLPTPSAHPSVVMMTAGRCHTLLSPVTEESGEEGTNSEISSPPACRSPSPVANTDASVNQDIAYYQALSAERLQTDAAKIHPSTSASQEFYEPGLEPSATAKLGDLQRSWETLKNVISEKQRTLYEALERQQKYQDSLQSISTKMEAIELKLSESPEPGRSPESQMAEHQALMDEILMLQDEINELQSSLAEELVSESCEADPAEQLALQSTLTVLAERMSTIRMKASGKRQLLEEKLNDQLEEQRQEQALQRYRCEADELDSWLLSTKATLDTALSPPKEPMDMEAQLMDCQNMLVEIEQKVVALSELSVHNENLLLEGKAHTKDEAEQLAGKLRRLKGSLLELQRALHDKQLNMQGTAQEKEESDVDLTATQSPGVQEWLAQARTTWTQQRQSSLQQQKELEQELAEQKSLLRSVASRGEEILIQHSAAETSGDAGEKPDVLSQELGMEGEKSSAEDQMRMKWESLHQEFSTKQKLLQNVLEQEQEQVLYSRPNRLLSGVPLYKGDVPTQDKSAVTSLLDGLNQAFEEVSSQSGGAKRQSIHLEQKLYDGVSATSTWLDDVEERLFVATALLPEETETCLFNQEILAKDIKEMSEEMDKNKNLFSQAFPENGDNRDVIEDTLGCLLGRLSLLDSVVNQRCHQMKERLQQILNFQNDLKVLFTSLADNKYIILQKLANVFEQPVAEQIEAIQQAEDGLKEFDAGIIELKRRGDKLQVEQPSMQELSKLQDMYDELMMIIGSRRSGLNQNLTLKSQYERALQDLADLLETGQEKMAGDQKIIVSSKEEIQQLLDKHKEYFQGLESHMILTETLFRKIISFAVQKETQFHTELMAQASAVLKRAHKRGVELEYILETWSHLDEDQQELSRQLEVVESSIPSVGLVEENEDRLIDRITLYQHLKSSLNEYQPKLYQVLDDGKRLLISISCSDLESQLNQLGECWLSNTNKMSKELHRLETILKHWTRYQSESADLIHWLQSAKDRLEFWTQQSVTVPQELEMVRDHLNAFLEFSKEVDAQSSLKSSVLSTGNQLLRLKKVDTATLRSELSRIDSQWTDLLTNIPAVQEKLHQLQMDKLPSRHAISEVMSWISLMENVIQKDEDNIKNSIGYKAIHEYLQKYKGFKIDINCKQLTVDFVNQSVLQISSQDVESKRSDKTDFAEQLGAMNKSWQILQGLVTEKIQLLEGLLESWSEYENNVQCLKTWFETQEKRLKQQHRIGDQASVQNALKDCQDLEDLIKAKEKEVEKIEQNGLALIQNKKEDVSSIVMSTLRELGQTWANLDHMVGQLKILLKSVLDQWSSHKVAFDKINSYLMEARYSLSRFRLLTGSLEAVQVQVDNLQNLQDDLEKQERSLQKFGSITNQLLKECHPPVTETLTNTLKEVNMRWNNLLEEIAEQLQSSKALLQLWQRYKDYSKQCASTVQQQEDRTNELLKAATNKDIADDEVATWIQDCNDLLKGLGTVKDSLFFLHELGEQLKQQVDASAASAIQSDQLSLSQHLCALEQALCKQQTSLQAGVLDYETFAKSLEALEAWIVEAEEILQGQDPSHSSDLSTIQERMEELKGQMLKFSSMAPDLDRLNELGYRLPLNDKEIKRMQNLNRHWSLISSQTTERFSKLQSFLLQHQTFLEKCETWMEFLVQTEQKLAVEISGNYQHLLEQQRAHELFQAEMFSRQQILHSIIIDGQRLLEQGQVDDRDEFNLKLTLLSNQWQGVIRRAQQRRGIIDSQIRQWQRYREMAEKLRKWLVEVSYLPMSGLGSVPIPLQQARTLFDEVQFKEKVFLRQQGSYILTVEAGKQLLLSADSGAEAALQAELAEIQEKWKSASMRLEEQKKKLAFLLKDWEKCEKGIADSLEKLRTFKKKLSQSLPDHHEELHAEQMRCKELENAVGSWTDDLTQLSLLKDTLSAYISADDISILNERVELLQRQWEELCHQLSLRRQQIGERLNEWAVFSEKNKELCEWLTQMESKVSQNGDILIEEMIEKLKKDYQEEIAIAQENKIQLQQMGERLAKASHESKASEIEYKLGKVNDRWQHLLDLIAARVKKLKETLVAVQQLDKNMSSLRTWLAHIESELAKPIVYDSCNSEEIQRKLNEQQELQRDIEKHSTGVASVLNLCEVLLHDCDACATDAECDSIQQATRNLDRRWRNICAMSMERRLKIEETWRLWQKFLDDYSRFEDWLKSSERTAAFPSSSGVIYTVAKEELKKFEAFQRQVHECLTQLELINKQYRRLARENRTDSACSLKQMVHEGNQRWDNLQKRVTSILRRLKHFIGQREEFETARDSILVWLTEMDLQLTNIEHFSECDVQAKIKQLKAFQQEISLNHNKIEQIIAQGEQLIEKSEPLDAAIIEEELDELRRYCQEVFGRVERYHKKLIRLPLPDDEHDLSDRELELEDSAALSDLHWHDRSADSLLSPQPSSNLSLSLAQPLRSERSGRDTPASVDSIPLEWDHDYDLSRDLESAMSRALPSEDEEGQDDKDFYLRGAVGLSGDHSALESQIRQLGKALDDSRFQIQQTENIIRSKTPTGPELDTSYKGYMKLLGECSSSIDSVKRLEHKLKEEEESLPGFVNLHSTETQTAGVIDRWELLQAQALSKELRMKQNLQKWQQFNSDLNSIWAWLGDTEEELEQLQRLELSTDIQTIELQIKKLKELQKAVDHRKAIILSINLCSPEFTQADSKESRDLQDRLSQMNGRWDRVCSLLEEWRGLLQDALMQCQGFHEMSHGLLLMLENIDRRKNEIVPIDSNLDAEILQDHHKQLMQIKHELLESQLRVASLQDMSCQLLVNAEGTDCLEAKEKVHVIGNRLKLLLKEVSRHIKELEKLLDVSSSQQDLSSWSSADELDTSGSVSPTSGRSTPNRQKTPRGKCSLSQPGPSVSSPHSRSTKGGSDSSLSEPGPGRSGRGFLFRVLRAALPLQLLLLLLIGLACLVPMSEEDYSCALSNNFARSFHPMLRYTNGPPPL

SEQ ID NO: 3384 - protein, 485 aa, Homo sapiens
ISLSASAGPWSGSRGGSMLAVGCALLAALLAAPGAALAPRRCPAQEVARGVLTSLPGDSVTLTCPGVEPEDNATVHWVLRKPAAGSHPSRWAGMGRRLLLRSVQLHDSGNYSCYRAGRPAGTVHLLVDVPPEEPQLSCFRKSPLSNVVCEWGPRSTPSLTTKAVLLVRKFQNSPAEDFQEPCQYSQESQKFSCQLAVPEGDSSFYIVSMCVASSVGSKFSKTQTFQGCGILQPDPPANITVTAVARNPRWLSVTWQDPHSWNSSFYRLRFELRYRAERSKTFTTWMVKDLQHHCVIHDAWSGLRHVVQLRAQEEFGQGEWSEWSPEAMGTPWTESRSPPAENEVSTPMQALTTNKDDDNILFRDSANATSLPVQDSSSVPLPTFLVAGGSLAFGTLLCIAIVLRFKKTWKLRALKEGKTSMHPPYSLGQLVPERPRPTPVLVPLISPPVSPSSLGSDNTSSHNRPDARDPRSPYDISNTDYFFPR

SEQ ID NO: 3385 - protein, 259 aa, Homo sapiens
IAAPDSRRWLWSVLAAALGLLTAGVSALEVYTPKEIFVANGTQGKLTCKFKSTSTTGGLTSVSWSFQPEGADTTVSFFHYSQGQVYLGNYPPFKDRISWAGDLDKKDASINIENMQFIHNGTYICDVKNPPDIVVQPGHIRLYVVEKENLPVFPVWVVVGIVTAVVLGLTLLISMILAVLYRRKNSKRDYTGCSTSESLSPVKQAPRKSPSDTEGLVKSLPSGSHQGPVIYAQLDHSGGHHSDKINKSESVVYADIRKN

SEQ ID NO: 3386 - protein, 560 aa, Homo sapiens
LLRSELGRSSGLRGRGASRLPGPKRRGPRVMAKGEGAESGSAAGLLPTSILQSTERPAQVKKEPKKKKQQLSVCNKLCYALGGAPYQVTGCALGFFLQIYLLDVAQVGPFSASIILFVGRAWDAITDPLVGLCISKSPWTCLGRLMPWIIFSTPLAVIAYFLIWFVPDFPHGQTYWYLLFYCLFETMVTCFHVPYSALTMFISTEQTERDSATAYRMTVEVLGTVLGTAIQGQIVGQADTPCFQDLNSSTVASQSANHTHGTTSHRETQKAYLLAAGVIVCIYIICAVILILGVREQREPYEAQQSEPIAYFRGLRLVMSHGPYIKLITGFLFTSLAFMLVEGNFVLFCTYTLGFRNEFQNLLLAIMLSATLTIPIWQWFLTRFGKKTAVYVGISSAVPFLILVALMESNLIITYAVAVAAGISVAAAFLLPWSMLPDVIDDFHLKQPHFHGTEPIFFSFYVFFTKFASGVSLGISTLSLDFAGYQTRGCSQPERVKFTLNMLVTMAPIVLILLGLLLFKMYPIDEERRRQNKKALQALRDEASSSGCSETDSTELASIL

SEQ ID NO: 3387 - protein, 211 aa, Homo sapiens
LLCLLLIIGLFANLSSCLWWLFNQEPGRLYVELQFFCAVFNFGQGFISFGIFGLDKHLIILPFKRRLEFLWNNKDTAENRDSPVSEEIKMTCQQFIHYHRDLCIRNIVKERRCGAKTSAGTFCGCDLVSWLIEVGLASDRGEAVIYGDRLVQGGVIQHITNEYEFRDEYLFYRFLQKSPEQSPPAINANTLQQERYKEIEHSSPPSHSPKT

SEQ ID NO: 3388 - protein, 584 aa, Homo sapiens
IAAAEEPAGSPSVMTRAGDHNRQRGCCGSLADYLTSAKFLLYLGHSLSTWGDRMWHFAVSVFLVELYGNSLLLTAVYGLVVAGSVLVLGAIIGDWVDKNARLKVAQTSLVVQNVSVILCGIILMMVFLHKHELLTMYHGWVLTSCYILIITIANIANLASTATAITIQRDWIVVVAGEDRSKLANMNATIRRIDQLTNILAPMAVGQIMTFGSPVIGCGFISGWNLVSMCVEYVLLWKVYQKTPALAVKAGLKEEETELKQLNLHKDTEPKPLEGTHLMGVKDSNIHELEHEQEPTCASQMAEPFRTFRDGWVSYYNQPVFLAGMGLAFLYMTVLGFDCITTGYAYTQGLSGSILSILMGASAITGIMGTVAFTWLRRKCGLVRTGLISGLAQLSCLILCVISVFMPGSPLDLSVSPFEDIRSRFIQGESITPTKIPEITTEIYMSNGSNSANIVPETSPESVPIISVSLLFAGVIAARIGLWSFDLTVTQLLQENVIESERGIINGVQNSMNYLLDLLHFIMVILAPNPEAFGLLVLISVSFVAMGHIMYFRFAQNTLGNKLFACGPDAKEVRKENQANTSVV

SEQ ID NO: 3389 - protein, 1901 aa, Homo sapiens
TPPRCPVPLLLLLLLGAARAGALEIQRRFPSPTPTNNFALDGAAGTVYLAAVNRLYQLSGANLSLEAEAAVGPVPDSPLCHAPQLPQASCEHPRRLTDNYNKILQLDPGQGLVVVCGSIYQGFCQLRRRGNISAVAVRFPPAAPPAEPVTVFPSMLNVAANHPNASTVGLVLPPAAGAGGSRLLVGATYTGYGSSFFPRNRSLEDHRFENTPEIAIRSLDTRGDLAKLFTFDLNPSDDNILKIKQGAKEQHKLGFVSAFLHPSDPPPGAQSYAYLALNSEARAGDKESQARSLLARICLPHGAGGDAKKLTESYIQLGLQCAGGAGRGDLYSRLVSVFPARERLFAVFERPQGSPAARAAPAALCAFRFADVRAAIRAARTACFVEPAPDVVAVLDSVVQGTGPACERKLNIQLQPEQLDCGAAHLQHPLSILQPLKATPVFRAPGLTSVAVASVNNYTAVFLGTVNGRLLKINLNESMQVVSRRVVTVAYGEPVHHVMQFDPADSGYLYLMTSHQMARVKVAACNVHSTCGDCVGAADAYCGWCALETRCTLQQDCTNSSQQHFWTSASEGPSRCPAMTVLPSEIDVRQEYPGMILQISGSLPSLSGMEMACDYGNNIRTVARVPGPAFGHQIAYCNLLPRDQFPPFPPNQDHVTVEMSVRVNGRNIVKANFTIYDCSRTAQVYPHTACTSCLSAQWPCFWCSQQHSCVSNQSRCEASPNPTSPQDCPRTLLSPLAPVPTGGSQNILVPLANTAFFQGAALECSFGLEEIFEAVWVNESVVRCDQVVLHTTRKSQVFPLSLQLKGRPARFLDSPEPMTVMVYNCAMGSPDCSQCLGREDLGHLCMWSDGCRLRGPLQPMAGTCPAPEIHAIEPLSGPLDGGTLLTIRGRNLGRRLSDVAHGVWIGGVACEPLPDRYTVSEEIVCVTGPAPGPLSGVVTVNASKEGKSRDRFSYVLPLVHSLEPTMGPKAGGTRITIHGNDLHVGSELQVLVNDTDPCTELMRTDTSIACTMPEGALPAPVPVCVRFERRGCVHGNLTFWYMQNPVITAISPRRSPVSGGRTITVAGERFHMVQNVSMAVHHIGREPTLCKVLNSTLITCPSPGALSNASAPVDFFINGRAYADEVAVAEELLDPEEAQRGSRFRLDYLPNPQFSTAKREKWIKHHPGEPLTLVIHKEQDSLGLQSHEYRVKIGQVSCDIQIVSDRIIHCSVNESLGAAVGQLPITIQVGNFNQTIATLQLGGSETAIIVSIVICSVLLLLSVVALFVFCTKSRRAERYWQKTLLQMEEMESQIREEIRKGFAELQTDMTDLTKELNRSQGIPFLEYKHFVTRTFFPKCSSLYEERYVLPSQTLNSQGSSQAQETHPLLGEWKIPESCRPNMEEGISLFSSLLNNKHFLIVFVHALEQQKDFAVRDRCSLASLLTIALHGKLEYYTSIMKELLVDLIDASAAKNPKLMLRRTESVVEKMLTNWMSICMYSCLRETVGEPFFLLLCAIKQQINKGSIDAITGKARYTLSEEWLLRENIEAKPRNLNVSFQGCGMDSLSVRAMDTDTLTQVKEKILEAFCKNVPYSQWPRAEDVDLEWFASSTQSYILRDLDDTSVVEDGRKKLNTLAHYKIPEGASLAMSLIDKKDNTLGRVKDLDTEKYFHLVLPTDELAEPKKSHRQSHRKKVLPEIYLTRLLSTKGTLQKFLDDLFKAILSIREDKPPLAVKYFFDFLEEQAEKRGISDPDTLHIWKTNSLPLRFWVNILKNPQFVFDIDKTDHIDACLSVIAQAFIDACSISDLQLGKDSPTNKLLYAKEIPEYRKIVQRYYKQIQDMTPLSEQEMNAHLAEESRKYQNEFNTNVAMAEIYKYAKRYRPQIMAALEANPTARRTQLQHKFEQVVALMEDNIYECYSEA

SEQ ID NO: 3390 - protein, 142 aa, Homo sapiens
LSGAVGVGCGMCSAGELLRGGDGGERDEDGDALAEREAAGTGWDPGASPRRRGQRPKESEQDVEDSQNHTGEPVGDDYKKMGTLFGELNKNLINMGFTRMYFGERIVEPVIVIFFWVMLWFLGLQALGLVAVLCLVIIYVQQ

SEQ ID NO: 3391 - protein, 333 aa, Homo sapiens
TKRQKDLGLCATPRGTRLMEKFRAVLDLHVKHHSALGYGLVTLLTAGGERIFSAVAFQCPCSAAWNLPYGLVFLLVPALALFLLGYVLSARTWRLLTGCCSSARASCGSALRGSLVCTQISAAAALAPLTWVAVALLGGAFYECAATGSAAFAQRLCLGRNRSCAAELPLVPCNQAKASDVQDLLKDLKAQSQVLGWILIAVVIIILLIFTSVTRCLSPVSFLQLKFWKIYLEQEQQILKSKATEHATELAKENIKCFFEGSHPKEYNTPSMKEWQQISSLYTFNPKGQYYSMLHKYVNRKEKTHSIRSTEGDTVIPVLGFVDSSGINSTPEL

SEQ ID NO: 3392 - protein, 234 aa, Homo sapiens
LPSGRGRLTAMPGRAPLRTVPGALGAWLLGGLWAWTLCGLCSLGAVGAPRPCQAPQQWEGRQVMYQQSSGRNSRALLSYDGLNQRVRVLDERKALIPCKRLFEYILLYKDGVMFQIDQATKQCSKMTLTQPWDPLDIPQNSTFEDQYSIGGPQEQITVQEWSDRKSARSYETWIGIYTVKDCYPVQETFTINYSVILSTRFFDIQLGIKDPSVFTPPSTCQMAQLEKMSEDCSW

SEQ ID NO: 3393 - protein, 372 aa, Homo sapiens
VTSAPEPGARLPGSGWARTQALGSCGAPGVAMNIVVEFFVVTFKVLWAFVLAAARWLVRPKEKSVAGQVCLITGAGSGLGRLFALEFARRRALLVLWDINTQSNEETAGMVRHIYRDLEAADAAALQAGNGEEEILPHCNLQVFTYTCDVGKRENVYLTAERVRKEVGEVSVLVNNAGVVSGHHLLECPDELIERTMMVNCHAHFWTTKAFLPTMLEINHGHIVTVASSLGLFSTAGVEDYCASKFGVVGFHESLSHELKAAEKDGIKTTLVCPYLVDTGMFRGCRIRKEIEPFLPPLKPDYCVKQAMKAILTDQPMICTPRLMYIVTFMKSILPFEAVVCMYRFLGADKCMYPFIAQRKQATNNNEAKNGI

SEQ ID NO: 3394 - protein, 2236 aa, Homo sapiens
LLEVAWPLFIFLILISVRLSYPPYEQHECHFPNKAMPSAGTLPWVQGIICNANNPCFRYPTPGEAPGVVGNFNKSIVARLFSDARRLLLYSQKDTSMKDMRKVLRTLQQIKKSSSNLKLQDFLVDNETFSGFLYHNLSLPKSTVDKMLRADVILHKVFLQGYQLHLTSLCNGSKSEEMIQLGDQEVSELCGLPREKLAAAERVLRSNMDILKPILRTLNSTSPFPSKELAEATKTLLHSLGTLAQELFSMRSWSDMRQEVMFLTNVNSSSSSTQIYQAVSRIVCGHPEGGGLKIKSLNWYEDNNYKALFGGNGTEEDAETFYDNSTTPYCNDLMKNLESSPLSRIIWKALKPLLVGKILYTPDTPATRQVMAEVNKTFQELAVFHDLEGMWEELSPKIWTFMENSQEMDLVRMLLDSRDNDHFWEQQLDGLDWTAQDIVAFLAKHPEDVQSSNGSVYTWREAFNETNQAIRTISRFMECVNLNKLEPIATEVWLINKSMELLDERKFWAGIVFTGITPGSIELPHHVKYKIRMDIDNVERTNKIKDGYWDPGPRADPFEDMRYVWGGFAYLQDVVEQAIIRVLTGTEKKTGVYMQQMPYPCYVDDIFLRVMSRSMPLFMTLAWIYSVAVIIKGIVYEKEARLKETMRIMGLDNSILWFSWFISSLIPLLVSAGLLVVILKLGNLLPYSDPSVVFVFLSVFAVVTILQCFLISTLFSRANLAAACGGIIYFTLYLPYVLCVAWQDYVGFTLKIFASLLSPVAFGFGCEYFALFEEQGIGVQWDNLFESPVEEDGFNLTTSVSMMLFDTFLYGVMTWYIEAVFPGQYGIPRPWYFPCTKSYWFGEESDEKSHPGSNQKRISEICMEEEPTHLKLGVSIQNLVKVYRDGMKVAVDGLALNFYEGQITSFLGHNGAGKTTTMSILTGLFPPTSGTAYILGKDIRSEMSTIRQNLGVCPQHNVLFDMLTVEEHIWFYARLKGLSEKHVKAEMEQMALDVGLPSSKLKSKTSQLSGGMQRKLSVALAFVGGSKVVILDEPTAGVDPYSRRGIWELLLKYRQGRTIILSTHHMDEADVLGDRIAIISHGKLCCVGSSLFLKNQLGTGYYLTLVKKDVESSLSSCRNSSSTVSYLKKEDSVSQSSSDAGLGSDHESDTLTIDVSAISNLIRKHVSEARLVEDIGHELTYVLPYEAAKEGAFVELFHEIDDRLSDLGISSYGISETTLEEIFLKVAEESGVDAETSDGTLPARRNRRAFGDKQSCLRPFTEDDAADPNDSDIDPESRETDLLSGMDGKGSYQVKGWKLTQQQFVALLWKRLLIARRSRKGFFAQIVLPAVFVCIALVFSLIVPPFGKYPSLELQPWMYNEQYTFVSNDAPEDTGTLELLNALTKDPGFGTRCMEGNPIPDTPCQAGEEEWTTAPVPQTIMDLFQNGNWTMQNPSPACQCSSDKIKKMLPVCPPGAGGLPPPQRKQNTADILQDLTGRNISDYLVKTYVQIIAKSLKNKIWVNEFRYGGFSLGVSNTQALPPSQEVNDAIKQMKKHLKLAKDSSADRFLNSLGRFMTGLDTKNNVKVWFNNKGWHAISSFLNVINNAILRANLQKGENPSHYGITAFNHPLNLTKQQLSEVALMTTSVDVLVSICVIFAMSFVPASFVVFLIQERVSKAKHLQFISGVKPVIYWLSNFVWDMCNYVVPATLVIIIFICFQQKSYVSSTNLPVLALLLLLYGWSITPLMYPASFVFKIPSTAYVVLTSVNLFIGINGSVATFVLELFTDNKLNNINDILKSVFLIFPHFCLGRGLIDMVKNQAMADALERFGENRFVSPLSWDLVGRNLFAMAVEGVVFFLITVLIQYRFFIRPRPVNAKLSPLNDEDEDVRRERQRILDGGGQNDILEIKELTKIYRRKRKPAVDRICVGIPPGECFGLLGVNGAGKSSTFKMLTGDTTVTRGDAFLNKNSILSNIHEVHQNMGYCPQFDAITELLTGREHVEFFALLRGVPEKEVGKVGEWAIRKLGLVKYGEKYAGNYSGGNKRKLSTAMALIGGPPVVFLDEPTTGMDPKARRFLWNCALSVVKEGRSVVLTSHSMEECEALCTRMAIMVNGRFRCLGSVQHLKNRFGDGYTIVVRIAGSNPDLKPVQDFFGLAFPGSVLKEKHRNMLQYQLPSSLSSLARIFSILSQSKKRLHIEDYSVSQTTLDQVFVNFAKDQSDDDHLKDLSLHKNQTVVDVAVLTSFLQDEKVKESYV

SEQ ID NO: 3395 - protein, 838 aa, Homo sapiens
TSTWRYGRGPGIGTVTMVSWGRFICLVVVTMATLSLARPSFSLVEDTTLEPEEPPTKYQISQPEVYVAAPGESLEVRCLLKDAAVISWTKDGVHLGPNNRTVLIGEYLQIKGATPRDSGLYACTASRTVDSETWYFMVNVTDAISSGDDEDDTDGAEDFVSENSNNKRAPYWTNTEKMEKRLHAVPAANTVKFRCPAGGNPMPTMRWLKNGKEFKQEHRIGGYKVRNQHWSLIMESVVPSDKGNYTCVVENEYGSINHTYHLDVVERSPHRPILQAGLPANASTVVGGDVEFVCKVYSDAQPHIQWIKHVEKNGSKYGPDGLPYLKVLKHSGINSSNAEVLALFNVTEADAGEYICKVSNYIGQANQSAWLTVLPKQQAPGREKEITASPDYLEIAIYCIGVFLIACMVVTVILCRMKNTTKKPDFSSQPAVHKLTKRIPLRRQVTVSAESSSSMNSNTPLVRITTRLSSTADTPMLAGVSEYELPEDPKWEFPRDKLTLGKPLGEGCFGQVVMAEAVGIDKDKPKEAVTVAVKMLKDDATEKDLSDLVSEMEMMKMIGKHKNIINLLGACTQDGPLYVIVEYASKGNLREYLRARRPPGMEYSYDINRVPEEQMTFKDLVSCTYQLARGMEYLASQKCIHRDLAARNVLVTENNVMKIADFGLARDINNIDYYKKTTNGRLPVKWMAPEALFDRVYTHQSDVWSFGVLMWEIFTLGGSPYPGIPVEELFKLLKEGHRMDKPANCTNELYMMMRDCWHAVPSQRPTFKQLVEDLDRILTLTTNEEYLDLSQPLEQYSPSYPDTRSSCSSGDDSVFSPDPMPYEPCLPQYPHINGSVKT

SEQ ID NO: 3396 - protein, 449 aa, Homo sapiens
LFLSRHHWPPAAAPGVLAAQPRRRPGTPVLCAKPWPRGPGHGPGARGEAASRGAVTGRASAMKTLIAAYSGVLRGERQAEADRSQRSHGGPALSREGSGRWGTGSSILSALQDLFSVTWLNRSKVEKQLQVISVLQWVLSFLVLGVACSAILMYIFCTDCWLIAVLYFTWLVFDWNTPKKGGRRSQWVRNWAVWRYFRDYFPIQLVKTHNLLTTRNYIFGYHPHGIMGLGAFCNFSTEATEVSKKFPGIRPYLATLAGNFRMPVLREYLMSGGICPVSRDTIDYLLSKNGSGNAIIIVVGGAAESLSSMPGKNAVTLRNRKGFVKLALRHGADLVPIYSFGENEVYKQVIFEEGSWGRWVQKKFQKYIGFAPCIFHGRGLFSSDTWGLVPYSKPITTVVGEPITIPKLEHPTQQDIDLYHTMYMEALVKLFDKHKTKFGLPETEVLEVN

SEQ ID NO: 3397 - protein, 105 aa, Homo sapiens
VRRSAMDSAAQTALASHPANIVMVCVIALMAPMNSTASPSVRTSWTLCVRTASSACSTPWSVTESSSAATGPMRMRRLQDAPKILSSTRYVMSSVSSVRMECASV

SEQ ID NO: 3398 - protein, 1307 aa, Homo sapiens
LRPRMPGPRGAAGGLAPEMRGAGAAGLLALLLLLLLLLLGLGGRVEGGPAGERGAGGGGALARERFKVVFAPVICKRTCLKGQCRDSCQQGSNMTLIGENGHSTDTLTGSGFRVVVCPLPCMNGGQCSSRNQCLCPPDFTGRFCQVPAGGAGGGTGGSGPGLSRTGALSTGALPPLAPEGDSVASKHAIYAVQVIADPPGPGEGPPAQHAAFLVPLGPGQISAEVQAPPPVVNVRVHHPPEASVQVHRIESSNAESAAPSQHLLPHPKPSHPRPPTQKPLGRCFQDTLPKQPCGSNPLPGLTKQEDCCGSIGTAWGQSKCHKCPQLQYTGVQKPGPVRGEVGADCPQGYKRLNSTHCQDINECAMPGVCRHGDCLNNPGSYRCVCPPGHSLGPSRTQCIADKPEEKSLCFRLVSPEHQCQHPLTTRLTRQLCCCSVGKAWGARCQRCPTDGTAAFKEICPAGKGYHILTSHQTLTIQGESDFSLFLHPDGPPKPQQLPESPSQAPPPEDTEEERGVTTDSPVSEERSVQQSHPTATTTPARPYPELISRPSPPTMRWFLPDLPPSRSAVEIAPTQVTETDECRLNQNICGHGECVPGPPDYSCHCNPGYRSHPQHRYCVDVNECEAEPCGPGRGICMNTGGSYNCHCNRGYRLHVGAGGRSCVDLNECAKPHLCGDGGFCINFPGHYKCNCYPGYRLKASRPPVCEDIDECRDPSSCPDGKCENKPGSFKCIACQPGYRSQGGGACRDVNECAEGSPCSPGWCENLPGSFRCTCAQGYAPAPDGRSCLDVDECEAGDVCDNGICSNTPGSFQCQCLSGYHLSRDRSHCEDIDECDFPAACIGGDCINTNGSYRCLCPQGHRLVGGRKCQDIDECSQDPSLCLPHGACKNLQGSYVCVCDEGFTPTQDQHGCEEVEQPHHKKECYLNFDDTVFCDSVLATNVTQQECCCSLGAGWGDHCEIYPCPVYSSAEFHSLCPDGKGYTQDNNIVNYGIPAHRDIDECMLFGSEICKEGKCVNTQPGYECYCKQGFYYDGNLLECVDVDECLDESNCRNGVCENTRGGYRCACTPPAEYSPAQRQCLSPEEMDVDECQDPAACRPGRCVNLPGSYRCECRPPWVPGPSGRDCQLPESPAERAPERRDVCWSQRGEDGMCAGPLAGPALTFDDCCCRQGRGWGAQCRPCPPRGAGSHCPTSQSESNSFWDTSPLLLGKPPRDEDSSEEDSDECRCVSGRCVPRPGGAVCECPGGFQLDASRARCVDIDECRELNQRGLLCKSERCVNTSGSFRCVCKAGFARSRPHGACVPQRRR

SEQ ID NO: 3399 - protein, 287 aa, Homo sapiens
LPFLLCAVLLSAVQAQAGWLQHDFGHLSVFSTSKWNHLLHHFVIGHLKGAPASWWNHMHFQHHAKPNCFRKDPDINMHPFFFALGKILSVELGKQKKKYMPYNHQHKYFFLIGPPALLPLYFQWYIFYFVIQRKKWVDLAWMITFYVRFFLTYVPLLGLKAFLGLFFIVRFLESNWFVWVTQMNHIPMHIDHDRNMDWVSTQLQATCNVHKSAFNDWFSGHLNFQIEHHLFPTMPRHNYHKVAPLVQSLCAKHGIEYQSKPLLSAFADIIHSLKESGQLWLDAYLHQ

SEQ ID NO: 3400 - protein, 979 aa, Homo sapiens
VESAGWRLPGEANAWPCPAPRRTMTLLLLPLLLASLLASCSCNKANKHKPWIEAEYQGIVMENDNTVLLNPPLFALDKDAPLRYAGEICGFRLHGSGVPFEAVILDKATGEGLIRAKEPVDCEAQKEHTFTIQAYDCGEGPDGANTKKSHKATVHVRVNDVNEFAPVFVERLYRAAVTEGKLYDRILRVEAIDGDCSPQYSQICYYEILTPNTPFLIDNDGNIENTEKLQYSGERLYKFTVTAYDCGKKRAADDAEVEIQVKPTCKPSWQGWNKRIEYAPGAGSLALFPGIRLETCDEPLWNIQATIELQTSHVAKGCDRDNYSERALRKLCGAATGEVDLLPMPGPNANWTAGLSVHYSQDSSLIYWFNGTQAVQVPLGGPSGLGSGPQDSLSDHFTLSFWMKHGVTPNKGKKEEETIVCNTVQNEDGFSHYSLTVHGCRIAFLYWPLLESARPVKFLWKLEQVCDDEWHHYALNLEFPTVTLYTDGISFDPALIHDNGLIHPPRREPALMIGACWTEEKNKEKEKGDNSTDTTQGDPLSIHHYFHGYLAGFSVRSGRLESREVIECLYACREGLDYRDFESLGKGMKVHVNPSQSLLTLEGDDVETFNHALQHVAYMNTLRFATPGVRPLRLTTAVKCFSEESCVSIPEVEGYVVVLQPDAPQILLSGTAHFARPAVDFEGTNGVPLFPDLQITCSISHQVEAKKDESWQGTVTDTRMSDEIVHNLDGCEISLVGDDLDPERESLLLDTTSLQQRGLELTNTSAYLTIAGVESITVYEEILRQARYRLRHGAALYTRKFRLSCSEMNGRYSSNEFIVEVNVLHSMNRVAHPSHVLSSQQFLHRGHQPPPEMAGHSLASSHRNSMIPSAATLIIVVCVGFLVLMVVLGLVRIHSLHRRVSGAGGPPGASSDPKDPDLFWDDSALTIIVNPMESYQNRQSCVTGAVGGQQEDEDSSDSEVADSPSSDERRIIETPPHRY

SEQ ID NO: 3401 - protein, 580 aa, Homo sapiens
RVFCDDNMTNSKGRSITDKTSGGPSSGGGFVDWTLRLNTIQSDKFLNLLLSMVPVIYQKNQEDRHKKANGIWQDGLSTAVQTFSNRSEQHMEYHSFSEQSFHANNGHASSSCSQKYDDYANYNYCDGRETSETTAMLQDEDISSDGDEDAIVEVTPKLPKESSGIMALQILVPFLLAGFGTVSAGMVLDIVQHWEVFRKVTEVFILVPALLGLKGNLEMTLASRLSTAVNIGKMDSPIEKWNLIIGNLALKQVQATVVGFLAAVAAIILGWIPEGKYYLDHSILLCSSSVATAFIASLLQGIIMVGVIVGSKKTGINPDNVATPIAASFGDLITLAILAWISQGLYSCLETYYYISPLVGVFFLALTPIWIIIAAKHPATRTVLHSGWEPVITAMVISSIGGLILDTTVSDPNLVGIVVYTPVINGIGGNLVAIQASRISTYLHLHSIPGELPDEPKGCYYPFRTFFGPGVNNKSAQVLLLLVIPGHLIFLYTIHLMKSGHTSLTIIFIVVYLFGAVLQVFTLLWIADWMVHHFWRKGKDPDSFSIPYLTALGDLLGTALLALSFHFLWLIGDRDGDVGD

SEQ ID NO: 3402 - protein, 47 aa, Homo sapiens
VLVCLVRELRGPGIVFKVVLLPTCPVVPAPVLTATLPFFHPRVGSTK

SEQ ID NO: 3403 - protein, 517 aa, Homo sapiens
IPTLIMLFPISMSATEFLLASVIFCLVFWVIRASRPQVPKGLKNPPGPWGWPLIGHMLTLGKNPHLALSRMSQQYGDVLQIRIGSTPVVVLSGLDTIRQALVRQGDDFKGRPDLYTFTLISNGQSMSFSPDSGPVWAARRRLAQNGLKSFSIASDPASSTSCYLEEHVSKEAEVLISTLQELMAGPGHFNPYRYVVVSVTNVICAICFGRRYDHNHQELLSLVNLNNNFGEVVGSGNPADFIPILRYLPNPSLNAFKDLNEKFYSFMQKMVKEHYKTFEKGHIRDITDSLIEHCQEKQLDENANVQLSDEKIINIVLDLFGAGFDTVTTAISWSLMYLVMNPRVQRKIQEELDTVIGRSRRPRLSDRSHLPYMEAFILETFRHSSFVPFTIPHSTTRDTSLKGFYIPKGRCVFVNQWQINHDQKLWVNPSEFLPERFLTPDGAIDKVLSEKVIIFGMGKRKCIGETIARWEVFLFLAILLQRVEFSVPLGVKVDMTPIYGLTMKHACCEHFQMQLRS

SEQ ID NO: 3404 - protein, 32 aa, Homo sapiens
LAFVFVVLGGLWGLRAAAVSHVGFWKLRSVWG

SEQ ID NO: 3405 - protein, 122 aa, Homo sapiens
LSASAWGSITAVTPLLAHLSSAHLAFMTFSRILMGLLQGVYFPALTSLLSQKVRESERAFTYSIVGAGSQFGTLLTGAVGSLLLEWYGWQSIFYFSGGLTLLWVWYVYRYLLSEKGNAGRAG

SEQ ID NO: 3406 - protein, 278 aa, Homo sapiens
LTRGPAARSIRSMLLLTRSPTAWHRLSQLKPRVLPGTLGGQALHLRSWLLSRQGPAETGGQGQPQGPGLRTRLLITGLFGAGLGGAWLALRAEKERLQQQKRTEALRQAAVGQGDFHLLDHRGRARCKADFRGQWVLMYFGFTHCPDICPDELEKLVQVVRQLEAEPGLPPVQPVFITVDPERDDVEAMARYVQDFHPRLLGLTGSTKQVAQASHSYRVYYNAGPKDEDQDYIVDHSIAIYLLNPDGLFTDYYGRSRSAEQISDSVRRHMAAFRSVLS

SEQ ID NO: 3407 - protein, 684 aa, Homo sapiens
IHPAPASGDPMARAHWGCCPWLVLLCACAWGHTKPVDLGGQDVRNCSTNPPYLPVTVVNTTMSLTALRQQMQTQNLSAYIIPGTDAHMNEYIGQHDERRAWITGFTGSAGTAVVTMKKAAVWTDSRYWTQAERQMDCNWELHKEVGTTPIVTWLLTEIPAGGRVGFDPFLLSIDTWESYDLALQGSNRQLVSITTNLVDLVWGSERPPVPNQPIYALQEAFTGSTWQEKVSGVRSQMQKHQKVPTAVLLSALEETAWLFNLRASDIPYNPFFYSYTLLTDSSIRLFANKSRFSSETLSYLNSSCTGPMCVQIEDYSQVRDSIQAYSLGDVRIWIGTSYTMYGIYEMIPKEKLVTDTYSPVMMTKAVKNSKEQALLKASHVRDAVAVIRYLVWLEKNVPKGTVDEFSGAEIVDKFRGEEQFSSGPSFETISASGLNAALAHYSPTKELNRKLSSDEMYLLDSGGQYWDGTTDITRTVHWGTPSAFQKEAYTRVLIGNIDLSRLIFPAATSGRMVEAFARRALWDAGLNYGHGTGHGIGNFLCVHEWPVGFQSNNIAMAKGMFTSIEPGYYKDGEFGIRLEDVALVVEAKTKYPGSYLTFEVVSFVPYDRNLIDVSLLSPEHLQYLNRYYQTIREKVGPELQRRQLLEEFEWLQQHTEPLAARAPDTASWASVLVVSTLAILGWSV

SEQ ID NO: 3408 - protein, 260 aa, Homo sapiens [sequence omitted]

SEQ ID NO: 3409 - protein, 840 aa, Homo sapiens [sequence omitted]

SEQ ID NO: 3410 - protein, 225 aa, Homo sapiens
MRHKTSSSSLRMGAYVFIGVGAVTMLMGFLGCIGAVNEVRCLLGLYFAFLLLILIAQVTAGALFYFNMGKLKQEMGGIVTELIRDYNSSREDSLQDAWDYVQAQVKCCGWVSFYNWTDNAELMNRPEVTYPCSCEVKGEEDNSLSVRKGFCEAPGNRTQSGNHPEDWPVYQEGCMEKVQAWLQENLGIILGVGVGVAIIELLGMVLSICLCRHVHSEDYSKVPKY

SEQ ID NO: 3411 - protein, 216 aa, Homo sapiens
MESNLSGLVPAAGLVPALPPAVTLGLTAAYTTLYALLFFSVYAQLWLVLLYGHKRLSYQTVFLALCLLWAALRTTLFSFYFRDTPRANRLGPLPFWLLYCCPVCLQFFTLTLMNLYFAQVVFKAKVKRRPEMSRGLLAVRGAFVGASLLFLLVNVLCAVLSHRRRAQPWALLLVRVLVSDSLFVICALSLAACLCLVARRAPSTSIYLEAKVGLQH

SEQ ID NO: 3412 - protein, 88 aa, Homo sapiens
MSSENCFVAENSSLHPESGQENDATSPHFSTRHEGSFQVPVLCAVMNVVFITILIIALIALSGGSTLHQFFQSLLAVSIHAQLKSILV

SEQ ID NO: 3413 - protein, 244 aa, Homo sapiens
MNHHVCPVENWSYNESCPPDPAEQGGPKTCCTLDDVPLISKCGSYPPESCLFSLIGNMGAFMVALICLLRYGQLLEQSRHSWVNTTALITGCTNAAGLLVVGNFQVDHARSLHYVGAGVAFPAGLLFVCLHCALSYQGATAPLDLAVAYLRSVLAVIAFITLVLSGVFFVHESSQLQHGAALCEWVCVIDILIFYGTFSYEFGAVSSDTLVAALQPTPGRACKSSGSSSTSTHLNCAPESIAMI

SEQ ID NO: 3414 - protein, 129 aa, Homo sapiens
MWDNLTCWPATPRGQVVVLACPLIFKLFSSIQGRNVSRSCTDEGWTHLEPGPYPIACGLDDKAASLDEVGCKAAMVFFQYCVMANFFWLLVEGLYLYTLLAVSFFSERKYFWGGTQHIHHGVDHRQDPF

SEQ ID NO: 3415 - protein, 732 aa, Homo sapiens
ILGASNILWIMFAASQAFKIETTPESRYLAQIGDSVSLTCSTTGCESPFFSWRTQIDSPLNGKVTNEGTTSTLTMNPVSFGNEHSYLCTATCESRKLEKGIQVEIYSFPKDPEIHLSGPLEAGKPITVKCSVADVYPFDRLEIDLLKGDHLMKSQEFLEDADRKSLETKSLEVTFTPVIEDIGKVLVCRAKLHIDEMDSVPTVRQAVKELQVYISPKNTVISVNPSTKLQEGGSVTMTCSSEGLPAPEIFWSKKLDNGNLQHLSGNATLTLIAMRMEDSGIYVCEGVNLIGKNRKEVELIVQEKPFTVEISPGPRIAAQIGDSVMLTCSVMGCESPSFSWRTQIDSPLSGKVRSEGTNSTLTLSPVSFENEHSYLCTVTCGHKKLEKGIQVELYSFPRDPEIEMSGGLVNGSSVTVSCKVPSVYPLDRLEIELLKGETILENIEFLEDTDMKSLENKSLEMTFIPTIEDTGKALVCQAKLHIDDMEFEPKQRQSTQTLYVNVAPRDTTVLVSPSSILEEGSSVNMTCLSQGFPAPKILWSRQLPNGELQPLSENATLTLISTKMEDSGVYLCEGINQAGRSRKEVELIIQVTPKDIKLTAFPSESVKEGDTVIISCTCGNVPETWIILKKKAETGDTVLKSIDGAYTIRKAQLKDAGVYECESKNKVGSQLRSLTLDVQGRENNKDYFSPELLVLYFASSLIIPAIGMIIYFARKANMKGSYSLVEAQKSKV

SEQ ID NO: 3416 - protein, 483 aa, Homo sapiens
LSASAGPWSGSRGGSMLAVGCALLAALLAAPGAALAPRRCPAQEVARGVLTSLPGDSVTLTCPGVEPEDNATVHWVLRKPAAGSHPSRWAGMGRRLLLRSVQLHDSGNYSCYRAGRPAGTVHLLVDVPPEEPQLSCFRKSPLSNVVCEWGPRSTPSLTTKAVLLVRKFQNSPAEDFQEPCQYSQESQKFSCQLAVPEGDSSFYIVSMCVASSVGSKFSKTQTFQGCGILQPDPPANITVTAVARNPRWLSVTWQDPHSWNSSFYRLRFELRYRAERSKTFTTWMVKDLQHHCVIHDAWSGLRHVVQLRAQEEFGQGEWSEWSPEAMGTPWTESRSPPAENEVSTPMQALTTNKDDDNILFRDSANATSLPVQDSSSVPLPTFLVAGGSLAFGTLLCIAIVLRFKKTWKLRALKEGKTSMHPPYSLGQLVPERPRPTPVLVPLISPPVSPSSLGSDNTSSHNRPDARDPRSPYDISNTDYFFPR

SEQ ID NO: 3417 - protein, 260 aa, Homo sapiens
VIAAPDSRRWLWSVLAAALGLLTAGVSALEVYTPKEIFVANGTQGKLTCKFKSTSTTGGLTSVSWSFQPEGADTTVSFFHYSQGQVYLGNYPPFKDRISWAGDLDKKDASINIENMQFIHNGTYICDVKNPPDIVVQPGHIRLYVVEKENLPVFPVWVVVGIVTAVVLGLTLLISMILAVLYRRKNSKRDYTGCSTSESLSPVKQAPRKSPSDTEGLVKSLPSGSHQGPVIYAQLDHSGGHHSDKINKSESVVYADIRKN

SEQ ID NO: 3418 - protein, 601 aa, Homo sapiens
ISDLGNNTLDMAPEINLPGPMSLIDNTKGQLVVNPEALKILSAITQPVVVVAIVGLYRTGKSYLMNKLAGKKNGFSLGSTVKSHTKGIWMWCVPHPKKPEHTLVLLDTEGLGDIEKGDNENDSWIFALAILLSSTFVYNSMGTINQQAMDQLHYVTELTDRIKANSSPGNNSVDDSADFVSFFPAFVWTLRDFTLELEVDGEPITADDYLELSLKLRKGTDKKSKSFNDPRLCIRKFFPKRKCFVFDWPAPKKYLAHLEQLKEEELNPDFIEQVAEFCSYILSHSNVKTLSGGIPVNGPRLESLVLTYVNAISSGDLPCMENAVLALAQIENSAAVEKAIAHYEQQMGQKVQLPTETLQELLDLHRDSEREAIEVFMKNSFKDVDQMFQRKLGAQLEARRDDFCKQNSKASSDCCMALLQDIFGPLEEDVKQGTFSKPGGYRLFTQKLQELKNKYYQVPRKGIQAKEVLKKYLESKEDVADALLQTDQSLSEKEKAIEVERIKAESAEAAKKMLEEIQKKNEEMMEQKEKSYQEHVKQLTEKMERDRAQLMAEQEKTLALKLQEQERLLKEGFENESKRLQKDIWDIQMRSKSLEPICNIL

SEQ ID NO: 3419 - protein, 32 aa, Homo sapiens
KFPSFGIGEGVSFFLFFFLEPVLIALNKYSLK

SEQ ID NO: 3420 - protein, 567 aa, Homo sapiens
VLLRLICFIALLISSLEADKCKEREEKIILVSSANEIDVRPCPLNPNEHKGTITWYKDDSKTPVSTEQASRIHQHKEKLWFVPAKVEDSGHYYCVVRNSSYCLRIKISAKFVENEPNLCYNAQAIFKQKLPVAGDGGLVCPYMEFFKNENNELPKLQWYKDCKPLLLDNIHFSGVKDRLIVMNVAEKHRGNYTCHASYTYLGKQYPITRVIEFITLEENKPTRPVIVSPANETMEVDLGSQIQLICNVTGQLSDIAYWKWNGSVIDEDDPVLGEDYYSVENPANKRRSTLITVLNISEIESRFYKHPFTCFAKNTHGIDAAYIQLIYPVTNFQKHMIGICVTLTVIIVCSVFIYKIFKIDIVLWYRDSCYDFLPIKASDGKTYDAYILYPKTVGEGSTSDCDIFVFKVLPEVLEKQCGYKLFIYGRDDYVGEDIVEVINENVKKSRRLIIILVRETSGFSWLGGSSEEQIAMYNALVQDGIKVVLLELEKIQDYEKMPESIKFIKQKHGAIRWSGDFTQGPQSAKTRFWKNVRYHMPVQRRSPSSKHQLLSPATKEKLQREAHVPLG

SEQ ID NO: 3421 - protein, 357 aa, Homo sapiens
IAETEEDMSNITDPQMWDFDDLNFTGMPPADEDYSPCMLETETLNKYVVIIAYALVFLLSLLGNSLVMLVILYSRVGRSVTDVYLLNLALADLLFALTLPIWAASKVNGWIFGTFLCKVVSLLKEVNFYSGILLLACISVDRYLAIVHATRTLTQKRHLVKFVCLGCWGLSMNLSLPFFLFRQAYHPNNSSPVCYEVLGNDTAKWRMVLRILPHTFGFIVPLFVMLFCYGFTLRTLFKAHMGQKHRAMRVIFAVVLIFLLCWLPYNLVLLADTLMRTQVIQESCERRNNIGRALDATEILGFLHSCLNPIIYAFIGQNFRHGFLKILAMHGLVSKEFLARHRVTSYTSSSVNVSSNL

SEQ ID NO: 3422 - protein, 811 aa, Homo sapiens [sequence omitted]

SEQ ID NO: 3423 - protein, 114 aa, Homo sapiens
LVIALVPVGRGNYEELENSGDTTVESERPNKVTIPSTFAAVTIKETLNANINSTNFAPDENQLEFILMVLIPLILLVLLLLSVVFLATYYKRKRTKQEPSSQGSQSALQTYLLV

SEQ ID NO: 3424 - protein, 186 aa, Homo sapiens
TPEVKVACSEDVDLPCTAPWDPQVPYTVSWVKLLEGGEERMETPQEDHLRGQHYHQKGQNGSFDAPNERPYSLKIRNTTSCNSGTYRCTLQDPDGQRNLSGKVILRVTGCPAQRKEETFKKYRAEIVLLLALVIFYLTLIIFTCKFARLQSIFPDFSKAGMERAFLPVTSPNKHLGLVTPHKTELV

SEQ ID NO: 3425 - protein, 904 aa, Homo sapiens
IISLFTFAVGVNICLGFTAHRIKRAEGWEEGPPTVLSDSPWTNISGSCKGRCFELQEAGPPDCRCDNLCKSYTSCCHDFDELCLKTARGWECTKDRCGEVRNEENACHCSEDCLARGDCCTNYQVVCKGESHWVDDDCEEIKAAECPAGFVRPPLIIFSVDGFRASYMKKGSKVMPNIEKLRSCGTHSPYMRPVYPTKTFPNLYTLATGLYPESHGIVGNSMYDPVFDATFHLRGREKFNHRWWGGQPLWITATKQGVKAGTFFWSVVIPHERRILTILQWLTLPDHERPSVYAFYSEQPDFSGHKYGPFGPEESSYGSPFTPAKRPKRKVAPKRRQERPVAPPKKRRRKIHRMDHYAAETRQDKMTNPLREIDKIVGQLMDGLKQLKLHRCVNVIFVGDHGMEDVTCDRTEFLSNYLTNVDDITLVPGTLGRIRSKFSNNAKYDPKAIIANLTCKKPDQHFKPYLKQHLPKRLHYANNRRIEDIHLLVERRWHVARKPLDVYKKPSGKCFFQGDHGFDNKVNSMQTVFVGYGSTFKYKTKVPPFENIELYNVMCDLLGLKPAPNNGTHGSLNHLLRTNTFRPTMPEEVTRPNYPGIMYLQSDFDLGCTCDDKVEPKNKLDELNKRLHTKGSTEERHLLYGRPAVLYRTRYDILYHTDFESGYSEIFLMPLWTSYTVSKQAEVSSVPDHLTSCVRPDVRVSPSFSQNCLAYKNDKQMSYGFLFPPYLSSSPEAKYDAFLVTNMVPMYPAFKRVWNYFQRVLVKKYASERNGVNVISGPIFDYDYDGLHDTEDKIKQYVEGSSIPVPTHYYSIITSCLDFTQPADKCDGPLSVSSFILPHRPDNEESCNSSEDESKWVEELMKMHTARVRDIEHLTSLDFFRKTSRSYPEILTLKTYLHTYESEI

SEQ ID NO: 3426 - protein, 877 aa, Homo sapiens
IISLFTFAVGVNICLGFTAHRIKRAEGWEEGPPTVLSDSPWTNISGSCKGRCFELQEAGPPDCRCDNLCKSYTSCCHDFDELCLKTARGWECTKDRCGEVRNEENACHCSEDCLARGDCCTNYQVVCKGESHWVDDDCEEIKAAECPAGFVRPPLIIFSVDGFRASYMKKGSKVMPNIEKLRSCGTHSPYMRPVYPTKTFPNLYTLATGLYPESHGIVGNSMYDPVFDATFHLRGREKFNHRWWGGQPLWITATKQGVKAGTFFWSVVIPHERRILTILQWLTLPDHERPSVYAFYSEQPDFSGHKYGPFGPEMTNPLREIDKIVGQLMDGLKQLKLHRCVNVIFVGDHGMEDVTCDRTEFLSNYLTNVDDITLVPGTLGRIRSKFSNNAKYDPKAIIANLTCKKPDQHFKPYLKQHLPKRLHYANNRRIEDIHLLVERRWHVARKPLDVYKKPSGKCFFQGDHGFDNKVNSMQTVFVGYGSTFKYKTKVPPFENIELYNVMCDLLGLKPAPNNGTHGSLNHLLRTNTFRPTMPEEVTRPNYPGIMYLQSDFDLGCTCDDKVEPKNKLDELNKRLHTKGSTEAETRKFRGSRNENKENINGNFEPRKERHLLYGRPAVLYRTRYDILYHTDFESGYSEIFLMPLWTSYTVSKQAEVSSVPDHLTSCVRPDVRVSPSFSQNCLAYKNDKQMSYGFLFPPYLSSSPEAKYDAFLVTNMVPMYPAFKRVWNYFQRVLVKKYASERNGVNVISGPIFDYDYDGLHDTEDKIKQYVEGSSIPVPTHYYSIITSCLDFTQPADKCDGPLSVSSFILPHRPDNEESCNSSEDESKWVEELMKMHTARVRDIEHLTSLDFFRKTSRSYPEILTLKTYLHTYESEI

SEQ ID NO: 3427 - protein, 243 aa, Homo sapiens
LLIFYYSFAIVGMEFFCGIVFPNCCNTSTVADAYRWRNHTVGNRTVVEEGYYYLNNFDNILNSFVTLFELTVVNNWYIIMEGVTSQTSHWSRLYFMTFYIVTMVVMTIIVAFILEAFVFRMNYSRKNQDSEVDGGITLEKEISKEELVAVLELYREARGASSDVTRLLETLSQMERYQQHSMVFLGRRSRTKSDLSLKMYQEEIQEWYEEHAREQEQQRQLSSSAAPAAQQPPGSRQRSQTVT

SEQ ID NO: 3428 - protein, 497 aa, Homo sapiens
RALNFLFYLALVAAAAFSGWCVHHVLEEVQQVRRSHQDFSRQREELGQGLQGVEQKVQSLQATFGTFESILRSSQHKQDLTEKAVKQGESEVSRISEVLQKLQNEILKDLSDGIHVVKDARERDFTSLENTVEERLTELTKSINDNIAIFTEVQKRSQKEINDMKAKVASLEESEGNKQDLKALKEAVKEIQTSAKSREWDMEALRSTLQTMESDIYTEVRELVSLKQEQQAFKEAADTERLALQALTEKLLRSEESVSRLPEEIRRLEEELRQLKSDSHGPKEDGGFRHSEAFEALQQKSQGLDSRLQHVEDGVLSMQVASARQTESLESLLSKSQEHEQRLAALQGRLEGLGSSEADQDGLASTVRSLGETQLVLYGDVEELKRSVGELPSTVESLQKVQEQVHTLLSQDQAQAARLPPQDFLDRLSSLDNLKASVSQVEADLKMLRTAVDSLVAYSVKIETNENNLESAKGLLDDLRNDLDRLFVKVEKIHEKV

SEQ ID NO: 3429 - protein, 739 aa, Homo sapiens
ITRGSGCLLAGAARRALRARGRRRRTRGRTLAAGSLAAGSAGTGRAGRVALTMVSYWDTGVLLCALLSCLLLTGSSSGSKLKDPELSLKGTQHIMQAGQTLHLQCRGEAAHKWSLPEMVSKESERLSITKSACGRNGKQFCSTLTLNTAQANHTGFYSCKYLAVPTSKKKETESAIYIFISDTGRPFVEMYSEIPEIIHMTEGRELVIPCRVTSPNITVTLKKFPLDTLIPDGKRIIWDSRKGFIISNATYKEIGLLTCEATVNGHLYKTNYLTHRQTNTIIDVQISTPRPVKLLRGHTLVLNCTATTPLNTRVQMTWSYPDEKNKRASVRRRIDQSNSHANIFYSVLTIDKMQNKDKGLYTCRVRSGPSFKSVNTSVHIYDKAFITVKHRKQQVLETVAGKRSYRLSMKVKAFPSPEVVWLKDGLPATEKSARYLTRGYSLIIKDVTEEDAGNYTILLSIKQSNVFKNLTATLIVNVKPQIYEKAVSSFPDPALYPLGSRQILTCTAYGIPQPTIKWFWHPCNHNHSEARCDFCSNNEESFILDADSNMGNRIESITQRMAIIEGKNKMASTLVVADSRISGIYICIASNKVGTVGRNISFYITDVPNGFHVNLEKMPTEGEDLKLSCTVNKFLYRDVTWILLRTVNNRTMHYSISKQKMAITKEHSITLNLTIMNVSLQDSGTYACRARNVYTGEEILQKKEITIRGEHCNKKAVFSRISKFKSTRNDCTTQSNVKH

SEQ ID NO: 3430 - protein, 1390 aa, Homo sapiens
ITRGSGCLLAGAARRALRARGRRRRTRGRTLAAGSLAAGSAGTGRAGRVALTMVSYWDTGVLLCALLSCLLLTGSSSGSKLKDPELSLKGTQHIMQAGQTLHLQCRGEAAHKWSLPEMVSKESERLSITKSACGRNGKQFCSTLTLNTAQANHTGFYSCKYLAVPTSKKKETESAIYIFISDTGRPFVEMYSEIPEIIHMTEGRELVIPCRVTSPNITVTLKKFPLDTLIPDGKRIIWDSRKGFIISNATYKEIGLLTCEATVNGHLYKTNYLTHRQTNTIIDVQISTPRPVKLLRGHTLVLNCTATTPLNTRVQMTWSYPDEKNKRASVRRRIDQSNSHANIFYSVLTIDKMQNKDKGLYTCRVRSGPSFKSVNTSVHIYDKAFITVKHRKQQVLETVAGKRSYRLSMKVKAFPSPEVVWLKDGLPATEKSARYLTRGYSLIIKDVTEEDAGNYTILLSIKQSNVFKNLTATLIVNVKPQIYEKAVSSFPDPALYPLGSRQILTCTAYGIPQPTIKWFWHPCNHNHSEARCDFCSNNEESFILDADSNMGNRIESITQRMAIIEGKNKMASTLVVADSRISGIYICIASNKVGTVGRNISFYITDVPNGFHVNLEKMPTEGEDLKLSCTVNKFLYRDVTWILLRTVNNRTMHYSISKQKMAITKEHSITLNLTIMNVSLQDSGTYACRARNVYTGEEILQKKEITIRDQEAPYLLRNLSDHTVAISSSTTLDCHANGVPEPQITWFKNNHKIQQEPGIILGPGSSTLFIERVTEEDEGVYHCKATNQKGSVESSAYLTVQGTSDKSNLELITLTCTCVAATLFWLLLTLFIRKMKRSSSEIKTDYLSIIMDPDEVPLDEQCERLPYDASKWEFARERLKLGKSLGRGAFGKVVQASAFGIKKSPTCRTVAVKMLKEGATASEYKALMTELKILTHIGHHLNVVNLLGACTKQGGPLMVIVEYCKYGNLSNYLKSKRDLFFLNKDAALHMEPKKEKMEPGLEQGKKPRLDSVTSSESFASSGFQEDKSLSDVEEEEDSDGFYKEPITMEDLISYSFQVARGMEFLSSRKCIHRDLAARNILLSENNVVKICDFGLARDIYKNPDYVRKGDTRLPLKWMAPESIFDKIYSTKSDVWSYGVLLWEIFSLGGSPYPGVQMDEDFCSRLREGMRMRAPEYSTPEIYQIMLDCWHRDPKERPRFAELVEKLGDLLQANVQQDGKDYIPINAILTGNSGFTYSTPAFSEDFFKESISAPKFNSGSSDDVRYVNAFKFMSLERIKTFEELLPNATSMFDDYQGDSSTLLASPMLKRFTWTDSKPKASLKIDLRVTSKSKESGLSDVSRPSFCHSSCGHVSEGKRRFTYDHAELERKIACCSPPPDYNSVVLYSTPPI

SEQ ID NO: 3431 - protein, 31 aa, Homo sapiens
LWALFVVNLYMFSNCLIVYVLYLQDKTVQFW

SEQ ID NO: 3432 - protein, 44 aa, Homo sapiens
RPFPPRKRNRIVCPLSRTSTLSTPLLMQVRVMTCFLLALRIISI

SEQ ID NO: 3433 - protein, 133 aa, Homo sapiens
RRWAPTLGPRGAANHTGLRPSYPAPSPSTSTFTSPPFHFFLYVFFLLETDSIHIEYNIFVYLTGRGRGGDRGGAGPAAWYSSPRGHWEGDPRPLPSPLCTVLWKRNTHLVSKEFILRRVCVCVCLFFLLNLFK

SEQ ID NO: 3434 - protein, 754 aa, Homo sapiens
KGFGTTIFSSRQQLKMPGKMVVILGASNILWIMFAASQAFKIETTPESRYLAQIGDSVSLTCSTTGCESPFFSWRTQIDSPLNGKVTNEGTTSTLTMNPVSFGNEHSYLCTATCESRKLEKGIQVEIYSFPKDPEIHLSGPLEAGKPITVKCSVADVYPFDRLEIDLLKGDHLMKSQEFLEDADRKSLETKSLEVTFTPVIEDIGKVLVCRAKLHIDEMDSVPTVRQAVKELQVYISPKNTVISVNPSTKLQEGGSVTMTCSSEGLPAPEIFWSKKLDNGNLQHLSGNATLTLIAMRMEDSGIYVCEGVNLIGKNRKEVELIVQEKPFTVEISPGPRIAAQIGDSVMLTCSVMGCESPSFSWRTQIDSPLSGKVRSEGTNSTLTLSPVSFENEHSYLCTVTCGHKKLEKGIQVELYSFPRDPEIEMSGGLVNGSSVTVSCKVPSVYPLDRLEIELLKGETILENIEFLEDTDMKSLENKSLEMTFIPTIEDTGKALVCQAKLHIDDMEFEPKQRQSTQTLYVNVAPRDTTVLVSPSSILEEGSSVNMTCLSQGFPAPKILWSRQLPNGELQPLSENATLTLISTKMEDSGVYLCEGINQAGRSRKEVELIIQVTPKDIKLTAFPSESVKEGDTVIISCTCGNVPETWIILKKKAETGDTVLKSIDGAYTIRKAQLKDAGVYECESKNKVGSQLRSLTLDVQGRENNKDYFSPELLVLYFASSLIIPAIGMIIYFARKANMKGSYSLVEAQKSKV

SEQ ID NO: 3435 - protein, 570 aa, Homo sapiens
LASARRPWLRLLRSELGRSSGLRGRGASRLPGPKRRGPRVMAKGEGAESGSAAGLLPTSILQSTERPAQVKKEPKKKKQQLSVCNKLCYALGGAPYQVTGCALGFFLQIYLLDVAQVGPFSASIILFVGRAWDAITDPLVGLCISKSPWTCLGRLMPWIIFSTPLAVIAYFLIWFVPDFPHGQTYWYLLFYCLFETMVTCFHVPYSALTMFISTEQTERDSATAYRMTVEVLGTVLGTAIQGQIVGQADTPCFQDLNSSTVASQSANHTHGTTSHRETQKAYLLAAGVIVCIYIICAVILILGVREQREPYEAQQSEPIAYFRGLRLVMSHGPYIKLITGFLFTSLAFMLVEGNFVLFCTYTLGFRNEFQNLLLAIMLSATLTIPIWQWFLTRFGKKTAVYVGISSAVPFLILVALMESNLIITYAVAVAAGISVAAAFLLPWSMLPDVIDDFHLKQPHFHGTEPIFFSFYVFFTKFASGVSLGISTLSLDFAGYQTRGCSQPERVKFTLNMLVTMAPIVLILLGLLLFKMYPIDEERRRQNKKALQALRDEASSSGCSETDSTELASIL

SEQ ID NO: 3436 - protein, 251 aa, Homo sapiens
KGGSGMFASGWNQTVPIEEAGSMAALLLLPLLLLLPLLLLKLHLWPQLRWLPADLAFAVRALCCKRALRARALAAAAADPEGPEGGCSLAWRLAELAQQRAAHTFLIHGSRRFSYSEAERESNRAARAFLRALGWDWGPDGGDSGEGSAGEGERAAPGAGDAAAGSGAEFAGGDGAARGGGAAAPLSPGATVALLLPAGPEFLWLWFGLAKAGLRTAFVPTALRRGPLLHCLRSCGARALVLAPGKAGAPN

SEQ ID NO: 3437 - protein, 29 aa, Homo sapiens
TLFLPQRRIYLFFFFFFLFLTRCFAFGKR

SEQ ID NO: 3438 - protein, 743 aa, Homo sapiens
VAATAASGTSATMASCPDSDNSWVLAGSESLPVETLGPASRMDPESERALQAPHSPSKTDGKELAGTMDGEGTLFQTESPQSGSILTEETEVKGTLEGDVCGVEPPGPGDTVVQGDLQETTVVTGLGPDTQDLEGQSPPQSLPSTPKAAWIREEGRCSSSDDDTDVDMEGLRRRRGREAGPPQPMVPLAVENQAGGEGAGGELGISLNMCLLGALVLLGLGVLLFSGGLSESETGPMEEVERQVLPDPEVLEAVGDRQDGLREQLQAPVPPDSVPSLQNMGLLLDKLAKENQDIRLLQAQLQAQKEELQSLMHQPKGLEEENAQLRGALQQGEAFQRALESELQQLRARLQGLEADCVRGPDGVCLSGGRGPQGDKAIREQGPREQEPELSFLKQKEQLEAEAQALRQELERQRRLLGSVQQDLERSLQDASRGDPAHAGLAELGHRLAQKLQGLENWGQDPGVSANASKAWHQKSHFQNSREWSGKEKWWDGQRDRKAEHWKHKKEESGRERKKNWGGQEDREPAGRWKEGRPRVEESGSKKEGKRQGPKEPPRKSGSFHSSGEKQKQPRWREGTKDSHDPLPSWAELLRPKYRAPQGCSGVDECARQEGLTFFGTELAPVRQQELASLLRTYLARLPWAGQLTKELPLSPAFFGEDGIFRHDRLRFRDFVDALEDSLEEVAVQQTGDDDEVDDFEDFIFSHFFGDKALKKRSGKKDKHSQSPRAAGPREGHSHSHHHHHRG

SEQ ID NO: 3439 - protein, 251 aa, Homo sapiens
KADKASASAPAPASATEILLTPAREEQPPQHRSKRGGSVGGVCYLSMGMVVLLMGLVFASVYIYRYFFLAQLARDNFFRCGVLYEDSLSSQVRTQMELEEDVKIYLDENYERINVPVPQFGGGDPADIIHDFQRGLTAYHDISLDKCYVIELNTTIVLPPRNFWELLMNVKRGTYLPQTYIIQEEMVVTEHVSDKEALGSFIYHLCNGKDTYRLRRRATRRRINKRGAKNCNAIRHFENTFVVETLICGVV

SEQ ID NO: 3440 - protein, 337 aa, Homo sapiens
MGSGDYDSMKEPCFREENANFNKIFLPTIYSIIFLTGIVGNGLVILVMGYQKKLRSMTDKYRLHLSVADLLFVITLPFWAVDAVANWYFGNFLCKAVHVIYTVNLYSSVLILAFISLDRYLAIVHATNSQRPRKLLAEKVVYVGVWIPALLLTIPDFIFANVSEADDRYICDRFYPNDLWVVVFQFQHIMVGLILPGIVILSCYCIIISKLSHSKGHQKRKALKTTVILILAFFACWLPYYIGISIDSFILLEIIKQGCEFENTVHKWISITEALAFFHCCLNPILYAFLGAKFKTSAQHALTSVSRGSSLKILSKGKRGGHSSVSTESESSSFHSS

SEQ ID NO: 3441 - protein, 544 aa, Homo sapiens
TPPRARTFPECTPRPPAGAMAGLWLGLVWQKLLLWGAASALSLAGASLVLSLLQRVASYARKWQQMRPIPTVARAYPLVGHALLMKPDGREFFQQIIEYTEEYRHMPLLKLWVGPVPMVALYNAENVEVILTSSKQIDKSSMYKFLEPWLGLGLLTSTGNKWRSRRKMLTPTFHFTILEDFLDIMNEQANILVKKLEKHINQEAFNCFFYITLCALDIICETAMGKNIGAQSNDDSEYVRAVYRMSEMIFRRIKMPWLWLDLWYLMFKEGWEHKKSLQILHTFTNSVIAERANEMNANEDCRGDGRGSAPSKNKRRAFLDLLLSVTDDEGNRLSHEDIREEVDTFMFEGHDTTAAAINWSLYLLGSNPEVQKKVDHELDDVFGKSDRPATVEDLKKLRYLECVIKETLRLFPSVPLFARSVSEDCEVAGYRVLKGTEAVIIPYALHRDPRYFPNPEEFQPERFFPENAQGRHPYAYVPFSAGPRNCIGQKFAVMEEKTILSCILRHFWIESNQKREELGLEGQLILRPSNGIWIKLKRRNADER

SEQ ID NO: 3442 - protein, 41 aa, Homo sapiens
LLLLSIYFYYSLPNAVGPPFTWMLALLGLSQALNILLGLKV

SEQ ID NO: 3443 - protein, 201 aa, Homo sapiens
LWSLHLLSVPRQRAVEMAGPRPRWRDQLLFMSIIVLVIVVICLMFYALLWEAGNLTDLPNLRIGFYNFCLWNEDTSTLQCHQFPELEALGVPRVGLGLARLGVYGSLVLTLFAPQPLLLAQCNSDERAWRLAVGFLAVSSVLLAGGLGLFLSYVWKWVRLSLPGPGFLALGSAQALLILLLIAMAVFPLRAERAESKLESC

SEQ ID NO: 3444 - protein, 724 aa, Homo sapiens
TARSFLSSPLMLQNPQEKSQAYPRRRRPGCYAYRQNPEAIAAAAMYTFLPDNFSPAKPKPSKDLKPLLGSAVLGLLLVLAAVVAWCYYSVSLRKAERLRAELLDLKAGGFSIRNQKGEQVFRLAFRSGALDLDSCSRDGALLGCSLTADGLPLHFFIQTVRPKDTVMCYRVRWEEAAPGRAVEHAMFLGDAAAHWYGGAEMRTQHWPIRLDGQQEPQPFVTSDVYSSDAAFGGILERYWLSSRAAAIKVNDSVPFHLGWNSTERSLRLQARYHDTPYKPPAGRAAAPELSYRVCVGSDVTSIHKYMVRRYFNKPSRVPAPEAFRDPIWSTWALYGRAVDQDKVLRFAQQIRLHHFNSSHLEIDDMYTPAYGDFDFDEVKFPNASDMFRRLRDAGFRVTLWVHPFVNYNSSRFGEGVERELFVREPTGRLPALVRWWNGIGAVLDFTHPKARDWFQGHLRRLRSRYSVASFKFDAGEVSYLPRDFSTYRPLPDPSVWSRRYTEMALPFFSLAEVRVGYQSQNISCFFRLVDRDSVWGYDLGLRSLIPAVLTVSMLGYPFILPDMVGGNAVPQRTAGGDVPERELYIRWLEVAAFMPAMQFSIPPWRYDAEVVAIAQKFAALRASLVAPLLLELAGEVTDTGDPIVRPLWWIAPGDETAHRIDSQFLIGDTLLVAPVLEPGKQERDVYLPAGKWRSYKGELFDKTPVLLTDYPVDLDEIAYFTWAS

SEQ ID NO: 3445 - protein, 2251 aa, Homo sapiens
LWKNLTFRRRQTCQLLLEVAWPLFIFLILISVRLSYPPYEQHECHFPNKAMPSAGTLPWVQGIICNANNPCFRYPTPGEAPGVVGNFNKSIVARLFSDARRLLLYSQKDTSMKDMRKVLRTLQQIKKSSSNLKLQDFLVDNETFSGFLYHNLSLPKSTVDKMLRADVILHKVFLQGYQLHLTSLCNGSKSEEMIQLGDQEVSELCGLPREKLAAAERVLRSNMDILKPILRTLNSTSPFPSKELAEATKTLLHSLGTLAQELFSMRSWSDMRQEVMFLTNVNSSSSSTQIYQAVSRIVCGHPEGGGLKIKSLNWYEDNNYKALFGGNGTEEDAETFYDNSTTPYCNDLMKNLESSPLSRIIWKALKPLLVGKILYTPDTPATRQVMAEVNKTFQELAVFHDLEGMWEELSPKIWTFMENSQEMDLVRMLLDSRDNDHFWEQQLDGLDWTAQDIVAFLAKHPEDVQSSNGSVYTWREAFNETNQAIRTISRFMECVNLNKLEPIATEVWLINKSMELLDERKFWAGIVFTGITPGSIELPHHVKYKIRMDIDNVERTNKIKDGYWDPGPRADPFEDMRYVWGGFAYLQDVVEQAIIRVLTGTEKKTGVYMQQMPYPCYVDDIFLRVMSRSMPLFMTLAWIYSVAVIIKGIVYEKEARLKETMRIMGLDNSILWFSWFISSLIPLLVSAGLLVVILKLGNLLPYSDPSVVFVFLSVFAVVTILQCFLISTLFSRANLAAACGGIIYFTLYLPYVLCVAWQDYVGFTLKIFASLLSPVAFGFGCEYFALFEEQGIGVQWDNLFESPVEEDGFNLTTSVSMMLFDTFLYGVMTWYIEAVFPGQYGIPRPWYFPCTKSYWFGEESDEKSHPGSNQKRISEICMEEEPTHLKLGVSIQNLVKVYRDGMKVAVDGLALNFYEGQITSFLGHNGAGKTTTMSILTGLFPPTSGTAYILGKDIRSEMSTIRQNLGVCPQHNVLFDMLTVEEHIWFYARLKGLSEKHVKAEMEQMALDVGLPSSKLKSKTSQLSGGMQRKLSVALAFVGGSKVVILDEPTAGVDPYSRRGIWELLLKYRQGRTIILSTHHMDEADVLGDRIAIISHGKLCCVGSSLFLKNQLGTGYYLTLVKKDVESSLSSCRNSSSTVSYLKKEDSVSQSSSDAGLGSDHESDTLTIDVSAISNLIRKHVSEARLVEDIGHELTYVLPYEAAKEGAFVELFHEIDDRLSDLGISSYGISETTLEEIFLKVAEESGVDAETSDGTLPARRNRRAFGDKQSCLRPFTEDDAADPNDSDIDPESRETDLLSGMDGKGSYQVKGWKLTQQQFVALLWKRLLIARRSRKGFFAQIVLPAVFVCIALVFSLIVPPFGKYPSLELQPWMYNEQYTFVSNDAPEDTGTLELLNALTKDPGFGTRCMEGNPIPDTPCQAGEEEWTTAPVPQTIMDLFQNGNWTMQNPSPACQCSSDKIKKMLPVCPPGAGGLPPPQRKQNTADILQDLTGRNISDYLVKTYVQIIAKSLKNKIWVNEFRYGGFSLGVSNTQALPPSQEVNDAIKQMKKHLKLAKDSSADRFLNSLGRFMTGLDTKNNVKVWFNNKGWHAISSFLNVINNAILRANLQKGENPSHYGITAFNHPLNLTKQQLSEVALMTTSVDVLVSICVIFAMSFVPASFVVFLIQERVSKAKHLQFISGVKPVIYWLSNFVWDMCNYVVPATLVIIIFICFQQKSYVSSTNLPVLALLLLLYGWSITPLMYPASFVFKIPSTAYVVLTSVNLFIGINGSVATFVLELFTDNKLNNINDILKSVFLIFPHFCLGRGLIDMVKNQAMADALERFGENRFVSPLSWDLVGRNLFAMAVEGVVFFLITVLIQYRFFIRPRPVNAKLSPLNDEDEDVRRERQRILDGGGQNDILEIKELTKIYRRKRKPAVDRICVGIPPGECFGLLGVNGAGKSSTFKMLTGDTTVTRGDAFLNKNSILSNIHEVHQNMGYCPQFDAITELLTGREHVEFFALLRGVPEKEVGKVGEWAIRKLGLVKYGEKYAGNYSGGNKRKLSTAMALIGGPPVVFLDEPTTGMDPKARRFLWNCALSVVKEGRSVVLTSHSMEECEALCTRMAIMVNGRFRCLGSVQHLKNRFGDGYTIVVRIAGSNPDLKPVQDFFGLAFPGSVLKEKHRNMLQYQLPSSLSSLARIFSILSQSKKRLHIEDYSVSQTTLDQVFVNFAKDQSDDDHLKDLSLHKNQTVVDVAVLTSFLQDEKVKESYV

SEQ ID NO: 3446 - protein, 174 aa, Homo sapiens
RSTRPPLGFEMASPHQEPKPGDLIEIFRLGYEHWALYIGDGYVIHLAPPSEYPGAGSSSVFSVLSNSAEVKRERLEDVVGGCCYRVNNSLDHEYQPRPVEVIISSAKEMVGQKMKYSIVSRNCEHFVTQLRYGKSRCKQVEKAKVEVGVATALGILVVAGCSFAIRRYQKKATA

SEQ ID NO: 3447 - protein, 74 aa, Homo sapiens
VSWAPPALWVLGCCALLLSLWALCTACRRPEDAVAPRKRARRQRARLQGSATAAEAQVGHQTARAAPGPAQQQG

SEQ ID NO: 3448 - protein, 643 aa, Homo sapiens
MVVILGASNILWIMFAASQAFKIETTPESRYLAQIGDSVSLTCSTTGCESPFFSWRTQIDSPLNGKVTNEGTTSTLTMNPVSFGNEHSYLCTATCESRKLEKGIQVEIYSFPKDPEIHLSGPLEAGKPITVKCSVADVYPFDRLEIDLLKGDHLMKSQEFLEDADRKSLETKSLEVTFTPVIEDIGKVLVCRAKLHIDEMDSVPTVRQAVKELQVYISPKNTVISVNPSTKLQEGGSVTMTCSSEGLPAPEIFWSKKLDNGNLQHLSGNATLTLIAMRMEDSGIYVCEGVNLIGKNRKEVELIVQAFPRDPEIEMSGGLVNGSSVTVSCKVPSVYPLDRLEIELLKGETILENIEFLEDTDMKSLENKSLEMTFIPTIEDTGKALVCQAKLHIDDMEFEPKQRQSTQTLYVNVAPRDTTVLVSPSSILEEGSSVNMTCLSQGFPAPKILWSRQLPNGELQPLSENATLTLISTKMEDSGVYLCEGINQAGRSRKEVELIIQVTPKDIKLTAFPSESVKEGDTVIISCTCGNVPETWIILKKKAETGDTVLKSIDGAYTIRKAQLKDAGVYECESKNKVGSQLRSLTLDVQGRENNKDYFSPELLVLYFASSLIIPAIGMIIYFARKANMKGSYSLVEAQKSKV

SEQ ID NO: 3449 - protein, 266 aa, Homo sapiens [sequence omitted]

SEQ ID NO: 3450 - protein, 171 aa, Homo sapiens
MITYKSQVFSYPHRYLVLDLALLFLMGILEAVRLYLGTRGNLTEAERPLAASLALTAGTALLSAHFLLWQALVLWADWALSATLLALHGLEAVLQVVAIAAFTSHTSPFRGFGGEVRAKAGDETAGERAAEGHIRSLRPLQFYQLLPFARSAKQILALCFFPIPRFTISSP

SEQ ID NO: 3451 - protein, 145 aa, Homo sapiens
MTGLSMDGGGSPKGDVDPFYYGKPGPLRTLPEPSGPLPPSSGLSQPQVHALCPLSPLVTTGCCGQAAERDSCWERPPIPLLLPSLSGDYETVRNGGLIFAGLAFIVGLLILLSKWGGLQGRGADQGTSLLKAAEQAGFRELPREG

SEQ ID NO: 3452 - protein, 1493 aa, Homo sapiens
MVSVVGPMGLLVVLLVGGCAAEEPPRFIKEPKDQIGVSGGVASFVCQATGDPKPRVTWNKKGKKVNSQRFETIEFDESAGAVLRIQPLRTPRDENVYECVAQNSVGEITVHAKLTVLREDQLPSGFPNIDMGPQLKVVERTRTATMLCAASGNPDPEITWFKDFLPVDPSASNGRIKQLRSGALQIESSEETDQGKYECVATNSAGVRYSSPANLYVRVRRVAPRFSILPMSHEIMPGGNVNITCVAVGSPMPYVKWMQGAEDLTPEDDMPVGRNVLELTDVKDSANYTCVAMSSLGVIEAVAQITVKSLPKAPGTPMVTENTATSITITWDSGNPDPVSYYVIEYKSKSQDGPYQIKEDITTTRYSIGGLSPNSEYEIWVSAVNSIGQGPPSESVVTRTGEQAPASAPRNVQARMLSATTMIVQWEEPVEPNGLIRGYRVYYTMEPEHPVGNWQKHNVDDSLLTTVGSLLEDETYTVRVLAFTSVGDGPLSDPIQVKTQQGVPGQPMNLRAEARSETSITLSWSPPRQESIIKYELLFREGDHGREVGRTFDPTTSYVVEDLKPNTEYAFRLAARSPQGLGAFTPVVRQRTLQSISPKNFKVKMIMKTSVLLSWEFPDNYNSPTPYKIQYNGLTLDVDGRTTKKLITHLKPHTFYNFVLTNRGSSLGGLQQTVTAWTAFNLLNGKPSVAPKPDADGFIMVYLPDGQSPVPVQSYFIVMVPLRKSRGGQFLTPLGSPEDMDLEELIQDISRLQRRSLRHSRQLEVPRPYIAARFSVLPPTFHPGDQKQYGGFDNRGLEPGHRYVLFVLAVLQKSEPTFAASPFSDPFQLDNPDPQPIVDGEEGLIWVIGPVLAVVFIICIVIAILLYKKKPHSKRKDSEPRTKCLLNNADLAPHHPKDPVEMRRINFQTPGMLSHPPIPIADMAEHTERLKANDSLKLSQEYESIDPGQQFTWEHSNLEVNKPKNRYANVIAYDHSRVILQPIEGIMGSDYINANYVDGYRCQNAYIATQGPLPETFGDFWRMVWEQRSATIVMMTRLEEKSRIKCDQYWPNRGTETYGFIQVTLLDTIELATFCVRTFSLHKNGSSEKREVRQFQFTAWPDHGVPEYPTPFLAFLRRVKTCNPPDAGPIVVHCSAGVGRTGCFIVIDAMLERIKPEKTVDVYGHVTLMRSQRNYMVQTEDQYSFIHEALLEAVGCGNTEVPARSLYAYIQKLAQVEPGEHVTGMELEFKRLANSKAHTSRFISANLPCNKFKNRLVNIMPYESTRVCLQPIRGVEGSDYINASFIDGYRQQKAYIATQGPLAETTEDFWRMLWENNSTIVVMLTKLREMGREKCHQYWPAERSARYQYFVVDPMAEYNMPQYILREFKVTDARDGQSRTVRQFQFTDWPEQGVPKSGEGFIDFIGQVHKTKEQFGQDGPISVHCSAGVGRTGVFITLSIVLERMRYEGVVDIFQTVKMLRTQRPAMVQTEDEYQFCYQAALEYLGSFDHYAT

SEQ ID NO: 3453 - protein, 667 aa, Homo sapiens
VAGSQIVATHPPLPYPRALEQQLAADHRHSEDMSVGVSTSAPLSPTSGTSVGMSTFSIMDYVVFVLLLVLSLAIGLYHACRGWGRHTVGELLMADRKMGCLPVALSLLATFQSAVAILGVPSEIYRFGTQYWFLGCCYFLGLLIPAHIFIPVFYRLHLTSAYEYLELRFNKTVRVCGTVTFIFQMVIYMGVVLYAPSLALNAVTGFDLWLSVLALGIVCTVYTALGGLKAVIWTDVFQTLVMFLGQLAVIIVGSAKVGGLGRVWAVASQHGRISGFELDPDPFVRHTFWTLAFGGVFMMLSLYGVNQAQVQRYLSSRTEKAAVLSCYAVFPFQQVSLCVGCLIGLVMFAYYQEYPMSIQQAQAAPDQFVLYFVMDLLKGLPGLPGLFIACLFSGSLSTISSAFNSLATVTMEDLIRPWFPEFSEARAIMLSRGLAFGYGLLCLGMAYISSQMGPVLQAAISIFGMVGGPLLGLFCLGMFFPCANPPGAVVGLLAGLVMAFWIGIGSIVTSMGSSMPPSPSNGSSFSLPTNLTVATVTTLMPLTTFSKPTGLQRFYSLSYLWYSAHNSTTVIVVGLIVSLLTGRMRGRSLNPATIYPVLPKLLSLLPLSCQKRLHCRSYGQDHLDTGLFPEKPRNGVLGDSRDKEAMALDGTAYQGSSSTCILQETSL

SEQ ID NO: 3454 - protein, 265 aa, Homo sapiens
LPQRPRRRRCEGPMRAPLLPPAPVVLSLLILGSGHYAAGLDLNDTYSGKREPFSGDHSADGFEVTSRSEMSSGSEISPVSEMPSSSEPSSGADYDYSEEYDNEPQIPGYIVDDSVRVEQVVKPPQNKTESENTSDKPKRKKKGGKNGKNRRNRKKKNPCNAEFQNFCIHGECKYIEHLEAVTCKCQQEYFGERCGEKSMKTHSMIDSSLSKIALAAIAAFMSAVILTAVAVITVQLRRQYVRKYEGEAEERKKLRQENGNVHAIA

SEQ ID NO: 3455 - protein, 416 aa, Homo sapiens
LRAMGQPGNGSAFLLAPNGSHAPDHDVTQERDEVWVVGMGIVMSLIVLAIVFGNVLVITAIAKFERLQTVTNYFITSLACADLVMGLAVVPFGAAHILMKMWTFGNFWCEFWTSIDVLCVTASIETLCVIAVDRYFAITSPFKYQSLLTKNKARVIILMVWIVSGLTSFLPIQMHWYRATHQEAINCYANETCCDFFTNQAYAIASSIVSFYVPLVIMVFVYSRVFQEAKRQLQKIDKSEGRFHVQNLSQVEQDGRTGHGLRRSSKFCLKEHKALKTLGIIMGTFTLCWLPFFIVNIVHVIQDNLIRKEVYILLNWIGYVNSGFNPLIYCRSPDFRIAFQELLCLRRSSLKAYGNGYSSNGNTGEQSGYHVEQEKENKLLCEDLPGTEDFVGHQGTVPSDNIDSQGRNCSTNDSLL

SEQ ID NO: 3456 - protein, 512 aa, Homo sapiens
VSLLHRLPHFDLSWEATSSQFRPEDTDYQQALLLLGAAALACLALDLLFLLFYSFWLCCRRRKSEEHLDADCCCTAWCVIIATLVCSAGIAVGFYGNGETSDGIHRATYSLRHANRTVAGVQDRVWDTAVGLNHTAEPSLQTLERQLAGRPEPLRAVQRLQGLLETLLGYTAAIPFWRNTAVSLEVLAEQVDLYDWYRWLGYLGLLLLDVIICLLVLVGLIRSSKGILVGVCLLGVLALVISWGALGLELAVSVGSSDFCVDPDAYVTKMVEEYSVLSGDILQYYLACSPRAANPFQQKLSGSHKALVEMQDVVAELLRTVPWEQPATKDPLLRVQEVLNGTEVNLQHLTALVDCRSLHLDYVQALTGFCYDGVEGLIYLALFSFVTALMFSSIVCSVPHTWQQKRGPDEDGEEEAAPGPRQAHDSLYRVHMPSLYSCGSSYGSETSIPAAAHTVSNAPVTEYMSQNANFQNPRCENTPLIGRESPPPSYTSSMRAKYLATSQPRPDSSGSH

SEQ ID NO: 3457 - protein, 211 aa, Homo sapiens
LVDRAADRGADARRGRPLGTAGGAVSVAMTDQTYCDRLVQDTPFLTGHGRLSEQQVDRIILQLNRYYPQILTNKEAEKFRNPKASLRVRLCDLLSHLQRSGERDCQEFYRALYIHAQPLHSRLPSRHALQNSDCTELDSGSQSGELSNRGPMSFLAGLGLAVGLALLLYCYPPDPKGLPGTRRVLGFSPVIIDRHVSRYLLAFLADDLGGL

SEQ ID NO: 3458 - protein, 909 aa, Homo sapiens
LRLVAMEWGSESAAVRRHRVGVERREGAAAAPPPEREARAQEPLVDGCSGGGRTRKRSPGGSGGASRGAGTGLSEVRAALGLALYLIALRTLVQLSLQQLVLRGAAGHRGEFDALQARDYLEHITSIGPRTTGSPENEILTVHYLLEQIKLIEVQSNSLHKISVDVQRPTGSFSIDFLGGFTSYYDNITNVVVKLEPRDGAQHAVLANCHFDSVANSPGASDDAVSCSVMLEVLRVLSTSSEALHHAVIFLFNGAEENVLQASHGFITQHPWASLIRAFINLEAAGVGGKELVFQTGPENPWLVQAYVSAAKHPFASVVAQEVFQSGIIPSDTDFRIYRDFGNIPGIDLAFIENGYIYHTKYDTADRILTDSIQRAGDNILAVLKHLATSDMLAAASKYRHGNMVFFDVLGLFVIAYPSRIGSIINYMVVMGVVLYLGKKFLQPKHKTGNYKKDFLCGLGITLISWFTSLVTVLIIAVFISLIGQSLSWYNHFYVSVCLYGTATVAKIILIHTLAKRFYYMNASAQYLGEVFFDISLFVHCCFLVTLTYQGLCSAFISAVWVAFPLLTKLCVHKDFKQHGAQGKFIAFYLLGMFIPYLYALYLIWAVFEMFTPILGRSGSEIPPDVVLASILAGCTMILSSYFINFIYLAKSTKKTMLTLTLVCAITFLLVCSGTFFPYSSNPANPKPKRVFLQHMTRTFHDLEGNAVKRDSGIWINGFDYTGISHITPHIPEINDSIRAHCEENAPLCGFPWYLPVHFLIRKNWYLPAPEVSPRNPPHFRLISKEQTPWDSIKLTFEATGPSHMSFYVRAHKGSTLSQWSLGNGTPVTSKGGDYFVFYSHGLQASAWQFWIEVQVSEEHPEGMVTVAIAAHYLSGEDKRSPQLDALKEKFPDWTFPSAWVCTYDLFVF

SEQ ID NO: 3459 - protein, 453 aa, Homo sapiens
LGSRLFLSRHHWPPAAAPGVLAAQPRRRPGTPVLCAKPWPRGPGHGPGARGEAASRGAVTGRASAMKTLIAAYSGVLRGERQAEADRSQRSHGGPALSREGSGRWGTGSSILSALQDLFSVTWLNRSKVEKQLQVISVLQWVLSFLVLGVACSAILMYIFCTDCWLIAVLYFTWLVFDWNTPKKGGRRSQWVRNWAVWRYFRDYFPIQLVKTHNLLTTRNYIFGYHPHGIMGLGAFCNFSTEATEVSKKFPGIRPYLATLAGNFRMPVLREYLMSGGICPVSRDTIDYLLSKNGSGNAIIIVVGGAAESLSSMPGKNAVTLRNRKGFVKLALRHGADLVPIYSFGENEVYKQVIFEEGSWGRWVQKKFQKYIGFAPCIFHGRGLFSSDTWGLVPYSKPITTVVGEPITIPKLEHPTQQDIDLYHTMYMEALVKLFDKHKTKFGLPETEVLEVN

SEQ ID NO: 3460 - protein, 856 aa, Homo sapiens
IPPSQQITMLQTKDLIWTLFFLGTAVSLQVDIVPSQGEISVGESKFFLCQVAGDAKDKDISWFSPNGEKLTPNQQRISVVWNDDSSSTLTIYNANIDDAGIYKCVVTGEDGSESEATVNVKIFQKLMFKNAPTPQEFREGEDAVIVCDVVSSLPPTIIWKHKGRDVILKKDVRFIVLSNNYLQIRGIKKTDEGTYRCEGRILARGEINFKDIQVIVNVPPTIQARQNIVNATANLGQSVTLVCDAEGFPEPTMSWTKDGEQIEQEEDDEKYIFSDDSSQLTIKKVDKNDEAEYICIAENKAGEQDATIHLKVFAKPKITYVENQTAMELEEQVTLTCEASGDPIPSITWRTSTRNISSEEKTLDGHMVVRSHARVSSLTLKSIQYTDAGEYICTASNTIGQDSQSMYLEVQYAPKLQGPVAVYTWEGNQVNITCEVFAYPSATISWFRDGQLLPSSNYSNIKIYNTPSASYLEVTPDSENDFGNYNCTAVNRIGQESLEFILVQADTPSSPSIDQVEPYSSTAQVQFDEPEATGGVPILKYKAEWRAVGEEVWHSKWYDAKEASMEGIVTIVGLKPETTYAVRLAALNGKGLGEISAASEFKTQPVQGEPSAPKLEGQMGEDGNSIKVNLIKQDDGGSPIRHYLVRYRALSSEWKPEIRLPSGSDHVMLKSLDWNAEYEVYVVAENQQGKSKAAHFVFRTSAQPTAIPANGSPTSGLSTGAIVGILIVIFVLLLVVVDITCYFLNKCGLFMCIAVNLCGKAGPGAKGKDMEEGKAAFSKDESKEPIVEVRTEEERTPNHDGGKHTEPNETTPLTEPEKGPVEAKPECQETETKPAPAEVKTVPNDATQTKENESKA

SEQ ID NO: 3461 - protein, 30 aa, Homo sapiens
IGLSRGRHVAFRGAFMGLSGMGFLFLIVNR

SEQ ID NO: 3462 - protein, 273 aa, Homo sapiens
RLHARQSMRVTLATIAWMVSFVSNYSHTANILPDIENEDFIKDCVRIHNKFRSEVKPTASDMLYMTWDPALAQIAKAWASNCQFSHNTRLKPPHKLHPNFTSLGENIWTGSVPIFSVSSAITNWYDEIQDYDFKTRICKKVCGHYTQVVWADSYKVGCAVQFCPKVSGFDALSNGAHFICNYGPGGNYPTWPYKRGATCSACPNNDKCLDNLCVNRQRDQVKRYYSVVYPGWPIYPRNRYTSLFLIVNSVILILSVIITILVQHKYPNLVLLD

SEQ ID NO: 3463 - protein, 518 aa, Homo sapiens
KIPTLIMLFPISMSATEFLLASVIFCLVFWVIRASRPQVPKGLKNPPGPWGWPLIGHMLTLGKNPHLALSRMSQQYGDVLQIRIGSTPVVVLSGLDTIRQALVRQGDDFKGRPDLYTFTLISNGQSMSFSPDSGPVWAARRRLAQNGLKSFSIASDPASSTSCYLEEHVSKEAEVLISTLQELMAGPGHFNPYRYVVVSVTNVICAICFGRRYDHNHQELLSLVNLNNNFGEVVGSGNPADFIPILRYLPNPSLNAFKDLNEKFYSFMQKMVKEHYKTFEKGHIRDITDSLIEHCQEKQLDENANVQLSDEKIINIVLDLFGAGFDTVTTAISWSLMYLVMNPRVQRKIQEELDTVIGRSRRPRLSDRSHLPYMEAFILETFRHSSFVPFTIPHSTTRDTSLKGFYIPKGRCVFVNQWQINHDQKLWVNPSEFLPERFLTPDGAIDKVLSEKVIIFGMGKRKCIGETIARWEVFLFLAILLQRVEFSVPLGVKVDMTPIYGLTMKHACCEHFQMQLRS

SEQ ID NO: 3464 - protein, 542 aa, Homo sapiens
IMVADPPRDSKGLAAAEPTANGGLALASIEDQGAAAGGYCGSRDQVRRCLRANLLVLLTVVAVVAGVALGLGVSGAGGALALGPERLSAFVFPGELLLRLLRMIILPLVVCSLIGGAASLDPGALGRLGAWALLFFLVTTLLASALGVGLALALQPGAASAAINASVGAAGSAENAPSKEVLDSFLDLARNIFPSNLVSAAFRSYSTTYEERNITGTRVKVPVGQEVEGMNILGLVVFAIVFGVALRKLGPEGELLIRFFNSFNEATMVLVSWIMWYAPVGIMFLVAGKIVEMEDVGLLFARLGKYILCCLLGHAIHGLLVLPLIYFLFTRKNPYRFLWGIVTPLATAFGTSSSSATLPLMMKCVEENNGVAKHISRFILPIGATVNMDGAALFQCVAAVFIAQLSQQSLDFVKIITILVTATASSVGAAGIPAGGVLTLAIILEAVNLPVDHISLILAVDWLVDRSCTVLNVEGDALGAGLLQNYVDRTESRSTEPELIQVKSELPLDPLPVPTEEGNPLLKHYRGPAGDATVASEKESVM

SEQ ID NO: 3465 - protein, 332 aa, Homo sapiens
LWSLLLLLGVFAAAAAAPPDPLSQLPAPQHPKIRLYNAEQVLSWEPVALSNSTRPVVYQVQFKYTDSKWFTADIMSIGVNCTQITATECDFTAASPSAGFPMDFNVTLRLRAELGALHSAWVTMPWFQHYRNVTVGPPENIEVTPGEGSLIIRFSSPFDIADTSTAFFCYYVHYWEKGGIQQVKGPFRSNSISLDNLKPSRVYCLQVQAQLLWNKSNIFRVGHLSNISCYETMADASTELQQVILISVGTFSLLSVLAGACFFLVLKYRGLIKYWFHTPPSIPLQIEEYLKDPTQPILEALDKDSSPKDDVWDSVSIISFPEKEQEDVLQTL

SEQ ID NO: 3466 - protein, 269 aa, Homo sapiens
IRSMLLLTRSPTAWHRLSQLKPRVLPGTLGGQALHLRSWLLSRQGPAETGGQGQPQGPGLRTRLLITGLFGAGLGGAWLALRAEKERLQQQKRTEALRQAAVGQGDFHLLDHRGRARCKADFRGQWVLMYFGFTHCPDICPDELEKLVQVVRQLEAEPGLPPVQPVFITVDPERDDVEAMARYVQDFHPRLLGLTGSTKQVAQASHSYRVYYNAGPKDEDQDYIVDHSIAIYLLNPDGLFTDYYGRSRSAEQISDSVRRHMAAFRSVLS

SEQ ID NO: 3467 - protein, 253 aa, Homo sapiens
VVQGLGLVMASPSRRLQTKPVITCFKSVLLIYTFIFWITGVILLAVGIWGKVSLENYFSLLNEKATNVPFVLIATGTVIILLGTFGCFATCRASAWMLKLYAMFLTLVFLVELVAAIVGFVFRHEIKNSFKNNYEKALKQYNSTGDYRSHAVDKIQNTLHCCGVTDYRDWTDTNYYSEKGFPKSCCKLEDCTPQRDADKVNNEGCFIKVMTIIESEMGVVAGISFGVACFQLIGIFLAYCLSRAITNNQYEIV

SEQ ID NO: 3468 - protein, 979 aa, Homo sapiens
VTFACKTNFSMNGNKSVWCQANNMWGPTRLPTCVSVFPLECPALPMIHNGHHTSENVGSIAPGLSVTYSCESGYLLVGEKIINCLSSGKWSAVPPTCEEARCKSLGRFPNGKVKEPPILRVGVTANFFCDEGYRLQGPPSSRCVIAGQGVAWTKMPVCEEIFCPSPPPILNGRHIGNSLANVSYGSIVTYTCDPDPEEGVNFILIGESTLRCTVDSQKTGTWSGPAPRCELSTSAVQCPHPQILRGRMVSGQKDRYTYNDTVIFACMFGFTLKGSKQIRCNAQGTWEPSAPVCEKECQAPPNILNGQKEDRHMVRFDPGTSIKYSCNPGYVLVGEESIQCTSEGVWTPPVPQCKVAACEATGRQLLTKPQHQFVRPDVNSSCGEGYKLSGSVYQECQGTIPWFMEIRLCKEITCPPPPVIYNGAHTGSSLEDFPYGTTVTYTCNPGPERGVEFSLIGESTIRCTSNDQERGTWSGPAPLCKLSLLAVQCSHVHIANGYKISGKEAPYFYNDTVTFKCYSGFTLKGSSQIRCKADNTWDPEIPVCEKGCQSPPGLHHGRHTGGNTVFFVSGMTVDYTCDPGYLLVGNKSIHCMPSGNWSPSAPRCEETCQHVRQSLQELPAGSRVELVNTSCQDGYQLTGHAYQMCQDAENGIWFKKIPLCKVIHCHPPPVIVNGKHTGMMAENFLYGNEVSYECDQGFYLLGEKKLQCRSDSKGHGSWSGPSPQCLRSPPVTRCPNPEVKHGYKLNKTHSAYSHNDIVYVDCNPGFIMNGSRVIRCHTDNTWVPGVPTCIKKAFIGCPPPPKTPNGNHTGGNIARFSPGMSILYSCDQGYLLVGEALLLCTHEGTWSQPAPHCKEVNCSSPADMDGIQKGLEPRKMYQYGAVVTLECEDGYMLEGSPQSQCQSDHQWNPPLAVCRSRSLAPVLCGIAAGLILLTFLIVITLYVISKHRARNYYTDTSQKEAFHLEAREVYSVDPYNPAS

SEQ ID NO: 3469 - protein, 273 aa, Homo sapiens
VLTTTAFPFVSVMSWKKALRIPGDLRVATVTLMLAMLSSLLAEGRDSPEDFVFQFKGMCYFTNGTERVRLVTRYIYNREEYARFDSDVGVYRAVTPQGRPDAEYWNSQKEVLEGTRAELDTVCRHNYEVAFRGILQRRVEPTVTISPSRTEALNHHNLLVCSVTDFYPGQIKVRWFRNDQEETAGVVSTPLIRNGDWTFQILVMLEMTPQRGDVYTCHVEHPSLQSPITVEWRAQSESAQSKMLSGVGGFVLGLIFLGLGLIIRQRSQKGLLH

SEQ ID NO: 3470 - protein, 251 aa, Homo sapiens
LLQMLPLLWLLPHSWAVPEAPTPMWPDDLQNHTFLHTVYCQDGSPSVGLSEAYDEDQLFFFDFSQNTRVPRLPEFADWAQEQGDAPAILFDKEFCEWMIQQIGPKLDGKIPVSRGFPIAEVFTLKPLEFGKPNTLVCFVSNLFPPMLTVNWQHHSVPVEGFGPTFVSAVDGLSFQAFSYLNFTPEPSDIFSCIVTHEIDRYTAIAYWVPRNALPSDLLENVLCGVAFGLGVLGIIVGIVLIIYFRKPCSGD

SEQ ID NO: 3471 - protein, 518 aa, Homo sapiens
IHSIYSQLIILDLLVPVIGLITELPLHIRETLLFTSSLILTLNTVFVLAVKLKWFYYSTRYVYLLVRHMYRIYGLQLLMEDTWKRIRFPDILRVFWLTRVTAQATVLMYILRMANETDSFFISWDDFWDLICNLIISGCDSTLTVLGMSAVISSVAHYLGLGILAFIGSTEEDDRRLGFVAPVLFFILALQTGLSGLRPEERLIRLSRNMCLLLTAVLHFIHGMTDPVLMSLSASHVSSFRRHFPVLFVSACLFILPVLLSYVLWHHYALNTWLFAVTAFCVELCLKVIVSLTVYTLFMIDGYYNVLWEKLDDYVYYVRSTGSIIEFIFGVVMFGNGAYTMMFESGSKIRAFMMCLHAYFNIYLQAKNGWKTFMNRRTAVKKINSLPEIKGSRLQEINDVCAICYHEFTTSARITPCNHYFHALCLRKWLYIQDTCPMCHQKVYIEDDIKDNSNVSNNNGFIPPNETPEEAVREAAAESDRELNEDDSTDCDDDVQRERNGVIQHTGAAAEEFNDDTD

SEQ ID NO: 3472 - protein, 1017 aa, Homo sapiens
LQDQEGWEYASLIGWKFHWKQRSSDTFRRRRWRRKMAPSETHGAAAIFKLEGALGADTTEDGDEKSLEKQKHSATTVFGANTPIVSCNFDRVYIYHLRCYVYQARNLLALDKDSFSDPYAHICFLHRSKTTEIIHSTLNPTWDQTIIFDEVEIYGEPQTVLQNPPKVIMELFDNDQVGKDEFLGRSIFSPVVKLNSEMDITPKLLWHPVMNGDKACGDVLVTAELILRGKDGSNLPILPPQRAPNLYMVPQGIRPVVQLTAIEILAWGLRNMKNFQMASITSPSLVVECGGERVESVVIKNLKKTPNFPSSVLFMKVFLPKEELYMPPLVIKVIDHRQFGRKPVVGQCTIERLDRFRCDPYAGKEDIVPQLKASLLSAPPCRDIVIEMEDTKPLLASKLTEKEEEIVDWWSKFYASSGEHEKCGQYIQKGYSKLKIYNCELENVAEFEGLTDFSDTFKLYRGKSDENEDPSVVGEFKGSFRIYPLPDDPSVPAPPRQFRELPDSVPQECTVRIYIVRGLELQPQDNNGLCDPYIKITLGKKVIEDRDHYIPNTLNPVFGRMYELSCYLPQEKDLKISVYDYDTFTRDEKVGETIIDLENRFLSRFGSHCGIPEEYCVSGVNTWRDQLRPTQLLQNVARFKGFPQPILSEDGSRIRYGGRDYSLDEFEANKILHQHLGAPEERLALHILRTQGLVPEHVETRTLHSTFQPNISQGKLQMWVDVFPKSLGPPGPPFNITPRKAKKYYLRVIIWNTKDVILDEKSITGEEMSDIYVKGWIPGNEENKQKTDVHYRSLDGEGNFNWRFVFPFDYLPAEQLCIVAKKEHFWSIDQTEFRIPPRLIIQIWDNDKFSLDDYLGFLELDLRHTIIPAKSPEKCRLDMIPDLKAMNPLKAKTASLFEQKSMKGWWPCYAEKDGARVMAGKVEMTLEILNEKEADERPAGKGRDEPNMNPKLDLPNRPETSFLWFTNPCKTMKFIVWRRFKWVIIGLLFLLILLLFVAVLLYSLPNYLSMKIVKPNV

SEQ ID NO: 3473 - protein, 256 aa, Homo sapiens
MPETPKWFHLPYLFQMPAYASSSKFVTRVTTPAQRGKVPPVHHSSPTTQITHRPRVSRASSVAGDKPRTFLPSTTASKISALEGLLKPQTPSYNHHTRLHRQRALDYGSQSGREGQGFHILIPTILGLFLLALLGLVVKRAVERRKALSRRARRLAVRMRALESSQRPRGSPRPRSQNNIYSACPRRARGADAAGTGEAPVPGPGAPLPPAPLQVSESPWLHAPSLKTSCEYVSLYHQPAAMMEDSDSDDYINVPA

SEQ ID NO: 3474 - protein, 234 aa, Homo sapiens
IMWQLLLPTALLLLVSAGMRTEDLPKAVVFLEPQWYSVLEKDSVTLKCQGAYSPEDNSTQWFHNENLISSQASSYFIDAATVNDSGEYRCQTNLSTLSDPVQLEVHIGWLLLQAPRWVFKEEDPIHLRCHSWKNTALHKVTYLQNGKDRKYFHHNSDFHIPKATLKDSGSYFCRGLVGSKNVSSETVNITITQGLAVSTISSFSPPGYQVSFCLVMVLLFAVDTGLYFSVKTNI

SEQ ID NO: 3475 - protein, 248 aa, Homo sapiens
KASASAPAPASATEILLTPAREEQPPQHRSKRGGSVGGVCYLSMGMVVLLMGLVFASVYIYRYFFLAQLARDNFFRCGVLYEDSLSSQVRTQMELEEDVKIYLDENYERINVPVPQFGGGDPADIIHDFQRGLTAYHDISLDKCYVIELNTTIVLPPRNFWELLMNVKRGTYLPQTYIIQEEMVVTEHVSDKEALGSFIYHLCNGKDTYRLRRRATRRRINKRGAKNCNAIRHFENTFVVETLICGVV

SEQ ID NO: 3476 - protein, 321 aa, Homo sapiens
LSNILFVMAFLLSGAAPLKIQAYFNETADLPCQFANSQNQSLSELVVFWQDQENLVLNEVYLGKEKFDSVHSKYMGRTSFDSDSWTLRLHNLQIKDKGLYQCIIHHKKPTGMIRIHQMNSELSVLANFSQPEIVPISNITENVYINLTCSSIHGYPEPKKMSVLLRTKNSTIEYDGVMQKSQDNVTELYDVSISLSVSFPDVTSNMTIFCILETDKTRLLSSPFSIELEDPQPPPDHIPWITAVLPTVIICVMVFCLILWKWKKKKRPRNSYKCGTNTMEREESEQTKKREKIHIPERSDEAQRVFKSSKTSSCDKSDTCF

SEQ ID NO: 3477 - protein, 237 aa, Homo sapiens
LLWPGAALLVLLGVAASLCVRCSRPGAKRSEKIYQQRSLREDQQSFTGSRTYSLVGQAWPGPLADMAPTRKDKLLQFYPSLEDPASSRYQNFSKGSRHGSEEAYIDPIAMEYYNWGRFSKPPEDDDANSYENVLICKQKTTETGAQQEGIGGLCRGDLSLSLALKTGPTSGLCPSASPEEDEESEDYQNSASIHQWRESRKVMGQLQREASPGPVGSPDEEDGEPDYVNGEVAATEA

SEQ ID NO: 3478 - protein, 47 aa, Homo sapiens
LSLTLAALSLGLWWTFDRSRSGLGLGITIAFLATLITQFLVYNGVYQ

SEQ ID NO: 3479 - protein, 33 aa, Homo sapiens
KTTLWRLISGTLGIICLSLMSTLGILLKNCKFF

SEQ ID NO: 3480 - protein, 57 aa, Homo sapiens
VLSYFLFLKTLLAFNALLLLLLVAFIMGPQVAFPPALPGPAPVCTGLELLTGAVRKP

SEQ ID NO: 3481 - protein, 68 aa, Homo sapiens
LDSVAGVLKLYFRSLEPPLFPPDLFGELLASSELEATAERVEHVSRLLWRLPAPVLVVLRYLFTFLNQ

SEQ ID NO: 3482 - protein, 87 aa, Homo sapiens
KMIPAVVLLLLLLVEQAAALGEPQLCYILDAILFLYGIVLTLLYCRLKIQVRKAAITSYEKSDGVYTGLSTRNQETYETLKHEKPPQ

SEQ ID NO: 3483 - protein, 318 aa, Homo sapiens
ILFVMAFLLSGAAPLKIQAYFNETADLPCQFANSQNQSLSELVVFWQDQENLVLNEVYLGKEKFDSVHSKYMGRTSFDSDSWTLRLHNLQIKDKGLYQCIIHHKKPTGMIRIHQMNSELSVLANFSQPEIVPISNITENVYINLTCSSIHGYPEPKKMSVLLRTKNSTIEYDGVMQKSQDNVTELYDVSISLSVSFPDVTSNMTIFCILETDKTRLLSSPFSIELEDPQPPPDHIPWITAVLPTVIICVMVFCLILWKWKKKKRPRNSYKCGTNTMEREESEQTKKREKIHIPERSDEAQRVFKSSKTSSCDKSDTCF

SEQ ID NO: 3484 - protein, 797 aa, Homo sapiens
LLSTGSCGLKHWTMPHTLWMVWVLGVIISLSKEESSNQASLSCDRNGICKGSSGSLNSIPSGLTEAVKSLDLSNNRITYISNSDLQRCVNLQALVLTSNGINTIEEDSFSSLGSLEHLDLSYNYLSNLSSSWFKPLSSLTFLNLLGNPYKTLGETSLFSHLTKLQILRVGNMDTFTKIQRKDFAGLTFLEELEIDASDLQSYEPKSLKSIQNVSHLILHMKQHILLLEIFVDVTSSVECLELRDTDLDTFHFSELSTGETNSLIKKFTFRNVKITDESLFQVMKLLNQISGLLELEFDDCTLNGVGNFRASDNDRVIDPGKVETLTIRRLHIPRFYLFYDLSTLYSLTERVKRITVENSKVFLVPCLLSQHLKSLEYLDLSENLMVEEYLKNSACEDAWPSLQTLILRQNHLASLEKTGETLLTLKNLTNIDISKNSFHSMPETCQWPEKMKYLNLSSTRIHSVTGCIPKTLEILDVSNNNLNLFSLNLPQLKELYISRNKLMTLPDASLLPMLLVLKISRNAITTFSKEQLDSFHTLKTLEAGGNNFICSCEFLSFTQEQQALAKVLIDWPANYLCDSPSHVRGQQVQDVRLSVSECHRTALVSGMCCALFLLILLTGVLCHRFHGLWYMKMMWAWLQAKRKPRKAPSRNICYDAFVSYSERDAYWVENLMVQELENFNPPFKLCLHKRDFIPGKWIIDNIIDSIEKSHKTVFVLSENFVKSEWCKYELDFSHFRLFDENNDAAILILLEPIEKKAIPQRFCKLRKIMNTKTYLEWPMDEAQREGFWVNLRAAIKS

SEQ ID NO: 3485 - protein, 54 aa, Homo sapiens
VRACLGCPLRRGALLLLSIYFYYSLPNAVGPPFTWMLALLGLSQALNILLGLKV

SEQ ID NO: 3486 - protein, 170 aa, Homo sapiens
IFFLELAVAVLAFLFQDWVRDRFREFFESNIKSYRDDIDLQNLIDSLQKANQCCGAYGPEDWDLNVYFNCSGASYSREKCGVPFSCCVPDPAQKVVNTQCGYDVRIQLKSKWDESIFTKGCIQALESWLPRNIYIVAGVFIAISLLQIFGIFLARTLISDIEAVKAGHHF

SEQ ID NO: 3487 - protein, 30 aa, Homo sapiens
LWRLISGTLGIICLSLMSTLGILLKNCKFF

SEQ ID NO: 3488 - protein, 1159 aa, Homo sapiens
RAALLLFTALATSLGFNLDTEELTAFRVDSAGFGDSVVQYANSWVVVGAPQKITAANQTGGLYQCGYSTGACEPIGLQVPPEAVNMSLGLSLASTTSPSQLLACGPTVHHECGRNMYLTGLCFLLGPTQLTQRLPVSRQECPRQEQDIVFLIDGSGSISSRNFATMMNFVRAVISQFQRPSTQFSLMQFSNKFQTHFTFEEFRRSSNPLSLLASVHQLQGFTYTATAIQNVVHRLFHASYGARRDAAKILIVITDGKKEGDSLDYKDVIPMADAAGIIRYAIGVGLAFQNRNSWKELNDIASKPSQEHIFKVEDFDALKDIQNQLKEKIFAIEGTETTSSSSFELEMAQEGFSAVFTPDGPVLGAVGSFTWSGGAFLYPPNMSPTFINMSQENVDMRDSYLGYSTELALWKGVQSLVLGAPRYQHTGKAVIFTQVSRQWRMKAEVTGTQIGSYFGASLCSVDVDSDGSTDLVLIGAPHYYEQTRGGQVSVCPLPRGWRRWWCDAVLYGEQGHPWGRFGAALTVLGDVNGDKLTDVVIGAPGEEENRGAVYLFHGVLGPSISPSHSQRIAGSQLSSRLQYFGQALSGGQDLTQDGLVDLAVGARGQVLLLRTRPVLWVGVSMQFIPAEIPRSAFECREQVVSEQTLVQSNICLYIDKRSKNLLGSRDLQSSVTLDLALDPGRLSPRATFQETKNRSLSRVRVLGLKAHCENFNLLLPSCVEDSVTPITLRLNFTLVGKPLLAFRNLRPMLAADAQRYFTASLPFEKNCGADHICQDNLGISFSFPGLKSLLVGSNLELNAEVMVWNDGEDSYGTTITFSHPAGLSYRYVAEGQKQGQLRSLHLTCDSAPVGSQGTWSTSCRINHLIFRGGAQITFLATFDVSPKAVLGDRLLLTANVSSENNTPRTSKTTFQLELPVKYAVYTVVSSHEQFTKYLNFSESEEKESHVAMHRYQVNNLGQRDLPVSINFWVPVELNQEAVWMDVEVSHPQNPSLRCSSEKIAPPASDFLAHIQKNPVLDCSIAGCLRFRCDVPSFSVQEELDFTLKGNLSFGWVRQILQKKVSVVSVAEITFDTSVYSQLPGQEAFMRAQTTTVLEKYKVHNPTPLIVGSSIGGLLLLALITAVLYKVGFFKRQYKEMMEEANGQIAPENGTQTPSPPSEK

SEQ ID NO: 3489 - protein, 350 aa, Homo sapiens
VLFSGALLGLLAAQGTGNDCPHKKSATLLPSFTVTPTVTESTGTTSHRTTKSHKTTTHRTTTTGTTSHGPTTATHNPTTTSHGNVTVHPTSNSTATSQGPSTATHSPATTSHGNATVHPTSNSTATSPGFTSSAHPEPPPPSPSPSPTSKETIGDYTWTNGSQPCVHLQAQIQIRVMYTTQGGGEAWGISVLNPNKTKVQGSCEGAHPHLLLSFPYGHLSFGFMQDLQQKVVYLSYMAVEYNVSFPHAAQWTFSAQNASLRDLQAPLGQSFSCSNSSIILSPAVHLDLLSLRLQAAQLPHTGVFGQSFSCPSDRSILLPLIIGLILLGLLALVLIAFCIIRRRPSAYQAL

SEQ ID NO: 3490 - protein, 91 aa, Homo sapiens
KVLERGVKLAELQQRSDQLLDMSSTFNKTTQNLAQKKCWENIRYRICVGLVVVGVLLIILIVLLVVFLPQSSDSSSAPRTQDAGIASGPGN

SEQ ID NO: 3491 - protein, 801 aa, Homo sapiens
IALSLLSTGSCGLKHWTMPHTLWMVWVLGVIISLSKEESSNQASLSCDRNGICKGSSGSLNSIPSGLTEAVKSLDLSNNRITYISNSDLQRCVNLQALVLTSNGINTIEEDSFSSLGSLEHLDLSYNYLSNLSSSWFKPLSSLTFLNLLGNPYKTLGETSLFSHLTKLQILRVGNMDTFTKIQRKDFAGLTFLEELEIDASDLQSYEPKSLKSIQNVSHLILHMKQHILLLEIFVDVTSSVECLELRDTDLDTFHFSELSTGETNSLIKKFTFRNVKITDESLFQVMKLLNQISGLLELEFDDCTLNGVGNFRASDNDRVIDPGKVETLTIRRLHIPRFYLFYDLSTLYSLTERVKRITVENSKVFLVPCLLSQHLKSLEYLDLSENLMVEEYLKNSACEDAWPSLQTLILRQNHLASLEKTGETLLTLKNLTNIDISKNSFHSMPETCQWPEKMKYLNLSSTRIHSVTGCIPKTLEILDVSNNNLNLFSLNLPQLKELYISRNKLMTLPDASLLPMLLVLKISRNAITTFSKEQLDSFHTLKTLEAGGNNFICSCEFLSFTQEQQALAKVLIDWPANYLCDSPSHVRGQQVQDVRLSVSECHRTALVSGMCCALFLLILLTGVLCHRFHGLWYMKMMWAWLQAKRKPRKAPSRNICYDAFVSYSERDAYWVENLMVQELENFNPPFKLCLHKRDFIPGKWIIDNIIDSIEKSHKTVFVLSENFVKSEWCKYELDFSHFRLFDENNDAAILILLEPIEKKAIPQRFCKLRKIMNTKTYLEWPMDEAQREGFWVNLRAAIKS

SEQ ID NO: 3492 - protein, 57 aa, Homo sapiens
KAALVLLSACLVTLWGLGEPPEHTLRYLVLHLASLQLGLLLNGVCSLAEELRHIHSR

SEQ ID NO: 3493 - protein, 98 aa, Homo sapiens
TVPEKSLDKEHRCIVRHENNKNGVDQEIIFPPIKTDVITMDPKDNCSKDANDTLLLQLTNTSAYYMYLLLLLKSVVYFAIITCCLLRRTAFCCNGEKS

SEQ ID NO: 3494 - protein, 271 aa, Homo sapiens
RTGGMGSACIKVTKYFLFLFNLIFFILGAVILGFGVWILADKSSFISVLQTSSSSLRMGAYVFIGVGAVTMLMGFLGCIGAVNEVRCLLGLYFAFLLLILIAQVTAGALFYFNMGKLKQEMGGIVTELIRDYNSSREDSLQDAWDYVQAQVKCCGWVSFYNWTDNAELMNRPEVTYPCSCEVKGEEDNSLSVRKGFCEAPGNRTQSGNHPEDWPVYQEGCMEKVQAWLQENLGIILGVGVGVAIIELLGMVLSICLCRHVHSEDYSKVPKY

SEQ ID NO: 3495 - protein, 513 aa, Homo sapiens
IPMLVDGPSERPALCFLLLAVAMSFFGSALSIDETRAHLLLKEKMMRLGGRLVLNTKEELANERLMTLKIAEMKEAMRTLIFPPSMHFFQAKHLIERSQVFNILRMMPKGAALHLHDIGIVTMDWLVRNVTYRPHCHICFTPRGIMQFRFAHPTPRPSEKCSKWILLEDYRKRVQNVTEFDDSLLRNFTLVTQHPEVIYTNQNVVWSKFETIFFTISGLIHYAPVFRDYVFRSMQEFYEDNVLYMEIRARLLPVYELSGEHHDEEWSVKTYQEVAQKFVETHPEFIGIKIIYSDHRSKDVAVIAESIRMAMGLRIKFPTVVAGFDLVGHEDTGHSLHDYKEALMIPAKDGVKLPYFFHAGETDWQGTSIDRNILDALMLNTTRIGHGFALSKHPAVRTYSWKKDIPIEVCPISNQVLKLVSDLRNHPVATLMATGHPMVISSDDPAMFGAKGLSYDFYEVFMGIGGMKADLRTLKQLAMNSIKYSTLLESEKNTFMEIWKKRWDKFIADVATK

SEQ ID NO: 3496 - protein, 718 aa, Homo sapiens
IMSRRSQRLTRYSQGDDDGSSSSGGSSVAGSQSTLFKDSPLRTLKRKSSNMKRLSPAPQLGPSSDAHTSYYSESLVHESWFPPRSSLEELHGDANWGEDLRVRRRRGTGGSESSRASGLVGRKATEDFLGSSSGYSSEDDYVGYSDVDQQSSSSRLRSAVSRAGSLLWMVATSPGRLFRLLYWWAGTTWYRLTTAASLLDVFVLTRRFSSLKTFLWFLLPLLLLTCLTYGAWYFYPYGLQTFHPALVSWWAAKDSRRPDEGWEARDSSPHFQAEQRVMSRVHSLERRLEALAAEFSSNWQKEAMRLERLELRQGAPGQGGGGGLSHEDTLALLEGLVSRREAALKEDFRRETAARIQEELSALRAEHQQDSEDLFKKIVRASQESEARIQQLKSEWQSMTQESFQESSVKELRRLEDQLAGLQQELAALALKQSSVAEEVGLLPQQIQAVRDDVESQFPAWISQFLARGGGGRVGLLQREEMQAQLRELESKILTHVAEMQGKSAREAAASLSLTLQKEGVIGVTEEQVHHIVKQALQRYSEDRIGLADYALESGGASVISTRCSETYETKTALLSLFGIPLWYHSQSPRVILQPDVHPGNCWAFQGPQGFAVVRLSARIRPTAVTLEHVPKALSPNSTISSAPKDFAIFGFDEDLQQEGTLLGKFTYDQDGEPIQTFHFQAPTMATYQVVELRILTNWGHPEYTCIYRFRVHGEPAH

SEQ ID NO: 3497 - protein, 1027 aa, Homo sapiens
RTVLAQMAGISYVASFFLLLTKLSIGQREVTVQKGPLFRAEGYPVSIGCNVTGHQGPSEQHFQWSVYLPTNPTQEVQIISTKDAAFSYAVYTQRVRSGDVYVERVQGNSVLLHISKLQMKDAGEYECHTPNTDEKYYGSYSAKTNLIVIPDTLSATMSSQTLGKEEGEPLALTCEASKATAQHTHLSVTWYLTQDGGGSQATEIISLSKDFILVPGPLYTERFAASDVQLNKLGPTTFRLSIERLQSSDQGQLFCEATEWIQDPDETWMFITKKQTDQTTLRIQPAVKDFQVNITADSLFAEGKPLELVCLVVSSGRDPQLQGIWFFNGTEIAHIDAGGVLGLKNDYKERASQGELQVSKLGPKAFSLKIFSLGPEDEGAYRCVVAEVMKTRTGSWQVLQRKQSPDSHVHLRKPAARSVVMSTKNKQQVVWEGETLAFLCKAGGAESPLSVSWWHIPRDQTQPEFVAGMGQDGIVQLGASYGVPSYHGNTRLEKMDWATFQLEITFTAITDSGTYECRVSEKSRNQARDLSWTQKISVTVKSLESSLQVSLMSRQPQVMLTNTFDLSCVVRAGYSDLKVPLTVTWQFQPASSHIFHQLIRITHNGTIEWGNFLSRFQKKTKVSQSLFRSQLLVHDATEEETGVYQCEVEVYDRNSLYNNRPPRASAISHPLRIAVTLPESKLKVNSRSQVQELSINSNTDIECSILSRSNGNLQLAIIWYFSPVSTNASWLKILEMDQTNVIKTGDEFHTPQRKQKFHTEKVSQDLFQLHILNVEDSDRGKYHCAVEEWLLSTNGTWHKLGEKKSGLTELKLKPTGSKVRVSKVYWTENVTEHREVAIRCSLESVGSSATLYSVMWYWNRENSGSKLLVHLQHDGLLEYGEEGLRRHLHCYRSSSTDFVLKLHQVEMEDAGMYWCRVAEWQLHGHPSKWINQASDESQRMVLTVLPSEPTLPSRICSSAPLLYFLFICPFVLLLLLLISLLCLYWKARKLSTLRSNTRKEKALWVDLKEAGGVTTNRREDEEEDEGN

SEQ ID NO: 3498 - protein, 277 aa, Homo sapiens
KMYRISQLMSTPVASSSRLEREYAGELSPTCIFPSFTCDSLDGYHSFECGSIDPLTGSHYTCRRSPRLLTNGYYIWTEDSFLCDKDGNITLNPSQTSVMYKENLVSTSKSWLHGSIFGDINSSPSEDNWLKGTRRLDTDHCNGNADDLDCSSLTDDWESGKMNAESVITSSSSHIISQPPGGNSHSLSLQSQLTASERFQENSSDHSETRLLQEVFFQAILLAVCLIISACARWFMGEILASVFTCSLMITVAYVKSLFLSLASYFKTTACARFVKI

SEQ ID NO: 3499 - protein, 194 aa, Homo sapiens
LGTAGGAVSVAMTDQTYCDRLVQDTPFLTGHGRLSEQQVDRIILQLNRYYPQILTNKEAEKFRNPKASLRVRLCDLLSHLQRSGERDCQEFYRALYIHAQPLHSRLPSRHALQNSDCTELDSGSQSGELSNRGPMSFLAGLGLAVGLALLLYCYPPDPKGLPGTRRVLGFSPVIIDRHVSRYLLAFLADDLGGL

SEQ ID NO: 3500 - protein, 470 aa, Homo sapiens
LAQAPASLGKATMNRGVPFRHLLLVLQLALLPAATQGKKVVLGKKGDTVELTCTASQKKSIQFHWKNSNQIKILGNQGSFLTKGPSKLNDRADSRRSLWDQGNFPLIIKNLKIEDSDTYICEVEDQKEEVQLLVFGLTANSDTHLLQGQSLTLTLESPPGSSPSVQCRSPRGKNIQGGKTLSVSQLELQDSGTWTCTVLQNQKKVEFKIDIVVLAFQKASSIVYKKEGEQVEFSFPLAFTVEKLTGSGELWWQAERASSSKSWITFDLKNKEVSVKRVTQDPKLQMGKKLPLHLTLPQALPQYAGSGNLTLALEAKTGKLHQEVNLVVMRATQLQKNLTCEVWGPTSPKLMLSLKLENKEAKVSKREKAVWVLNPEAGMWQCLLSDSGQVLLESNIKVLPTWSTPVQPMALIVLGGVAGLLLFIGLGIFFCVRCRHRRRQAERMSQIKRLLSEKKTCQCPHRFQKTCSPI

SEQ ID NO: 3501 - protein, 1160 aa, Homo sapiens
RFWLLPAMALRVLLLTALTLCHGFNLDTENAMTFQENARGFGQSVVQLQGSRVVVGAPQEIVAANQRGSLYQCDYSTGSCEPIRLQVPVEAVNMSLGLSLAATTSPPQLLACGPTVHQTCSENTYVKGLCFLFGSNLRQQPQKFPEALRGCPQEDSDIAFLIDGSGSIIPHDFRRMKEFVSTVMEQLKKSKTLFSLMQYSEEFRIHFTFKEFQNNPNPRSLVKPITQLLGRTHTATGIRKVVRELFNITNGARKNAFKILVVITDGEKFGDPLGYEDVIPEADREGVIRYVIGVGDAFRSEKSRQELNTIASKPPRDHVFQVNNFEALKTIQNQLREKIFAIEGTQTGSSSSFEHEMSQEGFSAAITSNGPLLSTVGSYDWAGGVFLYTSKEKSTFINMTRVDSDMNDAYLGYAAAIILRNRVQSLVLGAPRYQHIGLVAMFRQNTGMWESNANVKGTQIGAYFGASLCSVDVDSNGSTDLVLIGAPHYYEQTRGGQVSVCPLPRGQRARWQCDAVLYGEQGQPWGRFGAALTVLGDVNGDKLTDVAIGAPGEEDNRGAVYLFHGTSGSGISPSHSQRIAGSKLSPRLQYFGQSLSGGQDLTMDGLVDLTVGAQGHVLLLRSQPVLRVKAIMEFNPREVARNVFECNDQVVKGKEAGEVRVCLHVQKSTRDRLREGQIQSVVTYDLALDSGRPHSRAVFNETKNSTRRQTQVLGLTQTCETLKLQLPNCIEDPVSPIVLRLNFSLVGTPLSAFGNLRPVLAEDAQRLFTALFPFEKNCGNDNICQDDLSITFSFMSLDCLVVGGPREFNVTVTVRNDGEDSYRTQVTFFFPLDLSYRKVSTLQNQRSQRSWRLACESASSTEVSGALKSTSCSINHPIFPENSEVTFNITFDVDSKASLGNKLLLKANVTSENNMPRTNKTEFQLELPVKYAVYMVVTSHGVSTKYLNFTASENTSRVMQHQYQVSNLGQRSLPISLVFLVPVRLNQTVIWDRPQVTFSENLSSTCHTKERLPSHSDFLAELRKAPVVNCSIAVCQRIQCDIPFFGIQEEFNATLKGNLSFDWYIKTSHNHLLIVSTAEILFNDSVFTLLPGQGAFVRSQTETKVEPFEVPNPLPLIVGSSVGGLLLLALITAALYKLGFFKRQYKDMMSEGGPPGAEPQ

SEQ ID NO: 3502 - protein, 55 aa, Homo sapiens
LAILGTLCYHWLGRRVGVLQGQCWEDFVGQELYRFLVMDFVLMLLDTLFGELVWR

SEQ ID NO: 3503 - protein, 786 aa, Homo sapiens
LSGAPPAGSPRGKGARPGGGLASDAPGRARSRRGSRFSSGEESTSHLIMSRRSQRLTRYSQGDDDGSSSSGGSSVAGSQSTLFKDSPLRTLKRKSSNMKRLSPAPQLGPSSDAHTSYYSESLVHESWFPPRSSLEELHGDANWGEDLRVRRRRGTGGSESSRASGLVGRKATEDFLGSSSGYSSEDDYVEDSEGRGSKVTETEPVSSFPAGYSDVDQQSSSSRLRSAVSRAGSLLWMVATSPGRLFRLLYWWAGTTWYRLTTAASLLDVFVLTRRFSSLKTFLWFLLPLLLLTCLTYGAWYFYPYGLQTFHPALVSWWAAKDSRRPDEGWEARDSSPHFQAEQRVMSRVHSLERRLEALAAEFSSNWQKEAMRLERLELRQGAPGQGGGGGLSHEDTLALLEGLVSRREAALKEDFRRETAARIQEELSALRAEHQQDSEDLFKKIVRASQESEARIQQLKSEWQSMTQESFQESSVKELRRLEDQLAGLQQELAALALKQSSVAEEVGLLPQQIQAVRDDVESQFPAWISQFLARGGGGRVGLLQREEMQAQLRELESKILTHVAEMQGKSAREAAASLSLTLQKEGVIGVTEEQVHHIVKQALQRYSEDRIGLADYALESGGASVISTRCSETYETKTALLSLFGIPLWYHSQSPRVILQPDVHPGNCWAFQGPQGFAVVRLSARIRPTAVTLEHVPKALSPNSTISSAPKDFAIFGFDEDLQQEGTLLGKFTYDQDGEPIQTFHFQAPTMATYQVVELRILTNWGHPEYTCIYRFRVHGEPAH

SEQ ID NO: 3504 - protein, 1031 aa, Homo sapiens
LGRKRTVLAQMAGISYVASFFLLLTKLSIGQREVTVQKGPLFRAEGYPVSIGCNVTGHQGPSEQHFQWSVYLPTNPTQEVQIISTKDAAFSYAVYTQRVRSGDVYVERVQGNSVLLHISKLQMKDAGEYECHTPNTDEKYYGSYSAKTNLIVIPDTLSATMSSQTLGKEEGEPLALTCEASKATAQHTHLSVTWYLTQDGGGSQATEIISLSKDFILVPGPLYTERFAASDVQLNKLGPTTFRLSIERLQSSDQGQLFCEATEWIQDPDETWMFITKKQTDQTTLRIQPAVKDFQVNITADSLFAEGKPLELVCLVVSSGRDPQLQGIWFFNGTEIAHIDAGGVLGLKNDYKERASQGELQVSKLGPKAFSLKIFSLGPEDEGAYRCVVAEVMKTRTGSWQVLQRKQSPDSHVHLRKPAARSVVMSTKNKQQVVWEGETLAFLCKAGGAESPLSVSWWHIPRDQTQPEFVAGMGQDGIVQLGASYGVPSYHGNTRLEKMDWATFQLEITFTAITDSGTYECRVSEKSRNQARDLSWTQKISVTVKSLESSLQVSLMSRQPQVMLTNTFDLSCVVRAGYSDLKVPLTVTWQFQPASSHIFHQLIRITHNGTIEWGNFLSRFQKKTKVSQSLFRSQLLVHDATEEETGVYQCEVEVYDRNSLYNNRPPRASAISHPLRIAVTLPESKLKVNSRSQVQELSINSNTDIECSILSRSNGNLQLAIIWYFSPVSTNASWLKILEMDQTNVIKTGDEFHTPQRKQKFHTEKVSQDLFQLHILNVEDSDRGKYHCAVEEWLLSTNGTWHKLGEKKSGLTELKLKPTGSKVRVSKVYWTENVTEHREVAIRCSLESVGSSATLYSVMWYWNRENSGSKLLVHLQHDGLLEYGEEGLRRHLHCYRSSSTDFVLKLHQVEMEDAGMYWCRVAEWQLHGHPSKWINQASDESQRMVLTVLPSEPTLPSRICSSAPLLYFLFICPFVLLLLLLISLLCLYWKARKLSTLRSNTRKEKALWVDLKEAGGVTTNRREDEEEDEGN

SEQ ID NO: 3505 - protein, 28 aa, Homo sapiens
LKRRNPHFGPIFLLDYFLISILPIVLMF

SEQ ID NO: 3506 - protein, 255 aa, Homo sapiens
IMWQLLLPTALLLLVSAGMRTEDLPKAVVFLEPQWYRVLEKDSVTLKCQGAYSPEDNSTQWFHNESLISSQASSYFIDAATVDDSGEYRCQTNLSTLSDPVQLEVHIGWLLLQAPRWVFKEEDPIHLRCHSWKNTALHKVTYLQNGKGRKYFHHNSDFYIPKATLKDSGSYFCRGLFGSKNVSSETVNITITQGLAVSTISSFFPPGYQVSFCLVMVLLFAVDTGLYFSVKTNIRSSTRDWKDHKFKWRKDPQDK

SEQ ID NO: 3507 - protein, 1706 aa, Homo sapiens
LLFWFFDLAEPSGRAANDPFTIVHGNTGKCIKPVYGWIVADDCDETEDKLWKWVSQHRLFHLHSQKCLGLDITKSVNELRMFSCDSSAMLWWKCEHHSLYGAARYRLALKDGHGTAISNASDVWKKGGSEESLCDQPYHEIYTRDGNSYGRPCEFPFLIDGTWHHDCILDEDHSGPWCATTLNYEYDRKWGICLKPENGCEDNWEKNEQFGSCYQFNTQTALSWKEAYVSCQNQGADLLSINSAAELTYLKEKEGIAKIFWIGLNQLYSARGWEWSDHKPLNFLNWDPDRPSAPTIGGSSCARMDAESGLWQSFSCEAQLPYVCRKPLNNTVELTDVWTYSDTRCDAGWLPNNGFCYLLVNESNSWDKAHAKCKAFSSDLISIHSLADVEVVVTKLHNEDIKEEVWIGLKNINIPTLFQWSDGTEVTLTYWDENEPNVPYNKTPNCVSYLGELGQWKVQSCEEKLKYVCKRKGEKLNDASSDKMCPPDEGWKRHGETCYKIYEDEVPFGTNCNLTITSRFEQEYLNDLMKKYDKSLRKYFWTGLRDVDSCGEYNWATVGGRRRAVTFSNWNFLEPASPGGCVAMSTGKSVGKWEVKDCRSFKALSICKKMSGPLGPEEASPKPDDPCPEGWQSFPASLSCYKVFHAERIVRKRNWEEAERFCQALGAHLSSFSHVDEIKEFLHFLTDQFSGQHWLWIGLNKRSPDLQGSWQWSDRTPVSTIIMPNEFQQDYDIRDCAAVKVFHRPWRRGWHFYDDREFIYLRPFACDTKLEWVCQIPKGRTPKTPDWYNPDRAGIHGPPLIIEGSEYWFVADLHLNYEEAVLYCASNHSFLATITSFVGLKAIKNKIANISGDGQKWWIRISEWPIDDHFTYSRYPWHRFPVTFGEECLYMSAKTWLIDLGKPTDCSTKLPFICEKYNVSSLEKYSPDSAAKVQCSEQWIPFQNKCFLKIKPVSLTFSQASDTCHSYGGTLPSVLSQIEQDFITSLLPDMEATLWIGLRWTAYEKINKWTDNRELTYSNFHPLLVSGRLRIPENFFEEESRYHCALILNLQKSPFTGTWNFTSCSERHFVSLCQKYSEVKSRQTLQNASETVKYLNNLYKIIPKTLTWHSAKRECLKSNMQLVSITDPYQQAFLSVQALLHNSSLWIGLFSQDDELNFGWSDGKRLHFSRWAETNGQLEDCVVLDTDGFWKTVDCNDNQPGAICYYSGNETEKEVKPVDSVKCPSPVLNTPWIPFQNCCYNFIITKNRHMATTQDEVHTKCQKLNPKSHILSIRDEKENNFVLEQLLYFNYMASWVMLGITYRNKSLMWFDKTPLSYTHWRAGRPTIKNEKFLAGLSTDGFWDIQTFKVIEEAVYFHQHSILACKIEMVDYKEEYNTTLPQFMPYEDGIYSVIQKKVTWYEALNMCSQSGGHLASVHNQNGQLFLEDIVKRDGFPLWVGLSSHDGSESSFEWSDGSTFDYIPWKGQTSPGNCVLLDPKGTWKHEKCNSVKDGAICYKPTKSKKLSRLTYSSRCPAAKENGSRWIQYKGHCYKSDQALHSFSEAKKLCSKHDHSATIVSIKDEDENKFVSRLMRENNNITMRVWLGLSQHSVDQSWSWLDGSEVTFVKWENKSKSGVGRCSMLIASNETWKKVECEHGFGRVVCKVPLGPDYTAIAIIVATLSILVLMGGLIWFLFQRHRLHLAGFSSVRYAQGVNEDEIMLPSFHD

SEQ ID NO: 3508 - protein, 689 aa, Homo sapiens
LPLWLCLGFHFLTVGWRNRSGTATAASQGVCKLVGGAADCRGQSLASVPSSLPPHARMLTLDANPLKTLWNHSLQPYPLLESLSLHSCHLERISRGAFQEQGHLRSLVLGDNCLSENYEETAAALHALPGLRRLDLSGNALTEDMAALMLQNLSSLRSVSLAGNTIMRLDDSVFEGLERLRELDLQRNYIFEIEGGAFDGLAELRHLNLAFNNLPCIVDFGLTRLRVLNVSYNVLEWFLATGGEAAFELETLDLSHNQLLFFPLLPQYSKLRTLLLRDNNMGFYRDLYNTSSPREMVAQFLLVDGNVTNITTVSLWEEFSSSDLADLRFLDMSQNQFQYLPDGFLRKMPSLSHLNLHQNCLMTLHIREHEPPGALTELDLSHNQLSELHLAPGLASCLGSLRLFNLSSNQLLGVPPGLFANARNITTLDMSHNQISLCPLPAASDRVGPPSCVDFRNMASLRSLSLEGCGLGALPDCPFQGTSLTYLDLSSNWGVLNGSLAPLQDVAPMLQVLSLRNMGLHSSFMALDFSGFGNLRDLDLSGNCLTTFPRFGGSLALETLDLRRNSLTALPQKAVSEQLSRGLRTIYLSQNPYDCCGVDGWGALQHGQTVADWAMVTCNLSSKIIRVTELPGGVPRDCKWERLDLGLLYLVLILPSCLTLLVACTVIVLTFKKPLLQVIKSRCHWSSVY

SEQ ID NO: 3509 - protein, 91 aa, Homo sapiens
ISSHLRSPPPPPPCPPGLPQLGAPAVASRRLRALSSRFAARAAAAAADCCGARTRTPGIRCRRRRPARRPASVRWFPPCVLWVALSWVFPA

SEQ ID NO: 3510 - protein, 874 aa, Homo sapiens
RAARHCGAMSGARGEGPEAGAGGAGGRAAPENPGGVLSVELPGLLAQLARSFALLLPVYALGYLGLSFSWVLLALALLAWCRRSRGLKALRLCRALALLEDEERVVRLGVRACDLPAWVHFPDTERAEWLNKTVKHMWPFICQFIEKLFRETIEPAVRGANTHLSTFSFTKVDVGQQPLRINGVKVYTENVDKRQIILDLQISFVGNCEIDLEIKRYFCRAGVKSIQIHGTMRVILEPLIGDMPLVGALSIFFLRKPLLEINWTGLTNLLDVPGLNGLSDTIILDIISNYLVLPNRITVPLVSEVQIAQLRFPVPKGVLRIHFIEAQDLQGKDTYLKGLVKGKSDPYGIIRVGNQIFQSRVIKENLSPKWNEVYEALVYEHPGQELEIELFDEDPDKDDFLGSLMIDLIEVEKERLLDEWFTLDEVPKGKLHLRLEWLTLMPNASNLDKVLTDIKADKDQANDGLSSALLILYLDSARNLPSNPLEFNPDVLKKTAVQRALKSGKKISSNPNPVVQMSVGHKAQESKIRYKTNEPVWEENFTFFIHNPKRQDLEVEVRDEQHQCSLGNLKVPLSQLLTSEDMTVSQRFQLSNSGPNSTIKMKIALRVLHLEKRERPPDHQHSAQVKRPSVSKEGRKTSIKSHMSGSPGPGGSNTAPSTPVIGGSDKPGMEEKAQPPEAGPQGLHDLGRSSSSLLASPGHISVKEPTPSIASDISLPIATQELRQRLRQLENGTTLGQSPLGQIQLTIRHSSQRNKLIVVVHACRNLIAFSEDGSDPYVRMYLLPDKRRSGRRKTHVSKKTLNPVFDQSFDFSVSLPEVQRRTLDVAVKNSGGFLSKDKGLLGKVLVALASEELAKGWTQWYDLTEDGTRPQAMT

SEQ ID NO: 3511 - protein, 233 aa, Homo sapiens
KMYRISQLMSTPVASSSRLEREYAGELSPTCIFPSFTCDSLDGYHSFECGSIDPLTGSHYTCRRSPRLLTNGYYIWTEDSFLCDKDGNITLNPSQTSVMYKENLVRIFRKKKRICHSFSSLFNLSTSKSWLHGSIFGDINSSPSEDNWLKGTRRLDTDHCNGNETRLLQEVFFQAILLAVCLIISACARWFMGEILASVFTCSLMITVAYVKSLFLSLASYFKTTACARFVKI

SEQ ID NO: 3512 - protein, 48 aa, Homo sapiens [sequence omitted]

SEQ ID NO: 3513 - protein, 73 aa, Homo sapiens
IGLALTVSALLFSSFLWFAIRCGCSLDRKGKYTLTPRMWPPAPGAQPLEMLPGWTHTLSPLRSSCYWSKRMLG

SEQ ID NO: 3514 - protein, 198 aa, Homo sapiens
LGDFLVWQWWSWPWGDGDAGSAAPHTPPEAAAGRLLLVLSCVGLLLTLAHPLRLRHCVLVLLLASFVWWVSFTSLGSLPSALRPLLSGLVGGAGCLLALGLDHFFQIREAPLHPRLSSAAEEKVPVIRPRRRSSCVSLGETAASYYGSCKIFRRPSLPCISREQMILWDWDLKQWYKPHYQVSIINICDEYLNNICDH

SEQ ID NO: 3515 - protein, 2208 aa, Homo sapiens
RRESRLPFLFTLVALLPPGALCEVWTQRLHGGSAPLPQDRGFLVVQGDPRELRLWARGDARGASRADEKPLRRKRSAALQPEPIKVYGQVSLNDSHNQMVVHWAGEKSNVIVALARDSLALARPKSSDVYVSYDYGKSFKKISDKLNFGLGNRSEAVIAQFYHSPADNKRYIFADAYAQYLWITFDFCNTLQGFSIPFRAADLLLHSKASNLLLGFDRSHPNKQLWKSDDFGQTWIMIQEHVKSFSWGIDPYDKPNTIYIERHEPSGYSTVFRSTDFFQSRENQEVILEEVRDFQLRDKYMFATKVVHLLGSEQQSSVQLWVSFGRKPMRAAQFVTRHPINEYYIADASEDQVFVCVSHSNNRTNLYISEAEGLKFSLSLENVLYYSPGGAGSDTLVRYFANEPFADFHRVEGLQGVYIATLINGSMNEENMRSVITFDKGGTWEFLQAPAFTGYGEKINCELSQGCSLHLAQRLSQLLNLQLRRMPILSKESAPGLIIATGSVGKNLASKTNVYISSSAGARWREALPGPHYYTWGDHGGIITAIAQGMETNELKYSTNEGETWKTFIFSEKPVFVYGLLTEPGEKSTVFTIFGSNKENVHSWLILQVNATDALGVPCTENDYKLWSPSDERGNECLLGHKTVFKRRTPHATCFNGEDFDRPVVVSNCSCTREDYECDFGFKMSEDLSLEVCVPDPEFSGKSYSPPVPCPVGSTYRRTRGYRKISGDTCSGGDVEARLEGELVPCPLAEENEFILYAVRKSIYRYDLASGATEQLPLTGLRAAVALDFDYEHNCLYWSDLALDVIQRLCLNGSTGQEVIINSGLETVEALAFEPLSQLLYWVDAGFKKIEVANPDGDFRLTIVNSSVLDRPRALVLVPQEGVMFWTDWGDLKPGIYRSNMDGSAAYHLVSEDVKWPNGISVDDQWIYWTDAYLECIERITFSGQQRSVILDNLPHPYAIAVFKNEIYWDDWSQLSIFRASKYSGSQMEILANQLTGLMDMKIFYKGKNTGSNACVPRPCSLLCLPKANNSRSCRCPEDVSSSVLPSGDLMCDCPQGYQLKNNTCVKQENTCLRNQYRCSNGNCINSIWWCDFDNDCGDMSDERNCPTTICDLDTQFRCQESGTCIPLSYKCDLEDDCGDNSDESHCEMHQCRSDEYNCSSGMCIRSSWVCDGDNDCRDWSDEANCTAIYHTCEASNFQCRNGHCIPQRWACDGDTDCQDGSDEDPVNCEKKCNGFRCPNGTCIPSSKHCDGLRDCSDGSDEQHCEPLCTHFMDFVCKNRQQCLFHSMVCDGIIQCRDGSDEDAAFAGCSQDPEFHKVCDEFGFQCQNGVCISLIWKCDGMDDCGDYSDEANCENPTEAPNCSRYFQFRCENGHCIPNRWKCDRENDCGDWSDEKDCGDSHILPFSTPGPSTCLPNYYRCSSGTCVMDTWVCDGYRDCADGSDEEACPLLANVTAASTPTQLGRCDRFEFECHQPKTCIPNWKRCDGHQDCQDGRDEANCPTHSTLTCMSREFQCEDGEACIVLSERCDGFLDCSDESDEKACSDELTVYKVQNLQWTADFSGDVTLTWMRPKKMPSASCVYNVYYRVVGESIWKTLETHSNKTNTVLKVLKPDTTYQVKVQVQCLSKAHNTNDFVTLRTPEGLPDAPRNLQLSLPREAEGVIVGHWAPPIHTHGLIREYIVEYSRSGSKMWASQRAASNFTEIKNLLVNTLYTVRVAAVTSRGIGNWSDSKSITTIKGKVIPPPDIHIDSYGENYLSFTLTMESDIKVNGYVVNLFWAFDTHKQERRTLNFRGSILSHKVGNLTAHTSYEISAWAKTDLGDSPLAFEHVMTRGVRPPAPSLKAKAINQTAVECTWTGPRNVVYGIFYATSFLDLYRNPKSLTTSLHNKTVIVSKDEQYLFLVRVVVPYQGPSSDYVVVKMIPDSRLPPRHLHVVHTGKTSVVIKWESPYDSPDQDLLYAVAVKDLIRKTDRSYKVKSRNSTVEYTLNKLEPGGKYHIIVQLGNMSKDSSIKITTVSLSAPDALKIITENDHVLLFWKSLALKEKHFNESRGYEIHMFDSAMNITAYLGNTTDNFFKISNLKMGHNYTFTVQARCLFGNQICGEPAILLYDELGSGADASATQAARSTDVAAVVVPILFLILLSLGVGFAILYTKHRRLQSSFTAFANSHYSSRLGSAIFSSGDDLGEDDEDAPMITGFSDDVPMVIA

SEQ ID NO: 3516 - protein, 240 aa, Homo sapiens
IHTHSLTLKMQDEERYMTLNVQSKKRSSAQTSQLTFKDYSVTLHWYKILLGISGTVNGILTLTLISLILLVSQGVLLKCQKGSCSNATQYEDTGDLKVNNGTRRNISNKDLCASRSADQTVLCQSEWLKYQGKCYWFSNEMKSWSDSYVYCLERKSHLLIIHDQLEMAFIQKNLRQLNYVWIGLNFTSLKMTWTWVDGSPIDSKIFFIKGPAKENSCAAIKESKIFSETCSSVFKWICQY

SEQ ID NO: 3517 - protein, 38 aa, Homo sapiens
IDAILEDSSHSRKKPRTLPLAWHPPVCFLVTGFLSAGR

SEQ ID NO: 3518 - protein, 858 aa, Homo sapiens
LASGQPAQLPSLRRRDSPVPLTLSPAAPAGSSAGTMGGRVFLVFLAFCVWLTLPGAETQDSRGCARWCPQDSSCVNATACRCNPGFSSFSEIITTPMETCDDINECATLSKVSCGKFSDCWNTEGSYDCVCSPGYEPVSGAKTFKNESENTCQDVDECQQNPRLCKSYGTCVNTLGSYTCQCLPGFKLKPEDPKLCTDVNECTSGQNPCHSSTHCLNNVGSYQCRCRPGWQPIPGSPNGPNNTVCEDVDECSSGQHQCDSSTVCFNTVGSYSCRCRPGWKPRHGIPNNQKDTVCEDMTFSTWTPPPGVHSQTLSRFFDKVQDLGRDYKPGLANNTIQSILQALDELLEAPGDLETLPRLQQHCVASHLLDGLEDVLRGLSKNLSNGLLNFSYPAGTELSLEVQKQVDRSVTLRQNQAVMQLDWNQAQKSGDPGPSVVGLVSIPGMGKLLAEAPLVLEPEKQMLLHETHQGLLQDGSPILLSDVISAFLSNNDTQNLSSPVTFTFSHRSVIPRQKVLCVFWEHGQNGCGHWATTGCSTIGTRDTSTICRCTHLSSFAVLMAHYDVQEEDPVLTVITYMGLSVSLLCLLLAALTFLLCKAIQNTSTSLHLQLSLCLFLAHLLFLVAIDQTGHKVLCSIIAGTLHYLYLATLTWMLLEALYLFLTARNLTVVNYSSINRFMKKLMFPVGYGVPAVTVAISAASRPHLYGTPSRCWLQPEKGFIWGFLGPVCAIFSVNLVLFLVTLWILKNRLSSLNSEVSTLRNTRMLAFKATAQLFILGCTWCLGILQVGPAARVMAYLFTIINSLQGVFIFLVYCLLSQQVREQYGKWSKGIRKLKTESEMHTLSSSAKADTSKPSTVN

SEQ ID NO: 3519 - protein, 902 aa, Homo sapiens
VLAQGLLSMALLALCWERSLAGAEETIPLQTLRCYNDYTSHITCRWADTQDAQRLVNVTLIRRVNEDLLEPVSCDLSDDMPWSACPHPRCVPRRCVIPCQSFVVTDVDYFSFQPDRPLGTRLTVTLTQHVQPPEPRDLQISTDQDHFLLTWSVALGSPQSHWLSPGDLEFEVVYKRLQDSWEDAAILLSNTSQATLGPEHLMPSSTYVARVRTRLAPGSRLSGRPSKWSPEVCWDSQPGDEAQPQNLECFFDGAAVLSCSWEVRKEVASSVSFGLFYKPSPDAGSAVLLREEECSPVLREGLGSLHTRHHCQIPVPDPATHGQYIVSVQPRRAEKHIKSSVNIQMAPPSLNVTKDGDSYSLRWETMKMRYEHIDHTFEIQYRKDTATWKDSKTETLQNAHSMALPALEPSTRYWARVRVRTSRTGYNGIWSEWSEARSWDTESVLPMWVLALIVIFLTIAVLLALRFCGIYGYRLRRKWEEKIPNPSKSHLFQNGSAELWPPGSMSAFTSGSPPHQGPWGSRFPELEGVFPVGFGDSEVSPLTIEDPKHVCDPPSGPDTTPAASDLPTEQPPSPQPGPPAASHTPEKQASSFDFNGPYLGPPHSRSLPDILGQPEPPQEGGSQKSPPPGSLEYLCLPAGGQVQLVPLAQAMGPGQAVEVERRPSQGAAGSPSLESGGGPAPPALGPRVGGQDQKDSPVAIPMSSGDTEDPGVASGYVSSADLVFTPNSGASSVSLVPSLGLPSDQTPSLCPGLASGPPGAPGPVKSGFEGYVELPPIEGRSPRSPRNNPVPPEAKSPVLNPGERPADVSPTSPQPEGLLVLQQVGDYCFLPGLGPGPLSLRSKPSSPGPGPEIKNLDQAFQVKKPPGQAVPQVPVIQLFKALKQQDYLSLPPWEVNKPGEVC

SEQ ID NO: 3520 - protein, 546 aa, Homo sapiens [sequence omitted]

SEQ ID NO: 3521 - protein, 152 aa, Homo sapiens
MAVGFFGCCGAMRESQCVLGSFFTCLLVIFAAEVTTGVFAFIGKGVAIRHVQTMYEEAYNDYLKDRGKGNGTLITFHSTFQCCGKESSEQVQPTCPKELLGHKNCIDEIETIISVKLQLIGIVGIGIAGLTIFGMIFSMVLCCAIRNSRDVI

SEQ ID NO: 3522 - protein, 1044 aa, Homo sapiens
MYLTGLCFLLGPTQLTQRLPVSRQECPRQEQDIVFLIDGSGSISSRNFATMMNFVRAVISQFQRPSTQFSLMQFSNKFQTHFTFEEFRRSSNPLSLLASVHQLQGFTYTATAIQNVVHRLFHASYGARRDAAKILIVITDGKKEGDSLDYKDVIPMADAAGIIRYAIGVGLAFQNRNSWKELNDIASKPSQEHIFKVEDFDALKDIQNQLKEKIFAIEGTETTSSSSFELEMAQEGFSAVFTPDGPVLGAVGSFTWSGGAFLYPPNMSPTFINMSQENVDMRDSYLGYSTELALWKGVQSLVLGAPRYQHTGKAVIFTQVSRQWRMKAEVTGTQIGSYFGASLCSVDVDSDGSTDLVLIGAPHYYEQTRGGQVSVCPLPRGWRRWWCDAVLYGEQGHPWGRFGAALTVLGDVNGDKLTDVVIGAPGEEENRGAVYLFHGVLGPSISPSHSQRIAGSQLSSRLQYFGQALSGGQDLTQDGLVDLAVGARGQVLLLRTRPVLWVGVSMQFIPAEIPRSAFECREQVVSEQTLVQSNICLYIDKRSKNLLGSRDLQSSVTLDLALDPGRLSPRATFQETKNRSLSRVRVLGLKAHCENFNLLLPSCVEDSVTPITLRLNFTLVGKPLLAFRNLRPMLAADAQRYFTASLPFEKNCGADHICQDNLGISFSFPGLKSLLVGSNLELNAEVMVWNDGEDSYGTTITFSHPAGLSYRYVAEGQKQGQLRSLHLTCDSAPVGSQGTWSTSCRINHLIFRGGAQITFLATFDVSPKAVLGDRLLLTANVSSENNTPRTSKTTFQLELPVKYAVYTVVSSHEQFTKYLNFSESEEKESHVAMHRYQVNNLGQRDLPVSINFWVPVELNQEAVWMDVEVSHPQNPSLRCSSEKIAPPASDFLAHIQKNPVLDCSIAGCLRFRCDVPSFSVQEELDFTLKGNLSFGWVRQILQKKVSVVSVAEITFDTSVYSQLPGQEAFMRAQTTTVLEKYKVHNPTPLIVGSSIGGLLLLALITAVLYKVGFFKRQYKEMMEEANGQIAPENGTQTPSPPSEK

SEQ ID NO: 3523 - protein, 1050 aa, Homo sapiens
MYLTGLCFLLGPTQLTQRLPVSRQECPRQEQDIVFLIDGSGSISSRNFATMMNFVRAVISQFQRPSTQFSLMQFSNKFQTHFTFEEFRRSSNPLSLLASVHQLQGFTYTATAIQNVVHRLFHASYGARRDAAKILIVITDGKKEGDSLDYKDVIPMADAAGIIRYAIGVGLAFQNRNSWKELNDIASKPSQEHIFKVEDFDALKDIQNQLKEKIFAIEGTETTSSSSFELEMAQEGFSAVFTPDGPVLGAVGSFTWSGGAFLYPPNMSPTFINMSQENVDMRDSYLGYSTELALWKGVQSLVLGAPRYQHTGKAVIFTQVSRQWRMKAEVTGTQIGSYFGASLCSVDVDSDGSTDLVLIGAPHYYEQTRGGQVSVCPLPRGWRRWWCDAVLYGEQGHPWGRFGAALTVLGDVNGDKLTDVVIGAPGEEENRGAVYLFHGVLGPSISPSHSQRIAGSQLSSRLQYFGQALSGGQDLTQDGLVDLAVGARGQVLLLRTRPVLWVGVSMQFIPAEIPRSAFECREQVVSEQTLVQSNICLYIDKRSKNLLGSRDLQSSVTLDLALDPGRLSPRATFQETKNRSLSRVRVLGLKAHCENFNLLLPSCVEDSVTPITLRLNFTLVGKPLLAFRNLRPMLAADAQRYFTASLPFEKNCGADHICQDNLGISFSFPGLKSLLVGSNLELNAEVMVWNDGEDSYGTTITFSHPAGLSYRYVAEGQKQGQLRSLHLTCDSAPVGSQGTWSTSCRINHLIFRGGAQITFLATFDVSPKAVLGDRLLLTANVSSENNTPRTSKTTFQLELPVKYAVYTVVSSHEQFTKYLNFSESEEKESHVAMHRYQVNNLGQRDLPVSINFWVPVELNQEAVWMDVEVSHPQNPSLRCSSEKIAPPASDFLAHIQKNPVLDCSIAGCLRFRCDVPSFSVQEELDFTLKGNLSFGWVRQILQKKVSVVSVAEITFDTSVYSQLPGQEAFMRAQTTTVLEKYKVHNPTPLIVGSSIGGLLLLALITAVLYKVGFFKRQYKEMMEEANGQIAPENGTQTPSPPTPHYPQDNV

SEQ ID NO: 3524 - protein, 134 aa, Homo sapiens [sequence omitted]

SEQ ID NO: 3525 - protein, 117 aa, Homo sapiens
MSLFRLRPASTPPQLDETLSERLWGLTEMFPERVRSAAGATFDLSLFVAQKMYRFSRAALWIGTTSFMILVLPVVFETEKLQMEQQQQLQQRQILLGPNTGLSGGMPGALPSLPGKI

SEQ ID NO: 3526 - protein, 254 aa, Homo sapiens [sequence omitted]

SEQ ID NO: 3527 - protein, 275 aa, Homo sapiens
LAAARVPETELPQRPRRRRCEGPMRAPLLPPAPVVLSLLILGSGHYAAGLDLNDTYSGKREPFSGDHSADGFEVTSRSEMSSGSEISPVSEMPSSSEPSSGADYDYSEEYDNEPQIPGYIVDDSVRVEQVVKPPQNKTESENTSDKPKRKKKGGKNGKNRRNRKKKNPCNAEFQNFCIHGECKYIEHLEAVTCKCQQEYFGERCGEKSMKTHSMIDSSLSKIALAAIAAFMSAVILTAVAVITVQLRRQYVRKYEGEAEERKKLRQENGNVHAIA

SEQ ID NO: 3528 - protein, 189 aa, Homo sapiens
LPRRADMQAPRAALVFALVIALVPVGRGNYEELENSGDTTVESERPNKVTIPSTFAAVTIKETLNANINSTNFAPDENQLEFILMVLIPLILLVLLLLSVVFLATYYKRKRTKQEPSSQGSQSALQTYELGSENVKVPIFEEDTPSVMEIEMEELDKWMNSMNRNADFECLPTLKEEKESNHNPSDSES

SEQ ID NO: 3529 - protein, 315 aa, Homo sapiens
ISVPTADSETVHYHYGPKDLVTILFYIFITIILHAVVQEYILDKISKRLHLSKVKHSKFNESGQLVVFHFTSVIWCFYVVVTEGYLTNPRSLWEDYPHVHLPFQVKFFYLCQLAYWLHALPELYFQKVRKEEIPRQLQYICLYLVHIAGAYLLNLSRLGLILLLLQYSTEFLFHTARLFYFADENNEKLFSAWAAVFGVTRLFILTLAVLAIGFGLARMENQAFDPEKGNFNTLFCRLCVLLLVCAAQAWLMWRFIHSQLRHWREYWNEQSAKRRVPATPRLPARLIKRESGYHENGVVKAENGTSPRTKKLKSP

SEQ ID NO: 3530 - protein, 228 aa, Homo sapiens
RLTAMPGRAPLRTVPGALGAWLLGGLWAWTLCGLCSLGAVGAPRPCQAPQQWEGRQVMYQQSSGRNSRALLSYDGLNQRVRVLDERKALIPCKRLFEYILLYKDGVMFQIDQATKQCSKMTLTQPWDPLDIPQNSTFEDQYSIGGPQEQITVQEWSDRKSARSYETWIGIYTVKDCYPVQETFTINYSVILSTRFFDIQLGIKDPSVFTPPSTCQMAQLEKMSEDCSW

SEQ ID NO: 3531 - protein, 50 aa, Homo sapiens
VIISLKLKRKLLMLKMYHLSFQHLTTTSSVSTGISSSLYLSYRPKCHLSL

SEQ ID NO: 3532 - protein, 2072 aa, Homo sapiens
LLKLAFYQLRTMLRVIVESASNIPKTKFGKPDPIVSVIFKDEKKKTKKVDNELNPVWNEILEFDLRGIPLDFSSSLGIIVKDFETIGQNKLIGTATVALKDLTGDQSRSLPYKLISLLNEKGQDTGATIDLVIGYDPPSAPHPNDLSGPSVPGMGGDGEEDEGDEDRLDNAVRGPGPKGPVGTVSEAQLARRLTKVKNSRRMLSNKPQDFQIRVRVIEGRQLSGNNIRPVVKVHVCGQTHRTRIKRGNNPFFDELFFYNVNMTPSELMDEIISIRVYNSHSLRADCLMGEFKIDVGFVYDEPGHAVMRKWLLLNDPEDTSSGSKGYMKVSMFVLGTGDEPPPERRDRDNDSDDVESNLLLPAGIALRWVTFLLKIYRAEDIPQMDDAFSQTVKEIFGGNADKKNLVDPFVEVSFAGKKVCTNIIEKNANPEWNQVVNLQIKFPSVCEKIKLTIYDWDRLTKNDVVGTTYLHLSKIAASGGEVEDFSSSGTGAASYTVNTGETEVGFVPTFGPCYLNLYGSPREYTGFPDPYDELNTGKGEGVAYRGRILVELATFLEKTPPDKKLEPISNDDLLVVEKYQRRRKYSLSAVFHSATMLQDVGEAIQFEVSIGNYGNKFDTTCKPLASTTQYSRAVFDGNYYYYLPWAHTKPVVTLTSYWEDISHRLDAVNTLLAMAERLQTNIEALKSGIQGKIPANQLAELWLKLIDEVIEDTRYTLPLTEGKANVTVLDTQIRKLRSRSLSQIHEAAVRMRSEATDVKSTLAEIEDWLDKLMQLTEEPQNSMPDIIIWMIRGEKRLAYARIPAHQVLYSTSGENASGKYCGKTQTIFLKYPQEKNNGPKVPVELRVNIWLGLSAVEKKFNSFAEGTFTVFAEMYENQALMFGKWGTSGLVGRHKFSDVTGKIKLKREFFLPPKGWEWEGEWIVDPERSLLTEADAGHTEFTDEVYQNESRYPGGDWKPAEDTYTDANGDKAASPSELTCPPGWEWEDDAWSYDINRAVDEKGWEYGITIPPDHKPKSWVAAEKMYHTHRRRRLVRKRKKDLTQTASSTARAMEELQDQEGWEYASLIGWKFHWKQRSSDTFRRRRWRRKMAPSETHGAAAIFKLEGALGADTTEDGDEKSLEKQKHSATTVFGANTPIVSCNFDRVYIYHLRCYVYQARNLLALDKDSFSDPYAHICFLHRSKTTEIIHSTLNPTWDQTIIFDEVEIYGEPQTVLQNPPKVIMELFDNDQVGKDEFLGRSIFSPVVKLNSEMDITPKLLWHPVMNGDKACGDVLVTAELILRGKDGSNLPILPPQRAPNLYMVPQGIRPVVQLTAIEILAWGLRNMKNFQMASITSPSLVVECGGERVESVVIKNLKKTPNFPSSVLFMKVFLPKEELYMPPLVIKVIDHRQFGRKPVVGQCTIERLDRFRCDPYAGKEDIVPQLKASLLSAPPCRDIVIEMEDTKPLLASKLTEKEEEIVDWWSKFYASSGEHEKCGQYIQKGYSKLKIYNCELENVAEFEGLTDFSDTFKLYRGKSDENEDPSVVGEFKGSFRIYPLPDDPSVPAPPRQFRELPDSVPQECTVRIYIVRGLELQPQDNNGLCDPYIKITLGKKVIEDRDHYIPNTLNPVFGRMYELSCYLPQEKDLKISVYDYDTFTRDEKVGETIIDLENRFLSRFGSHCGIPEEYCVSGVNTWRDQLRPTQLLQNVARFKGFPQPILSEDGSRIRYGGRDYSLDEFEANKILHQHLGAPEERLALHILRTQGLVPEHVETRTLHSTFQPNISQGKLQMWVDVFPKSLGPPGPPFNITPRKAKKYYLRVIIWNTKDVILDEKSITGEEMSDIYVKGWIPGNEENKQKTDVHYRSLDGEGNFNWRFVFPFDYLPAEQLCIVAKKEHFWSIDQTEFRIPPRLIIQIWDNDKFSLDDYLGFLELDLRHTIIPAKSPEKCRLDMIPDLKAMNPLKAKTASLFEQKSMKGWWPCYAEKDGARVMAGKVEMTLEILNEKEADERPAGKGRDEPNMNPKLDLPNRPETSFLWFTNPCKTMKFIVWRRFKWVIIGLLFLLILLLFVAVLLYSLPNYLSMKIVKPNV

SEQ ID NO: 3533 - protein, 796 aa, Homo sapiens
LQESSGGGELRLKEWIMTHEEHHAAKTLGIGKAIAVLTSGGDAQGMNAAVRAVVRVGIFTGARVFFVHEGYQGLVDGGDHIKEATWESVSMMLQLGGTVIGSARCKDFREREGRLRAAYNLVKRGITNLCVIGGDGSLTGADTFRSEWSDLLSDLQKAGKITDEEATKSSYLNIVGLVGSIDNDFCGTDMTIGTDSALHRIMEIVDAITTTAQSHQRTFVLEVMGRHCGYLALVTSLSCGADWVFIPECPPDDDWEEHLCRRLSETRTRGSRLNIIIVAEGAIDKNGKPITSEDIKNLVVKRLGYDTRVTVLGHVQRGGTPSAFDRILGSRMGVEAVMALLEGTPDTPACVVSLSGNQAVRLPLMECVQVTKDVTKAMDEKKFDEALKLRGRSFMNNWEVYKLLAHVRPPVSKSGSHTVAVMNVGAPAAGMNAAVRSTVRIGLIQGNRVLVVHDGFEGLAKGQIEEAGWSYVGGWTGQGGSKLGTKRTLPKKSFEQISANITKFNIQGLVIIGGFEAYTGGLELMEGRKQFDELCIPFVVIPATVSNNVPGSDFSVGADTALNTICTTCDRIKQSAAGTKRRVFIIETMGGYCGYLATMAGLAAGADAAYIFEEPFTIRDLQANVEHLVQKMKTTVKRGLVLRNEKCNENYTTDFIFNLYSEEGKGIFDSRKNVLGHMQQGGSPTPFDRNFATKMGAKAMNWMSGKIKESYRNGRIFANTPDSGCVLGMRKRALVFQPVAELKDQTDFEHRIPKEQWWLKLRPILKILAKYEIDLDTSDHAHLEHITRKRSGEAAV

SEQ ID NO: 3534 - protein, 144 aa, Homo sapiens
LRGVMSRFLNVLRSWLVMVSIIAMGNTLQSFRDHTFLYEKLYTGKPNLVNGLQARTFGIWTLLSSVIRCLCAIDIHNKTLYHITLWTFLLALGHFLSELFVYGTAAPTIGVLAPLMVASFSILGMLVGLRYLEVEPVSRQKKRN

SEQ ID NO: 3535 - protein, 52 aa, Homo sapiens
LSLNFQPQRPPPLSPRAMGRVSGLVPSRFLTLLAHLVVVITLFWSRCPSSCH

SEQ ID NO: 3536 - protein, 212 aa, Homo sapiens
ICTEGVVSVSWGENTVMSCNISNAFSHVNIKLRAHGQESAIFNEVAPGYFSRDGWQLQVQGGVAQLVIKGARDSHAGLYMWHLVGHQRNNRQVTLEVSGAEPQSAPDTGFWPVPAVVTAVFILLVALVMFAWYRCRCSQQRREKKFFLLEPQMKVAALRAGAQQGLSRASAELWTPDSEPTPRPLALVFKPSPLGALELLSPQPLFPYAADP

SEQ ID NO: 3537 - protein, 67 aa, Homo sapiens
MIQSPEAAGQEAVLLVLPLVVGLLNLGAPYLCRVLAALEPHDSPVLEVYVAICRCVAAHENIIWCWS

SEQ ID NO: 3538 - protein, 455 aa, Homo sapiens
LGGSPGTQLCPRRLSTPSPMQPPPDEARRDMAGDTQWSRPECQAWTGTLLLGTCLLYCARSSMPICTVSMSQDFGWNKKEAGIVLSSFFWGYCLTQVVGGHLGDRIGGEKVILLSASAWGSITAVTPLLAHLSSAHLAFMTFSRILMGLLQGVYFPALTSLLSQKVRESERAFTYSIVGAGSQFGTLLTGAVGSLLLEWYGWQSIFYFSGGLTLLWVWYVYRYLLSEKDLILALGVLAQSRPVSRHNRVPWRRLFRKPAVWAAVVSQLSAACSFFILLSWLPTFFEETFPDAKGWIFNVVPWLVAIPASLFSGFLSDHLINQGYRAITVRKLMQGMGLGLSSVFALCLGHTSSFCESVVFASASIGLQTFNHSGISVNIQDLAPSCAGFLFGVANTAGALAGVVGVCLGGYLMETTGSWTCLFNLVAIISNLGLCTFLVFGQAQRVDLSSTHEDL

SEQ ID NO: 3539 - protein, 252 aa, Homo sapiens
VQGLGLVMASPSRRLQTKPVITCFKSVLLIYTFIFWITGVILLAVGIWGKVSLENYFSLLNEKATNVPFVLIATGTVIILLGTFGCFATCRASAWMLKLYAMFLTLVFLVELVAAIVGFVFRHEIKNSFKNNYEKALKQYNSTGDYRSHAVDKIQNTLHCCGVTDYRDWTDTNYYSEKGFPKSCCKLEDCTPQRDADKVNNEGCFIKVMTIIESEMGVVAGISFGVACFQLIGIFLAYCLSRAITNNQYEIV

SEQ ID NO: 3540 - protein, 165 aa, Homo sapiens
MWRRAAPGLTVRCGSGFQALVLTALLVGLGMSAGLPLGALPEMLLPLAFVATLTAFIFSLFLYMKAQVAPVSALAPGGNSGNPIYDFFLGRELNPRICFFDFKYFCELRPGLIGWVLINLALLMKEAELRGSPSLAMWLVNGFQLLYVGDALWHEVRLDWTRVGV

SEQ ID NO: 3541 - protein, 216 aa, Homo sapiens
MQPPPDEARRDMAGDTQWSRPECQAWTGTLLLGTCLLYCARSSMPICTVSMSQDFGWNKKEAGIVLSSFFWGYCLTQVVGGHLGDRIGGEKVILLSASAWGSITAVTPLLAHLSSAHLAFMTFSRILMGLLQGVYFPALTSLLSQKVRESERAFTYSIVGAGSQFGTLLTGAVGSLLLEWYGWQSIFYFSGGLTLLWVWYVYRYLLSEKGNAGRAG

SEQ ID NO: 3542 - protein, 111 aa, Homo sapiens
MLCVCVSGVQARFLTPHVCCVCPGTVPYAPCVLCVSCLYMWLPLMLTRWGTILARVGWDQTLFSSSPEIMLPKISSQTQRMGWWGAPCEVAPERWGPLQGTSGVLLQLTLG

SEQ ID NO: 3543 - protein, 314 aa, Homo sapiens
MGASEQDLGLSLFEALGYVDDQLFVFYDHESRRVEPRTPWVSSRISSQMWLQLSQSLKGWDHMFTVDFWTIMENHNHSKESHTLQVILGCEMQEDNSTEGYWKYGYDGQDHLEFCPDTLDWRAAEPRAWPTKLEWERHKIRARQNRAYLERDCPAQLQQLLELGRGVLDQQVPPLVKVTHHVTSSVTTLRCRALNYYPQNITMKWLKDKQPMDAKEFEPKDVLPNGDGTYQGWITLAVPPGEEQRYTCQVEHPGLDQPLIVIWEPSPSGTLVIGVISGIAVFVVILFIGILFIILRKRQGSRGAMGHYVLAERE

SEQ ID NO: 3544 - protein, 164 aa, Homo sapiens
KVEREVLGSASISVALFSPSWYSPPNLGFLHARVASCSTSLSLILVSTSSPGKFPFSRLALPTRASDFHPSFSLLASDYPPPIPPRPAAQLPPPFTRTGTIIPTPLRPVWDSTCLLPNPTLISAWSLPLWPNLSSRLIGDGHSHSLVPNTSSWMDSRHPCPLFN

SEQ ID NO: 3545 - protein, 371 aa, Homo sapiens
LLRSELGRSSGLRGRGASRLPGPKRRGPRVMAKGEGAESGSAAGLLPTSILQSTERPAQVKKEPKKKKQQLSVCNKLCYALGGAPYQVTGCALGFFLQIYLLDVAQVGPFSASIILFVGRAWDAITDPLVGLCISKSPWTCLGRLMPWIIFSTPLAVIAYFLIWFVPDFPHGQTYWYLLFYCLFETMVTCFHVPYSALTMFISTEQTERDSATAYRMTVEVLGTVLGTAIQGQIVGQADTPCFQDLNSSTVASQSANHTHGTTSHRETQKAYLLAAGVIVCIYIICAVILILGVREQREPYEAQQSEPIAYFRGLRLVMSHGPYIKLITGFLFTSLAFMLVEGNFVLFCTYTLGFRNEFQNLLLAIMVHAA

SEQ ID NO: 3546 - protein, 602 aa, Homo sapiens
LGPLGARAALRIPGQRCGPRPGRPLRSSQRASERARAADAPGRDPAARMTAPGAAGRCPPTTWLGSLLLLVCLLASRSITEEVSEYCSHMIGSGHLQSLQRLIDSQMETSCQITFEFVDQEQLKDPVCYLKKAFLLVQDIMEDTMRFRDNTPNAIAIVQLQELSLRLKSCFTKDYEEHDKACVRTFYETPLQLLEKVKNVFNETKNLLDKDWNIFSKNCNNSFAECSSQDVVTKPDCNCLYPKAIPSSDPASVSPHQPLAPSMAPVAGLTWEDSEGTEGSSLLPGEQPLHTVDPGSAKQRPPRSTCQSFEPPETPVVKDSTIGGSPQPRPSVGAFNPGMEDILDSAMGTNWVPEEASGEASEIPVPQGTELSPSRPGGGSMQTEPARPSNFLSASSPLPASAKGQQPADVTGTALPRVGPVRPTGQDWNHTPQKTDHPSALLRDPPEPGSPRISSLRPQGLSNPSTLSAQPQLSRSHSSGSVLPLGELEGRRSTRDRRSPAEPEGGPASEGAARPLPRFNSVPLTDTGHERQSEGSFSPQLQESVFHLLVPSVILVLLAVGGLLFYRWRRRSHQEPQRADSPLEQPEGSPLTQDDRQVELPV

SEQ ID NO: 3547 - protein, 319 aa, Homo sapiens
LGPEWGARRGGATRRGWRRDQKPLPQAEPTSAGTRAQGRGGGGGDCSGWTMAASAGAGAVIAAPDSRRWLWSVLAAALGLLTAGVSALEVYTPKEIFVANGTQGKLTCKFKSTSTTGGLTSVSWSFQPEGADTTVSFFHYSQGQVYLGNYPPFKDRISWAGDLDKKDASINIENMQFIHNGTYICDVKNPPDIVVQPGHIRLYVVEKENLPVFPVWVVVGIVTAVVLGLTLLISMILAVLYRRKNSKRDYTGCSTSESLSPVKQAPRKSPSDTEGLVKSLPSGSHQGPVIYAQLDHSGGHHSDKINKSESVVYADIRKN

SEQ ID NO: 3548 - protein, 1111 aa, Homo sapiens
LPDARGSRNASRRGGFGRGMGAAGLLGVFLALVAPGVLGISCGSPPPILNGRISYYSTPIAVGTVIRYSCSGTFRLIGEKSLLCITKDKVDGTWDKPAPKCEYFNKYSSCPEPIVPGGYKIRGSTPYRHGDSVTFACKTNFSMNGNKSVWCQANNMWGPTRLPTCVSVFPLECPALPMIHNGHHTSENVGSIAPGLSVTYSCESGYLLVGEKIINCLSSGKWSAVPPTCEEARCKSLGRFPNGKVKEPPILRVGVTANFFCDEGYRLQGPPSSRCVIAGQGVAWTKMPVCEEIFCPSPPPILNGRHIGNSLANVSYGSIVTYTCDPDPEEGVNFILIGESTLRCTVDSQKTGTWSGPAPRCELSTSAVQCPHPQILRGRMVSGQKDRYTYNDTVIFACMFGFTLKGSKQIRCNAQGTWEPSAPVCEKECQAPPNILNGQKEDRHMVRFDPGTSIKYSCNPGYVLVGEESIQCTSEGVWTPPVPQCKVAACEATGRQLLTKPQHQFVRPDVNSSCGEGYKLSGSVYQECQGTIPWFMEIRLCKEITCPPPPVIYNGAHTGSSLEDFPYGTTVTYTCNPGPERGVEFSLIGESTIRCTSNDQERGTWSGPAPLCKLSLLAVQCSHVHIANGYKISGKEAPYFYNDTVTFKCYSGFTLKGSSQIRCKADNTWDPEIPVCEKGCQSPPGLHHGRHTGGNTVFFVSGMTVDYTCDPGYLLVGNKSIHCMPSGNWSPSAPRCEETCQHVRQSLQELPAGSRVELVNTSCQDGYQLTGHAYQMCQDAENGIWFKKIPLCKVIHCHPPPVIVNGKHTGMMAENFLYGNEVSYECDQGFYLLGEKKLQCRSDSKGHGSWSGPSPQCLRSPPVTRCPNPEVKHGYKLNKTHSAYSHNDIVYVDCNPGFIMNGSRVIRCHTDNTWVPGVPTCIKKAFIGCPPPPKTPNGNHTGGNIARFSPGMSILYSCDQGYLLVGEALLLCTHEGTWSQPAPHCKEVNCSSPADMDGIQKGLEPRKMYQYGAVVTLECEDGYMLEGSPQSQCQSDHQWNPPLAVCRSRSLAPVLCGIAAGLILLTFLIVITLYVISKHRARNYYTDTSQKEAFHLEAREVYSVDPYNPAS

SEQ ID NO: 3549 - protein, 185 aa, Homo sapiens
VKMERVQPLEENVGNAARPRFERNKLLLVASVIQGLGLLLCFTYICLHFSALQVSHRYPRIQSIKVQFTEYKKEKGFILTSQKEDEIMKVQNNSVIINCDGFYLISLKGYFSQEVNISLHYQKDEEPLFQLKKVRSVNSLMVASLTYKDKVYLNVTTDNTSLDDFHVNGGELILIHQNPGEFCVL

SEQ ID NO: 3550 - protein, 1034 aa, Homo sapiens
LQRPWRVPWLPWTILLVSTAAASQNQERLCAFKDPYQQDLGIGESRISHENGTILCSKGSTCYGLWEKSKGDINLVKQGCWSHIGDPQECHYEECVVTTTPPSIQNGTYRFCCCSTDLCNVNFTENFPPPDTTPLSPPHSFNRDETIIIALASVSVLAVLIVALCFGYRMLTGDRKQGLHSMNMMEAAASEPSLDLDNLKLLELIGRGRYGAVYKGSLDERPVAVKVFSFANRQNFINEKNIYRVPLMEHDNIARFIVGDERVTADGRMEYLLVMEYYPNGSLCKYLSLHTSDWVSSCRLAHSVTRGLAYLHTELPRGDHYKPAISHRDLNSRNVLVKNDGTCVISDFGLSMRLTGNRLVRPGEEDNAAISEVGTIRYMAPEVLEGAVNLRDCESALKQVDMYALGLIYWEIFMRCTDLFPGESVPEYQMAFQTEVGNHPTFEDMQVLVSREKQRPKFPEAWKENSLAVRSLKETIEDCWDQDAEARLTAQCAEERMAELMMIWERNKSVSPTVNPMSTAMQNERNLSHNRRVPKIGPYPDYSSSSYIEDSIHHTDSIVKNISSEHSMSSTPLTIGEKNRNSINYERQQAQARIPSPETSVTSLSTNTTTTNTTGLTPSTGMTTISEMPYPDETNLHTTNVAQSIGPTPVCLQLTEEDLETNKLDPKEVDKNLKESSDENLMEHSLKQFSGPDPLSSTSSSLLYPLIKLAVEATGQQDFTQTANGQACLIPDVLPTQIYPLPKQQNLPKRPTSLPLNTKNSTKEPRLKFGSKHKSNLKQVETGVAKMNTINAAEPHVVTVTMNGVAGRNHSVNSHAATTQYANGTVLSGQTTNIVTHRAQEMLQNQFIGEDTRLNINSSPDEHEPLLRREQQAGHDEGVLDRLVDRRERPLEGGRTNSNNNNSNPCSEQDVLAQGVPSTAADPGPSKPRRAQRPNSLDLSATNVLDGSSIQIGESTQDGKSGSGEKIKKRVKTPYSLKRWRPSTWVISTESLDCEVNNNGSNRAVHSKSSTAVYLAEGGTATTMVSKDIGMNCL

SEQ ID NO: 3551 - protein, 35 aa, Homo sapiens
VCVLISLISGMFFCLMNAILNAVLERGVGVRVYSI

SEQ ID NO: 3552 - protein, 1733 aa, Homo sapiens
RTRPEGLRQLRMRTGWATPRRPAGLLMLLFWFFDLAEPSGRAANDPFTIVHGNTGKCIKPVYGWIVADDCDETEDKLWKWVSQHRLFHLHSQKCLGLDITKSVNELRMFSCDSSAMLWWKCEHHSLYGAARYRLALKDGHGTAISNASDVWKKGGSEESLCDQPYHEIYTRDGNSYGRPCEFPFLIDGTWHHDCILDEDHSGPWCATTLNYEYDRKWGICLKPENGCEDNWEKNEQFGSCYQFNTQTALSWKEAYVSCQNQGADLLSINSAAELTYLKEKEGIAKIFWIGLNQLYSARGWEWSDHKPLNFLNWDPDRPSAPTIGGSSCARMDAESGLWQSFSCEAQLPYVCRKPLNNTVELTDVWTYSDTRCDAGWLPNNGFCYLLVNESNSWDKAHAKCKAFSSDLISIHSLADVEVVVTKLHNEDIKEEVWIGLKNINIPTLFQWSDGTEVTLTYWDENEPNVPYNKTPNCVSYLGELGQWKVQSCEEKLKYVCKRKGEKLNDASSDKMCPPDEGWKRHGETCYKIYEDEVPFGTNCNLTITSRFEQEYLNDLMKKYDKSLRKYFWTGLRDVDSCGEYNWATVGGRRRAVTFSNWNFLEPASPGGCVAMSTGKSVGKWEVKDCRSFKALSICKKMSGPLGPEEASPKPDDPCPEGWQSFPASLSCYKVFHAERIVRKRNWEEAERFCQALGAHLSSFSHVDEIKEFLHFLTDQFSGQHWLWIGLNKRSPDLQGSWQWSDRTPVSTIIMPNEFQQDYDIRDCAAVKVFHRPWRRGWHFYDDREFIYLRPFACDTKLEWVCQIPKGRTPKTPDWYNPDRAGIHGPPLIIEGSEYWFVADLHLNYEEAVLYCASNHSFLATITSFVGLKAIKNKIANISGDGQKWWIRISEWPIDDHFTYSRYPWHRFPVTFGEECLYMSAKTWLIDLGKPTDCSTKLPFICEKYNVSSLEKYSPDSAAKVQCSEQWIPFQNKCFLKIKPVSLTFSQASDTCHSYGGTLPSVLSQIEQDFITSLLPDMEATLWIGLRWTAYEKINKWTDNRELTYSNFHPLLVSGRLRIPENFFEEESRYHCALILNLQKSPFTGTWNFTSCSERHFVSLCQKYSEVKSRQTLQNASETVKYLNNLYKIIPKTLTWHSAKRECLKSNMQLVSITDPYQQAFLSVQALLHNSSLWIGLFSQDDELNFGWSDGKRLHFSRWAETNGQLEDCVVLDTDGFWKTVDCNDNQPGAICYYSGNETEKEVKPVDSVKCPSPVLNTPWIPFQNCCYNFIITKNRHMATTQDEVHTKCQKLNPKSHILSIRDEKENNFVLEQLLYFNYMASWVMLGITYRNKSLMWFDKTPLSYTHWRAGRPTIKNEKFLAGLSTDGFWDIQTFKVIEEAVYFHQHSILACKIEMVDYKEEYNTTLPQFMPYEDGIYSVIQKKVTWYEALNMCSQSGGHLASVHNQNGQLFLEDIVKRDGFPLWVGLSSHDGSESSFEWSDGSTFDYIPWKGQTSPGNCVLLDPKGTWKHEKCNSVKDGAICYKPTKSKKLSRLTYSSRCPAAKENGSRWIQYKGHCYKSDQALHSFSEAKKLCSKHDHSATIVSIKDEDENKFVSRLMRENNNITMRVWLGLSQHSVDQSWSWLDGSEVTFVKWENKSKSGVGRCSMLIASNETWKKVECEHGFGRVVCKVPLGPDYTAIAIIVATLSILVLMGGLIWFLFQRHRLHLAGFSSVRYAQGVNEDEIMLPSFHD

SEQ ID NO: 3553 - protein, 700 aa, Homo sapiens
LREPAALEMELLPLWLCLGFHFLTVGWRNRSGTATAASQGVCKLVGGAADCRGQSLASVPSSLPPHARMLTLDANPLKTLWNHSLQPYPLLESLSLHSCHLERISRGAFQEQGHLRSLVLGDNCLSENYEETAAALHALPGLRRLDLSGNALTEDMAALMLQNLSSLRSVSLAGNTIMRLDDSVFEGLERLRELDLQRNYIFEIEGGAFDGLAELRHLNLAFNNLPCIVDFGLTRLRVLNVSYNVLEWFLATGGEAAFELETLDLSHNQLLFFPLLPQYSKLRTLLLRDNNMGFYRDLYNTSSPREMVAQFLLVDGNVTNITTVSLWEEFSSSDLADLRFLDMSQNQFQYLPDGFLRKMPSLSHLNLHQNCLMTLHIREHEPPGALTELDLSHNQLSELHLAPGLASCLGSLRLFNLSSNQLLGVPPGLFANARNITTLDMSHNQISLCPLPAASDRVGPPSCVDFRNMASLRSLSLEGCGLGALPDCPFQGTSLTYLDLSSNWGVLNGSLAPLQDVAPMLQVLSLRNMGLHSSFMALDFSGFGNLRDLDLSGNCLTTFPRFGGSLALETLDLRRNSLTALPQKAVSEQLSRGLRTIYLSQNPYDCCGVDGWGALQHGQTVADWAMVTCNLSSKIIRVTELPGGVPRDCKWERLDLGLLYLVLILPSCLTLLVACTVIVLTFKKPLLQVIKSRCHWSSVY

SEQ ID NO: 3554 - protein, 657 aa, Homo sapiens
RFLSKESQEDWGMERQSRVMSEKDEYQFQHQGAVELLVFNFLLILTILTIWLFKNHRFRFLHETGGAMVYGLIMGLILRYATAPTDIESGTVYDCVKLTFSPSTLLVNITDQVYEYKYKREISQHNINPHQGNAILEKMTFDPEIFFNVLLPPIIFHAGYSLKKRHFFQNLGSILTYAFLGTAISCIVIGLIMYGFVKAMIHAGQLKNGDFHFTDCLFFGSLMSATDPVTVLAIFHELHVDPDLYTLLFGESVLNDAVAIVLTYSISIYSPKENPNAFDAAAFFQSVGNFLGIFAGSFAMGSAYAIITALLTKFTKLCEFPMLETGLFFLLSWSAFLSAEAAGLTGIVAVLFCGVTQAHYTYNNLSSDSKIRTKQLFEFMNFLAENVIFCYMGLALFTFQNHIFNALFILGAFLAIFVARACNIYPLSFLLNLGRKQKIPWNFQHMMMFSGLRGAIAFALAIRNTESQPKQMMFTTTLLLVFFTVWVFGGGTTPMLTWLQIRVGVDLDENLKEDPSSQHQEANNLDKNMTKAESARLFRMWYSFDHKYLKPILTHSGPPLTTTLPEWCGPISRLLTSPQAYGEQLKEDDVECIVNQDELAINYQEQASSPCSPPARLGLDQKASPQTPGKENIYEGDLGLGGYELKLEQTLGQSQLN

SEQ ID NO: 3555 - protein, 152 aa, Homo sapiens
LVRRGVVLRRLSGAVGVGCGMCSAGELLRGGDGGERDEDGDALAEREAAGTGWDPGASPRRRGQRPKESEQDVEDSQNHTGEPVGDDYKKMGTLFGELNKNLINMGFTRMYFGERIVEPVIVIFFWVMLWFLGLQALGLVAVLCLVIIYVQQ

SEQ ID NO: 3556 - protein, 187 aa, Homo sapiens
RRADMQAPRAALVFALVIALVPVGRGNYEELENSGDTTVESERPNKVTIPSTFAAVTIKETLNANINSTNFAPDENQLEFILMVLIPLILLVLLLLSVVFLATYYKRKRTKQEPSSQGSQSALQTYELGSENVKVPIFEEDTPSVMEIEMEELDKWMNSMNRNADFECLPTLKEEKESNHNPSDSES

SEQ ID NO: 3557 - protein, 569 aa, Homo sapiens
VCQKPQAVANPVGQADWKSGKVLAQSSVTLPSVTMKLWVSALLMAWFGVLSCVQAEFFTSIGHMTDLIYAEKELVQSLKEYILVEEAKLSKIKSWANKMEALTSKSAADAEGYLAHPVNAYKLVKRLNTDWPALEDLVLQDSAAGFIANLSVQRQFFPTDEDEIGAAKALMRLQDTYRLDPGTISRGELPGTKYQAMLSVDDCFGMGRSAYNEGDYYHTVLWMEQVLKQLDAGEEATTTKSQVLDYLSYAVFQLGDLHRALELTRRLLSLDPSHERAGGNLRYFEQLLEEEREKTLTNQTEAELATPEGIYERPVDYLPERDVYESLCRGEGVKLTPRRQKRLFCRYHHGNRAPQLLIAPFKEEDEWDSPHIVRYYDVMSDEEIERIKEIAKPKLARATVRDPKTGVLTVASYRVSKSSWLEEDDDPVVARVNRRMQHITGLTVKTAELLQVANYGVGGQYEPHFDFSRNDERDTFKHLGTGNRVATFLNYMSDVEAGGATVFPDLGAAIWPKKGTAVFWYNLLRSGEGDYRTRHAACPVLVGCKWVSNKWFHERGQEFLRPCGSTEVD

SEQ ID NO: 3558 - protein, 731 aa, Homo sapiens
IRRGEAELAKLAPSGVMVPGARGGGALARAAGRGLLALLLAVSAPLRLQAEELGDGCGHLVTYQDSGTMTSKNYPGTYPNHTVCEKTITVPKGKRLILRLGDLDIESQTCASDYLLFTSSSDQYGPYCGSMTVPKELLLNTSEVTVRFESGSHISGRGFLLTYASSDHPDLITCLERASHYLKTEYSKFCPAGCRDVAGDISGNMVDGYRDTSLLCKAAIHAGIIADELGGQISVLQRKGISRYEGILANGVLSRDGSLSDKRFLFTSNGCSRSLSFEPDGQIRASSSWQSVNESGDQVHWSPGQARLQDQGPSWASGDSSNNHKPREWLEIDLGEKKKITGIRTTGSTQSNFNFYVKSFVMNFKNNNSKWKTYKGIVNNEEKVFQGNSNFRDPVQNNFIPPIVARYVRVVPQTWHQRIALKVELIGCQITQGNDSLVWRKTSQSTSVSTKKEDETITRPIPSEETSTGINITTVAIPLVLLVVLVFAGMGIFAAFRKKKKKGSPYGSAEAQKTDCWKQIKYPFARHQSAEFTISYDNEKEMTQKLDLITSDMADYQQPLMIGTGTVTRKGSTFRPMDTDAEEAGVSTDAGGHYDCPQRAGRHEYALPLAPPEPEYATPIVERHVLRAHTFSAQSGYRVPGPQPGHKHSLSSGGFSPVAGVGAQDGDYQRPHSAQPADRGYDRPKAVSALATESGHPDSQKPPTHPGTSDSYSAPRDCLTPLNQTAMTALL

SEQ ID NO: 3559 - protein, 196 aa, Homo sapiens
LRQAPEGGSCQPGKTENTITMTTSHQPQDRYKAVWLIFFMLGLGTLLPWNFFMTATQYFTNRLDMSQNVSLVTAELSKDAQASAAPAAPLPERNSLSAIFNNVMTLCAMLPLLLFTYLNSFLHQRIPQSVRILGSLVAILLVFLITAILVKVQLDALPFFVITMIKIVLINCKLGQEGAYGRRHAQLPPLFFQTQR

SEQ ID NO: 3560 - protein, 509 aa, Homo sapiens
LHRLPHFDLSWEATSSQFRPEDTDYQQALLLLGAAALACLALDLLFLLFYSFWLCCRRRKSEEHLDADCCCTAWCVIIATLVCSAGIAVGFYGNGETSDGIHRATYSLRHANRTVAGVQDRVWDTAVGLNHTAEPSLQTLERQLAGRPEPLRAVQRLQGLLETLLGYTAAIPFWRNTAVSLEVLAEQVDLYDWYRWLGYLGLLLLDVIICLLVLVGLIRSSKGILVGVCLLGVLALVISWGALGLELAVSVGSSDFCVDPDAYVTKMVEEYSVLSGDILQYYLACSPRAANPFQQKLSGSHKALVEMQDVVAELLRTVPWEQPATKDPLLRVQEVLNGTEVNLQHLTALVDCRSLHLDYVQALTGFCYDGVEGLIYLALFSFVTALMFSSIVCSVPHTWQQKRGPDEDGEEEAAPGPRQAHDSLYRVHMPSLYSCGSSYGSETSIPAAAHTVSNAPVTEYMSQNANFQNPRCENTPLIGRESPPPSYTSSMRAKYLATSQPRPDSSGSH

SEQ ID NO: 3561 - protein, 311 aa, Homo sapiens
VAAGSGPGRNSSRAIHWSLPRALVPATGTRASGSQKRQRPPKGQEALWSRPHSRHSAERAGGSHSDPGRLSAPLGLGLPSGRGRLTAMPGRAPLRTVPGALGAWLLGGLWAWTLCGLCSLGAVGAPRPCQAPQQWEGRQVMYQQSSGRNSRALLSYDGLNQRVRVLDERKALIPCKRLFEYILLYKDGVMFQIDQATKQCSKMTLTQPWDPLDIPQNSTFEDQYSIGGPQEQITVQEWSDRKSARSYETWIGIYTVKDCYPVQETFTINYSVILSTRFFDIQLGIKDPSVFTPPSTCQMAQLEKMSEDCSW

SEQ ID NO: 3562 - protein, 764 aa, Homo sapiens
VPGTVPAAEGTPLCPVLGTRDGRHAPRSIVSLIWVPGRCGRRAGSARVTPAAGAPGPAGAGRGVPGRAAAMKHLKRWWSAGGGLLHLTLLLSLAGLRVDLDLYLLLPPPTLLQDELLFLGGPASSAYALSPFSASGGWGRAGHLHPKGRELDPAAPPEGQLLREVRALGVPFVPRTSVDAWLVHSVAAGSADEAHGLLGAAAASSTGGAGASVDGGSQAVQGGGGDPRAARSGPLDAGEEEKAPAEPTAQVPDAGGCASEENGVLREKHEAVDHSSQHEENEERVSAQKENSLQQNDDDENKIAEKPDWEAEKTTESRNERHLNGTDTSFSLEDLFQLLSSQPENSLEGISLGDIPLPGSISDGMNSSAHYHVNFSQAISQDVNLHEAILLCPNNTFRRDPTARTSQSQEPFLQLNSHTTNPEQTLPGTNLTGFLSPVDNHMRNLTSQDLLYDLDINIFDEINLMSLATEDNFDPIDVSQLFDEPDSDSGLSLDSSHNNTSVIKSNSSHSVCDEGAIGYCTDHESSSHHDLEGAVGGYYPEPSKLCHLDQSDSDFHGDLTFQHVFHNHTYHLQPTAPESTSEPFPWPGKSQKIRSRYLEDTDRNLSRDEQRAKALHIPFSVDEIVGMPVDSFNSMLSRYYLTDLQVSLIRDIRRRGKNKVAAQNCRKRKLDIILNLEDDVCNLQAKKETLKREQAQCNKAINIMKQKLHDLYHDIFSRLRDDQGRPVNPNHYALQCTHDGSILIVPKELVASGHKKETQKGKRK

SEQ ID NO: 3563 - protein, 276 aa, Homo sapiens
LASAWAGVRAQDGAAVVRNPGLSASQEATPGANMSSGTELLWPGAALLVLLGVAASLCVRCSRPGAKRSEKIYQQRSLREDQQSFTGSRTYSLVGQAWPGPLADMAPTRKDKLLQFYPSLEDPASSRYQNFSKGSRHGSEEAYIDPIAMEYYNWGRFSKPPEDDDANSYENVLICKQKTTETGAQQEGIGGLCRGDLSLSLALKTGPTSGLCPSASPEEDEESEDYQNSASIHQWRESRKVMGQLQREASPGPVGSPDEEDGEPDYVNGEVAATEA

SEQ ID NO: 3564 - protein, 351 aa, Homo sapiens
LGSCGAPGVAMNIVVEFFVVTFKVLWAFVLAAARWLVRPKEKSVAGQVCLITGAGSGLGRLFALEFARRRALLVLWDINTQSNEETAGMVRHIYRDLEAADAAALQAGNGEEEILPHCNLQVFTYTCDVGKRENVYLTAERVRKEVGEVSVLVNNAGVVSGHHLLECPDELIERTMMVNCHAHFWTTKAFLPTMLEINHGHIVTVASSLGLFSTAGVEDYCASKFGVVGFHESLSHELKAAEKDGIKTTLVCPYLVDTGMFRGCRIRKEIEPFLPPLKPDYCVKQAMKAILTDQPMICTPRLMYIVTFMKSILPFEAVVCMYRFLGADKCMYPFIAQRKQATNNNEAKNGI

SEQ ID NO: 3565 - protein, 291 aa, Homo sapiens
KMRIFAVFIFMTYWHLLNAFTVTVPKDLYVVEYGSNMTIECKFPVEKQLDLAALIVYWEMEDKNIIQFVHGEEDLKVQHSSYRQRARLLKDQLSLGNAALQITDVKLQDAGVYRCMISYGGADYKRITVKVNAPYNKINQRILVVDPVTSEHELTCQAEGYPKAEVIWTSSDHQVLSGKTTTTNSKREEKLFNVTSTLRINTTTNEIFYCTFRRLDPEENHTAELVIPELPLAHPPNERTHLVILGAILLCLGVALTFIFRLRKGRMMDVKKCGIQDTNSKKQSDTHLEET

SEQ ID NO: 3566 - protein, 135 aa, Homo sapiens [sequence omitted]

SEQ ID NO: 3567 - protein, 201 aa, Homo sapiens
IKMSSENCFVAENSSLHPESGQENDATSPHFSTRHEGSFQVPVLCAVMNVVFITILIIALIALSVGQYNCPGQYTFSMPSDSHVSSCSEDWVGYQRKCYFISTVKRSWTSAQNACSEHGATLAVIDSEKDMNFLKRYAGREEHWVGLKKEPGHPWKWSNGKEFNNWFNVTGSDKCVFLKNTEVSSMECEKNLYWICNKPYK

SEQ ID NO: 3568 - protein, 490 aa, Homo sapiens
LCAVLGAVMIVMVPSLIKQQVLKNVRIDPSSLSFNMWKEIPIPFYLSVYFFDVMNPSEILKGEKPQVRERGPYVYREFRHKSNITFNNNDTVSFLEYRTFQFQPSKSHGSESDYIVMPNILVLGAAVMMENKPMTLKLIMTLAFTTLGERAFMNRTVGEIMWGYKDPLVNLINKYFPGMFPFKDKFGLFAELNNSDSGLFTVFTGVQNISRIHLVDKWNGLSKVDFWHSDQCNMINGTSGQMWPPFMTPESSLEFYSPEACRSMKLMYKESGVFEGIPTYRFVAPKTLFANGSIYPPNEGFCPCLESGIQNVSTCRFSAPLFLSHPHFLNADPVLAEAVTGLHPNQEAHSLFLDIHPVTGIPMNCSVKLQLSLYMKSVAGIGQTGKIEPVVLPLLWFAESGAMEGETLHTFYTQLVLMPKVMHYAQYVLLALGCVLLLVPVICQIRSQEKCYLFWSSSKKGSKDKEAIQAYSESLMTSAPKGSVLQEAKL

SEQ ID NO: 3569 - protein, 48 aa, Homo sapiens
LVRIVMALCSALMTIFTIKMGTGIMLINLVMPMTGTRTEVCFGLSVPG

SEQ ID NO: 3570 - protein, 205 aa, Homo sapiens
TPTPPRCKAGFKRTSLRFLPAPHHRTREEEAGEKQNFFPLSCPFLRTCSEAEEPVLEEMVMGLGVLLLVFVLGLGLTPPTLAQDNSRYTHFLTQHYDAKPQGRDDRYCESIMRRRGLTSPCKDINTFIHGNKRSIKAICENKNGNPHRENLRISKSSFQVTTCKLHGGSPWPPCQYRATAGFRNVVVACENGLPVHLDQSIFRRP

SEQ ID NO: 3571 - protein, 62 aa, Homo sapiens
LFSFILLRATDSTEMETIRRLSIHLNKYLALTPPRRNSLMLWLIPWSMTSFMAKMVFFLHMV

SEQ ID NO: 3572 - protein, 72 aa, Homo sapiens
VPWHLPMGWLCSGLLFPVSCLVLLQVASSGLFRMPCGERKRVEARRSGGRSGVEEMRGSGSLWEVDLRTDWN

SEQ ID NO: 3573 - protein, 1412 aa, Homo sapiens
RRAWSPSQNSSPSRSRSQGGGCRDRQPCMMHLRLFCILLAAVSGAEGWGYYGCDEELVGPLYARSLGASSYYSLLTAPRFARLHGISGWSPRIGDPNPWLQIDLMKKHRIRAVATQGSFNSWDWVTRYMLLYGDRVDSWTPFYQRGHNSTFFGNVNESAVVRHDLHFHFTARYIRIVPLAWNPRGKIGLRLGLYGCPYKADILYFDGDDAISYRFPRGVSRSLWDVFAFSFKTEEKDGLLLHAEGAQGDYVTLELEGAHLLLHMSLGSSPIQPRPGHTTVSAGGVLNDQHWHYVRVDRFGRDVNFTLDGYVQRFILNGDFERLNLDTEMFIGGLVGAARKNLAYRHNFRGCIENVIFNRVNIADLAVRRHSRITFEGKVAFRCLDPVPHPINFGGPHNFVQVPGFPRRGRLAVSFRFRTWDLTGLLLFSRLGDGLGHVELTLSEGQVNVSIAQSGRKKLQFAAGYRLNDGFWHEVNFVAQENHAVISIDDVEGAEVRVSYPLLIRTGTSYFFGGCPKPASRWDCHSNQTAFHGCMELLKVDGQLVNLTLVEGRRLGFYAEVLFDTCGITDRCSPNMCEHDGRCYQSWDDFICYCELTGYKGETCHTPLYKESCEAYRLSGKTSGNFTIDPDGSGPLKPFVVYCDIRENRAWTVVRHDRLWTTRVTGSSMERPFLGAIQYWNASWEEVSALANASQHCEQWIEFSCYNSRLLNTAGGYPYSFWIGRNEEQHFYWGGSQPGIQRCACGLDRSCVDPALYCNCDADQPQWRTDKGLLTFVDHLPVTQVVIGDTNRSTSEAQFFLRPLRCYGDRNSWNTISFHTGAALRFPPIRANHSLDVSFYFRTSAPSGVFLENMGGPYCQWRRPYVRVELNTSRDVVFAFDVGNGDENLTVHSDDFEFNDDEWHLVRAEINVKQARLRVDHRPWVLRPMPLQTYIWMEYDQPLYVGSAELKRRPFVGCLRAMRLNGVTLNLEGRANASEGTSPNCTGHCAHPRLPCFHGGRCVERYSYYTCDCDLTAFDGPYCNHDIGGFFEPGTWMRYNLQSALRSAAREFSHMLSRPVPGYEPGYIPGYDTPGYVPGYHGPGYRLPDYPRPGRPVPGYRGPVYNVTGEEVSFSFSTSSAPAVLLYVSSFVRDYMAVLIKDDGTLQLRYQLGTSPYVYQLTTRPVTDGQPHSINITRVYRNLFIQVDYFPLTEQKFSLLVDSQLDSPKALYLGRVMETGVIDPEIQRYNTPGFSGCLSGVRFNNVAPLKTHFRTPRPMTAELAEALRVQGELSESNCGAMPRLVSEVPPELDPWYLPPDFPYYHDEGWVAILLGFLVAFLLLGLVGMLVLFYLQNHRYKGSYHTNEPKAAHEYHPGSKPPLPTSGPAQVPTPTAAPNQAPASAPAPAPTPAPAPGPRDQNLPQILEESRSE

SEQ ID NO: 3574 - protein, 307 aa, Homo sapiens
LAGNGLVLATHLAARRAARSPTSAHLLQLALADLLLALTLPFAAAGALQGWSLGSATCRTISGLYSASFHAGFLFLACISADRYVAIARALPAGPRPSTPGRAHLVSVIVWLLSLLLALPALLFSQDGQREGQRRCRLIFPEGLTQTVKGASAVAQVALGFALPLGVMVACYALLGRTLLAARGPERRRALRVVVALVAAFVVLQLPYSLALLLDTADLLAARERSCPASKRKDVALLVTSGLALARCGLNPVLYAFLGLRFRQDLRRLLRGGSCPSGPQPRRGCPRRPRLSSCSAPTETHSLSWDN

SEQ ID NO: 3575 - protein, 466 aa, Homo sapiens
LGGAARVGQPGLGGSPGTQLCPRRLSTPSPMQPPPDEARRDMAGDTQWSRPECQAWTGTLLLGTCLLYCARSSMPICTVSMSQDFGWNKKEAGIVLSSFFWGYCLTQVVGGHLGDRIGGEKVILLSASAWGSITAVTPLLAHLSSAHLAFMTFSRILMGLLQGVYFPALTSLLSQKVRESERAFTYSIVGAGSQFGTLLTGAVGSLLLEWYGWQSIFYFSGGLTLLWVWYVYRYLLSEKDLILALGVLAQSRPVSRHNRVPWRRLFRKPAVWAAVVSQLSAACSFFILLSWLPTFFEETFPDAKGWIFNVVPWLVAIPASLFSGFLSDHLINQGYRAITVRKLMQGMGLGLSSVFALCLGHTSSFCESVVFASASIGLQTFNHSGISVNIQDLAPSCAGFLFGVANTAGALAGVVGVCLGGYLMETTGSWTCLFNLVAIISNLGLCTFLVFGQAQRVDLSSTHEDL

SEQ ID NO: 3576 - protein, 336 aa, Homo sapiens
LAAWIAAVAATAGPEEAALPPEQSRVQPMTASNWTLVMEGEWMLKFYAPWCPSCQQTDSEWEAFAKNGEILQISVGKVDVIQEPGLSGRFFVTTLPAFFHAKDGIFRRYRGPGIFEDLQNYILEKKWQSVEPLTGWKSPASLTMSGMAGLFSISGKIWHLHNYFTVTLGIPAWCSYVFFVIATLVFGLFMGLVLVVISECFYVPLPRHLSERSEQNRRSEEAHRAEQLQDAEEEKDDSNEEENKDSLVDDEEEKEDLGDEDEAEEEEEEDNLAAGVDEERSEANDQGPPGEDGVTREEVEPEEAEEGISEQPCPADTEVVEDSLRQRKSQHADKGL

SEQ ID NO: 3577 - protein, 360 aa, Homo sapiens
VSGSADPERGPGRDLSRRRAPGAMRPTLLWSLLLLLGVFAAAAAAPPDPLSQLPAPQHPKIRLYNAEQVLSWEPVALSNSTRPVVYQVQFKYTDSKWFTADIMSIGVNCTQITATECDFTAASPSAGFPMDFNVTLRLRAELGALHSAWVTMPWFQHYRNVTVGPPENIEVTPGEGSLIIRFSSPFDIADTSTAFFCYYVHYWEKGGIQQVKGPFRSNSISLDNLKPSRVYCLQVQAQLLWNKSNIFRVGHLSNISCYETMADASTELQQVILISVGTFSLLSVLAGACFFLVLKYRGLIKYWFHTPPSIPLQIEEYLKDPTQPILEALDKDSSPKDDVWDSVSIISFPEKEQEDVLQTL

SEQ ID NO: 3578 - protein, 608 aa, Homo sapiens
RHSVTFVPSGAARGLSRMVPSSPAVEKQVPVEPGPDPELRSWRHLVCYLCFYGFMAQIRPGESFITPYLLGPDKNFTREQVTNEITPVLSYSYLAVLVPVFLLTDYLRYTPVLLLQGLSFVSVWLLLLLGHSVAHMQLMELFYSVTMAARIAYSSYIFSLVRPARYQRVAGYSRAAVLLGVFTSSVLGQLLVTVGRVSFSTLNYISLAFLTFSVVLALFLKRPKRSLFFNRDDRGRCETSASELERMNPGPGGKLGHALRVACGDSVLARMLRELGDSLRRPQLRLWSLWWVFNSAGYYLVVYYVHILWNEVDPTTNSARVYNGAADAASTLLGAITSFAAGFVKIRWARWSKLLIAGVTATQAGLVFLLAHTRHPSSIWLCYAAFVLFRGSYQFLVPIATFQIASSLSKELCALVFGVNTFFATIVKTIITFIVSDVRGLGLPVRKQFQLYSVYFLILSIIYFLGAMLDGLRHCQRGHHPRQPPAQGLRSAAEEKAAQALSVQDKGLGGLQPAQSPPLSPEDSLGAVGPASLEQRQSDPYLAQAPAPQAAEFLSPVTTPSPCTLCSAQASGPEAADETCPQLAVHPPGVSKLGLQCLPSDGVQNVNQ

SEQ ID NO: 3579 - protein, 593 aa, Homo sapiens
RWAHAVVMSRESDVEAQQSHGSSACSQPHGSVTQSQGSSSQSQGISSSSTSTMPNSSQSSHSSSGTLSSLETVSTQELYSIPEDQEPEDQEPEEPTPAPWARLWALQDGFANLETESGHVTQSDLELLLSSDPPASASQSAGIRGVRHHPRPVCSLKCVNDNYWFGRDKSCEYCFDEPLLKRTDKYRTYSKKHFRIFREVGPKNSYIAYIEDHSGNGTFVNTELVGKGKRRPLNNNSEIALSLSRNKVFVFFDLTVDDQSVYPKALRDEYIMSKTLGSGACGEVKLAFERKTCKKVAIKIISKRKFAIGSAREADPALNVETEIEILKKLNHPCIIKIKNFFDAEDYYIVLELMEGGELFDKVVGNKRLKEATCKLYFYQMLLAVQYLHENGIIHRDLKPENVLLSSQEEDCLIKITDFGHSKILGETSLMRTLCGTPTYLAPEVLVSVGTAGYNRAVDCWSLGVILFICLSGYPPFSEHRTQVSLKDQITSGKYNFIPEVWAEVSEKALDLVKKLLVVDPKARFTTEEALRHPWLQDEDMKRKFQDLLSEENESTALPQVLAQPSTSRKRPREGEAEGAETTKRPAVCAAVL

SEQ ID NO: 3580 - protein, 282 aa, Homo sapiens
RGPRLNTGRSITCKTKEARMLLAWVQAFLVSNMLLAEAYGSGGCFWDNGHLYREDQTSPAPGLRCLNWLDAQSGLASAPVSGAGNHSYCRNPDEDPRGPWCYVSGEAGVPEKRPCEDLRCPETTSQALPAFTTEIQEASEGPGADEVQVFAPANALPARSEAAAVQPVIGISQRVRMNSKEKKDLGTLGYVLGITMMVIIIAIGAGIILGYSYKRGKDLKEQHDQKVCEREMQRITLPLSAFTNPTCEIVDEKTVVVHTSQTPVDPQEGTTPLMGQAGTPGA

SEQ ID NO: 3581 - protein, 62 aa, Homo sapiens
MHYYRYSNAKVSCWYKYLLFSYNIIFWLAGVVFLGVGLWAWSEKCCPAFSVSFRVCCPTSPK

SEQ ID NO: 3582 - protein, 966 aa, Homo sapiens
LLGVFLALVAPGVLGISCGSPPPILNGRISYYSTPIAVGTVIRYSCSGTFRLIGEKSLLCITKDKVDGTWDKPAPKCEYFNKYSSCPEPIVPGGYKIRGSTPYRHGDSVTFACKTNFSMNGNKSVWCQANNMWGPTRLPTCVSVFPLECPALPMIHNGHHTSENVGSIAPGLSVTYSCESGYLLVGEKIINCLSSGKWSAVPPTCEEARCKSLGRFPNGKVKEPPILRVGVTANFFCDEGYRLQGPPSSRCVIAGQGVAWTKMPVCEEIFCPSPPPILNGRHIGNSLANVSYGSIVTYTCDPDPEEGVNFILIGESTLRCTVDSQKTGTWSGPAPRCELSTSAVQCPHPQILRGRMVSGQKDRYTYNDTVIFACMFGFTLKGSKQIRCNAQGTWEPSAPVCEKECQAPPNILNGQKEDRHMVRFDPGTSIKYSCNPGYVLVGEESIQCTSEGVWTPPVPQCKVAACEATGRQLLTKPQHQFVRPDVNSSCGEGYKLSGSVYQECQGTIPWFMEIRLCKEITCPPPPVIYNGAHTGSSLEDFPYGTTVTYTCNPGPERGVEFSLIGESTIRCTSNDQERGTWSGPAPLCKLSLLAVQCSHVHIANGYKISGKEAPYFYNDTVTFKCYSGFTLKGSSQIRCKADNTWDPEIPVCEKETCQHVRQSLQELPAGSRVELVNTSCQDGYQLTGHAYQMCQDAENGIWFKKIPLCKVIHCHPPPVIVNGKHTGMMAENFLYGNEVSYECDQGFYLLGEKKLQCRSDSKGHGSWSGPSPQCLRSPPVTRCPNPEVKHGYKLNKTHSAYSHNDIVYVDCNPGFIMNGSRVIRCHTDNTWVPGVPTCIKKEVNCSSPADMDGIQKGLEPRKMYQYGAVVTLECEDGYMLEGSPQSQCQSDHQWNPPLAVCRSRSLAPVLCGIAAGLILLTFLIVITLYVISKHRARNYYTDTSQKEAFHLEAREVYSVDPYNPAS

SEQ ID NO: 3583 - protein, 104 aa, Homo sapiens
MYQYGAVVTLECEDGYMLEGSPQSQCQSDHQWNPPLAVCRSRSLAPVLCGIAAGLILLTFLIVITLYVISKHRARNYYTDTSQKEAFHLEAREVYSVDPYNPAS

SEQ ID NO: 3584 - protein, 30 aa, Homo sapiens
RGKLEGVVLLSQLSCLSAMFSGRVWLGLPP

SEQ ID NO: 3585 - protein, 394 aa, Homo sapiens
IKPGSGAQTLQSSDLGLEDSGPPPVPKETVDSFLDLARNLFPSNLVVAAFRTYATDYKVVTQNSSSGNVTHEKIPIGTEIEGMNILGLVLFALVLGVALKKLGSEGEDLIRFFNSLNEATMVLVSWIMWYVPVGIMFLVGSKIVEMKDIIVLVTSLGKYIFASILGHVIHGGIVLPLIYFVFTRKNPFRFLLGLLAPFATAFATCSSSATLPSMMKCIEENNGVDKRISRFILPIGATVNMDGAAIFQCVAAVFIAQLNNVELNAGQIFTILVTATASSVGAAGVPAGGVLTIAIILEAIGLPTHDLPLILAVDWIVDRTTTVVNVEGDALGAGILHHLNQKATKKGEQELAEVKVEAIPNCKSEEETSPLVTHQNPAGPVASAPELESKESVL

SEQ ID NO: 3586 - protein, 361 aa, Homo sapiens
VMDPEETSVYLDYYYATSPNSDIRETHSHVPYTSVFLPVFYTAVFLTGVLGNLVLMGALHFKPGSRRLIDIFIINLAASDFIFLVTLPLWVDKEASLGLWRTGSFLCKGSSYMISVNMHCSVLLLTCMSVDRYLAIVWPVVSRKFRRTDCAYVVCASIWFISCLLGLPTLLSRELTLIDDKPYCAEKKATPIKLIWSLVALIFTFFVPLLSIVTCYCCIARKLCAHYQQSGKHNKKLKKSIKIIFIVVAAFLVSWLPFNTFKFLAIVSGLRQEHYLPSAILQLGMEVSGPLAFANSCVNPFIYYIFDSYIRRAIVHCLCPCLKNYDFGSSTETSDSHLTKALSTFIHAEDFARRRKRSVSL

SEQ ID NO: 3587 - protein, 115 aa, Homo sapiens
RFLSKESQEDWGMERQSRVMSEKDEYQFQHQGAVELLVFNFLLILTILTIWLFKNHRFRFLHETGGAMVYDKPPKFAMSREQMSQSCSHTAHNASLLTDAGPLSCGESRASCLFL

SEQ ID NO: 3588 - protein, 265 aa, Homo sapiens
KALRIPGDLRVATVTLMLAMLSSLLAEGRDSPEDFVFQFKGMCYFTNGTERVRLVTRYIYNREEYARFDSDVGVYRAVTPQGRPDAEYWNSQKEVLEGTRAELDTVCRHNYEVAFRGILQRRVEPTVTISPSRTEALNHHNLLVCSVTDFYPGQIKVRWFRNDQEETAGVVSTPLIRNGDWTFQILVMLEMTPQRGDVYTCHVEHPSLQSPITVEWRAQSESAQSKMLSGVGGFVLGLIFLGLGLIIRQRSQKGPQGPPPAGLLH

SEQ ID NO: 3589 - protein, 83 aa, Homo sapiens
KAPDGGWGWAVLFGCFVITGFSYAFPKAVSVFFKELIQEFGIGYSDTAWISSILLAMLYGTGEGGLTPGPLSGALLADPAGRV

SEQ ID NO: 3590 - protein, 67 aa, Homo sapiens
VPSRFLTLLAHLVVVITLFWSRDSNIQACLPLTFTPEEYDKQDIHALPAVTEMALFVTVFGLKKKPF

SEQ ID NO: 3591 - protein, 60 aa, Homo sapiens
KCMGRVWDLPGVLKVEGFRATMAQRLVRVLQICAGHVPGVSALNLLSLLRSSEGPSLEDL

SEQ ID NO: 3592 - protein, 534 aa, Homo sapiens
MHLEKLEEQLSRSHGQEVNELKTKIEKLKVELDEARLSEKQLKHQVDHQKELLSCKSEELRVMSERVQESMSSEMLALQIELTEMESMKTTLKEEVNELQYRQEQLELLITNLMRQVDRLKEEKEEREKEAVSYYNALEKARVANQDLQVQLDQALQQALDPNSKGNSLFAEVEDRRAAMERQLISMKVKYQSLKKQNVFNREQMQRMKLQIATLLQMKGSQTEFEQQERLLAMLEQKNGEIKHLLGEIRNLEKFKNLYDSMESKPSVDSGTLEDNTYYTDLLQMKLDNLNKEIESTKGELSIQRMKALFESQRALDIERKLFANERCLQLSESENMKLRAKLDELKLKYEPEETVEVPVLKKRREVLPVDITTAKDACVNNSALGGEVYRLPPQKEETQSCPNSLEDNNLQLEKSVSIYTPVVSLSPHKNLPVDMQLKKEKKCVKLIGVPADAEALSERSGNTPNSPRSVSSFPPGSQQTSPSLLSRCMNCAVCFFIYFLTIACSIIPQFHLPTFNFSRTLRKTKLIAKGKDS

SEQ ID NO: 3593 - protein, 98 aa, Homo sapiens
RVMSEKDEYQFQHQGAVELLVFNFLLILTILTIWLFKNHRFRFLHETGGAMVYDKPPKFAMSREQMSQSCSHTAHNASLLTDAGPLSCGESRASCLFL

SEQ ID NO: 3594 - protein, 62 aa, Homo sapiens
VRQVYCGLVRAPQVQTRPLSSRFVERRVYVVEDQRRDELGPSTCLTACWTALCCCCLWDMLT

SEQ ID NO: 3595 - protein, 67 aa, Homo sapiens
VEVQESEWRLTEAKGPTMGKESGWDSGRAAVAAVVGGGAAGLSVTSKVIGGFAGTALGAWLGSPPSS

SEQ ID NO: 3596 - protein, 151 aa, Homo sapiens
RQKALPRLRGVMSRFLNVLRSWLVMVSIIAMGNTLQSFRDHTFLYEKLYTGKPNLVNGLQARTFGIWTLLSSVIRCLCAIDIHNKTLYHITLWTFLLALGHFLSELFVYGTAAPTIGVLAPLMVASFSILGMLVGLRYLEVEPVSRQKKRN

SEQ ID NO: 3597 - protein, 636 aa, Homo sapiens
LRLLLLLWAAAASAQGHLRSGPRIFAVWKGHVGQDRVDFGQTEPHTVLFHEPGSSSVWVGGRGKVYLFDFPEGKNASVRTVNIGSTKGSCLDKRDCENYITLLERRSEGLLACGTNARHPSCWNLVNGTVVPLGEMRGYAPFSPDENSLVLFEGDEVYSTIRKQEYNGKIPRFRRIRGESELYTSDTVMQNPQFIKATIVHQDQAYDDKIYYFFREDNPDKNPEAPLNVSRVAQLCRGDQGGESSLSVSKWNTFLKAMLVCSDAATNKNFNRLQDVFLLPDPSGQWRDTRVYGVFSNPWNYSAVCVYSLGDIDKVFRTSSLKGYHSSLPNPRPGKCLPDQQPIPTETFQVADRHPEVAQRVEPMGPLKTPLFHSKYHYQKVAVHRMQASHGETFHVLYLTTDRGTIHKVVEPGEQEHSFAFNIMEIQPFRRAAAIQTMSLDAERRKLYVSSQWEVSQVPLDLCEVYGGGCHGCLMSRDPYCGWDQGRCISIYSSERSVLQSINPAEPHKECPNPKPDKAPLQKVSLAPNSRYYLSCPMESRHATYSWRHKENVEQSCEPGHQSPNCILFIENLTAQQYGHYFCEAQEGSYFREAQHWQLLPEDGIMAEHLLGHACALAASLWLGVLPTLTLGLLVH

SEQ ID NO: 3598 - protein, 93 aa, Homo sapiens
MVGVVMFTLGFAGCVGALRENICLLNFFCGTIVLIFFLELAVAVLAFLFQDWVRDRFREFFESNIKSYRDDIDLQNLIDSLQKAVSTSPAGPR

SEQ ID NO: 3599 - protein, 302 aa, Homo sapiens
MSAGLPLGALPEMLLPLAFVATLTAFIFSLFLYMKAQVAPVSALAPGGNSGNPIYDFFLGRELNPRICFFDFKYFCELRPGLIGWVLINLALLMKEAELRGSPSLAMWLVNGFQLLYVGDALWHEEAVLTTMDITHDGFGFMLAFGDMAWVPFTYSLQAQFLLHHPQPLGLPMASVICLINATGYYIFRGANSQKNTFRKNPSDPRVAGLETISTATGRKLLVSGWWGMVRHPNYLGDLIMALAWSLPCGVSHLLPYFYLLYFTALLVHREARDERQCLQKYGLAWQEYCRRVPYRIMPYIY

SEQ ID NO: 3600 - protein, 523 aa, Homo sapiens
MVPSLIKQQVLKNVRIDPSSLSFNMWKEIPIPFYLSVYFFDVMNPSEILKGEKPQVRERGPYVYREFRHKSNITFNNNDTVSFLEYRTFQFQPSKSHGSESDYIVMPNILVLGAAVMMENKPMTLKLIMTLAFTTLGERAFMNRTVGEIMWGYKDPLVNLINKYFPGMFPFKDKFGLFAELNNSDSGLFTVFTGVQNISRIHLVDKWNGLSKVDFWHSDQCNMINGTSGQMWPPFMTPESSLEFYSPEACRSMKLMYKESGVFEGIPTYRFVAPKTLFANGSIYPPNEGFCPCLESGIQNVSTCRFSAPLFLSHPHFLNADPVLAEAVTGLHPNQEAHSLFLDIHPVTGIPMNCSVKLQLSLYMKSVAGIGQTGKIEPVVLPLLWFAESGAMEGETLHTFYTQLVLMPKVMHYAQYVLLALGCVLLLVPVICQIRSQVGAGQRAARADSHSLACWGKGASDRTLWPTAAWSPPPAAVLRLCRSGSGHCWGLRSTLASFACRVATTLPVLEGLGPSLGGGTGGL

SEQ ID NO: 3601 - protein, 34 aa, Homo sapiens
LPPVFGLYSSFYPVFIYFLFGTSRHISVGKWRQA

SEQ ID NO: 3602 - protein, 387 aa, Homo sapiens
ICGALVEVKCLNFRKLQEIYFIETKKFLLIGKSNICVKVGEKSLTCKKIDLTTIVKPEAPFDLSVVYREGANDFVVTFNTSHLQKKYVKVLMHDVAYRQEKDENKWTHVNLSSTKLTLLQRKLQPAAMYEIKVRSIPDHYFKGFWSEWSPSYYFRTPEINNSSGEMDPILLTISILSFFSVALLVILACVLWKKRIKPIVWPSLPDHKKTLEHLCKKPRKNLNVSFNPESFLDCQIHRVDDIQARDEVEGFLQDTFPQQLEESEKQRLGGDVQSPNCPSEDVVITPESFGRDSSLTCLAGNVSACDAPILSSSRSLDCRESGKNGPHVYQDLLLSLGTTNSTLPPPFSLQSGILTLNPVAQGQPILTSLGSNQEEAYVTMSSFYQNQ

SEQ ID NO: 3603 - protein, 1195 aa, Homo sapiens
LQTQRNYGPPVRPRMGPERTGAAPLPLLLVLALSQGILNCCLAYNVGLPEAKIFSGPSSEQFGYAVQQFINPKGNWLLVGSPWSGFPENRMGDVYKCPVDLSTATCEKLNLQTSTSIPNVTEMKTNMSLGLILTRNMGTGGFLTCGPLWAQQCGNQYYTTGVCSDISPDFQLSASFSPATQPCPSLIDVVVVCDESNSIYPWDAVKNFLEKFVQGLDIGPTKTQVGLIQYANNPRVVFNLNTYKTKEEMIVATSQTSQYGGDLTNTFGAIQYARKYAYSAASGGRRSATKVMVVVTDGESHDGSMLKAVIDQCNHDNILRFGIAVLGYLNRNALDTKNLIKEIKAIASIPTERYFFNVSDEAALLEKAGTLGEQIFSIEGTVQGGDNFQMEMSQVGFSADYSSQNDILMLGAVGAFGWSGTIVQKTSHGHLIFPKQAFDQILQDRNHSSYLGYSVAAISTGESTHFVAGAPRANYTGQIVLYSVNENGNITVIQAHRGDQIGSYFGSVLCSVDVDKDTITDVLLVGAPMYMSDLKKEEGRVYLFTIKEGILGQHQFLEGPEGIENTRFGSAIAALSDINMDGFNDVIVGSPLENQNSGAVYIYNGHQGTIRTKYSQKILGSDGAFRSHLQYFGRSLDGYGDLNGDSITDVSIGAFGQVVQLWSQSIADVAIEASFTPEKITLVNKNAQIILKLCFSAKFRPTKQNNQVAIVYNITLDADGFSSRVTSRGLFKENNERCLQKNMVVNQAQSCPEHIIYIQEPSDVVNSLDLRVDISLENPGTSPALEAYSETAKVFSIPFHKDCGEDGLCISDLVLDVRQIPAAQEQPFIVSNQNKRLTFSVTLKNKRESAYNTGIVVDFSENLFFASFSLPVDGTEVTCQVAASQKSVACDVGYPALKREQQVTFTINFDFNLQNLQNQASLSFQALSESQEENKADNLVNLKIPLLYDAEIHLTRSTNINFYEISSDGNVPSIVHSFEDVGPKFIFSLKVTTGSVPVSMATVIIHIPQYTKEKNPLMYLTGVQTDKAGDISCNADINPLKIGQTSSSVSFKSENFRHTKELNCRTASCSNVTCWLKDVHMKGEYFVNVTTRIWNGTFASSTFQTVQLTAAAEINTYNPEIYVIEDNTVTIPLMIMKPDEKAEVPTGVIIGSIIAGILLLLALVAILWKLGFFKRKYEKMTKNPDEIDETTELSS

SEQ ID NO: 3604 - protein, 250 aa, Homo sapiens
ISLGCPCFVLWTTAQQCPALCLGLGPSCTCCLDPRPAWAWALVLPMTPPERLFLPRVCGTTLHLLLLGLLLVLLPGAQGLPGVGLTPSAAQTARQHPKMHLAHSTLKPAAHLIGDPSKQNSLLWRANTDRAFLQDGFSLSNNSLLVPTSGIYFVYSQVVFSGKAYSPKATSSPLYLAHEVQLFSSQYPFHVPLLSSQKMVYPGLQEPWLHSMYHGAAFQLTQGDQLSTHTDGIPHLVLSPSTVFFGAFAL

SEQ ID NO: 3605 - protein, 178 aa, Homo sapiens
ITMTTSHQPQDRYKAVWLIFFMLGLGTLLPWNFFMTATQYFTNRLDMSQNVSLVTAELSKDAQASAAPAAPLPERNSLSAIFNNVMTLCAMLPLLLFTYLNSFLHQRIPQSVRILGSLVAILLVFLITAILVKVQLDALPFFVITMIKIVLINCKLGQEGAYGRRHAQLPPLFFQTQR

SEQ ID NO: 3606 - protein, 776 aa, Homo sapiens
RWLLLRFSRSPAVPGTVPAAEGTPLCPVLGTRDGRHAPRSIVSLIWVPGRCGRRAGSARVTPAAGAPGPAGAGRGVPGRAAAMKHLKRWWSAGGGLLHLTLLLSLAGLRVDLDLYLLLPPPTLLQDELLFLGGPASSAYALSPFSASGGWGRAGHLHPKGRELDPAAPPEGQLLREVRALGVPFVPRTSVDAWLVHSVAAGSADEAHGLLGAAAASSTGGAGASVDGGSQAVQGGGGDPRAARSGPLDAGEEEKAPAEPTAQVPDAGGCASEENGVLREKHEAVDHSSQHEENEERVSAQKENSLQQNDDDENKIAEKPDWEAEKTTESRNERHLNGTDTSFSLEDLFQLLSSQPENSLEGISLGDIPLPGSISDGMNSSAHYHVNFSQAISQDVNLHEAILLCPNNTFRRDPTARTSQSQEPFLQLNSHTTNPEQTLPGTNLTGFLSPVDNHMRNLTSQDLLYDLDINIFDEINLMSLATEDNFDPIDVSQLFDEPDSDSGLSLDSSHNNTSVIKSNSSHSVCDEGAIGYCTDHESSSHHDLEGAVGGYYPEPSKLCHLDQSDSDFHGDLTFQHVFHNHTYHLQPTAPESTSEPFPWPGKSQKIRSRYLEDTDRNLSRDEQRAKALHIPFSVDEIVGMPVDSFNSMLSRYYLTDLQVSLIRDIRRRGKNKVAAQNCRKRKLDIILNLEDDVCNLQAKKETLKREQAQCNKAINIMKQKLHDLYHDIFSRLRDDQGRPVNPNHYALQCTHDGSILIVPKELVASGHKKETQKGKRK

SEQ ID NO: 3607 - protein, 722 aa, Homo sapiens
LPALLLQHVLLHLLLLPIAIPYAEGQRKRRNTIHEFKKSAKTTLIKIDPALKIKTKKVNTADQCANRCTRNKGLPFTCKAFVFDKARKQCLWFPFNSMSSGVKKEFGHEFDLYENKDYIRNCIIGKGRSYKGTVSITKSGIKCQPWSSMIPHEHSFLPSSYRGKDLQENYCRNPRGEEGGPWCFTSNPEVRYEVCDIPQCSEVECMTCNGESYRGLMDHTESGKICQRWDHQTPHRHKFLPERYPDKGFDDNYCRNPDGQPRPWCYTLDPHTRWEYCAIKTCADNTMNDTDVPLETTECIQGQGEGYRGTVNTIWNGIPCQRWDSQYPHEHDMTPENFKCKDLRENYCRNPDGSESPWCFTTDPNIRVGYCSQIPNCDMSHGQDCYRGNGKNYMGNLSQTRSGLTCSMWDKNMEDLHRHIFWEPDASKLNENYCRNPDDDAHGPWCYTGNPLIPWDYCPISRCEGDTTPTIVNLDHPVISCAKTKQLRVVNGIPTRTNIGWMVSLRYRNKHICGGSLIKESWVLTARQCFPSRDLKDYEAWLGIHDVHGRGDEKCKQVLNVSQLVYGPEGSDLVLMKLARPAVLDDFVSTIDLPNYGCTIPEKTSCSVYGWGYTGLINYDGLLRVAHLYIMGNEKCSQHHRGKVTLNESEICAGAEKIGSGPCEGDYGGPLVCEQHKMRMVLGVIVPGRGCAIPNRPGIFVRVAYYAKWIHKIILTYKVPQS

SEQ ID NO: 3608 - protein, 398 aa, Homo sapiens
IFGAFDPPSSLLMGLWGQSVPTASSARAGRYPGARTASGTRPWLLDPKILKFVVFIVAVLLPVRVDSATIPRQDEVPQQTVAPQQQRRSLKEEECPAGSHRSEYTGACNPCTEGVDYTIASNNLPSCLLCTVCKSGQTNKSSCTTTRDTVCQCEKGSFQDKNSPEMCRTCRTGCPRGMVKVSNCTPRSDIKCKNESAASSTGKTPAAEETVTTILGMLASPYHYLIIIVVLVIILAVVVVGFSCRKKFISYLKGICSGGGGGPERVHRVLFRRRSCPSRVPGAEDNARNETLSNRYLQPTQVSEQEIQGQELAELTGVTVELPEEPQRLLEQAEAEGCQRRRLLVPVNDADSADISTLLDASATLEEGHAKETIQDQLVGSEKLFYEEDEAGSATSCL

SEQ ID NO: 3609 - protein, 906 aa, Homo sapiens
VAMEWGSESAAVRRHRVGVERREGAAAAPPPEREARAQEPLVDGCSGGGRTRKRSPGGSGGASRGAGTGLSEVRAALGLALYLIALRTLVQLSLQQLVLRGAAGHRGEFDALQARDYLEHITSIGPRTTGSPENEILTVHYLLEQIKLIEVQSNSLHKISVDVQRPTGSFSIDFLGGFTSYYDNITNVVVKLEPRDGAQHAVLANCHFDSVANSPGASDDAVSCSVMLEVLRVLSTSSEALHHAVIFLFNGAEENVLQASHGFITQHPWASLIRAFINLEAAGVGGKELVFQTGPENPWLVQAYVSAAKHPFASVVAQEVFQSGIIPSDTDFRIYRDFGNIPGIDLAFIENGYIYHTKYDTADRILTDSIQRAGDNILAVLKHLATSDMLAAASKYRHGNMVFFDVLGLFVIAYPSRIGSIINYMVVMGVVLYLGKKFLQPKHKTGNYKKDFLCGLGITLISWFTSLVTVLIIAVFISLIGQSLSWYNHFYVSVCLYGTATVAKIILIHTLAKRFYYMNASAQYLGEVFFDISLFVHCCFLVTLTYQGLCSAFISAVWVAFPLLTKLCVHKDFKQHGAQGKFIAFYLLGMFIPYLYALYLIWAVFEMFTPILGRSGSEIPPDVVLASILAGCTMILSSYFINFIYLAKSTKKTMLTLTLVCAITFLLVCSGTFFPYSSNPANPKPKRVFLQHMTRTFHDLEGNAVKRDSGIWINGFDYTGISHITPHIPEINDSIRAHCEENAPLCGFPWYLPVHFLIRKNWYLPAPEVSPRNPPHFRLISKEQTPWDSIKLTFEATGPSHMSFYVRAHKGSTLSQWSLGNGTPVTSKGGDYFVFYSHGLQASAWQFWIEVQVSEEHPEGMVTVAIAAHYLSGEDKRSPQLDALKEKFPDWTFPSAWVCTYDLFVF

SEQ ID NO: 3610 - protein, 271 aa, Homo sapiens
KMHYYRYSNAKVSCWYKYLLFSYNIIFWLAGVVFLGVGLWAWSEKGVLSDLTKVTRMHGIDPVVLVLMVGVVMFTLGFAGCVGALRENICLLNFFCGTIVLIFFLELAVAVLAFLFQDWVRDRFREFFESNIKSYRDDIDLQNLIDSLQKANQCCGAYGPEDWDLNVYFNCSGASYSREKCGVPFSCCVPDPAQKVVNTQCGYDVRIQLKSKWDESIFTKGCIQALESWLPRNIYIVAGVFIAISLLQIFGIFLARTLISDIEAVKAGHHF

SEQ ID NO: 3611 - protein, 60 aa, Homo sapiens
KMRQLKGKPKKETSKDKKERKQAMQEARQQITTVVLPTLAVVVLLIVVFVYVATRPTITE

SEQ ID NO: 3612 - protein, 67 aa, Homo sapiens
KIGYKRQGGGRKPVSLNSPAALGFFVASFVIGARPTPQQPCPRDLQLVLILAPPTLVWVFSSTEKSR

SEQ ID NO: 3613 - protein, 985 aa, Homo sapiens
LYPSRKVESAGWRLPGEANAWPCPAPRRTMTLLLLPLLLASLLASCSCNKANKHKPWIEAEYQGIVMENDNTVLLNPPLFALDKDAPLRYAGEICGFRLHGSGVPFEAVILDKATGEGLIRAKEPVDCEAQKEHTFTIQAYDCGEGPDGANTKKSHKATVHVRVNDVNEFAPVFVERLYRAAVTEGKLYDRILRVEAIDGDCSPQYSQICYYEILTPNTPFLIDNDGNIENTEKLQYSGERLYKFTVTAYDCGKKRAADDAEVEIQVKPTCKPSWQGWNKRIEYAPGAGSLALFPGIRLETCDEPLWNIQATIELQTSHVAKGCDRDNYSERALRKLCGAATGEVDLLPMPGPNANWTAGLSVHYSQDSSLIYWFNGTQAVQVPLGGPSGLGSGPQDSLSDHFTLSFWMKHGVTPNKGKKEEETIVCNTVQNEDGFSHYSLTVHGCRIAFLYWPLLESARPVKFLWKLEQVCDDEWHHYALNLEFPTVTLYTDGISFDPALIHDNGLIHPPRREPALMIGACWTEEKNKEKEKGDNSTDTTQGDPLSIHHYFHGYLAGFSVRSGRLESREVIECLYACREGLDYRDFESLGKGMKVHVNPSQSLLTLEGDDVETFNHALQHVAYMNTLRFATPGVRPLRLTTAVKCFSEESCVSIPEVEGYVVVLQPDAPQILLSGTAHFARPAVDFEGTNGVPLFPDLQITCSISHQVEAKKDESWQGTVTDTRMSDEIVHNLDGCEISLVGDDLDPERESLLLDTTSLQQRGLELTNTSAYLTIAGVESITVYEEILRQARYRLRHGAALYTRKFRLSCSEMNGRYSSNEFIVEVNVLHSMNRVAHPSHVLSSQQFLHRGHQPPPEMAGHSLASSHRNSMIPSAATLIIVVCVGFLVLMVVLGLVRIHSLHRRVSGAGGPPGASSDPKDPDLFWDDSALTIIVNPMESYQNRQSCVTGAVGGQQEDEDSSDSEVADSPSSDERRIIETPPHRY

SEQ ID NO: 3614 - protein, 780 aa, Homo sapiens
RSPGPDAGAEGTEGPAPSPACTEAIAKALRLIQPGTHIPPTGSPAPQPLPVPAEMLLPRSVSSERAPGVPEPEELWEAEMERLRGSGTPVRGLPYAMMDKRLIWQLREPAGVQTLRWQRWQRRRQTVERRLREAAQRLARGLGLWEGALYEIGGLFGTGIRSYFTFLRFLLLLNLLSLLLTASFVLLPLVWLRPPDPGPTLNLTLQCPGSRQSPPGVLRFHNQLWHVLTGRAFTNTYLFYGAYRVGPESSSVYSIRLAYLLSPLACLLLCFCGTLRRMVKGLPQKTLLGQGYQAPLSAKVFSSWDFCIRVQEAATIKKHEISNEFKVELEEGRRFQLMQQQTRAQTACRLLSYLRVNVLNGLLVVGAISAIFWATKYSQDNKEESLFLLLQYLPPGVIALVNFLGPLLFTFLVQLENYPPNTEVNLTLIWCVVLKLASLGMFSVSLGQTILCIGRDKSSCESYGYNVCDYQCWENSVGEELYKLSIFNFLLTVAFAFLVTLPRRLLVDRFSGRFWAWLEREEFLVPKNVLDIVAGQTVTWMGLFYCPLLPLLNSVFLFLTFYIKKYTLLKNSRASSRPFRASSSTFFFQLVLLLGLLLAAVPLGYVVSSIHSSWDCGLFTNYSAPWQVVPELVALGLPPIGQRALHYLGSHAFSFPLLIMLSLVLTVCVSQTQANARAIHRLRKQLVWQVQEKWHLVEDLSRLLPEPGPSDSPGPKYPASQASRPQSFCPGCPCPGSPGHQAPRPGPSVVDAAGLRSPCPGQHGAPASARRFRFPSGAEL

SEQ ID NO: 3615 - protein, 154 aa, Homo sapiens
LNFQPQRPPPLSPRAMGRVSGLVPSRFLTLLAHLVVVITLFWSRDSNIQACLPLTFTPEEYDKQDIHPLPLCRLVAALSVTLGLFAVELAGFLSGVSMFNSTQSLISIGAHCSASVALSFFIFERWECTTYCALPAVTEMALFVTVFGLKKKPF

SEQ ID NO: 3616 - protein, 55 aa, Homo sapiens
LICAARRAPRRSRRRGGALGGGGVAGAAAASGLGLLGRLLPGEQLRPCRLKNGRI

SEQ ID NO: 3617 - protein, 339 aa, Homo sapiens
TALLAAWIAAVAATAGPEEAALPPEQSRVQPMTASNWTLVMEGEWMLKFYAPWCPSCQQTDSEWEAFAKNGEILQISVGKVDVIQEPGLSGRFFVTTLPAFFHAKDGIFRRYRGPGIFEDLQNYILEKKWQSVEPLTGWKSPASLTMSGMAGLFSISGKIWHLHNYFTVTLGIPAWCSYVFFVIATLVFGLFMGLVLVVISECFYVPLPRHLSERSEQNRRSEEAHRAEQLQDAEEEKDDSNEEENKDSLVDDEEEKEDLGDEDEAEEEEEEDNLAAGVDEERSEANDQGPPGEDGVTREEVEPEEAEEGISEQPCPADTEVVEDSLRQRKSQHADKGL

SEQ ID NO: 3618 - protein, 304 aa, Homo sapiens
VAPAFPEPAGQSAGSWRSALPLVLGPLTRGPAARSIRSMLLLTRSPTAWHRLSQLKPRVLPGTLGGQALHLRSWLLSRQGPAETGGQGQPQGPGLRTRLLITGLFGAGLGGAWLALRAEKERLQQQKRTEALRQAAVGQGDFHLLDHRGRARCKADFRGQWVLMYFGFTHCPDICPDELEKLVQVVRQLEAEPGLPPVQPVFITVDPERDDVEAMARYVQDFHPRLLGLTGSTKQVAQASHSYRVYYNAGPKDEDQDYIVDHSIAIYLLNPDGLFTDYYGRSRSAEQISDSVRRHMAAFRSVLS

SEQ ID NO: 3619 - protein, 67 aa, Homo sapiens
LGTLLALVCVFVICRRYLVMQRLFPRIPHMKDPIGDSFQNDKLVVWEAGKAGLEECLVTEVQVVQKT

SEQ ID NO: 3620 - protein, 1057 aa, Homo sapiens
MAELEFITKQIKQEVEELWIGLNDLKLQMNFEWSDGSLVSFTHWHPFEPNNFRDSLEDCVTIWGPEGRWNDSPCNQSLPSICKKAGQLSQGAAEEDHGCRKGWTWHSPSCYWLGEDQVTYSEARRLCTDHGSQLVTITNRFEQAFVSSLIYNWEGEYFWTALQDLNSTGSFFWLSGDEVMYTHWNRDQPGYSRGGCVALATGSAMGLWEVKNCTSFRARYICRQSLGTPVTPELPGPDPTPSLTGSCPQGWASDTKLRYCYKVFSSERLQDKKSWVQAQGACQELGAQLLSLASYEEEHFVANMLNKIFGESEPEIHEQHWFWIGLNRRDPRGGQSWRWSDGVGFSYHNFDRSRHDDDDIRGCAVLDLASLQWVAMQCDTQLDWICKIPRGTDVREPDDSPQGRREWLRFQEAEYKFFEHHSTWAQAQRICTWFQAELTSVHSQAELDFLSHNLQKFSRAQEQHWWIGLHTSESDGRFRWTDGSIINFISWAPGKPRPVGKDKKCVYMTASREDWGDQRCLTALPYICKRSNVTKETQPPDLPTTALGGCPSDWIQFLNKCFQVQGQEPQSRVKWSEAQFSCEQQEAQLVTITNPLEQAFITASLPNVTFDLWIGLHASQRDFQWVEQEPLMYANWAPGEPSGPSPAPSGNKPTSCAVVLHSPSAHFTGRWDDRSCTEETHGFICQKGTDPSLSPSPAALPPAPGTELSYLNGTFRLLQKPLRWHDALLLCESRNASLAYVPDPYTQAFLTQAARGLRTPLWIGLAGEEGSRRYSWVSEEPLNYVGWQDGEPQQPGGCTYVDVDGAWRTTSCDTKLQGAVCGVSSGPPPPRRISYHGSCPQGLADSAWIPFREHCYSFHMELLLGHKEARQRCQRAGGAVLSILDEMENVFVWEHLQSYEGQSRGAWLGMNFNPKGGTLVWQDNTAVNYSNWGPPGLGPSMLSHNSCYWIQSNSGLWRPGACTNITMGVVCKLPRAEQSSFSPSALPENPAALVVVLMAVLLLLALLTAALILYRRRQSIERGAFEGARYSRSSSSPTEATEKNILVSDMEMNEQQE

SEQ ID NO: 3621 - protein, 138 aa, Homo sapiens [sequence omitted]

SEQ ID NO: 3622 - protein, 205 aa, Homo sapiens [sequence omitted]

SEQ ID NO: 3623 - protein, 7571 aa, Homo sapiens
MLSNFGDCVQYKEIVKNSLEELISGSKEVQEQAEKILDTENLFEAQQLLLHHQQKTKRISAKKRDVQQQIAQAQQGEGGLPDRGHEELRKLESTLDGLERSRERQERRIQVTLRKWERFETNKETVVRYLFQTGSSHERFLSFSSLESLSSELEQTKEFSKRTESIAVQAENLVKEASEIPLGPQNKQLLQQQAKSIKEQVKKLEDTLEEDIKTMEMVKTKWDHFGSNFETLSVWITEKEKELNALETSSSAMDMQISQIKVTIQEIESKLSSIVGLEEEAQSFAQFVTTGESARIKAKLTQIRRYGEELREHAQCLEGTILGHLSQQQKFEENLRKIQQSVSEFEDKLAVPIKICSSATETYKVLQEHMDLCQALESLSSAITAFSASARKVVNRDSCVQEAAALQQQYEDILRRAKERQTALENLLAHWQRLEKELSSFLTWLERGEAKASSPEMDISADRVKVEGELQLIQALQNEVVSQASFYSKLLQLKESLFSVASKDDVKMMKLHLEQLDERWRDLPQIINKRINFLQSVVAEHQQFDELLLSFSVWIKLFLSELQTTSEISIMDHQVALTRHKDHAAEVESKKGELQSLQGHLAKLGSLGRAEDLHLLQGKAEDCFQLFEEASQVVERRQLALSHLAEFLQSHASLSGILRQLRQTVEATNSMNKNESDLIEKDLNDALQNAKALESAAVSLDGILSKAQYHLKIGSSEQRTSCRATADQLCGEVERIQNLLGTKQSEADALAVLKKAFQDQKEELLKSIEDIEERTDKERLKEPTRQALQQRLRVFNQLEDELNSHEHELCWLKDKAKQIAQKDVAFAPEVDREINRLEVTWDDTKRLIHENQGQCCGLIDLMREYQNLKSAVSKVLENASSVIVTRTTIKDQEDLKWAFSKHETAKNKMNYKQKDLDNFTSKGKHLLSELKKIHSSDFSLVKTDMESTVDKWLDVSEKLEENMDRLRVSLSIWDDVLSTRDEIEGWSNNCVPQMAENISNLDNHLRAEELLKEFESEVKNKALRLEELHSKVNDLKELTKNLETPPDLQFIEADLMQKLEHAKEITEVAKGTLKDFTAQSTQVEKFINDITTWFTKVEESLMNCAQNETCEALKKVKDIQKELQSQQSNISSTQENLNSLCRKYHSAELESLGRAMTGLIKKHEAVSQLCSKTQASLQESLEKHFSESMQEFQEWFLGAKAAAKESSDRTGDSKVLEAKLHDLQNILDSVSDGQSKLDAVTQEGQTLYAHLSKQIVSSIQEQITKANEEFQAFLKQCLKDKQALQDCASELGSFEDQHRKLNLWIHEMEERFNTENLGESKQHIPEKKNEVHKVEMFLGELLAARESLDKLSQRGQLLSEEGHGAGQEGRLCSQLLTSHQNLLRMTKEKLRSCQVALQEHEALEEALQSMWFWVKAIQDRLACAESTLGSKDTLEKRLSQIQDILLMKGEGEVKLNMAIGKGEQALRSSNKEGQRVIQTQLETLKEVWADIMSSSVHAQSTLESVISQWNDYVERKNQLEQWMESVDQKIEHPLQPQPGLKEKFVLLDHLQSILSEAEDHTRALHRLIAKSRELYEKTEDESFKDTAQEELKTQFNDIMTVAKEKMRKVEEIVKDHLMYLDAVHEFTDWLHSAKEELHRWSDMSGDSSATQKKLSKIKELIDSREIGASRLSRVESLAPEVKQNTTASGCELMHTEMQALRADWKQWEDSVFQTQSCLENLVSQMALSEQEFSGQVAQLEQALEQFSALLKTWAQQLTLLEGKNTDEEIVECWHKGQEILDALQKAEPRTEDLKSQLNELCRFSRDLSTYSGKVSGLIKEYNCLCLQASKGCQNKEQILQQRFRKAFRDFQQWLVNAKITTAKCFDIPQNISEVSTSLQKIQEFLSESENGQHKLNMMLSKGELLSTLLTKEKAKGIQAKVTAAKEDWKNFHSNLHQKESALENLKIQMKDFEVSAEPIQDWLSKTEKMVHESSNRLYDLPAKRREQQKLQSVLEEIHCYEPQLNRLKEKAQQLWEGQAASKSFRHRVSQLSSQYLALSNLTKEKVSRLDRIVAEHNQFSLGIKELQDWMTDAIHMLDSYCHPTSDKSVLDSRTLKLEALLSVKQEKEIQMKMIVTRGESVLQNTSPEGIPTIQQQLQSVKDMWASLLSAGIRCKSQLEGALSKWTSYQDGVRQFSGWMDSMEANLNESERQHAELRDKTTMLGKAKLLNEEVLSYSSLLETIEVKGAGMTEHYVTQLELQDLQERYRAIQERAKEAVTKSEKLVRLHQEYQRDLKAFEVWLGQEQEKLDQYSVLEGDAHTHETTLRDLQELQVHCAEGQALLNSVLHTREDVIPSGIPQAEDRALESLRQDWQAYQHRLSETRTQFNNVVNKLRLMEQKFQQVDEWLKTAEEKVSPRTRRQSNRATKEIQLHQMKKWHEEVTAYRDEVEEVGARAQEILDESHVNSRMGCQATQLTSRYQALLLQVLEQIKFLEEEIQSLEESESSLSSYSDWYGSTHKNFKNVATKIDKVDTVMMGKKLKTLEVLLKDMEKGHSLLKSAREKGERAVKYLEEGEAERLRKEIHDHMEQLKELTSTVRKEHMTLEKGLHLAKEFSDKCKALTQWIAEYQEILHVPEEPKMELYEKKAQLSKYKSLQQTVLSHEPSVKSVREKGEALLELVQDVTLKDKIDQLQSDYQDLCSIGKEHVFSLEAKVKDHEDYNSELQEVEKWLLQMSGRLVAPDLLETSSLETITQQLAHHKAMMEEIAGFEDRLNNLQMKGDTLIGQCADHLQAKLKQNVHAHLQGTKDSYSAICSTAQRMYQSLEHELQKHVSRQDTLQQCQAWLSAVQPDLEPSPQPPLSRAEAIKQVKHFRALQEQARTYLDLLCSMCDLSNASVKTTAKDIQQTEQTIEQKLVQAQNLTQGWEEIKHLKSELWIYLQDADQQLQNMKRRHSELELNIAQNMVSQVKDFVKKLQSKQASVNTIIEKVNKLTKKEESPEHKEINHLNDQWLDLCRQSNNLCLQREEDLQRTRDYHDCMNVVEVFLEKFTTEWDNLARSDAESTAVHLEALKKLALALQERKYAIEDLKDQKQKMIEHLNLDDKELVKEQTSHLEQRWFQLEDLIKRKIQVSVTNLEELNVVQSRFQELMEWAEEQQPNIAEALKQSPPPDMAQNLLMDHLAICSELEAKQMLLKSLIKDADRVMADLGLNERQVIQKALSDAQSHVNCLSDLVGQRRKYLNKALSEKTQFLMAVFQATSQIQQHERKIMFREHICLLPDDVSKQVKTCKSAQASLKTYQNEVTGLWAQGRELMKEVTEQEKSEVLGKLQELQSVYDSVLQKCSHRLQELEKNLVSRKHFKEDFDKACHWLKQADIVTFPEINLMNESSELHTQLAKYQNILEQSPEYENLLLTLQRTGQTILPSLNEVDHSYLSEKLNALPRQFNVIVALAKDKFYKVQEAILARKEYASLIELTTQSLSELEAQFLRMSKVPTDLAVEEALSLQDGCRAILDEVAGLGEAVDELNQKKEGFRSTGQPWQPDKMLHLVTLYHRLKRQTEQRVSLLEDTTSAYQEHEKMCQQLERQLKSVKEEQSKVNEETLPAEEKLKMYHSLAGSLQDSGIVLKRVTIHLEDLAPHLDPLAYEKARHQIQSWQGELKLLTSAIGETVTECESRMVQSIDFQTEMSRSLDWLRRVKAELSGPVYLDLNLQDIQEEIRKIQIHQEEVQSSLRIMNALSHKEKEKFTKAKELISADLEHSLAELSELDGDIQEALRTRQATLTEIYSQCQRYYQVFQAANDWLEDAQELLQLAGNGLDVESAEENLKSHMEFFSTEDQFHSNLEELHSLVATLDPLIKPTGKEDLEQKVASLELRSQRMSRDSGAQVDLLQRCTAQWHDYQKAREEVIELMNDTEKKLSEFSLLKTSSSHEAEEKLSEHKALVSVVNSFHEKIVALEEKASQLEKTGNDASKATLSRSMTTVWQRWTRLRAVAQDQEKILEDAVDEWTGFNNKVKKATEMIDQLQDKLPGSSAEKASKAELLTLLEYHDTFVLELEQQQSALGMLRQQTLSMLQDGAAPTPGEEPPLMQEITAMQDRCLNMQEKVKTNGKLVKQELKDREMVETQINSVKCWVQETKEYLGNPTIEIDAQLEELQILLTEATNHRQNIEKMAEEQKEKYLGLYTILPSELSLQLAEVALDLKIRDQIQDKIKEVEQSKATSQELSRQIQKLAKDLTTILTKLKAKTDNVVQAKTDQKVLGEELDGCNSKLMELDAAVQKFLEQNGQLGKPLAKKIGKLTELHQQTIRQAENRLSKLNQAASHLEEYNEMLELILKWIEKAKVLAHGTIAWNSASQLREQYILHQTLLEESKEIDSELEAMTEKLQYLTSVYCTEKMSQQVAELGRETEELRQMIKIRLQNLQDAAKDMKKFEAELKKLQAALEQAQATLTSPEVGRLSLKEQLSHRQHLLSEMESLKPKVQAVQLCQSALRIPEDVVASLPLCHAALRLQEEASRLQHTAIQQCNIMQEAVVQYEQYEQEMKHLQQLIEGAHREIEDKPVATSNIQELQAQISRHEELAQKIKGYQEQIASLNSKCKMLTMKAKHATMLLTVTEVEGLAEGTEDLDGELLPTPSAHPSVVMMTAGRCHTLLSPVTEESGEEGTNSEISSPPACRSPSPVANTDASVNQDIAYYQALSAERLQTDAAKIHPSTSASQEFYEPGLEPSATAKLGDLQRSWETLKNVISEKQRTLYEALERQQKYQDSLQSISTKMEAIELKLSESPEPGRSPESQMAEHQALMDEILMLQDEINELQSSLAEELVSESCEADPAEQLALQSTLTVLAERMSTIRMKASGKRQLLEEKLNDQLEEQRQEQALQRYRCEADELDSWLLSTKATLDTALSPPKEPMDMEAQLMDCQNMLVEIEQKVVALSELSVHNENLLLEGKAHTKDEAEQLAGKLRRLKGSLLELQRALHDKQLNMQGTAQEKEESDVDLTATQSPGVQEWLAQARTTWTQQRQSSLQQQKELEQELAEQKSLLRSVASRGEEILIQHSAAETSGDAGEKPDVLSQELGMEGEKSSAEDQMRMKWESLHQEFSTKQKLLQNVLEQEQEQVLYSRPNRLLSGVPLYKGDVPTQDKSAVTSLLDGLNQAFEEVSSQSGGAKRQSIHLEQKLYDGVSATSTWLDDVEERLFVATALLPEETETCLFNQEILAKDIKEMSEEMDKNKNLFSQAFPENGDNRDVIEDTLGCLLGRLSLLDSVVNQRCHQMKERLQQILNFQNDLKVLFTSLADNKYIILQKLANVFEQPVAEQIEAIQQAEDGLKEFDAGIIELKRRGDKLQVEQPSMQELSKLQDMYDELMMIIGSRRSGLNQNLTLKSQYERALQDLADLLETGQEKMAGDQKIIVSSKEEIQQLLDKHKEYFQGLESHMILTETLFRKIISFAVQKETQFHTELMAQASAVLKRAHKRGVELEYILETWSHLDEDQQELSRQLEVVESSIPSVGLVEENEDRLIDRITLYQHLKSSLNEYQPKLYQVLDDGKRLLISISCSDLESQLNQLGECWLSNTNKMSKELHRLETILKHWTRYQSESADLIHWLQSAKDRLEFWTQQSVTVPQELEMVRDHLNAFLEFSKEVDAQSSLKSSVLSTGNQLLRLKKVDTATLRSELSRIDSQWTDLLTNIPAVQEKLHQLQMDKLPSRHAISEVMSWISLMENVIQKDEDNIKNSIGYKAIHEYLQKYKGFKIDINCKQLTVDFVNQSVLQISSQDVESKRSDKTDFAEQLGAMNKSWQILQGLVTEKIQLLEGLLESWSEYENNVQCLKTWFETQEKRLKQQHRIGDQASVQNALKDCQDLEDLIKAKEKEVEKIEQNGLALIQNKKEDVSSIVMSTLRELGQTWANLDHMVGQLKILLKSVLDQWSSHKVAFDKINSYLMEARYSLSRFRLLTGSLEAVQVQVDNLQNLQDDLEKQERSLQKFGSITNQLLKECHPPVTETLTNTLKEVNMRWNNLLEEIAEQLQSSKALLQLWQRYKDYSKQCASTVQQQEDRTNELLKAATNKDIADDEVATWIQDCNDLLKGLGTVKDSLFFLHELGEQLKQQVDASAASAIQSDQLSLSQHLCALEQALCKQQTSLQAGVLDYETFAKSLEALEAWIVEAEEILQGQDPSHSSDLSTIQERMEELKGQMLKFSSMAPDLDRLNELGYRLPLNDKEIKRMQNLNRHWSLISSQTTERFSKLQSFLLQHQTFLEKCETWMEFLVQTEQKLAVEISGNYQHLLEQQRAHELFQAEMFSRQQILHSIIIDGQRLLEQGQVDDRDEFNLKLTLLSNQWQGVIRRAQQRRGIIDSQIRQWQRYREMAEKLRKWLVEVSYLPMSGLGSVPIPLQQARTLFDEVQFKEKVFLRQQGSYILTVEAGKQLLLSADSGAEAALQAELAEIQEKWKSASMRLEEQKKKLAFLLKDWEKCEKGIADSLEKLRTFKKKLSQSLPDHHEELHAEQMRCKELENAVGSWTDDLTQLSLLKDTLSAYISADDISILNERVELLQRQWEELCHQLSLRRQQIGERLNEWAVFSEKNKELCEWLTQMESKVSQNGDILIEEMIEKLKKDYQEEIAIAQENKIQLQQMGERLAKASHESKASEIEYKLGKVNDRWQHLLDLIAARVKKLKETLVAVQQLDKNMSSLRTWLAHIESELAKPIVYDSCNSEEIQRKLNEQQELQRDIEKHSTGVASVLNLCEVLLHDCDACATDAECDSIQQATRNLDRRWRNICAMSMERRLKIEETWRLWQKFLDDYSRFEDWLKSSERTAAFPSSSGVIYTVAKEELKKFEAFQRQVHECLTQLELINKQYRRLARENRTDSACSLKQMVHEGNQRWDNLQKRVTSILRRLKHFIGQREEFETARDSILVWLTEMDLQLTNIEHFSECDVQAKIKQLKAFQQEISLNHNKIEQIIAQGEQLIEKSEPLDAAIIEEELDELRRYCQEVFGRVERYHKKLIRLPLPDDEHDLSDRELELEDSAALSDLHWHDRSADSLLSPQPSSNLSLSLAQPLRSERSGRDTPASVDSIPLEWDHDYDLSRDLESAMSRALPSEDEEGQDDKDFYLRGAVGLSGDHSALESQIRQLGKALDDSRFQIQQTENIIRSKTPTGPELDTSYKGYMKLLGECSSSIDSVKRLEHKLKEEEESLPGFVNLHSTETQTAGVIDRWELLQAQALSKELRMKQNLQKWQQFNSDLNSIWAWLGDTEEELEQLQRLELSTDIQTIELQIKKLKELQKAVDHRKAIILSINLCSPEFTQADSKESRDLQDRLSQMNGRWDRVCSLLEEWRGLLQDALMQCQGFHEMSHGLLLMLENIDRRKNEIVPIDSNLDAEILQDHHKQLMQIKHELLESQLRVASLQDMSCQLLVNAEGTDCLEAKEKVHVIGNRLKLLLKEVSRHIKELEKLLDVSSSQQDLSSWSSADELDTSGSVSPTSGRSTPNRQKTPRGKCSLSQPGPSVSSPHSRSTKGGSDSSLSEPGPGRSGRGFLFRVLRAALPLQLLLLLLIGLACLVPMSEEDYSCALSNNFARSFHPMLRYTNGPPPL

SEQ ID NO: 3624 - protein, 51 aa, Homo sapiens
RKCVGCAGPQMDDIWPVVVMITWSMCGLVLLERVAGFLCRHSPSIKGLSRP

SEQ ID NO: 3625 - protein, 649 aa, Homo sapiens
RIQAQEDRAMGERTLHAAVPTPGYPESESIMMAPICLVENQEEQLTVNSKALEILDKISQPVVVVAIVGLYRTGKSYLMNRLAGKRNGFPLGSTVQSETKGIWMWCVPHLSKPNHTLVLLDTEGLGDVEKSNPKNDSWIFALAVLLSSSFVYNSVSTINHQALEQLHYVTELAELIRAKSCPRPDEAEDSSEFASFFPDFIWTVRDFTLELKLDGNPITEDEYLENALKLIPGKNPKIQNSNMPRECIRHFFRKRKCFVFDRPTNDKQYLNHMDEVPEENLERHFLMQSDNFCSYIFTHAKTKTLREGIIVTGKRLGTLVVTYVDAINSGAVPCLENAVTALAQLENPAAVQRAADHYSQQMAQQLRLPTDTLQELLDVHAACEREAIAVFMEHSFKDENHEFQKKLVDTIEKKKGDFVLQNEEASAKYCQAELKRLSEHLTESILRGIFSVPGGHNLYLEEKKQVEWDYKLVPRKGVKANEVLQNFLQSQVVVEESILQSDKALTAGEKAIAAERAMKEAAEKEQELLREKQKEQQQMMEAQERSFQEYMAQMEKKLEEERENLLREHERLLKHKLKVQEEMLKEEFQKKSEQLNKEINQLKEKIESTKNEQLRLLKILDMASNIMIVTLPGASKLLGVGTKYLGSRI

SEQ ID NO: 3626 - protein, 52 aa, Homo sapiens
VEKVWVREELSVIARFCAITSRASLSQLSGALLVAAVSSEFLALSMRRLVVF

SEQ ID NO: 3627 - protein, 227 aa, Homo sapiens
LTAMPGRAPLRTVPGALGAWLLGGLWAWTLCGLCSLGAVGAPRPCQAPQQWEGRQVMYQQSSGRNSRALLSYDGLNQRVRVLDERKALIPCKRLFEYILLYKDGVMFQIDQATKQCSKMTLTQPWDPLDIPQNSTFEDQYSIGGPQEQITVQEWSDRKSARSYETWIGIYTVKDCYPVQETFTINYSVILSTRFFDIQLGIKDPSVFTPPSTCQMAQLEKMSEDCSW

SEQ ID NO: 3628 - protein, 278 aa, Homo sapiens
VVLASAWAGVRAQDGAAVVRNPGLSASQEATPGANMSSGTELLWPGAALLVLLGVAASLCVRCSRPGAKRSEKIYQQRSLREDQQSFTGSRTYSLVGQAWPGPLADMAPTRKDKLLQFYPSLEDPASSRYQNFSKGSRHGSEEAYIDPIAMEYYNWGRFSKPPEDDDANSYENVLICKQKTTETGAQQEGIGGLCRGDLSLSLALKTGPTSGLCPSASPEEDEESEDYQNSASIHQWRESRKVMGQLQREASPGPVGSPDEEDGEPDYVNGEVAATEA

SEQ ID NO: 3629 - protein, 60 aa, Homo sapiens
MWGFLKRPVVVTADINLSLVALTGMGLLSRLWRLTYPRAVVLFRRIRWQFFVEQNWSRIQ

SEQ ID NO: 3630 - protein, 813 aa, Homo sapiens
RPEPTAPGPGRRAEKMNLQPIFWIGLISSVCCVFAQTDENRCLKANAKSCGECIQAGPNCGWCTNSTFLQEGMPTSARCDDLEALKKKGCPPDDIENPRGSKDIKKNKNVTNRSKGTAEKLKPEDITQIQPQQLVLRLRSGEPQTFTLKFKRAEDYPIDLYYLMDLSYSMKDDLENVKSLGTDLMNEMRRITSDFRIGFGSFVEKTVMPYISTTPAKLRNPCTSEQNCTSPFSYKNVLSLTNKGEVFNELVGKQRISGNLDSPEGGFDAIMQVAVCGSLIGWRNVTRLLVFSTDAGFHFAGDGKLGGIVLPNDGQCHLENNMYTMSHYYDYPSIAHLVQKLSENNIQTIFAVTEEFQPVYKELKNLIPKSAVGTLSANSSNVIQLIIDAYNSLSSEVILENGKLSEGVTISYKSYCKNGVNGTGENGRKCSNISIGDEVQFEISITSNKCPKKDSDSFKIRPLGFTEEVEVILQYICECECQSEGIPESPKCHEGNGTFECGACRCNEGRVGRHCECSTDEVNSEDMDAYCRKENSSEICSNNGECVCGQCVCRKRDNTNEIYSGKFCECDNFNCDRSNGLICGGNGVCKCRVCECNPNYTGSACDCSLDTSTCEASNGQICNGRGICECGVCKCTDPKFQGQTCEMCQTCLGVCAEHKECVQCRAFNKGEKKDTCTQECSYFNITKVESRDKLPQPVQPDPVSHCKEKDVDDCWFYFTYSVNGNNEVMVHVVENPECPTGPDIIPIVAGVVAGIVLIGLALLLIWKLLMIIHDRREFAKFEKEKMNAKWDTGENPIYKSAVTTVVNPKYEGK

SEQ ID NO: 3631 - protein, 431 aa, Homo sapiens
VSVLAPYRERVEFLRPSFTDGTIRLSRLELEDEGVYICEFATFPTGNRESQLNLTVMAKPTNWIEGTQAVLRAKKGQDDKVLVATCTSANGKPPSVVSWETRLKGEAEYQEIRNPNGTVTVISRYRLVPSREAHQQSLACIVNYHMDRFKESLTLNVQYEPEVTIEGFDGNWYLQRMDVKLTCKADANPPATEYHWTTLNGSLPKGVEAQNRTLFFKGPINYSLAGTYICEATNPIGTRSGQVEVNITEFPYTPSPPEHGRRAGPVPTAIIGGVAGSILLVLIVVGGIVVALRRRRHTFKGDYSTKKHVYGNGYSKAGIPQHHPPMAQNLQYPDDSDDEKKAGPLGGSSYEEEEEEEEGGGGGERKVGGPHPKYDEDAKRPYFTVDEAEARQDGYGDRTLGYQYDPEQLDLAENMVSQNDGSFISKKEWYV

SEQ ID NO: 3632 - protein, 1443 aa, Homo sapiens
KREERQSAWGRKERGREGWVRRRERSAANPRRRAWSPSQNSSPSRSRSQGGGCRDRQPCMMHLRLFCILLAAVSGAEGWGYYGCDEELVGPLYARSLGASSYYSLLTAPRFARLHGISGWSPRIGDPNPWLQIDLMKKHRIRAVATQGSFNSWDWVTRYMLLYGDRVDSWTPFYQRGHNSTFFGNVNESAVVRHDLHFHFTARYIRIVPLAWNPRGKIGLRLGLYGCPYKADILYFDGDDAISYRFPRGVSRSLWDVFAFSFKTEEKDGLLLHAEGAQGDYVTLELEGAHLLLHMSLGSSPIQPRPGHTTVSAGGVLNDQHWHYVRVDRFGRDVNFTLDGYVQRFILNGDFERLNLDTEMFIGGLVGAARKNLAYRHNFRGCIENVIFNRVNIADLAVRRHSRITFEGKVAFRCLDPVPHPINFGGPHNFVQVPGFPRRGRLAVSFRFRTWDLTGLLLFSRLGDGLGHVELTLSEGQVNVSIAQSGRKKLQFAAGYRLNDGFWHEVNFVAQENHAVISIDDVEGAEVRVSYPLLIRTGTSYFFGGCPKPASRWDCHSNQTAFHGCMELLKVDGQLVNLTLVEGRRLGFYAEVLFDTCGITDRCSPNMCEHDGRCYQSWDDFICYCELTGYKGETCHTPLYKESCEAYRLSGKTSGNFTIDPDGSGPLKPFVVYCDIRENRAWTVVRHDRLWTTRVTGSSMERPFLGAIQYWNASWEEVSALANASQHCEQWIEFSCYNSRLLNTAGGYPYSFWIGRNEEQHFYWGGSQPGIQRCACGLDRSCVDPALYCNCDADQPQWRTDKGLLTFVDHLPVTQVVIGDTNRSTSEAQFFLRPLRCYGDRNSWNTISFHTGAALRFPPIRANHSLDVSFYFRTSAPSGVFLENMGGPYCQWRRPYVRVELNTSRDVVFAFDVGNGDENLTVHSDDFEFNDDEWHLVRAEINVKQARLRVDHRPWVLRPMPLQTYIWMEYDQPLYVGSAELKRRPFVGCLRAMRLNGVTLNLEGRANASEGTSPNCTGHCAHPRLPCFHGGRCVERYSYYTCDCDLTAFDGPYCNHDIGGFFEPGTWMRYNLQSALRSAAREFSHMLSRPVPGYEPGYIPGYDTPGYVPGYHGPGYRLPDYPRPGRPVPGYRGPVYNVTGEEVSFSFSTSSAPAVLLYVSSFVRDYMAVLIKDDGTLQLRYQLGTSPYVYQLTTRPVTDGQPHSINITRVYRNLFIQVDYFPLTEQKFSLLVDSQLDSPKALYLGRVMETGVIDPEIQRYNTPGFSGCLSGVRFNNVAPLKTHFRTPRPMTAELAEALRVQGELSESNCGAMPRLVSEVPPELDPWYLPPDFPYYHDEGWVAILLGFLVAFLLLGLVGMLVLFYLQNHRYKGSYHTNEPKAAHEYHPGSKPPLPTSGPAQVPTPTAAPNQAPASAPAPAPTPAPAPGPRDQNLPQILEESRSE

SEQ ID NO: 3633 - protein, 551 aa, Homo sapiens
LLAFNALLLLLLVAFIMGPQVAFPPALPGPAPVCTGLELLTGAGCFTHTVMYYGHYSNATLNQPCGSPLDGSQCTPRVGGLPYNMPLAYLSTVGVSFFITCITLVYSMAHSFGESYRVGSTSGIHAITVFCSWDYKVTQKRASRLQQDNIRTRLKELLAEWQLRHSPRSVCGRLRQAAVLGLVWLLCLGTALGCAVAVHVFSEFMIQSPEAAGQEAVLLVLPLVVGLLNLGAPYLCRVLAALEPHDSPVLEVYVAICRNLILKLAILGTLCYHWLGRRVGVLQGQCWEDFVGQELYRFLVMDFVLMLLDTLFGELVWRIISEKKLKRRRKPEFDIARNVLELIYGQTLTWLGVLFSPLLPAVQIIKLLLVFYVKKTSLLANCQAPRRPWLASHMSTVFLTLLCFPAFLGAAVFLCYAVWQVKPSSTCGPFRTLDTMYEAGRVWVRHLEAAGPRVSWLPWVHRYLMENTFFVFLVSALLLAVIYLNIQVVRGQRKVICLLKEQISNEGEDKIFLINKLHSIYERKEREERSRVGTTEEAAAPPALLTDEQDA

SEQ ID NO: 3634 - protein, 442 aa, Homo sapiens
LIAYGASKPNALSVLIFIALALNGFGGMCMTFTSLTLPNMFGDLRSTFIALMIGSYASSAVTFPGIKLIYDAGVSFIVVLVVWAGCSGLVFLNCFFNWPLEPFPGPEDMDYSVKIKFSWLGFDHKITGKQFYKQVTTVGRRLSVGSSMRSAKEQVALQEGHKLCLSTVDLEVKCQPDAAVAPSFMHSVFSPILLLSLVTMCVTQLRLIFYMGAMNNILKFLVSGDQKTVMATVGLYTSIFGVLQLLCLLTAPVIGYIMDWRLKECEDASEEPEEKDANQGEKKKKKRDRQIQKITNAMRAFAFTNLLLVGFGVTCLIPNLPLQILSFILHTIVRGFIHSAVGGLYAAVYPSTQFGSLTGLQSLISALFALLQQPLFLAMMGPLQGDPLWVNVGLLLLSLLGFCLPLYLICYRRQLERQLQQRQEDDKLFLKINGSSNQEAFV

SEQ ID NO: 3635 - protein, 207 aa, Homo sapiens
RDMAGDTQWSRPECQAWTGTLLLGTCLLYCARSSMPICTVSMSQDFGWNKKEAGIVLSSFFWGYCLTQVVGGHLGDRIGGEKVILLSASAWGSITAVTPLLAHLSSAHLAFMTFSRILMGLLQGVYFPALTSLLSQKVRESERAFTYSIVGAGSQFGTLLTGAVGSLLLEWYGWQSIFYFSGGLTLLWVWYVYRYLLSEKGNAGRAG

SEQ ID NO: 3636 - protein, 149 aa, Homo sapiens
KSSFLCKRSQTCVDIKDNVVDEGFYFTPKGDDPCLSCTCHGGEPEMCVAALCERPQGCQQYRKDPKECCKFMCLDPDGNSLFDSMASGMRLVVSCISSFLILSLLLFMVHRLRQRRRERIESLIGANCKCPLRATTLVPIPTPGHPMSP

SEQ ID NO: 3637 - protein, 836 aa, Homo sapiens
LALLLLLLLLLLLQLQHLAAAAADPLLGGQGPAKDCEKDQFQCRNERCIPSVWRCDEDDDCLDHSDEDDCPKKTCADSDFTCDNGHCIHERWKCDGEEECPDGSDESEATCTKQVCPAEKLSCGPTSHKCVPASWRCDGEKDCEGGADEAGCATSLGTCRGDEFQCGDGTCVLAIKHCNQEQDCPDGSDEAGCLQVPPTFLGNRRRPRGLNECLHNNGGCSHICTDLKIGFECTCPAGFQLLDQKTCGDIDECKDPDACSQICVNYKGYFKCECYPGYEMDLLTKNCKAAAGKSPSLIFTNRHEVRRIDLVKRNYSRLIPMLKNVVALDVEVATNRIYWCDLSYRKIYSAYMDKASDPKEQEVLIDEQLHSPEGLAVDWVHKHIYWTDSGNKTISVATVDGGRRRTLFSRNLSEPRAIAVDPLRGFMYWSDWGDQAKIEKSGLNGVDRQTLVSDNIEWPNGITLDLLSQRLYWVDSKLHQLSSIDFSGGNRKTLISSTDFLSHPFGIAVFEDKVFWTDLENEAIFSANRLNGLEISILAENLNNPHDIVIFHELKQPRAPDACELSVQPNGGCEYLCLPAPQISSHSPKYTCACPDTMWLGPDMKRCYRAPQSTSTTTLASTMTRTVPATTRAPGTTVHRSTYQNHSTETPSLTAAVPSSVSVPRAPSISPSTLSPATSNHSQHYANEDSKMGSTVTAAVIGIIVPIVVIALLCMSGYLIWRNWKRKNTKSMNFDNPVYRKTTEEEDEDELHIGRTAQIGHVYPAAISSFDRPLWAEPCLGETREPEDPAPALKELFVLPGEPRSQLHQLPKNPLSELPVVKSKRVALSLEDDGLP

SEQ ID NO: 3638 - protein, 131 aa, Homo sapiens
LPRRADMQAPRAALVFALVIALVPVGRGNYEELENSGDTTVESERPNKVTIPSTFAAVTIKETLNANINSTNFAPDENQLEFILMVLIPLILLVLLLLSVVFLATYYKRKRTKQEPSSQGSQSALQTYLLV

SEQ ID NO: 3639 - protein, 516 aa, Homo sapiens
VGPRRADMGCSAKARWAAGALGVAGLLCAVLGAVMIVMVPSLIKQQVLKNVRIDPSSLSFNMWKEIPIPFYLSVYFFDVMNPSEILKGEKPQVRERGPYVYREFRHKSNITFNNNDTVSFLEYRTFQFQPSKSHGSESDYIVMPNILVLGAAVMMENKPMTLKLIMTLAFTTLGERAFMNRTVGEIMWGYKDPLVNLINKYFPGMFPFKDKFGLFAELNNSDSGLFTVFTGVQNISRIHLVDKWNGLSKVDFWHSDQCNMINGTSGQMWPPFMTPESSLEFYSPEACRSMKLMYKESGVFEGIPTYRFVAPKTLFANGSIYPPNEGFCPCLESGIQNVSTCRFSAPLFLSHPHFLNADPVLAEAVTGLHPNQEAHSLFLDIHPVTGIPMNCSVKLQLSLYMKSVAGIGQTGKIEPVVLPLLWFAESGAMEGETLHTFYTQLVLMPKVMHYAQYVLLALGCVLLLVPVICQIRSQEKCYLFWSSSKKGSKDKEAIQAYSESLMTSAPKGSVLQEAKL

SEQ ID NO: 3640 - protein, 1833 aa, Homo sapiens
MDGVSSEANEENDNIERPVRRRHSSILKPPRSPLQDLRGGNERVQESNALRNKKNSRRVSFADTIKVFQTESHMKIVRKSEMEETETGENLLLIQNKKLEDNYCEITGMNTLLSAPIHTQMQQKEFSIIEHTRERKHANDQTVIFSDENQMDLTSSHTVMITKGLLDNPISEKSTKIDTTSFLANLKLHTEDSRMKKEVNFSVDQNTSSENKIDFNDFIKRLKTGKCSAFPDVPDKENFEIPIYSKEPNSASSTHQMHVSLKEDENNSNITRLFREKDDGMNFTQCHTANIQTLIPTSSETNSRESKGNDITIYGNDFMDLTFNHTLQILPATGNFSEIENQTQNAMDVTTGYGTKASGNKTVFKSKQNTAFQDLSINSADKIHITRSHIMGAETHIVSQTCNQDARILAMTPESIYSNPSIQGCKTVFYSSCNDAMEMTKCLSNMREEKNLLKHDSNYAKMYCNPDAMSSLTEKTIYSGEENMDITKSHTVAIDNQIFKQDQSNVQIAAAPTPEKEMMLQNLMTTSEDGKMNVNCNSVPHVSKERIQQSLSNPLSISLTDRKTELLSGENMDLTESHTSNLGSQVPLAAYNLAPESTSESHSQSKSSSDECEEITKSRNEPFQRSDIIAKNSLTDTWNKDKDWVLKILPYLDKDSPQSADCNQEIATSHNIVYCGGVLDKQITNRNTVSWEQSLFSTTKPLFSSGQFSMKNHDTAISSHTVKSVLGQNSKLAEPLRKSLSNPTPDYCHDKMIICSEEEQNMDLTKSHTVVIGFGPSELQELGKTNLEHTTGQLTTMNRQIAVKVEKCGKSPIEKSGVLKSNCIMDVLEDESVQKPKFPKEKQNVKIWGRKSVGGPKIDKTIVFSEDDKNDMDITKSYTIEINHRPLLEKRDCHLVPLAGTSETILYTCRQDDMEITRSHTTALECKTVSPDEITTRPMDKTVVFVDNHVELEMTESHTVFIDYQEKERTDRPNFELSQRKSLGTPTVICTPTEESVFFPGNGESDRLVANDSQLTPLEEWSNNRGPVEVADNMELSKSATCKNIKDVQSPGFLNEPLSSKSQRRKSLKLKNDKTIVFSENHKNDMDITQSCMVEIDNESALEDKEDFHLAGASKTILYSCGQDDMEITRSHTTALECKTLLPNEIAIRPMDKTVLFTDNYSDLEVTDSHTVFIDCQATEKILEENPKFGIGKGKNLGVSFPKDNSCVQEIAEKQALAVGNKIVLHTEQKQQLFAATNRTTNEIIKFHSAAMDEKVIGKVVDQACTLEKAQVESCQLNNRDRRNVDFTSSHATAVCGSSDNYSCLPNVISCTDNLEGSAMLLCDKDEEKANYCPVQNDLAYANDFASEYYLESEGQPLSAPCPLLEKEEVIQTSTKGQLDCVITLHKDQDLIKDPRNLLANQTLVYSQDLGEMTKLNSKRVSFKLPKDQMKVYVDDIYVIPQPHFSTDQPPLPKKGQSSINKEEVILSKAGNKSLNIIENSSAPICENKPKILNSEEWFAAACKKELKENIQTTNYNTALDFHSNSDVTKQVIQTHVNAGEAPDPVITSNVPCFHSIKPNLNNLNGKTGEFLAFQTVHLPPLPEQLLELGNKAHNDMHIVQATEIHNINIISSNAKDSRDEENKKSHNGAETTSLPPKTVFKDKVRRCSLGIFLPRLPNKRNCSVTGIDDLEQIPADTTDINHLETQPVSSKDSGIGSVAGKLNLSPSQYINEENLPVYPDEINSSDSINIETEEKALIETYQKEISPYENKMGKTCNSQKRTWVQEEEDIHKEKKIRKNEIKFSDTTQDREVSSVLNQRMFLNFGFCFVFLNCGYSQILILVSGRQKIIIST

SEQ ID NO: 3641 - protein, 123 aa, Homo sapiens
MEPRTRVGPLLVLPDACKQPIRPRPWCHSRNTVSSCLGTRGKYGEGAKQETFTFALTLVFIQCVINAVFAKIWWIVPGAGSMLPVLSPIWVPWSPAIQHYSLSTTQLRSLVNPASQSQSCSLG

SEQ ID NO: 3642 - protein, 130 aa, Homo sapiens
MPWLPGPPGPAAGPLRRGCRGTAFPLPWTARCPGLRPQIPLPQRRGAVTPTPASPKPPWGPFRPPYSIFQTPGDHRPSQWLQGLPQRSPKMDTQPQRQQEKHMGIFFLYFNLIPLKCLFFIVFFIIYIIY

SEQ ID NO: 3643 - protein, 905 aa, Homo sapiens
MSHTRERDAGSKDSVATMLSRLFRMHGLFVASHPWEVIVGTVTLTICMMSMNMFTGNNKICGWNYECPKFEEDVLSSDIIILTITRCIAILYIYFQFQNLRQLGSKYILGIAGLFTIFSSFVFSTVVIHFLDKELTGLNEALPFFLLLIDLSRASTLAKFALSSNSQDEVRENIARGMAILGPTFTLDALVECLVIGVGTMSGVRQLEIMCCFGCMSVLANYFVFMTFFPACVSLVLELSRESREGRPIWQLSHFARVLEEEENKPNPVTQRVKMIMSLGLVLVHAHSRWIADPSPQNSTADTSKVSLGLDENVSKRIEPSVSLWQFYLSKMISMDIEQVITLSLALLLAVKYIFFEQTETESTLSLKNPITSPVVTQKKVPDNCCRREPMLVRNNQKCDSVEEETGINRERKVEVIKPLVAETDTPNRATFVVGNSSLLDTSSVLVTQEPEIELPREPRPNEECLQILGNAEKGAKFLSDAEIIQLVNAKHIPAYKLETLMETHERGVSIRRQLLSKKLSEPSSLQYLPYRDYNYSLVMGACCENVIGYMPIPVGVAGPLCLDEKEFQVPMATTEGCLVASTNRGCRAIGLGGGASSRVLADGMTRGPVVRLPRACDSAEVKAWLETSEGFAVIKEAFDSTSRFARLQKLHTSIAGRNLYIRFQSRSGDAMGMNMISKGTEKALSKLHEYFPEMQILAVSGNYCTDKKPAAINWIEGRGKSVVCEAVIPAKVVREVLKTTTEAMIEVNINKNLVGSAMAGSIGGYNAHAANIVTAIYIACGQDAAQNVGSSNCITLMEASGPTNEDLYISCTMPSIEIGTVGGGTNLLPQQACLQMLGVQGACKDNPGENARQLARIVCGTVMAGELSLMAALAAGHLVKSHMIHNRSKINLQDLQGACTKKTA

SEQ ID NO: 3644 - protein, 309 aa, Homo sapiens
LGYLLYLVFGAVVFSSVELPYEDLLRQELRKLKRRFLEEHECLSEQQLEQFLGRVLEASNYGVSVLSNASGNWNWDFTSALFFASTVLSTTGYGHTVPLSDGGKAFCIIYSVIGIPFTLLFLTAVVQRITVHVTRRPVLYFHIRWGFSKQVVAIVHAVLLGFVTVSCFFFIPAAVFSVLEDDWNFLESFYFCFISLSTIGLGDYVPGEGYNQKFRELYKIGITCYLLLGLIAMLVVLETFCELHELKKFRKMFYVKKDKDEDQVHIIEHDQLSFSSITDQAAGMKEDQKQNEPFVATQSSACVDGPANH

SEQ ID NO: 3645 - protein, 1553 aa, Homo sapiens
VSRRAEEAPARTMSFLEEARAAGRAVVLALVLLLLPAVPVGASVPPRPLLPLQPGMPHVCAEQELTLVGRRQPCVQALSHTVPVWKAGCGWQAWCVGHERRTVYYMGYRQVYTTEARTVLRCCRGWMQQPDEEGCLSAECSASLCFHGGRCVPGSAQPCHCPPGFQGPRCQYDVDECRTHNGGCQHRCVNTPGSYLCECKPGFRLHTDSRTCLAINSCALGNGGCQHHCVQLTITRHRCQCRPGFQLQEDGRHCVRRSPCANRNGSCMHRCQVVRGLARCECHVGYQLAADGKACEDVDECAAGLAQCAHGCLNTQGSFKCVCHAGYELGADGRQCYRIEMEIVNSCEANNGGCSHGCSHTSAGPLCTCPRGYELDTDQRTCIDVDDCADSPCCQQVCTNNPGGYECGCYAGYRLSADGCGCEDVDECASSRGGCEHHCTNLAGSFQCSCEAGYRLHEDRRGCSPLEEPMVDLDGELPFVRPLPHIAVLQDELPQLFQDDDVGADEEEAELRGEHTLTEKFVCLDDSFGHDCSLTCDDCRNGGTCLLGLDGCDCPEGWTGLICNETCPPDTFGKNCSFSCSCQNGGTCDSVTGACRCPPGVSGTNCEDGCPKGYYGKHCRKKCNCANRGRCHRLYGACLCDPGLYGRFCHLTCPPWAFGPGCSEECQCVQPHTQSCDKRDGSCSCKAGFRGERCQAECELGYFGPGCWQACTCPVGVACDSVSGECGKRCPAGFQGEDCGQECPVGTFGVNCSSSCSCGGAPCHGVTGQCRCPPGRTGEDCEADCPEGRWGLGCQEICPACQHAARCDPETGACLCLPGFVGSRCQDVCPAGWYGPSCQTRCSCANDGHCHPATGHCSCAPGWTGFSCQRACDTGHWGPDCSHPCNCSAGHGSCDAISGLCLCEAGYVGPRCEQQCPQGHFGPGCEQRCQCQHGAACDHVSGACTCPAGWRGTFCEHACPAGFFGLDCRSACNCTAGAACDAVNGSCLCPAGRRGPRCAETCPAHTYGHNCSQACACFNGASCDPVHGQCHCAPGWMGPSCLQACPAGLYGDNCRHSCLCQNGGTCDPVSGHCACPEGWAGLACEKECLPRDVRAGCRHSGGCLNGGLCDPHTGRCLCPAGWTGDKCQSPCLRGWFGEACAQRCSCPPGAACHHVTGACRCPPGFTGSGCEQACPPGSFGEDCAQMCQCPGENPACHPATGTCSCAAGYHGPSCQQRCPPGRYGPGCEQLCGCLNGGSCDAATGACRCPTGFLGTDCNLTCPQGRFGPNCTHVCGCGQGAACDPVTGTCLCPPGRAGVRCERGCPQNRFGVGCEHTCSCRNGGLCHASNGSCSCGLGWTGRHCELACPPGRYGAACHLECSCHNNSTCEPATGTCRCGPGFYGQACEHPCPPGFHGAGCQGLCWCQHGAPCDPISGRCLCPAGFHGHFCERGCEPGSFGEGCHQRCDCDGGAPCDPVTGLCLCPPGRSGATCNLDCRRGQFGPSCTLHCDCGGGADCDPVSGQCHCVDGYMGPTCREGGPLRLPENPSLAQGSAGTLPASSRPTSRSGGPARH

SEQ ID NO: 3646 - protein, 417 aa, Homo sapiens
IAVAYFGLTTLSASALAVALAFIIKPGSGAQTLQSSDLGLEDSGPPPVPKETVDSFLDLARNLFPSNLVVAAFRTYATDYKVVTQNSSSGNVTHEKIPIGTEIEGMNILGLVLFALVLGVALKKLGSEGEDLIRFFNSLNEATMVLVSWIMWYVPVGIMFLVGSKIVEMKDIIVLVTSLGKYIFASILGHVIHGGIVLPLIYFVFTRKNPFRFLLGLLAPFATAFATCSSSATLPSMMKCIEENNGVDKRISRFILPIGATVNMDGAAIFQCVAAVFIAQLNNVELNAGQIFTILVTATASSVGAAGVPAGGVLTIAIILEAIGLPTHDLPLILAVDWIVDRTTTVVNVEGDALGAGILHHLNQKATKKGEQELAEVKVEAIPNCKSEEETSPLVTHQNPAGPVASAPELESKESVL

SEQ ID NO: 3647 - protein, 1116 aa, Homo sapiens
VGPGAAARGGEGGCGSSSAAASDPARSAGRPLQVPAPLPVRPPMAAAGQLCLLYLSAGLLSRLGAAFNLDTREDNVIRKYGDPGSLFGFSLAMHWQLQPEDKRLLLVGAPRAEALPLQRANRTGGLYSCDITARGPCTRIEFDNDADPTSESKEDQWMGVTVQSQGPGGKVVTCAHRYEKRQHVNTKQESRDIFGRCYVLSQNLRIEDDMDGGDWSFCDGRLRGHEKFGSCQQGVAATFTKDFHYIVFGAPGTYNWKGIVRVEQKNNTFFDMNIFEDGPYEVGGETEHDESLVPVPANSYLGFSLDSGKGIVSKDEITFVSGAPRANHSGAVVLLKRDMKSAHLLPEHIFDGEGLASSFGYDVAVVDLNKDGWQDIVIGAPQYFDRDGEVGGAVYVYMNQQGRWNNVKPIRLNGTKDSMFGIAVKNIGDINQDGYPDIAVGAPYDDLGKVFIYHGSANGINTKPTQVLKGISPYFGYSIAGNMDLDRNSYPDVAVGSLSDSVTIFRSRPVINIQKTITVTPNRIDLRQKTACGAPSGICLQVKSCFEYTANPAGYNPSISIVGTLEAEKERRKSGLSSRVQFRNQGSEPKYTQELTLKRQKQKVCMEETLWLQDNIRDKLRPIPITASVEIQEPSSRRRVNSLPEVLPILNSDEPKTAHIDVHFLKEGCGDDNVCNSNLKLEYKFCTREGNQDKFSYLPIQKGVPELVLKDQKDIALEITVTNSPSNPRNPTKDGDDAHEAKLIATFPDTLTYSAYRELRAFPEKQLSCVANQNGSQADCELGNPFKRNSNVTFYLVLSTTEVTFDTPDLDINLKLETTSNQDNLAPITAKAKVVIELLLSVSGVAKPSQVYFGGTVVGEQAMKSEDEVGSLIEYEFRVINLGKPLTNLGTATLNIQWPKEISNGKWLLYLVKVESKGLEKVTCEPQKEINSLNLTESHNSRKKREITEKQIDDNRKFSLFAERKYQTLNCSVNVNCVNIRCPLRGLDSKASLILRSRLWNSTFLEEYSKLNYLDILMRAFIDVTAAAENIRLPNAGTQVRVTVFPSKTVAQYSGVPWWIILVAILAGILMLALLVFILWKCGFFKRNKKDHYDATYHKAEIHAQPSDKERLTSDA

SEQ ID NO: 3648 - protein, 163 aa, Homo sapiens
LAADHRHSEDMSVGVSTSAPLSPTSGTSVGMSTFSIMDYVVFVLLLVLSLAIGLYHACRGWGRHTVGELLMADRKMGCLPVALSLLATFQSAVAILGVPSEIYRFGTQYWFLGCCYFLGLLIPAHIFIPVFYRLHLTSAYEYLELRFNKTVRVCGTVTFIFQM

SEQ ID NO: 3649 - protein, 589 aa, Homo sapiens
LLLLLVGGAFLGACVAGSDEPGPEGLTSTSLLDLLLPTGLEPLDSEEPSETMGLGAGLGAPGSGFPSEENEESRILQPPQYFWEEEEELNDSSLDLGPTADYVFPDLTEKAGSIEDTSQAQELPNLPSPLPKMNLVEPPWHMPPREEEEEEEEEEEREKEEVEKQEEEEEEELLPVNGSQEEAKPQVRDFSLTSSSQTPGATKSRHEDSGDQASSGVEVESSMGPSLLLPSVTPTTVTPGDQDSTSQEAEATVLPAAGLGVEFEAPQEASEEATAGAAGLSGQHEEVPALPSFPQTTAPSGAEHPDEDPLGSRTSASSPLAPGDMELTPSSATLGQEDLNQQLLEGQAAEAQSRIPWDSTQVICKDWSNLAGKNYIILNMTENIDCEVFRQHRGPQLLALVEEVLPRHGSGHHGAWHISLSKPSEKEQHLLMTLVGEQGVVPTQDVLSMLGDIRRSLEEIGIQNYSTTSSCQARASQVRSDYGTLFVVLVVIGAICIIIIALGLLYNCWQRRLPKLKHVSHGEELRFVENGCHDNPTLDVASDSQSEMQEKHPSLNGGGALNGPGSWGALMGGKRDPEDSDVFEEDTHL

SEQ ID NO: 3650 - protein, 360 aa, Homo sapiens
KQAPHQTLAARFMDGHITFQTAATVKIPTTTPATTKNTATTSPITYTLVTTQATPNNSHTAPPVTEVTVGPSLAPYSLPPTITPPAHTTGTSSSTVSHTTGNTTQPSNQTTLPATLSIALHKSTTGQKPVQPTHAPGTTAAAHNTTRTAAPASTVPGPTLAPQPSSVKTGIYQVLNGSRLCIKAEMGIQLIVQDKESVFSPRRYFNIDPNATQASGNCGTRKSNLLLNFQGGFVNLTFTKDEESYYISEVGAYLTVSDPETIYQGIKHAVVMFQTAVGHSFKCVSEQSLQLSAHLQVKTTDVQLQAFDFEDDHFGNVDECSSDYTIVLPVIGAIVVGLCLMGMGVYKIRLRCQSSGYQRI

SEQ ID NO: 3651 - protein, 499 aa, Homo sapiens
RRSPGRKEGYCRNSESFFPSSLPFAEVSAGLGALLLELPRDCLGTGTAVALGPPLRTSPEWVRRVMEGAELAGKILSTWLTLVLGFILLPSVFGVSLGISEIYMKILVKTLEWATIRIEKGTPKESILKNSASVGIIQRDESPMEKGLSGLRGRDFELSDVFYFSKKGLEAIVEDEVTQRFSSEELVSWNLLTRTNVNFQYISLRLTMVWVLGVIVRYCVLLPLRVTLAFIGISLLVIGTTLVGQLPDSSLKNWLSELVHLTCCRICVRALSGTIHYHNKQYRPQKGGICVANHTSPIDVLILTTDGCYAMVGQVHGGLMGIIQRAMVKACPHVWFERSEMKDRHLVTKRLKEHIADKKKLPILIFPEGTCINNTSVMMFKKGSFEIGGTIHPVAIKYNPQFGDAFWNSSKYNMVSYLLRMMTSWAIVCDVWYMPPMTREEGEDAVQFANRVKSAIAIQGGLTELPWDGGLKRAKVKDIFKEEQQKNYSKMIVGNGSLS

SEQ ID NO: 3652 - protein, 157 aa, Homo sapiens
VRSTNSSVRKMAGNSILLAAVSILSACQQSYFALQVGKARLKYKVTPPAVTGSPEFERVFRAQQNCVEFYPIFIITLWMAGWYFNQVFATCLGLVYIYGRHLYFWGYSEAAKKRITGFRLSLGILALLTLLGALGIANSFLDEYLDLNIAKKLRRQF

SEQ ID NO: 3653 - protein, 344 aa, Homo sapiens
LKSWREENTSHPASGKGPLLDMSPAAAAEPDGDQQDRHVSKLIFCFFVFGAVLLCVGVLLSIFGFQACQYKPLPDCPMVLKVAGPACAVVGLGAVILARSRAQLQLRAGLQRGQQMDPDRAFICGESRQFAQCLIFGFLFLTSGMLISVLGIWVPGCGSNWAQEPLNETDTGDSEPRMCGFLSLQIMGPLIVLVGLCFFVVAHVKKRNTLNAGQDASEREEGQIQIMEPVQVTVGDSVIIFPPPPPPYFPESSASAVAESPGTNSLLPNENPPSYYSIFNYGTPTSEGAASERDCESIYTISGTNSSSEASHTPHLPSELPPRYEEKENAAATFLPLSSEPSPP

SEQ ID NO: 3654 - protein, 64 aa, Homo sapiens
VESGDDVQKWHLERGRKRRKNRSSASDLRWLKERMYLVSAISLHPSMTLLSMSLIFLARKPSAV

SEQ ID NO: 3655 - protein, 281 aa, Homo sapiens
VLTTTAFPFVSVMSWKKALRIPGDLRVATVTLMLAMLSSLLAEGRDSPEDFVFQFKGMCYFTNGTERVRLVTRYIYNREEYARFDSDVGVYRAVTPQGRPDAEYWNSQKEVLEGTRAELDTVCRHNYEVAFRGILQRRVEPTVTISPSRTEALNHHNLLVCSVTDFYPGQIKVRWFRNDQEETAGVVSTPLIRNGDWTFQILVMLEMTPQRGDVYTCHVEHPSLQSPITVEWRAQSESAQSKMLSGVGGFVLGLIFLGLGLIIRQRSQKGPQGPPPAGLLH

SEQ ID NO: 3656 - protein, 532 aa, Homo sapiens
RRPCASRGNHPRAPGREDAEQGVLRAGTGAATSRRCRMAAEPQPSSLSYRTTGSTYLHPLSELLGIPLDQVNFVVCQLVALFAAFWFRIYLRPGTTSSDVRHAVATIFGIYFVIFCFGWYSVHLFVLVLMCYAIMVTASVSNIHRYSFFVAMGYLTICHISRIYIFHYGILTTDFSGPLMIVTQKITTLAFQVHDGLGRRAEDLSAEQHRLAIKVKPSFLEYLSYLLNFMSVIAGPCNNFKDYIAFIEGKHIHMKLLEVNWKRKGFHSLPEPSPTGAVIHKLGITLVSLLLFLTLTKTFPVTCLVDDWFVHKASFPARLCYLYVVMQASKPKYYFAWTLADAVNNAAGFGFSGVDKNGNFCWDLLSNLNIWKIETATSFKMYLENWNIQTATWLKCVCYQRVPWYPTVLTFILSALWHGVYPGYYFTFLTGILVTLAARAVRNNYRHYFLSSRALKAVYDAGTWAVTQLAVSYTVAPFVMLAVEPTISLYKSMYFYLHIISLLIILFLPMKPQAHTQRRPQTLNSINKRKTD

SEQ ID NO: 3657 - protein, 1267 aa, Homo sapiens
KNFFKLNNKSEKDKKEKKPTVSVFSMFRYSNWLDKLYMVVGTLAAIIHGAGLPLMMLVFGEMTDIFANAGNLEDLMSNITNRSDINDTGFFMNLEEDMTRYAYYYSGIGAGVLVAAYIQVSFWCLAAGRQIHKIRKQFFHAIMRQEIGWFDVHDVGELNTRLTDDVSKINEGIGDKIGMFFQSMATFFTGFIVGFTRGWKLTLVILAISPVLGLSAAVWAKILSSFTDKELLAYAKAGAVAEEVLAAIRTVIAFGGQKKELERYNKNLEEAKRIGIKKAITANISIGAAFLLIYASYALAFWYGTTLVLSGEYSIGQVLTVFFSVLIGAFSVGQASPSIEAFANARGAAYEIFKIIDNKPSIDSYSKSGHKPDNIKGNLEFRNVHFSYPSRKEVKILKGLNLKVQSGQTVALVGNSGCGKSTTVQLMQRLYDPTEGMVSVDGQDIRTINVRFLREIIGVVSQEPVLFATTIAENIRYGRENVTMDEIEKAVKEANAYDFIMKLPHKFDTLVGERGAQLSGGQKQRIAIARALVRNPKILLLDEATSALDTESEAVVQVALDKARKGRTTIVIAHRLSTVRNADVIAGFDDGVIVEKGNHDELMKEKGIYFKLVTMQTAGNEVELENAADESKSEIDALEMSSNDSRSSLIRKRSTRRSVRGSQAQDRKLSTKEALDESIPPVSFWRIMKLNLTEWPYFVVGVFCAIINGGLQPAFAIIFSKIIGVFTRIDDPETKRQNSNLFSLLFLALGIISFITFFLQGFTFGKAGEILTKRLRYMVFRSMLRQDVSWFDDPKNTTGALTTRLANDAAQVKGAIGSRLAVITQNIANLGTGIIISFIYGWQLTLLLLAIVPIIAIAGVVEMKMLSGQALKDKKELEGSGKIATEAIENFRTVVSLTQEQKFEHMYAQSLQVPYRNSLRKAHIFGITFSFTQAMMYFSYAGCFRFGAYLVAHKLMSFEDVLLVFSAVVFGAMAVGQVSSFAPDYAKAKISAAHIIMIIEKTPLIDSYSTEGLMPNTLEGNVTFGEVVFNYPTRPDIPVLQGLSLEVKKGQTLALVGSSGCGKSTVVQLLERFYDPLAGKVLLDGKEIKRLNVQWLRAHLGIVSQEPILFDCSIAENIAYGDNSRVVSQEEIVRAAKEANIHAFIESLPNKYSTKVGDKGTQLSGGQKQRIAIARALVRQPHILLLDEATSALDTESEKVVQEALDKAREGRTCIVIAHRLSTIQNADLIVVFQNGRVKEHGTHQQLLAQKGIYFSMVSVQAGTKRQ

SEQ ID NO: 3658 - protein, 694 aa, Homo sapiens
LQLPVPPLGPAPRQALLVMAAASSPPRAERKRWGWGRLPGARRGSAGLAKKCPFSLELAEGGPAGGALYAPIAPGAPGPAPPASPAAPAAPPVASDLGPRPPVSLDPRVSIYSTRRPVLARTHVQGRVYNFLERPTGWKCFVYHFAVFLIVLVCLIFSVLSTIEQYAALATGTLFWMEIVLVVFFGTEYVVRLWSAGCRSKYVGLWGRLRFARKPISIIDLIVVVASMVVLCVGSKGQVFATSAIRGIRFLQILRMLHVDRQGGTWRLLGSVVFIHRQELITTLYIGFLGLIFSSYFVYLAEKDAVNESGRVEFGSYADALWWGVVTVTTIGYGDKVPQTWVGKTIASCFSVFAISFFALPAGILGSGFALKVQQKQRQKHFNRQIPAAASLIQTAWRCYAAENPDSSTWKIYIRKAPRSHTLLSPSPKPKKSVVVKKKKFKLDKDNGVTPGEKMLTVPHITCDPPEERRLDHFSVDGYDSSVRKSPTLLEVSMPHFMRTNSFAEDLDLEGETLLTPITHISQLREHHRATIKVIRRMQYFVAKKKFQQARKPYDVRDVIEQYSQGHLNLMVRIKELQRRLDQSIGKPSLFISVSEKSKDRGSNTIGARLNRVEDKVTQLDQRLALITDMLHQLLSLHGGSTPGSGGPPREGGAHITQPCGSGGSVDPELFLPSNTLPTYEQLTVPRRGPDEGS

SEQ ID NO: 3659 - protein, 493 aa, Homo sapiens
KEKFPSAVKLFGKRLEGPMAAKSQPNIPKAKSLDGVTNDRTASQGQWGRAWEVDWFSLASVIFLLLFAPFIVYYFIMACDQYSCALTGPVVDIVTGHARLSDIWAKTPPITRKAAQLYTLWVTFQVLLYTSLPDFCHKFLPGYVGGIQEGAVTPAGVVNKYQINGLQAWLLTHLLWFANAHLLSWFSPTIIFDNWIPLLWCANILGYAVSTFAMVKGYFFPTSARDCKFTGNFFYNYMMGIEFNPRIGKWFDFKLFFNGRPGIVAWTLINLSFAAKQRELHSHVTNAMVLVNVLQAIYVIDFFWNETWYLKTIDICHDHFGWYLGWGDCVWLPYLYTLQGLYLVYHPVQLSTPHAVGVLLLGLVGYYIFRVANHQKDLFRRTDGRCLIWGRKPKVIECSYTSADGQRHHSKLLVSGFWGVARHFNYVGDLMGSLAYCLACGGGHLLPYFYIIYMAILLTHRCLRDEHRCASKYGRDWERYTAAVPYRLLPGIF

SEQ ID NO: 3660 - protein, 53 aa, Homo sapiens
VCVLILAIGARACEPVGVAAAGTIGLSRGRHVAFRGAFMGLSGMGFLFLIVNR

SEQ ID NO: 3661 - protein, 76 aa, Homo sapiens
VVGGVVAVGTVLVALSAMGFTSVGIAASSIAAKMMSTAAIANGGGVAAGSLVAILQSVGECSGQDDQSQEMIQPRG

SEQ ID NO: 3662 - protein, 1434 aa, Homo sapiens
IFSHGLQGCLEAQGGQVRVTPACNTSLPAQRWKWVSRNRLFNLGTMQCLGTGWPGTNTTASLGMYECDREALNLRWHCRTLGDQLSLLLGARTSNISKPGTLERGDQTRSGQWRIYGSEEDLCALPYHEVYTIQGNSHGKPCTIPFKYDNQWFHGCTSTGREDGHLWCATTQDYGKDERWGFCPIKSNDCETFWDKDQLTDSCYQFNFQSTLSWREAWASCEQQGADLLSITEIHEQTYINGLLTGYSSTLWIGLNDLDTSGGWQWSDNSPLKYLNWESDQPDNPSEENCGVIRTESSGGWQNRDCSIALPYVCKKKPNATAEPTPPDRWANVKVECEPSWQPFQGHCYRLQAEKRSWQESKKACLRGGGDLVSIHSMAELEFITKQIKQEVEELWIGLNDLKLQMNFEWSDGSLVSFTHWHPFEPNNFRDSLEDCVTIWGPEGRWNDSPCNQSLPSICKKAGQLSQGAAEEDHGCRKGWTWHSPSCYWLGEDQVTYSEARRLCTDHGSQLVTITNRFEQAFVSSLIYNWEGEYFWTALQDLNSTGSFFWLSGDEVMYTHWNRDQPGYSRGGCVALATGSAMGLWEVKNCTSFRARYICRQSLGTPVTPELPGPDPTPSLTGSCPQGWASDTKLRYCYKVFSSERLQDKKSWVQAQGACQELGAQLLSLASYEEEHFVANMLNKIFGESEPEIHEQHWFWIGLNRRDPRGGQSWRWSDGVGFSYHNFDRSRHDDDDIRGCAVLDLASLQWVAMQCDTQLDWICKIPRGTDVREPDDSPQGRREWLRFQEAEYKFFEHHSTWAQAQRICTWFQAELTSVHSQAELDFLSHNLQKFSRAQEQHWWIGLHTSESDGRFRWTDGSIINFISWAPGKPRPVGKDKKCVYMTASREDWGDQRCLTALPYICKRSNVTKETQPPDLPTTALGGCPSDWIQFLNKCFQVQGQEPQSRVKWSEAQFSCEQQEAQLVTITNPLEQAFITASLPNVTFDLWIGLHASQRDFQWVEQEPLMYANWAPGEPSGPSPAPSGNKPTSCAVVLHSPSAHFTGRWDDRSCTEETHGFICQKGTDPSLSPSPAALPPAPGTELSYLNGTFRLLQKPLRWHDALLLCESRNASLAYVPDPYTQAFLTQAARGLRTPLWIGLAGEEGSRRYSWVSEEPLNYVGWQDGEPQQPGGCTYVDVDGAWRTTSCDTKLQGAVCGVSSGPPPPRRISYHGSCPQGLADSAWIPFREHCYSFHMELLLGHKEARQRCQRAGGAVLSILDEMENVFVWEHLQSYEGQSRGAWLGMNFNPKGGTLVWQDNTAVNYSNWGPPGLGPSMLSHNSCYWIQSNSGLWRPGACTNITMGVVCKLPRAEQSSFSPSALPENPAALVVVLMAVLLLLALLTAALILYRRRQSIERGAFEGARYSRSSSSPTEATEKNILVSDMEMNEQQE

SEQ ID NO: 3663 - protein, 544 aa, Homo sapiens
KEEDSEPKRIENRMLPITDRLLHLLGLEKTAFRIYAVSTLLLFLLFFLFRLLLRFLRLCRSFYITCRRLRCFPQPPRRNWLLGHLGMYLPNEAGLQDEKKVLDNMHHVLLVWMGPVLPLLVLVHPDYIKPLLGASAAIAPKDDLFYGFLKPWLGDGLLLSKGDKWSRHRRLLTPAFHFDILKPYMKIFNQSADIMHAKWRHLAEGSAVSLDMFEHISLMTLDSLQKCVFSYNSNCQEKMSDYISAIIELSALSVRRQYRLHHYLDFIYYRSADGRRFRQACDMVHHFTTEVIQERRRALRQQGAEAWLKAKQGKTLDFIDVLLLARDEDGKELSDEDIRAEADTFMFEGHDTTSSGISWMLFNLAKYPEYQEKCREEIQEVMKGRELEELEWDDLTQLPFTTMCIKESLRQYPPVTLVSRQCTEDIKLPDGRIIPKGIICLVSIYGTHHNPTVWPDSKVYNPYRFDPDNPQQRSPLAYVPFSAGPRNCIGQSFAMAELRVVVALTLLRFRLSVDRTRKVRRKPELILRTENGLWLKVEPLPPRA

SEQ ID NO: 3664 - protein, 193 aa, Homo sapiens
LFALLLFFVGGVAESIRETEVIDPQDLLEGRYFSGALPDDEDVVGPGQESDDFELSGSGDLDDLEDSMIGPEVVHPLVPLDNHIPERAGSGSQVPTEPKKLEENEVIPKRISPVEESEDVSNKVSMSSTVQGSNIFERTEVLAALIVGGIVGILFAVFLILLLMYRMKKKDEGSYDLGKKPIYKKAPTNEFYA

SEQ ID NO: 3665 - protein, 743 aa, Homo sapiens
RLRGVPVWAAGAFRFSSGEESTSHLIMSRRSQRLTRYSQGDDDGSSSSGGSSVAGSQSTLFKDSPLRTLKRKSSNMKRLSPAPQLGPSSDAHTSYYSESLVHESWFPPRSSLEELHGDANWGEDLRVRRRRGTGGSESSRASGLVGRKATEDFLGSSSGYSSEDDYVGYSDVDQQSSSSRLRSAVSRAGSLLWMVATSPGRLFRLLYWWAGTTWYRLTTAASLLDVFVLTRRFSSLKTFLWFLLPLLLLTCLTYGAWYFYPYGLQTFHPALVSWWAAKDSRRPDEGWEARDSSPHFQAEQRVMSRVHSLERRLEALAAEFSSNWQKEAMRLERLELRQGAPGQGGGGGLSHEDTLALLEGLVSRREAALKEDFRRETAARIQEELSALRAEHQQDSEDLFKKIVRASQESEARIQQLKSEWQSMTQESFQESSVKELRRLEDQLAGLQQELAALALKQSSVAEEVGLLPQQIQAVRDDVESQFPAWISQFLARGGGGRVGLLQREEMQAQLRELESKILTHVAEMQGKSAREAAASLSLTLQKEGVIGVTEEQVHHIVKQALQRYSEDRIGLADYALESGGASVISTRCSETYETKTALLSLFGIPLWYHSQSPRVILQPDVHPGNCWAFQGPQGFAVVRLSARIRPTAVTLEHVPKALSPNSTISSAPKDFAIFGFDEDLQQEGTLLGKFTYDQDGEPIQTFHFQAPTMATYQVVELRILTNWGHPEYTCIYRFRVHGEPAH

SEQ ID NO: 3666 - protein, 607 aa, Homo sapiens
MEGTATCNGSGSDTCAQCAHFRDGPHCVSSCPHGVLGAKGPIYKYPDVQNECRPCHENCTQGCKGPELQDCLGQTLVLIGKTHLTMALTVIAGLVVIFMMLGGTFLYWRGRRIQNKRAMRRYLERGESIEPLDPSEKTPIKWMALESIHFGKYTHQSDVWSYGVTVWELMTFGAEPYAGLRLAEVPDLLEKGERLAQPQICTIDVYMVMVKCWMIDENIRPTFKELANEFTRMARDPPRYLVIKRESGPGIAPGPEPHGLTNKKLEEVELEPELDLDLDLEAEEDNLATTTLGSALSLPVGTLNRPRGSQSLLSPSSGYMPMNQGNLGESCQESAVSGSSERCPRPVSLHPMPRGCLASESSEGHVTGSEAELQEKVSMCRSRSRSRSPRPRGDSAYHSQRHSLLTPVTPLSPPGLEEEDVNGYVMPDTHLKGTPSSREGTLSSVGLSSVLGTEEEDEDEEYEYMNRRRRHSPPHPPRPSSLEELGYEYMDVGSDLSASLGSTQSCPLHPVPIMPTAGTTPDEDYEYMNRQRDGGGPGGDYAAMGACPASEQGYEEMRAFQGPGHQAPHVHYARLKTLRSLEATDSAFDNPDYWHSRLFPKANAQRT

SEQ ID NO: 3667 - protein, 1198 aa, Homo sapiens
MAGGAWGRLACYLEFLKKEELKEFQLLLANKAHSRSSSGETPAQPEKTSGMEVASYLVAQYGEQRAWDLALHTWEQMGLRSLCAQAQEGAGHSPSFPYSPSEPHLGSPSQPTSTAVLMPWIHELPAGCTQGSERRVLRQLPDTSGRRWREISASLLYQALPSSPDHESPSQESPNAPTSTAVLGSWGSPPQPSLAPREQEAPGTQWPLDETSGIYYTEIREREREKSEKGRPPWAAVVGTPPQAHTSLQPHHHPWEPSVRESLCSTWPWKNEDFNQKFTQLLLLQRPHPRSQDPLVKRSWPDYVEENRGHLIEIRDLFGPGLDTQEPRIVILQGAAGIGKSTLARQVKEAWGRGQLYGDRFQHVFYFSCRELAQSKVVSLAELIGKDGTATPAPIRQILSRPERLLFILDGVDEPGWVLQEPSSELCLHWSQPQPADALLGSLLGKTILPEASFLITARTTALQNLIPSLEQARWVEVLGFSESSRKEYFYRYFTDERQAIRAFRLVKSNKELWALCLVPWVSWLACTCLMQQMKRKEKLTLTSKTTTTLCLHYLAQALQAQPLGPQLRDLCSLAAEGIWQKKTLFSPDDLRKHGLDGAIISTFLKMGILQEHPIPLSYSFIHLCFQEFFAAMSYVLEDEKGRGKHSNCIIDLEKTLEAYGIHGLFGASTTRFLLGLLSDEGEREMENIFHCRLSQGRNLMQWVPSLQLLLQPHSLESLHCLYETRNKTFLTQVMAHFEEMGMCVETDMELLVCTFCIKFSRHVKKLQLIEGRQHRSTWSPTMVVLFRWVPVTDAYWQILFSVLKVTRNLKELDLSGNSLSHSAVKSLCKTLRRPRCLLETLRLAGCGLTAEDCKDLAFGLRANQTLTELDLSFNVLTDAGAKHLCQRLRQPSCKLQRLQLVSCGLTSDCCQDLASVLSASPSLKELDLQQNNLDDVGVRLLCEGLRHPACKLIRLGLDQTTLSDEMRQELRALEQEKPQLLIFSRRKPSVMTPTEGLDTGEMSNSTSSLKRQRLGSERAASHVAQANLKLLDVSKIFPIAEIAEESSPEVVPVELLCVPSPASQGDLHTKPLGTDDDFWGPTGPVATEVVDKEKNLYRVHFPVAGSYRWPNTGLCFVMREAVTVEIEFCVWDQFLGEINPQHSWMVAGPLLDIKAEPGAVEAVHLPHFVALQGREKKQCHQTPSESWSHETGASHRR

SEQ ID NO: 3668 - protein, 122 aa, Homo sapiens
MLARLWGQADCCETKDLVVQQAGTNKTDVVCGPQDRLRALVVIPIIFGILFAILLVLVFIKKVAKKPTNKAPHPKQEPQEINFPDDLPGSNTAAPVQETLHGCQPVTQEDGKESRISVQERQ

SEQ ID NO: 3669 - protein, 86 aa, Homo sapiens
MVIIIAIGAGIILGYSYKRGKDLKEQHDQKVCEREMQRITLPLSAFTNPTCEIVDEKTVVVHTSQTPVDPQEGTTPLMGQAGTPGA

SEQ ID NO: 3670 - protein, 246 aa, Homo sapiens
LAAALGLLTAGVSALEVYTPKEIFVANGTQGKLTCKFKSTSTTGGLTSVSWSFQPEGADTTVSFFHYSQGQVYLGNYPPFKDRISWAGDLDKKDASINIENMQFIHNGTYICDVKNPPDIVVQPGHIRLYVVEKENLPVFPVWVVVGIVTAVVLGLTLLISMILAVLYRRKNSKRDYTGCSTSESLSPVKQAPRKSPSDTEGLVKSLPSGSHQGPVIYAQLDHSGGHHSDKINKSESVVYADIRKN

SEQ ID NO: 3671 - protein, 199 aa, Homo sapiens
TGTDARCCRVHTTRCCRDYPGEECCSEWDCMCVQPEFHCGDPCCTTCRHHPCPPGQGVQSQGKFSFGFQCIDCASGTFSGGHEGHCKPWTDCTQFGFLTVFPGNKTHNAVCVPGSPPAEPLGWLTVVLLAVAACVLLLTSAQLGLHIWQLRSQCMWPRETQLLLEVPPSTEDARSCQFPEEERGERSAEEKGRLGDLWV

SEQ ID NO: 3672 - protein, 1077 aa, Homo sapiens
VRPPMAAAGQLCLLYLSAGLLSRLGAAFNLDTREDNVIRKYGDPGSLFGFSLAMHWQLQPEDKRLLLVGAPRAEALPLQRANRTGGLYSCDITARGPCTRIEFDNDADPTSESKEDQWMGVTVQSQGPGGKVVTCAHRYEKRQHVNTKQESRDIFGRCYVLSQNLRIEDDMDGGDWSFCDGRLRGHEKFGSCQQGVAATFTKDFHYIVFGAPGTYNWKGIVRVEQKNNTFFDMNIFEDGPYEVGGETEHDESLVPVPANSYLGFSLDSGKGIVSKDEITFVSGAPRANHSGAVVLLKRDMKSAHLLPEHIFDGEGLASSFGYDVAVVDLNKDGWQDIVIGAPQYFDRDGEVGGAVYVYMNQQGRWNNVKPIRLNGTKDSMFGIAVKNIGDINQDGYPDIAVGAPYDDLGKVFIYHGSANGINTKPTQVLKGISPYFGYSIAGNMDLDRNSYPDVAVGSLSDSVTIFRSRPVINIQKTITVTPNRIDLRQKTACGAPSGICLQVKSCFEYTANPAGYNPSISIVGTLEAEKERRKSGLSSRVQFRNQGSEPKYTQELTLKRQKQKVCMEETLWLQDNIRDKLRPIPITASVEIQEPSSRRRVNSLPEVLPILNSDEPKTAHIDVHFLKEGCGDDNVCNSNLKLEYKFCTREGNQDKFSYLPIQKGVPELVLKDQKDIALEITVTNSPSNPRNPTKDGDDAHEAKLIATFPDTLTYSAYRELRAFPEKQLSCVANQNGSQADCELGNPFKRNSNVTFYLVLSTTEVTFDTPDLDINLKLETTSNQDNLAPITAKAKVVIELLLSVSGVAKPSQVYFGGTVVGEQAMKSEDEVGSLIEYEFRVINLGKPLTNLGTATLNIQWPKEISNGKWLLYLVKVESKGLEKVTCEPQKEINSLNLTESHNSRKKREITEKQIDDNRKFSLFAERKYQTLNCSVNVNCVNIRCPLRGLDSKASLILRSRLWNSTFLEEYSKLNYLDILMRAFIDVTAAAENIRLPNAGTQVRVTVFPSKTVAQYSGVPWWIILVAILAGILMLALLVFILWKCGFFKRNKKDHYDATYHKAEIHAQPSDKERLTSDA

SEQ ID NO: 3673 - protein, 438 aa, Homo sapiens
VRRVMEGAELAGKILSTWLTLVLGFILLPSVFGVSLGISEIYMKILVKTLEWATIRIEKGTPKESILKNSASVGIIQRDESPMEKGLSGLRGRDFELSDVFYFSKKGLEAIVEDEVTQRFSSEELVSWNLLTRTNVNFQYISLRLTMVWVLGVIVRYCVLLPLRVTLAFIGISLLVIGTTLVGQLPDSSLKNWLSELVHLTCCRICVRALSGTIHYHNKQYRPQKGGICVANHTSPIDVLILTTDGCYAMVGQVHGGLMGIIQRAMVKACPHVWFERSEMKDRHLVTKRLKEHIADKKKLPILIFPEGTCINNTSVMMFKKGSFEIGGTIHPVAIKYNPQFGDAFWNSSKYNMVSYLLRMMTSWAIVCDVWYMPPMTREEGEDAVQFANRVKSAIAIQGGLTELPWDGGLKRAKVKDIFKEEQQKNYSKMIVGNGSLS

SEQ ID NO: 3674 - protein, 341 aa, Homo sapiens
VLCVLIGLMFEVTAKTAFLFILPQYNISVPTADSETVHYHYGPKDLVTILFYIFITIILHAVVQEYILDKISKRLHLSKVKHSKFNESGQLVVFHFTSVIWCFYVVVTEGYLTNPRSLWEDYPHVHLPFQVKFFYLCQLAYWLHALPELYFQKVRKEEIPRQLQYICLYLVHIAGAYLLNLSRLGLILLLLQYSTEFLFHTARLFYFADENNEKLFSAWAAVFGVTRLFILTLAVLAIGFGLARMENQAFDPEKGNFNTLFCRLCVLLLVCAAQAWLMWRFIHSQLRHWREYWNEQSAKRRVPATPRLPARLIKRESGYHENGVVKAENGTSPRTKKLKSP

SEQ ID NO: 3675 - protein, 362 aa, Homo sapiens
LPGSGWARTQALGSCGAPGVAMNIVVEFFVVTFKVLWAFVLAAARWLVRPKEKSVAGQVCLITGAGSGLGRLFALEFARRRALLVLWDINTQSNEETAGMVRHIYRDLEAADAAALQAGNGEEEILPHCNLQVFTYTCDVGKRENVYLTAERVRKEVGEVSVLVNNAGVVSGHHLLECPDELIERTMMVNCHAHFWTTKAFLPTMLEINHGHIVTVASSLGLFSTAGVEDYCASKFGVVGFHESLSHELKAAEKDGIKTTLVCPYLVDTGMFRGCRIRKEIEPFLPPLKPDYCVKQAMKAILTDQPMICTPRLMYIVTFMKSILPFEAVVCMYRFLGADKCMYPFIAQRKQATNNNEAKNGI

SEQ ID NO: 3676 - protein, 348 aa, Homo sapiens
KFVVFIVAVLLPVRVDSATIPRQDEVPQQTVAPQQQRRSLKEEECPAGSHRSEYTGACNPCTEGVDYTIASNNLPSCLLCTVCKSGQTNKSSCTTTRDTVCQCEKGSFQDKNSPEMCRTCRTGCPRGMVKVSNCTPRSDIKCKNESAASSTGKTPAAEETVTTILGMLASPYHYLIIIVVLVIILAVVVVGFSCRKKFISYLKGICSGGGGGPERVHRVLFRRRSCPSRVPGAEDNARNETLSNRYLQPTQVSEQEIQGQELAELTGVTVELPEEPQRLLEQAEAEGCQRRRLLVPVNDADSADISTLLDASATLEEGHAKETIQDQLVGSEKLFYEEDEAGSATSCL

SEQ ID NO: 3677 - protein, 119 aa, Homo sapiens
LDTMYEAGRVWVRHLEAAGPRVSWLPWVHRYLMENTFFVFLVSALLLAVIYLNIQVVRGQRKVICLLKEQISNEGEDKIFLINKLHSIYERKEREERSRVGTTEEAAAPPALLTDEQDA

SEQ ID NO: 3678 - protein, 93 aa, Homo sapiens
IDPQEGGGVKAIGPLGRRSMRLGPRRRAACGRVAFGSSTFALVPVFAHLSILQSLVPAAGAASPVAISAQHLCYSHVTPGDPGAGAGQGPAPS

SEQ ID NO: 3679 - protein, 395 aa, Homo sapiens
IIKPGSGAQTLQSSDLGLEDSGPPPVPKETVDSFLDLARNLFPSNLVVAAFRTYATDYKVVTQNSSSGNVTHEKIPIGTEIEGMNILGLVLFALVLGVALKKLGSEGEDLIRFFNSLNEATMVLVSWIMWYVPVGIMFLVGSKIVEMKDIIVLVTSLGKYIFASILGHVIHGGIVLPLIYFVFTRKNPFRFLLGLLAPFATAFATCSSSATLPSMMKCIEENNGVDKRISRFILPIGATVNMDGAAIFQCVAAVFIAQLNNVELNAGQIFTILVTATASSVGAAGVPAGGVLTIAIILEAIGLPTHDLPLILAVDWIVDRTTTVVNVEGDALGAGILHHLNQKATKKGEQELAEVKVEAIPNCKSEEETSPLVTHQNPAGPVASAPELESKESVL

SEQ ID NO: 3680 - protein, 104 aa, Homo sapiens
LYPVASVDQVLQIVCVPYQWRVTMLIIVLVNAFVSITVEESVDRWGKCCLPWALGCRKKTPKAKYMYLAQELLVDPEWPPKPQTTTEAKALVKENGSCQIITIT

SEQ ID NO: 3681 - protein, 186 aa, Homo sapiens
TMVKLGNNFAEKGTKQPLLEDGFDTIPLMTPLDVNQLQFPPPDKVVVKTKTEYEPDRKKGKARPPQIAEFTVSITEGVTERFKVSVLVLFALAFLTCVVFLVVYKVYKYDRACPDGFVLKNTQCIPEGLESYYAEQDSSAREKFYTVINHYNLAKQSITRSVSPWMSVLSEEKLSEQETEAAEKSA

SEQ ID NO: 3682 - protein, 35 aa, Homo sapiens
VYVVEDQRRDELGPSTCLTACWTALCCCCLWDMLT

SEQ ID NO: 3683 - protein, 473 aa, Homo sapiens
LACLALDLLFLLFYSFWLCCRRRKSEEHLDADCCCTAWCVIIATLVCSAGIAVGFYGNGETSDGIHRATYSLRHANRTVAGVQDRVWDTAVGLNHTAEPSLQTLERQLAGRPEPLRAVQRLQGLLETLLGYTAAIPFWRNTAVSLEVLAEQVDLYDWYRWLGYLGLLLLDVIICLLVLVGLIRSSKGILVGVCLLGVLALVISWGALGLELAVSVGSSDFCVDPDAYVTKMVEEYSVLSGDILQYYLACSPRAANPFQQKLSGSHKALVEMQDVVAELLRTVPWEQPATKDPLLRVQEVLNGTEVNLQHLTALVDCRSLHLDYVQALTGFCYDGVEGLIYLALFSFVTALMFSSIVCSVPHTWQQKRGPDEDGEEEAAPGPRQAHDSLYRVHMPSLYSCGSSYGSETSIPAAAHTVSNAPVTEYMSQNANFQNPRCENTPLIGRESPPPSYTSSMRAKYLATSQPRPDSSGSH

SEQ ID NO: 3684 - protein, 793 aa, Homo sapiens
IFWIGLISSVCCVFAQTDENRCLKANAKSCGECIQAGPNCGWCTNSTFLQEGMPTSARCDDLEALKKKGCPPDDIENPRGSKDIKKNKNVTNRSKGTAEKLKPEDITQIQPQQLVLRLRSGEPQTFTLKFKRAEDYPIDLYYLMDLSYSMKDDLENVKSLGTDLMNEMRRITSDFRIGFGSFVEKTVMPYISTTPAKLRNPCTSEQNCTSPFSYKNVLSLTNKGEVFNELVGKQRISGNLDSPEGGFDAIMQVAVCGSLIGWRNVTRLLVFSTDAGFHFAGDGKLGGIVLPNDGQCHLENNMYTMSHYYDYPSIAHLVQKLSENNIQTIFAVTEEFQPVYKELKNLIPKSAVGTLSANSSNVIQLIIDAYNSLSSEVILENGKLSEGVTISYKSYCKNGVNGTGENGRKCSNISIGDEVQFEISITSNKCPKKDSDSFKIRPLGFTEEVEVILQYICECECQSEGIPESPKCHEGNGTFECGACRCNEGRVGRHCECSTDEVNSEDMDAYCRKENSSEICSNNGECVCGQCVCRKRDNTNEIYSGKFCECDNFNCDRSNGLICGGNGVCKCRVCECNPNYTGSACDCSLDTSTCEASNGQICNGRGICECGVCKCTDPKFQGQTCEMCQTCLGVCAEHKECVQCRAFNKGEKKDTCTQECSYFNITKVESRDKLPQPVQPDPVSHCKEKDVDDCWFYFTYSVNGNNEVMVHVVENPECPTGPDIIPIVAGVVAGIVLIGLALLLIWKLLMIIHDRREFAKFEKEKMNAKWDTGENPIYKSAVTTVVNPKYEGK

SEQ ID NO: 3685 - protein, 888 aa, Homo sapiens
LSLSRRPHSLQGGGHRIYRGKNIPPSQQITMLQTKDLIWTLFFLGTAVSLQVDIVPSQGEISVGESKFFLCQVAGDAKDKDISWFSPNGEKLTPNQQRISVVWNDDSSSTLTIYNANIDDAGIYKCVVTGEDGSESEATVNVKIFQKLMFKNAPTPQEFREGEDAVIVCDVVSSLPPTIIWKHKGRDVILKKDVRFIVLSNNYLQIRGIKKTDEGTYRCEGRILARGEINFKDIQVIVNVPPTIQARQNIVNATANLGQSVTLVCDAEGFPEPTMSWTKDGEQIEQEEDDEKYIFSDDSSQLTIKKVDKNDEAEYICIAENKAGEQDATIHLKVFAKPKITYVENQTAMELEEQVTLTCEASGDPIPSITWRTSTRNISSEEKASWTRPEKQETLDGHMVVRSHARVSSLTLKSIQYTDAGEYICTASNTIGQDSQSMYLEVQYAPKLQGPVAVYTWEGNQVNITCEVFAYPSATISWFRDGQLLPSSNYSNIKIYNTPSASYLEVTPDSENDFGNYNCTAVNRIGQESLEFILVQADTPSSPSIDQVEPYSSTAQVQFDEPEATGGVPILKYKAEWRAVGEEVWHSKWYDAKEASMEGIVTIVGLKPETTYAVRLAALNGKGLGEISAASEFKTQPVQGEPSAPKLEGQMGEDGNSIKVNLIKQDDGGSPIRHYLVRYRALSSEWKPEIRLPSGSDHVMLKSLDWNAEYEVYVVAENQQGKSKAAHFVFRTSAQPTAIPANGSPTSGLSTGAIVGILIVIFVLLLVVVDITCYFLNKCGLFMCIAVNLCGKAGPGAKGKDMEEGKAAFSKDESKEPIVEVRTEEERTPNHDGGKHTEPNETTPLTEPEKGPVEAKPECQETETKPAPAEVKTVPNDATQTKENESKA

SEQ ID NO: 3686 - protein, 1341 aa, Homo sapiens
RANDALQVLGLLFSLARGSEVGNSQAVCPGTLNGLSVTGDAENQYQTLYKLYERCEVVMGNLEIVLTGHNADLSFLQWIREVTGYVLVAMNEFSTLPLPNLRVVRGTQVYDGKFAIFVMLNYNTNSSHALRQLRLTQLTEILSGGVYIEKNDKLCHMDTIDWRDIVRDRDAEIVVKDNGRSCPPCHEVCKGRCWGPGSEDCQTLTKTICAPQCNGHCFGPNPNQCCHDECAGGCSGPQDTDCFACRHFNDSGACVPRCPQPLVYNKLTFQLEPNPHTKYQYGGVCVASCPHNFVVDQTSCVRACPPDKMEVDKNGLKMCEPCGGLCPKACEGTGSGSRFQTVDSSNIDGFVNCTKILGNLDFLITGLNGDPWHKIPALDPEKLNVFRTVREITGYLNIQSWPPHMHNFSVFSNLTTIGGRSLYNRGFSLLIMKNLNVTSLGFRSLKEISAGRIYISANRQLCYHHSLNWTKVLRGPTEERLDIKHNRPRRDCVAEGKVCDPLCSSGGCWGPGPGQCLSCRNYSRGGVCVTHCNFLNGEPREFAHEAECFSCHPECQPMEGTATCNGSGSDTCAQCAHFRDGPHCVSSCPHGVLGAKGPIYKYPDVQNECRPCHENCTQGCKGPELQDCLGQTLVLIGKTHLTMALTVIAGLVVIFMMLGGTFLYWRGRRIQNKRAMRRYLERGESIEPLDPSEKANKVLARIFKETELRKLKVLGSGVFGTVHKGVWIPEGESIKIPVCIKVIEDKSGRQSFQAVTDHMLAIGSLDHAHIVRLLGLCPGSSLQLVTQYLPLGSLLDHVRQHRGALGPQLLLNWGVQIAKGMYYLEEHGMVHRNLAARNVLLKSPSQVQVADFGVADLLPPDDKQLLYSEAKTPIKWMALESIHFGKYTHQSDVWSYGVTVWELMTFGAEPYAGLRLAEVPDLLEKGERLAQPQICTIDVYMVMVKCWMIDENIRPTFKELANEFTRMARDPPRYLVIKRESGPGIAPGPEPHGLTNKKLEEVELEPELDLDLDLEAEEDNLATTTLGSALSLPVGTLNRPRGSQSLLSPSSGYMPMNQGNLGESCQESAVSGSSERCPRPVSLHPMPRGCLASESSEGHVTGSEAELQEKVSMCRSRSRSRSPRPRGDSAYHSQRHSLLTPVTPLSPPGLEEEDVNGYVMPDTHLKGTPSSREGTLSSVGLSSVLGTEEEDEDEEYEYMNRRRRHSPPHPPRPSSLEELGYEYMDVGSDLSASLGSTQSCPLHPVPIMPTAGTTPDEDYEYMNRQRDGGGPGGDYAAMGACPASEQGYEEMRAFQGPGHQAPHVHYARLKTLRSLEATDSAFDNPDYWHSRLFPKANAQRT

SEQ ID NO: 3687 - protein, 496 aa, Homo sapiens
LGVAGLLCAVLGAVMIVMVPSLIKQQVLKNVRIDPSSLSFNMWKEIPIPFYLSVYFFDVMNPSEILKGEKPQVRERGPYVYREFRHKSNITFNNNDTVSFLEYRTFQFQPSKSHGSESDYIVMPNILVLGAAVMMENKPMTLKLIMTLAFTTLGERAFMNRTVGEIMWGYKDPLVNLINKYFPGMFPFKDKFGLFAELNNSDSGLFTVFTGVQNISRIHLVDKWNGLSKVDFWHSDQCNMINGTSGQMWPPFMTPESSLEFYSPEACRSMKLMYKESGVFEGIPTYRFVAPKTLFANGSIYPPNEGFCPCLESGIQNVSTCRFSAPLFLSHPHFLNADPVLAEAVTGLHPNQEAHSLFLDIHPVTGIPMNCSVKLQLSLYMKSVAGIGQTGKIEPVVLPLLWFAESGAMEGETLHTFYTQLVLMPKVMHYAQYVLLALGCVLLLVPVICQIRSQEKCYLFWSSSKKGSKDKEAIQAYSESLMTSAPKGSVLQEAKL

SEQ ID NO: 3688 - protein, 88 aa, Homo sapiens
VVGGVVAVGTVLVALSAMGFTSVGIAASSIAAKMMSTAAIANGGGVAAGSLVAILQSVGAAGLSVTSKVIGGFAGTALGAWLGSPPSS

SEQ ID NO: 3689 - protein, 536 aa, Homo sapiens
RMEEGARHRNNTEKKHPGGGESDASPEAGSGGGGVALKKEIGLVSACGIIVGNIIGSGIFVSPKGVLENAGSVGLALIVWIVTGFITVVGALCYAELGVTIPKSGGDYSYVKDIFGGLAGFLRLWIAVLVIYPTNQAVIALTFSNYVLQPLFPTCFPPESGLRLLAAICLLLLTWVNCSSVRWATRVQDIFTAGKLLALALIIIMGIVQICKGEYFWLEPKNAFENFQEPDIGLVALAFLQGSFAYGGWNFLNYVTEELVDPYKNLPRAIFISIPLVTFVYVFANVAYVTAMSPQELLASNAVAVTFGEKLLGVMAWIMPISVALSTFGGVNGSLFTSSRLFFAGAREGHLPSVLAMIHVKRCTPIPALLFTCISTLLMLVTSDMYTLINYVGFINYLFYGVTVAGQIVLRWKKPDIPRPIKINLLFPIIYLLFWAFLLVFSLWSEPVVCGIGLAIMLTGVPVYFLGVYWQHKPKCFSDFIELLTLVSQKMCVVVYPEVERGSGTEEANEDMEEQQQPMYQPTPTKDKDVAGQPQP

SEQ ID NO: 3690 - protein, 1493 aa, Homo sapiens
MVSVVGPMGLLVVLLVGGCAAEEPPRFIKEPKDQIGVSGGVASFVCQATGDPKPRVTWNKKGKKVNSQRFETIEFDESAGAVLRIQPLRTPRDENVYECVAQNSVGEITVHAKLTVLREDQLPSGFPNIDMGPQLKVVERTRTATMLCAASGNPDPEITWFKDFLPVDPSASNGRIKQLRSGALQIESSEETDQGKYECVATNSAGVRYSSPANLYVRVRRVAPRFSILPMSHEIMPGGNVNITCVAVGSPMPYVKWMQGAEDLTPEDDMPVGRNVLELTDVKDSANYTCVAMSSLGVIEAVAQITVKSLPKAPGTPMVTENTATSITITWDSGNPDPVSYYVIEYKSKSQDGPYQIKEDITTTRYSIGGLSPNSEYEIWVSAVNSIGQGPPSESVVTRTGEQAPASAPRNVQARMLSATTMIVQWEEPVEPNGLIRGYRVYYTMEPEHPVGNWQKHNVDDSLLTTVGSLLEDETYTVRVLAFTSVGDGPLSDPIQVKTQQGVPGQPMNLRAEARSETSITLSWSPPRQESIIKYELLFREGDHGREVGRTFDPTTSYVVEDLKPNTEYAFRLAARSPQGLGAFTPVVRQRTLQSISPKNFKVKMIMKTSVLLSWEFPDNYNSPTPYKIQYNGLTLDVDGRTTKKLITHLKPHTFYNFVLTNRGSSLGGLQQTVTAWTAFNLLNGKPSVAPKPDADGFIMVYLPDGQSPVPVQSYFIVMVPLRKSRGGQFLTPLGSPEDMDLEELIQDISRLQRRSLRHSRQLEVPRPYIAARFSVLPPTFHPGDQKQYGGFDNRGLEPGHRYVLFVLAVLQKSEPTFAASPFSDPFQLDNPDPQPIVDGEEGLIWVIGPVLAVVFIICIVIAILLYKNKPDSKRKDSEPRTKCLLNNADLAPHHPKDPVEMRRINFQTPGMLSHPPIPIADMAEHTERLKANDSLKLSQEYESIDPGQQFTWEHSNLEVNKPKNRYANVIAYDHSRVILQPIEGIMGSDYINANYVDGYRCQNAYIATQGPLPETFGDFWRMVWEQRSATIVMMTRLEEKSRIKCDQYWPNRGTETYGFIQVTLLDTIELATFCVRTFSLHKNGSSEKREVRQFQFTAWPDHGVPEYPTPFLAFLRRVKTCNPPDAGPIVVHCSAGVGRTGCFIVIDAMLERIKPEKTVDVYGHVTLMRSQRNYMVQTEDQYSFIHEALLEAVGCGNTEVPARSLYAYIQKLAQVEPGEHVTGMELEFKRLANSKAHTSRFISANLPCNKFKNRLVNIMPYESTRVCLQPIRGVEGSDYINASFIDGYRQQKAYIATQGPLAETTEDFWRMLWENNSTIVVMLTKLREMGREKCHQYWPAERSARYQYFVVDPMAEYNMPQYILREFKVTDARDGQSRTVRQFQFTDWPEQGVPKSGEGFIDFIGQVHKTKEQFGQDGPISVHCSAGVGRTGVFITLSIVLERMRYEGVVDIFQTVKMLRTQRPAMVQTEDEYQFCYQAALEYLGSFDHYAT

SEQ ID NO: 3691 - protein, 61 aa, Homo sapiens
MPASSWGRCVSSPQVVEGFRATMAQRLVRVLQICAGHVPGVSALNLLSLLRSSEGPSLEDL

SEQ ID NO: 3692 - protein, 1883 aa, Homo sapiens
LLLLLLLLPGMWAEAGLPRAGGGSQPPFRTFSASDWGLTHLVVHEQTGEVYVGAVNRIYKLSGNLTLLRAHVTGPVEDNEKCYPPPSVQSCPHGLGSTDNVNKLLLLDYAANRLLACGSASQGICQFLRLDDLFKLGEPHHRKEHYLSSVQEAGSMAGVLIAGPPGQGQAKLFVGTPIDGKSEYFPTLSSRRLMANEEDADMFGFVYQDEFVSSQLKIPSDTLSKFPAFDIYYVYSFRSEQFVYYLTLQLDTQLTSPDAAGEHFFTSKIVRLCVDDPKFYSYVEFPIGCEQAGVEYRLVQDAYLSRPGRALAHQLGLAEDEDVLFTVFAQGQKNRVKPPKESALCLFTLRAIKEKIKERIQSCYRGEGKLSLPWLLNKELGCINSPLQIDDDFCGQDFNQPLGGTVTIEGTPLFVDKDDGLTAVAAYDYRGRTVVFAGTRSGRIRKILVDLSNPGGRPALAYESVVAQEGSPILRDLVLSPNHQYLYAMTEKQVTRVPVESCVQYTSCELCLGSRDPHCGWCVLHSICSRRDACERADEPQRFAADLLQCVQLTVQPRNVSVTMSQVPLVLQAWNVPDLSAGVNCSFEDFTESESVLEDGRIHCRSPSAREVAPITRGQGDQRVVKLYLKSKETGKKFASVDFVFYNCSVHQSCLSCVNGSFPCHWCKYRHVCTHNVADCAFLEGRVNVSEDCPQILPSTQIYVPVGVVKPITLAARNLPQPQSGQRGYECLFHIPGSPARVTALRFNSSSLQCQNSSYSYEGNDVSDLPVNLSVVWNGNFVIDNPQNIQAHLYKCPALRESCGLCLKADPRFECGWCVAERRCSLRHHCAADTPASWMHARHGSSRCTDPKILKLSPETGPRQGGTRLTITGENLGLRFEDVRLGVRVGKVLCSPVESEYISAEQIVCEIGDASSVRAHDALVEVCVRDCSPHYRALSPKRFTFVTPTFYRVSPSRGPLSGGTWIGIEGSHLNAGSDVAVSVGGRPCSFSWRNSREIRCLTPPGQSPGSAPIIININRAQLTNPEVKYNYTEDPTILRIDPEWSINSGGTLLTVTGTNLATVREPRIRAKYGGIERENGCLVYNDTTMVCRAPSVANPVRSPPELGERPDELGFVMDNVRSLLVLNSTSFLYYPDPVLEPLSPTGLLELKPSSPLILKGRNLLPPAPGNSRLNYTVLIGSTPCTLTVSETQLLCEAPNLTGQHKVTVRAGGFEFSPGTLQVYSDSLLTLPAIVGIGGGGGLLLLVIVAVLIAYKRKSRDADRTLKRLQLQMDNLESRVALECKEAFAELQTDIHELTNDLDGAGIPFLDYRTYAMRVLFPGIEDHPVLKEMEVQANVEKSLTLFGQLLTKKHFLLTFIRTLEAQRSFSMRDRGNVASLIMTALQGEMEYATGVLKQLLSDLIEKNLESKNHPKLLLRRTESVAEKMLTNWFTFLLYKFLKECAGEPLFMLYCAIKQQMEKGPIDAITGEARYSLSEDKLIRQQIDYKTLTLNCVNPENENAPEVPVKGLDCDTVTQAKEKLLDAAYKGVPYSQRPKAADMDLEWRQGRMARIILQDEDVTTKIDNDWKRLNTLAHYQVTDGSSVALVPKQTSAYNISNSSTFTKSLSRYESMLRTASSPDSLRSRTPMITPDLESGTKLWHLVKNHDHLDQREGDRGSKMVSEIYLTRLLATKGTLQKFVDDLFETIFSTAHRGSALPLAIKYMFDFLDEQADKHQIHDADVRHTWKSNCLPLRFWVNVIKNPQFVFDIHKNSITDACLSVVAQTFMDSCSTSEHKLGKDSPSNKLLYAKDIPNYKSWVERYYADIAKMPAISDQDMSAYLAEQSRLHLSQFNSMSALHEIYSYITKYKDEILAALEKDEQARRQRLRSKLEQVVDTMALSS

SEQ ID NO: 3693 - protein, 84 aa, Homo sapiens
IITLWMAGWYFNQVFATCLGLVYIYGRHLYFWGYSEAAKKRITGFRLSLGILALLTLLGALGIANSFLDEYLDLNIAKKLRRQF

SEQ ID NO: 3694 - protein, 471 aa, Homo sapiens
ILPVGTLRSACREDRLPDPQKSGERVKRSSPRRGSLPEQRRAEPGTMGPRRLLLVAACFSLCGPLLSARTRARRPESKATNATLDPRSFLLRNPNDKYEPFWEDEEKNESGLTEYRLVSINKSSPLQKQLPAFISEDASGYLTSSWLTLFVPSVYTGVFVVSLPLNIMAIVVFILKMKVKKPAVVYMLHLATADVLFVSVLPFKISYYFSGSDWQFGSELCRFVTAAFYCNMYASILLMTVISIDRFLAVVYPMQSLSWRTLGRASFTCLAIWALAIAGVVPLLLKEQTIQVPGLNITTCHDVLNETLLEGYYAYYFSAFSAVFFFVPLIISTVCYVSIIRCLSSSAVANRSKKSRALFLSAAVFCIFIICFGPTNVLLIAHYSFLSHTSTTEAAYFAYLLCVCVSSISCCIDPLIYYYASSECQRYVYSILCCKESSDPSSYNSSGQLMASKMDTCSSNLNNSIYKKLLT

SEQ ID NO: 3695 - protein, 1439 aa, Homo sapiens
LTAAHLLCVCTAALAVAPGPRFLVTAPGIIRPGGNVTIGVELLEHCPSQVTVKAELLKTASNLTVSVLEAEGVFEKGSFKTLTLPSLPLNSADEIYELRVTGRTQDEILFSNSTRLSFETKRISVFIQTDKALYKPKQEVKFRIVTLFSDFKPYKTSLNILIKDPKSNLIQQWLSQQSDLGVISKTFQLSSHPILGDWSIQVQVNDQTYYQSFQVSEYVLPKFEVTLQTPLYCSMNSKHLNGTITAKYTYGKPVKGDVTLTFLPLSFWGKKKNITKTFKINGSANFSFNDEEMKNVMDSSNGLSEYLDLSSPGPVEILTTVTESVTGISRNVSTNVFFKQHDYIIEFFDYTTVLKPSLNFTATVKVTRADGNQLTLEERRNNVVITVTQRNYTEYWSGSNSGNQKMEAVQKINYTVPQSGTFKIEFPILEDSSELQLKAYFLGSKSSMAVHSLFKSPSKTYIQLKTRDENIKVGSPFELVVSGNKRLKELSYMVVSRGQLVAVGKQNSTMFSLTPENSWTPKACVIVYYIEDDGEIISDVLKIPVQLVFKNKIKLYWSKVKAEPSEKVSLRISVTQPDSIVGIVAVDKSVNLMNASNDITMENVVHELELYNTGYYLGMFMNSFAVFQECGLWVLTDANLTKDYIDGVYDNAEYAERFMEENEGHIVDIHDFSLGSSPHVRKHFPETWIWLDTNMGYRIYQEFEVTVPDSITSWVATGFVISEDLGLGLTTTPVELQAFQPFFIFLNLPYSVIRGEEFALEITIFNYLKDATEVKVIIEKSDKFDILMTSNEINATGHQQTLLVPSEDGATVLFPIRPTHLGEIPITVTALSPTASDAVTQMILVKAEGIEKSYSQSILLDLTDNRLQSTLKTLSFSFPPNTVTGSERVQITAIGDVLGPSINGLASLIRMPYGCGEQNMINFAPNIYILDYLTKKKQLTDNLKEKALSFMRQGYQRELLYQREDGSFSAFGNYDPSGSTWLSAFVLRCFLEADPYIDIDQNVLHRTYTWLKGHQKSNGEFWDPGRVIHSELQGGNKSPVTLTAYIVTSLLGYRKYQPNIDVQESIHFLESEFSRGISDNYTLALITYALSSVGSPKAKEALNMLTWRAEQEGGMQFWVSSESKLSDSWQPRSLDIEVAAYALLSHFLQFQTSEGIPIMRWLSRQRNSLGGFASTQDTTVALKALSEFAALMNTERTNIQVTVTGPSSPSPVKFLIDTHNRLLLQTAELAVVQPTAVNISANGFGFAICQLNVVYNVKASGSSRRRRSIQNQEAFDLDVAVKENKDDLNHVDLNVCTSFSGPGRSGMALMEVNLLSGFMVPSEAISLSETVKKVEYDHGKLNLYLDSVNETQFCVNIPAVRNFKVSNTQDASVSIVDYYEPRRQAVRSYNSEVKLSSCDLCSDVQGCRPCEDGASGSHHHSSVIFIFCFKLLYFMELWL

SEQ ID NO: 3696 - protein, 618 aa, Homo sapiens
LGHCLLESGRLSVLLLVPHFGENLKPTRADNLRLDRCHQRSLGTMWTFLGIATFTYFYKKFGDFITLANREVLLCVLVFLSLGLVLSYRCRHRNGGLLGRQQSGSQFALFSDILSGLPFIGFFWAKSPPESENKEQLEARRRRKGTNISETSLIGTAACTSTSSQNDPEVIIVGAGVLGSALAAVLSRDGRKVTVIERDLKEPDRIVGEFLQPGGYHVLKDLGLGDTVEGLDAQVVNGYMIHDQESKSEVQIPYPLSENNQVQSGRAFHHGRFIMSLRKAAMAEPNAKFIEGVVLQLLEEDDVVMGVQYKDKETGDIKELHAPLTVVADGLFSKFRKSLVSNKVSVSSHFVGFLMKNAPQFKANHAELILANPSPVLIYQISSSETRVLVDIRGEMPRNLREYMVEKIYPQIPDHLKEPFLEATDNSHLRSMPASFLPPSSVKKRGVLLLGDAYNMRHPLTGGGMTVAFKDIKLWRKLLKGIPDLYDDAAIFEAKKSFYWARKTSHSFVVNILAQALYELFSATDDSLHQLRKACFLYFKLGGECVAGPVGLLSVLSPNPLVLIGHFFAVAIYAVYFCFKSEPWITKPRALLSSGAVLYKACSVIFPLIYSEMKYMVH

SEQ ID NO: 3697 - protein, 299 aa, Homo sapiens
RTGECDCVSGSMAEKRHTRDSEAQRLPDSFKDSPSKGLGPCGWILVAFSFLFTVITFPISIWMCIKIIKEYERAIIFRLGRILQGGAKGPGLFFILPCTDSFIKVDMRTISFDIPPQEILTKDSVTISVDGVVYYRVQNATLAVANITNADSATRLLAQTTLRNVLGTKNLSQILSDREEIAHNMQSTLDDATDAWGIKVERVEIKDVKLPVQLQRAMAAEAEASREARAKVIAAEGEMNASRALKEASMVITESPAALQLRYLQTLTTIAAEKNSTIVFPLPIDMLQGIIGAKHSHLG

SEQ ID NO: 3698 - protein, 648 aa, Homo sapiens
RPGGTGQTNQPRVGSATMPRYGASLRQSCPRSGREQGQDGTAGAPGLLWMGLVLALALALALALALSDSRVLWAPAEAHPLSPQGHPARLHRIVPRLRDVFGWGNLTCPICKGLFTAINLGLKKEPNVARVGSVAIKLCNLLKIAPPAVCQSIVHLFEDDMVEVWRRSVLSPSEACGLLLGSTCGHWDIFSSWNISLPTVPKPPPKPPSPPAPGAPVSRILFLTDLHWDHDYLEGTDPDCADPLCCRRGSGLPPASRPGAGYWGEYSKCDLPLRTLESLLSGLGPAGPFDMVYWTGDIPAHDVWHQTRQDQLRALTTVTALVRKFLGPVPVYPAVGNHESTPVNSFPPPFIEGNHSSRWLYEAMAKAWEPWLPAEALRTLRIGGFYALSPYPGLRLISLNMNFCSRENFWLLINSTDPAGQLQWLVGELQAAEDRGDKVHIIGHIPPGHCLKSWSWNYYRIVARYENTLAAQFFGHTHVDEFEVFYDEETLSRPLAVAFLAPSATTYIGLNPGYRVYQIDGNYSGSSHVVLDHETYILNLTQANIPGAIPHWQLLYRARETYGLPNTLPTAWHNLVYRMRGDMQLFQTFWFLYHKGHPPSEPCGTPCRLATLCAQLSARADSPALCRHLMPDGSLPEAQSLWPRPLFC

SEQ ID NO: 3699 - protein, 866 aa, Homo sapiens
IPPSQQITMLQTKDLIWTLFFLGTAVSLQVDIVPSQGEISVGESKFFLCQVAGDAKDKDISWFSPNGEKLTPNQQRISVVWNDDSSSTLTIYNANIDDAGIYKCVVTGEDGSESEATVNVKIFQKLMFKNAPTPQEFREGEDAVIVCDVVSSLPPTIIWKHKGRDVILKKDVRFIVLSNNYLQIRGIKKTDEGTYRCEGRILARGEINFKDIQVIVNVPPTIQARQNIVNATANLGQSVTLVCDAEGFPEPTMSWTKDGEQIEQEEDDEKYIFSDDSSQLTIKKVDKNDEAEYICIAENKAGEQDATIHLKVFAKPKITYVENQTAMELEEQVTLTCEASGDPIPSITWRTSTRNISSEEKASWTRPEKQETLDGHMVVRSHARVSSLTLKSIQYTDAGEYICTASNTIGQDSQSMYLEVQYAPKLQGPVAVYTWEGNQVNITCEVFAYPSATISWFRDGQLLPSSNYSNIKIYNTPSASYLEVTPDSENDFGNYNCTAVNRIGQESLEFILVQADTPSSPSIDQVEPYSSTAQVQFDEPEATGGVPILKYKAEWRAVGEEVWHSKWYDAKEASMEGIVTIVGLKPETTYAVRLAALNGKGLGEISAASEFKTQPVQGEPSAPKLEGQMGEDGNSIKVNLIKQDDGGSPIRHYLVRYRALSSEWKPEIRLPSGSDHVMLKSLDWNAEYEVYVVAENQQGKSKAAHFVFRTSAQPTAIPANGSPTSGLSTGAIVGILIVIFVLLLVVVDITCYFLNKCGLFMCIAVNLCGKAGPGAKGKDMEEGKAAFSKDESKEPIVEVRTEEERTPNHDGGKHTEPNETTPLTEPEKGPVEAKPECQETETKPAPAEVKTVPNDATQTKENESKA

SEQ ID NO: 3700 - protein, 404 aa, Homo sapiens
LSERRSEPRPGRAARRGTVLGMAGIPGLLFLLFFLLCAVGQVSPYSAPWKPTWPAYRLPVVLPQSTLNLAKPDFGAEAKLEVSSSCGPQCHKGTPLPTYEEAKQYLSYETLYANGSRTETQVGIYILSSSGDGAQHRDSGSSGKSRRKRQIYGYDSRFSIFGKDFLLNYPFSTSVKLSTGCTGTLVAEKHVLTAAHCIHDGKTYVKGTQKLRVGFLKPKFKDGGRGANDSTSAMPEQMKFQWIRVKRTHVPKGWIKGNANDIGMDYDYALLELKKPHKRKFMKIGVSPPAKQLPGGRIHFSGYDNDRPGNLVYRFCDVKDETYDLLYQQCDAQPGASGSGVYVRMWKRQQQKWERKIIGIFSGHQWVDMNGSPQDFNVAVRITPLKYAQICYWIKGNYLDCREG

SEQ ID NO: 3701 - protein, 451 aa, Homo sapiens
RTRACSMGGVGEPGPREGPAQPGAPLPTFCWEQIRAHDQPGDKWLVIERRVYDISRWAQRHPGGSRLIGHHGAEDATDAFRAFHQDLNFVRKFLQPLLIGELAPEEPSQDGPLNAQLVEDFRALHQAAEDMKLFDASPTFFAFLLGHILAMEVLAWLLIYLLGPGWVPSALAAFILAISQAQSWCLQHDLGHASIFKKSWWNHVAQKFVMGQLKGFSAHWWNFRHFQHHAKPNIFHKDPDVTVAPVFLLGESSVEYGKKKRRYLPYNQQHLYFFLIGPPLLTLVNFEVENLAYMLVCMQWADLLWAASFYARFFLSYLPFYGVPGVLLFFVAVRVLESHWFVWITQMNHIPKEIGHEKHRDWVSSQLAATCNVEPSLFTNWFSGHLNFQIEHHLFPRMPRHNYSRVAPLVKSLCAKHGLSYEVKPFLTALVDIVRSLKKSGDIWLDAYLHQ

SEQ ID NO: 3702 - protein, 4543 aa, Homo sapiens
LTPPLLLLLPLLSALVAAAIDAPKTCSPKQFACRDQITCISKGWRCDGERDCPDGSDEAPEICPQSKAQRCQPNEHNCLGTELCVPMSRLCNGVQDCMDGSDEGPHCRELQGNCSRLGCQHHCVPTLDGPTCYCNSSFQLQADGKTCKDFDECSVYGTCSQLCTNTDGSFICGCVEGYLLQPDNRSCKAKNEPVDRPPVLLIANSQNILATYLSGAQVSTITPTSTRQTTAMDFSYANETVCWVHVGDSAAQTQLKCARMPGLKGFVDEHTINISLSLHHVEQMAIDWLTGNFYFVDDIDDRIFVCNRNGDTCVTLLDLELYNPKGIALDPAMGKVFFTDYGQIPKVERCDMDGQNRTKLVDSKIVFPHGITLDLVSRLVYWADAYLDYIEVVDYEGKGRQTIIQGILIEHLYGLTVFENYLYATNSDNANAQQKTSVIRVNRFNSTEYQVVTRVDKGGALHIYHQRRQPRVRSHACENDQYGKPGGCSDICLLANSHKARTCRCRSGFSLGSDGKSCKKPEHELFLVYGKGRPGIIRGMDMGAKVPDEHMIPIENLMNPRALDFHAETGFIYFADTTSYLIGRQKIDGTERETILKDGIHNVEGVAVDWMGDNLYWTDDGPKKTISVARLEKAAQTRKTLIEGKMTHPRAIVVDPLNGWMYWTDWEEDPKDSRRGRLERAWMDGSHRDIFVTSKTVLWPNGLSLDIPAGRLYWVDAFYDRIETILLNGTDRKIVYEGPELNHAFGLCHHGNYLFWTEYRSGSVYRLERGVGGAPPTVTLLRSERPPIFEIRMYDAQQQQVGTNKCRVNNGGCSSLCLATPGSRQCACAEDQVLDADGVTCLANPSYVPPPQCQPGEFACANSRCIQERWKCDGDNDCLDNSDEAPALCHQHTCPSDRFKCENNRCIPNRWLCDGDNDCGNSEDESNATCSARTCPPNQFSCASGRCIPISWTCDLDDDCGDRSDESASCAYPTCFPLTQFTCNNGRCININWRCDNDNDCGDNSDEAGCSHSCSSTQFKCNSGRCIPEHWTCDGDNDCGDYSDETHANCTNQATRPPGGCHTDEFQCRLDGLCIPLRWRCDGDTDCMDSSDEKSCEGVTHVCDPSVKFGCKDSARCISKAWVCDGDNDCEDNSDEENCESLACRPPSHPCANNTSVCLPPDKLCDGNDDCGDGSDEGELCDQCSLNNGGCSHNCSVAPGEGIVCSCPLGMELGPDNHTCQIQSYCAKHLKCSQKCDQNKFSVKCSCYEGWVLEPDGESCRSLDPFKPFIIFSNRHEIRRIDLHKGDYSVLVPGLRNTIALDFHLSQSALYWTDVVEDKIYRGKLLDNGALTSFEVVIQYGLATPEGLAVDWIAGNIYWVESNLDQIEVAKLDGTLRTTLLAGDIEHPRAIALDPRDGILFWTDWDASLPRIEAASMSGAGRRTVHRETGSGGWPNGLTVDYLEKRILWIDARSDAIYSARYDGSGHMEVLRGHEFLSHPFAVTLYGGEVYWTDWRTNTLAKANKWTGHNVTVVQRTNTQPFDLQVYHPSRQPMAPNPCEANGGQGPCSHLCLINYNRTVSCACPHLMKLHKDNTTCYEFKKFLLYARQMEIRGVDLDAPYYNYIISFTVPDIDNVTVLDYDAREQRVYWSDVRTQAIKRAFINGTGVETVVSADLPNAHGLAVDWVSRNLFWTSYDTNKKQINVARLDGSFKNAVVQGLEQPHGLVVHPLRGKLYWTDGDNISMANMDGSNRTLLFSGQKGPVGLAIDFPESKLYWISSGNHTINRCNLDGSGLEVIDAMRSQLGKATALAIMGDKLWWADQVSEKMGTCSKADGSGSVVLRNSTTLVMHMKVYDESIQLDHKGTNPCSVNNGDCSQLCLPTSETTRSCMCTAGYSLRSGQQACEGVGSFLLYSVHEGIRGIPLDPNDKSDALVPVSGTSLAVGIDFHAENDTIYWVDMGLSTISRAKRDQTWREDVVTNGIGRVEGIAVDWIAGNIYWTDQGFDVIEVARLNGSFRYVVISQGLDKPRAITVHPEKGYLFWTEWGQYPRIERSRLDGTERVVLVNVSISWPNGISVDYQDGKLYWCDARTDKIERIDLETGENREVVLSSNNMDMFSVSVFEDFIYWSDRTHANGSIKRGSKDNATDSVPLRTGIGVQLKDIKVFNRDRQKGTNVCAVANGGCQQLCLYRGRGQRACACAHGMLAEDGASCREYAGYLLYSERTILKSIHLSDERNLNAPVQPFEDPEHMKNVIALAFDYRAGTSPGTPNRIFFSDIHFGNIQQINDDGSRRITIVENVGSVEGLAYHRGWDTLYWTSYTTSTITRHTVDQTRPGAFERETVITMSGDDHPRAFVLDECQNLMFWTNWNEQHPSIMRAALSGANVLTLIEKDIRTPNGLAIDHRAEKLYFSDATLDKIERCEYDGSHRYVILKSEPVHPFGLAVYGEHIFWTDWVRRAVQRANKHVGSNMKLLRVDIPQQPMGIIAVANDTNSCELSPCRINNGGCQDLCLLTHQGHVNCSCRGGRILQDDLTCRAVNSSCRAQDEFECANGECINFSLTCDGVPHCKDKSDEKPSYCNSRRCKKTFRQCSNGRCVSNMLWCNGADDCGDGSDEIPCNKTACGVGEFRCRDGTCIGNSSRCNQFVDCEDASDEMNCSATDCSSYFRLGVKGVLFQPCERTSLCYAPSWVCDGANDCGDYSDERDCPGVKRPRCPLNYFACPSGRCIPMSWTCDKEDDCEHGEDETHCNKFCSEAQFECQNHRCISKQWLCDGSDDCGDGSDEAAHCEGKTCGPSSFSCPGTHVCVPERWLCDGDKDCADGADESIAAGCLYNSTCDDREFMCQNRQCIPKHFVCDHDRDCADGSDESPECEYPTCGPSEFRCANGRCLSSRQWECDGENDCHDQSDEAPKNPHCTSQEHKCNASSQFLCSSGRCVAEALLCNGQDDCGDSSDERGCHINECLSRKLSGCSQDCEDLKIGFKCRCRPGFRLKDDGRTCADVDECSTTFPCSQRCINTHGSYKCLCVEGYAPRGGDPHSCKAVTDEEPFLIFANRYYLRKLNLDGSNYTLLKQGLNNAVALDFDYREQMIYWTDVTTQGSMIRRMHLNGSNVQVLHRTGLSNPDGLAVDWVGGNLYWCDKGRDTIEVSKLNGAYRTVLVSSGLREPRALVVDVQNGYLYWTDWGDHSLIGRIGMDGSSRSVIVDTKITWPNGLTLDYVTERIYWADAREDYIEFASLDGSNRHVVLSQDIPHIFALTLFEDYVYWTDWETKSINRAHKTTGTNKTLLISTLHRPMDLHVFHALRQPDVPNHPCKVNNGGCSNLCLLSPGGGHKCACPTNFYLGSDGRTCVSNCTASQFVCKNDKCIPFWWKCDTEDDCGDHSDEPPDCPEFKCRPGQFQCSTGICTNPAFICDGDNDCQDNSDEANCDIHVCLPSQFKCTNTNRCIPGIFRCNGQDNCGDGEDERDCPEVTCAPNQFQCSITKRCIPRVWVCDRDNDCVDGSDEPANCTQMTCGVDEFRCKDSGRCIPARWKCDGEDDCGDGSDEPKEECDERTCEPYQFRCKNNRCVPGRWQCDYDNDCGDNSDEESCTPRPCSESEFSCANGRCIAGRWKCDGDHDCADGSDEKDCTPRCDMDQFQCKSGHCIPLRWRCDADADCMDGSDEEACGTGVRTCPLDEFQCNNTLCKPLAWKCDGEDDCGDNSDENPEECARFVCPPNRPFRCKNDRVCLWIGRQCDGTDNCGDGTDEEDCEPPTAHTTHCKDKKEFLCRNQRCLSSSLRCNMFDDCGDGSDEEDCSIDPKLTSCATNASICGDEARCVRTEKAAYCACRSGFHTVPGQPGCQDINECLRFGTCSQLCNNTKGGHLCSCARNFMKTHNTCKAEGSEYQVLYIADDNEIRSLFPGHPHSAYEQAFQGDESVRIDAMDVHVKAGRVYWTNWHTGTISYRSLPPAAPPTTSNRHRRQIDRGVTHLNISGLKMPRGIAIDWVAGNVYWTDSGRDVIEVAQMKGENRKTLISGMIDEPHAIVVDPLRGTMYWSDWGNHPKIETAAMDGTLRETLVQDNIQWPTGLAVDYHNERLYWADAKLSVIGSIRLNGTDPIVAADSKRGLSHPFSIDVFEDYIYGVTYINNRVFKIHKFGHSPLVNLTGGLSHASDVVLYHQHKQPEVTNPCDRKKCEWLCLLSPSGPVCTCPNGKRLDNGTCVPVPSPTPPPDAPRPGTCNLQCFNGGSCFLNARRQPKCRCQPRYTGDKCELDQCWEHCRNGGTCAASPSGMPTCRCPTGFTGPKCTQQVCAGYCANNSTCTVNQGNQPQCRCLPGFLGDRCQYRQCSGYCENFGTCQMAADGSRQCRCTAYFEGSRCEVNKCSRCLEGACVVNKQSGDVTCNCTDGRVAPSCLTCVGHCSNGGSCTMNSKMMPECQCPPHMTGPRCEEHVFSQQQPGHIASILIPLLLLLLLVLVAGVVFWYKRRVQGAKGFQHQRMTNGAMNVEIGNPTYKMYEGGEPDDVGGLLDADFALDPDKPTNFTNPVYATLYMGGHGSRHSLASTDEKRELLGRGPEDEIGDPLA

SEQ ID NO: 3703 - protein, 837 aa, Homo sapiens
TRSMAVEDEGLRVFQSVKIKIGEAKNLPSYPGPSKMRDCYCTVNLDQEEVFRTKIVEKSLCPFYGEDFYCEIPRSFRHLSFYIFDRDVFRRDSIIGKVAIQKEDLQKYHNRDTWFQLQHVDADSEVQGKVHLELRLSEVITDTGVVCHKLATRIVECQGLPIVNGQCDPYATVTLAGPFRSEAKKTKVKRKTNNPQFDEVFYFEVTRPCSYSKKSHFDFEEEDVDKLEIRVDLWNASNLKFGDEFLGELRIPLKVLRQSSSYEAWYFLQPRDNGSKSLKPDDLGSLRLNVVYTEDHVFSSDYYSPLRDLLLKSADVEPVSASAAHILGEVCREKQEAAVPLVRLFLHYGRVVPFISAIASAEVKRTQDPNTIFRGNSLASKCIDETMKLAGMHYLHVTLKPAIEEICQSHKPCEIDPVKLKDGENLENNMENLRQYVDRVFHAITESGVSCPTVMCDIFFSLREAAAKRFQDDPDVRYTAVSSFIFLRFFAPAILSPNLFQLTPHHTDPQTSRTLTLISKTVQTLGSLSKSKSASFKESYMATFYEFFNEQKYADAVKNFLDLISSSGRRDPKSVEQPIVLKEGFMIKRAQGRKRFGMKNFKKRWFRLTNHEFTYHKSKGDQPLYSIPIENILAVEKLEEESFKMKNMFQVIQPERALYIQANNCVEAKDWIDILTKVSQCNQKRLTVYHPSAYLSGHWLCCRAPSDSAPGCSPCTGGLPANIQLDIDGDRETERIYSLFNLYMSKLEKMQEACGSKSVYDGPEQEEYSTFVIDDPQETYKTLKQVIAGVGALEQEHAQYKRDKFKKTKYGSQEHPIGDKSFQNYIRQQSETSTHSI

SEQ ID NO: 3704 - protein, 1544 aa, Homo sapiens
LAPRARPPLPLPAAPDAEWGQGQGRRTQDPVPAPLEPLEFGLLQLLALWGLGLALCCLPVSPRCLGTKAPGPLRPRAPTHRRRGAARPALSTMRGLGTCLATLAGLLLTAAGETFSGGCLFDEPYSTCGYSQSEGDDFNWEQVNTLTKPTSDPWMPSGSFMLVNASGRPEGQRAHLLLPQLKENDTHCIDFHYFVSSKSNSPPGLLNVYVKVNNGPLGNPIWNISGDPTRTWNRAELAISTFWPNFYQVIFEVITSGHQGYLAIDEVKVLGHPCTRTPHFLRIQNVEVNAGQFATFQCSAIGRTVAGDRLWLQGIDVRDAPLKEIKVTSSRRFIASFNVVNTTKRDAGKYRCMIRTEGGVGISNYAELVVKEPPVPIAPPQLASVGATYLWIQLNANSINGDGPIVAREVEYCTASGSWNDRQPVDSTSYKIGHLDPDTEYEISVLLTRPGEGGTGSPGPALRTRTKCADPMRGPRKLEVVEVKSRQITIRWEPFGYNVTRCHSYNLTVHYCYQVGGQEQVREEVSWDTENSHPQHTITNLSPYTNVSVKLILMNPEGRKESQELIVQTDEDLPGAVPTESIQGSTFEEKIFLQWREPTQTYGVITLYEITYKAVSSFDPEIDLSNQSGRVSKLGNETHFLFFGLYPGTTYSFTIRASTAKGFGPPATNQFTTKISAPSMPAYELETPLNQTDNTVTVMLKPAHSRGAPVSVYQIVVEEERPRRTKKTTEILKCYPVPIHFQNASLLNSQYYFAAEFPADSLQAAQPFTIGDNKTYNGYWNTPLLPYKSYRIYFQAASRANGETKIDCVQVATKGAATPKPVPEPEKQTDHTVKIAGVIAGILLFVIIFLGVVLVMKKRKLAKKRKETMSSTRQEMTVMVNSMDKSYAEQGTNCDEAFSFMDTHNLNGRSVSSPSSFTMKTNTLSTSVPNSYYPDETHTMASDTSSLVQSHTYKKREPADVPYQTGQLHPAIRVADLLQHITQMKCAEGYGFKEEYESFFEGQSAPWDSAKKDENRMKNRYGNIIAYDHSRVRLQTIEGDTNSDYINGNYIDGYHRPNHYIATQGPMQETIYDFWRMVWHENTASIIMVTNLVEVGRVKCCKYWPDDTEIYKDIKVTLIETELLAEYVIRTFAVEKRGVHEIREIRQFHFTGWPDHGVPYHATGLLGFVRQVKSKSPPSAGPLVVHCSAGAGRTGCFIVIDIMLDMAEREGVVDIYNCVRELRSRRVNMVQTEEQYVFIHDAILEACLCGDTSVPASQVRSLYYDMNKLDPQTNSSQIKEEFRTLNMVTPTLRVEDCSIALLPRNHEKNRCMDILPPDRCLPFLITIDGESSNYINAALMDSYKQPSAFIVTQHPLPNTVKDFWRLVLDYHCTSVVMLNDVDPAQLCPQYWPENGVHRHGPIQVEFVSADLEEDIISRIFRIYNAARPQDGYRMVQQFQFLGWPMYRDTPVSKRSFLKLIRQVDKWQEEYNGGEGRTVVHCLNGGGRSGTFCAISIVCEMLRHQRTVDVFHAVKTLRNNKPNMVDLLDQYKFCYEVALEYLNSG

SEQ ID NO: 3705 - protein, 652 aa, Homo sapiens
LHRRSVEEPREFWGDIAKEFYWKTPCPGPFLRYNFDVTKGKIFIEWMKGATTNICYNVLDRNVHEKKLGDKVAFYWEGNEPGETTQITYHQLLVQVCQFSNVLRKQGIQKGDRVAIYMPMIPELVVAMLACARIGALHSIVFAGFSSESLCERILDSSCSLLITTDAFYRGEKLVNLKELADEALQKCQEKGFPVRCCIVVKHLGRAELGMGDSTSQSPPIKRSCPDVQISWNQGIDLWWHELMQEAGDECEPEWCDAEDPLFILYTSGSTGKPKGVVHTVGGYMLYVATTFKYVFDFHAEDVFWCTADIGWITGHSYVTYGPLANGATSVLFEGIPTYPDVNRLWSIVDKYKVTKFYTAPTAIRLLMKFGDEPVTKHSRASLQVLGTVGEPINPEAWLWYHRVVGAQRCPIVDTFWQTETGGHMLTPLPGATPMKPGSATFPFFGVAPAILNESGEELEGEAEGYLVFKQPWPGIMRTVYGNHERFETTYFKKFPGYYVTGDGCQRDQDGYYWITGRIDDMLNVSGHLLSTAEVESALVEHEAVAEAAVVGHPHPVKGECLYCFVTLCDGHTFSPKLTEELKKQIREKIGPIATPDYIQNAPGLPKTRSGKIMRRVLRKIAQNDHDLGDMSTVADPSVISHLFSHRCLTIQ

SEQ ID NO: 3706 - protein, 1299 aa, Homo sapiens
MPKKKRLSAGRVPLILFLCQMISALEVPLDPKLLEDLVQPPTITQQSPKDYIIDPRENIVIQCEAKGKPPPSFSWTRNGTHFDIDKDPLVTMKPGTGTLIINIMSEGKAETYEGVYQCTARNERGAAVSNNIVVRPSRSPLWTKEKLEPITLQSGQSLVLPCRPPIGLPPPIIFWMDNSFQRLPQSERVSQGLNGDLYFSNVLPEDTREDYICYARFNHTQTIQQKQPISVKVISVDELNDTIAANLSDTEFYGAKSSRERPPTFLTPEGNASNKEELRGNVLSLECIAEGLPTPIIYWAKEDGMLPKNRTVYKNFEKTLQIIHVSEADSGNYQCIAKNALGAIHHTISVRVKAAPYWITAPQNLVLSPGEDGTLICRANGNPKPRISWLTNGVPIEIAPDDPSRKIDGDTIIFSNVQERSSAVYQCNASNEYGYLLANAFVNVLAEPPRILTPANTLYQVIANRPALLDCAFFGSPLPTIEWFKGAKGSALHEDIYVLHENGTLEIPVAQKDSTGTYTCVARNKLGMAKNEVHLEIKDPTWIVKQPEYAVVQRGSMVSFECKVKHDHTLSLTVLWLKDNRELPSDERFTVDKDHLVVADVSDDDSGTYTCVANTTLDSVSASAVLSVVAPTPTPAPVYDVPNPPFDLELTDQLDKSVQLSWTPGDDNNSPITKFIIEYEDAMHKPGLWHHQTEVSGTQTTAQLKLSPYVNYSFRVMAVNSIGKSLPSEASEQYLTKASEPDKNPTAVEGLGSEPDNLVITWKPLNGFESNGPGLQYKVSWRQKDGDDEWTSVVVANVSKYIVSGTPTFVPYLIKVQALNDMGFAPEPAVVMGHSGEDLPMVAPGNVRVNVVNSTLAEVHWDPVPLKSIRGHLQGYRIYYWKTQSSSKRNRRHIEKKILTFQGSKTHGMLPGLEPFSHYTLNVRVVNGKGEGPASPDRVFNTPEGVPSAPSSLKIVNPTLDSLTLEWDPPSHPNGILTEYTLKYQPINSTHELGPLVDLKIPANKTRWTLKNLNFSTRYKFYFYAQTSAGSGSQITEEAVTTVDEAGILPPDVGAGKVQAVNPRISNLTAAAAETYANISWEYEGPEHVNFYVEYGVAGSKEEWRKEIVNGSRSFFGLKGLMPGTAYKVRVGAVGDSGFVSSEDVFETGPAMASRQVDIATQGWFIGLMCAVALLILILLIVCFIRRNKGGKYPVKEKEDAHADPEIQPMKEDDGTFGEYSDAEDHKPLKKGSRTPSDRTVKKEDSDDSLVDYGEGVNGQFNEDGSFIGQYSGKKEKEPAEGNESSEAPSPVNAMNSFV

SEQ ID NO: 3707 - protein, 1113 aa, Homo sapiens
MHWQEELIVGGTVKNSTGKLVSAHALQTMFQLMTPKQMYEHFKGYEYVSHINWNEDKAAAILEAWQRTYVEVVHQSVAQNSTQKVLSFTTTTLDDILKSFSDVSVIRVASGYLLMLAYACLTMLRWDCSKSQGAVGLAGVLLVALSVAAGLGLCSLIGISFNAATTQVLPFLALGVGVDDVFLLAHAFSETGQNKRIPFEDRTGECLKRTGASVALTSISNVTAFFMAALIPIPALRAFSLQAAVVVVFNFAMVLLIFPAILSMDLYRREDRRLDIFCCFTSPCVSRVIQVEPQAYTDTHDNTRYSPPPPYSSHSFAHETQITMQSTVQLRTEYDPHTHVYYTTAEPRSEISVQPVTVTQDTLSCQSPESTSSTRDLLSQFSDSSLHCLEPPCTKWTLSSFAEKHYAPFLLKPKAKVVVIFLFLGLLGVSLYGTTRVRDGLDLTDIVPRETREYDFIAAQFKYFSFYNMYIVTQKADYPNIQHLLYDLHRSFSNVKYVMLEENKQLPKMWLHYFRDWLQGLQDAFDSDWETGKIMPNNYKNGSDDGVLAYKLLVQTGSRDKPIDISQLTKQRLVDADGIINPSAFYIYLTAWVSNDPVAYAASQANIRPHRPEWVHDKADYMPETRLRIPAAEPIEYAQFPFYLNGLRDTSDFVEAIEKVRTICSNYTSLGLSSYPNGYPFLFWEQYIGLRHWLLLFISVVLACTFLVCAVFLLNPWTAGIIVMVLALMTVELFGMMGLIGIKLSAVPVVILIASVGIGVEFTVHVALAFLTAIGDKNRRAVLALEHMFAPVLDGAVSTLLGVLMLAGSEFDFIVRYFFAVLAILTILGVLNGLVLLPVLLSFFGPYPEVSPANGLNRLPTPSPEPPPSVVRFAMPPGHTHSGSDSSDSEYSSQTTVSGLSEELRHYEAQQGAGGPAHQVIVEATENPVFAHSTVVHPESRHHPPSNPRQQPHLDSGSLPPGRQGQQPRRDPPREGLWPPPYRPRRDAFEISTEGHSGPSNRARWGPRGARSHNPRNPASTAMGSSVPGYCQPITTVTASASVTVAVHPPPVPGPGRNPRGGLCPGYPETDHGLFEDPHVPFHVRCERRDSKVEVIELQDVECEERPRGSSSN

SEQ ID NO: 3708 - protein, 496 aa, Homo sapiens
KGLEFVLIHQRWVFVCLFLLPLSLIFDIYYYVRAWVVFKLSSAPRLHEQRVRDIQKQVREWKEQGSKTFMCTGRPGWLTVSLRVGKYKKTHKNIMINLMDILEVDTKKQIVRVEPLVTMGQVTALLTSIGWTLPVLPELDDLTVGGLIMGTGIESSSHKYGLFQHICTAYELVLADGSFVRCTPSENSDLFYAVPWSCGTLGFLVAAEIRIIPAKKYVKLRFEPVRGLEAICAKFTHESQRQENHFVEGLLYSLDEAVIMTGVMTDEAEPSKLNSIGNYYKPWFFKHVENYLKTNREGLEYIPLRHYYHRHTRSIFWELQDIIPFGNNPIFRYLFGWMVPPKISLLKLTQGETLRKLYEQHHVVQDMLVPMKCLQQALHTFQNDIHVYPIWLCPFILPSQPGLVHPKGNEAELYIDIGAYGEPRVKHFEARSCMRQLEKFVRSVHGFQMLYADCYMNREEFWEMFDGSLYHKLREKLGCQDAFPEVYDKICKAARH

SEQ ID NO: 3709 - protein, 209 aa, Homo sapiens
TRSSERSADLPEPGVGCSLGAPGTMVKLGNNFAEKGTKQPLLEDGFDTIPLMTPLDVNQLQFPPPDKVVVKTKTEYEPDRKKGKARPPQIAEFTVSITEGVTERFKVSVLVLFALAFLTCVVFLVVYKVYKYDRACPDGFVLKNTQCIPEGLESYYAEQDSSAREKFYTVINHYNLAKQSITRSVSPWMSVLSEEKLSEQETEAAEKSA

SEQ ID NO: 3710 - protein, 44 aa, Homo sapiens
RTARQRCVCEDVLHLLLCASQLLLLKQLSLLFGFLRLLASERHL

SEQ ID NO: 3711 - protein, 31 aa, Homo sapiens
MWRIVRLQQLLVNWSMLILVLKKILRIYTLL

SEQ ID NO: 3712 - protein, 424 aa, Homo sapiens
TRAAMPGGCSRGPAAGDGRLRLARLALVLLGWVSSSSPTSSASSFSSSAPFLASAVSAQPPLPDQCPALCECSEAARTVKCVNRNLTEVPTDLPAYVRNLFLTGNQLAVLPAGAFARRPPLAELAALNLSGSRLDEVRAGAFEHLPSLRQLDLSHNPLADLSPFAFSGSNASVSAPSPLVELILNHIVPPEDERQNRSFEGMVVAALLAGRALQGLRRLELASNHFLYLPRDVLAQLPSLRHLDLSNNSLVSLTYVSFRNLTHLESLHLEDNALKVLHNGTLAELQGLPHIRVFLDNNPWVCDCHMADMVTWLKETEVVQGKDRLTCAYPEKMRNRVLLELNSADLDCDPILPPSLQTSYVFLGIVLALIGAIFLLVLYLNRKGIKKWMHNIRDACRDHMEGYHYRYEINADPRLTNLSSNSDV

SEQ ID NO: 3713 - protein, 343 aa, Homo sapiens
RPALLLLMLLQTAVLQGRLLRSHSLHYLFMGASEQDLGLSLFEALGYVDDQLFVFYDHESRRVEPRTPWVSSRISSQMWLQLSQSLKGWDHMFTVDFWTIMENHNHSKESHTLQVILGCEMQEDNSTEGYWKYGYDGQDHLEFCPDTLDWRAAEPRAWPTKLEWERHKIRARQNRAYLERDCPAQLQQLLELGRGVLDQQVPPLVKVTHHVTSSVTTLRCRALNYYPQNITMKWLKDKQPMDAKEFEPKDVLPNGDGTYQGWITLAVPPGEEQRYTCQVEHPGLDQPLIVIWEPSPSGTLVIGVISGIAVFVVILFIGILFIILRKRQGSRGAMGHYVLAERE

SEQ ID NO: 3714 - protein, 354 aa, Homo sapiens
LDPKILKFVVFIVAVLLPVRVDSATIPRQDEVPQQTVAPQQQRRSLKEEECPAGSHRSEYTGACNPCTEGVDYTIASNNLPSCLLCTVCKSGQTNKSSCTTTRDTVCQCEKGSFQDKNSPEMCRTCRTGCPRGMVKVSNCTPRSDIKCKNESAASSTGKTPAAEETVTTILGMLASPYHYLIIIVVLVIILAVVVVGFSCRKKFISYLKGICSGGGGGPERVHRVLFRRRSCPSRVPGAEDNARNETLSNRYLQPTQVSEQEIQGQELAELTGVTVELPEEPQRLLEQAEAEGCQRRRLLVPVNDADSADISTLLDASATLEEGHAKETIQDQLVGSEKLFYEEDEAGSATSCL

SEQ ID NO: 3715 - protein, 44 aa, Homo sapiens
KNVTLKRRSPWVLAFEIFIPLVLFFILLGLRQKKPTISVKEVCK

SEQ ID NO: 3716 - protein, 306 aa, Homo sapiens
KQNPQSPPCCCVDDTWAQAEVGPVTSCTGFVEGSSRTGGMGSACIKVTKYFLFLFNLIFFILGAVILGFGVWILADKSSFISVLQTSSSSLRMGAYVFIGVGAVTMLMGFLGCIGAVNEVRCLLGLYFAFLLLILIAQVTAGALFYFNMGKLKQEMGGIVTELIRDYNSSREDSLQDAWDYVQAQVKCCGWVSFYNWTDNAELMNRPEVTYPCSCEVKGEEDNSLSVRKGFCEAPGNRTQSGNHPEDWPVYQEGCMEKVQAWLQENLGIILGVGVGVAIIELLGMVLSICLCRHVHSEDYSKVPKY

SEQ ID NO: 3717 - protein, 758 aa, Homo sapiens
LKMAEAHQAVAFQFTVTPDGIDLRLSHEALRQIYLSGLHSWKKKFIRFKNGIITGVYPASPSSWLIVVVGVMTTMYAKIDPSLGIIAKINRTLETANCMSSQTKNVVSGVLFGTGLWVALIVTMRYSLKVLLSYHGWMFTEHGKMSRATKIWMGMVKIFSGRKPMLYSFQTSLPRLPVPAVKDTVNRYLQSVRPLMKEEDFKRMTALAQDFAVGLGPRLQWYLKLKSWWATNYVSDWWEEYIYLRGRGPLMVNSNYYAMDLLYILPTHIQAARAGNAIHAILLYRRKLDREEIKPIRLLGSTIPLCSAQWERMFNTSRIPGEETDTIQHMRDSKHIVVYHRGRYFKVWLYHDGRLLKPREMEQQMQRILDNTSEPQPGEARLAALTAGDRVPWARCRQAYFGRGKNKQSLDAVEKAAFFVTLDETEEGYRSEDPDTSMDSYAKSLLHGRCYDRWFDKSFTFVVFKNGKMGLNAEHSWADAPIVAHLWEYVMSIDSLQLGYAEDGHCKGDINPNIPYPTRLQWDIPGECQEVIETSLNTANLLANDVDFHSFPFVAFGKGIIKKCRTSPDAFVQLALQLAHYKDMGKFCLTYEASMTRLFREGRTETVRSCTTESCDFVRAMVDPAQTVEQRLKLFKLASEKHQHMYRLAMTGSGIDRHLFCLYVVSKYLAVESPFLKEVLSEPWRLSTSQTPQQQVELFDLENNPEYVSSGGGFGPVADDGYGVSYILVGENLINFHISSKFSCPETGIISQGPSSDT

SEQ ID NO: 3718 - protein, 1059 aa, Homo sapiens
VAPGQGRAGAMGSRTPESPLHAVQLRWGPRRRPPLLPLLLLLLPPPPRVGGFNLDAEAPAVLSGPPGSFFGFSVEFYRPGTDGVSVLVGAPKANTSQPGVLQGGAVYLCPWGASPTQCTPIEFDSKGSRLLESSLSSSEGEEPVEYKSLQWFGATVRAHGSSILACAPLYSWRTEKEPLSDPVGTCYLSTDNFTRILEYAPCRSDFSWAAGQGYCQGGFSAEFTKTGRVVLGGPGSYFWQGQILSATQEQIAESYYPEYLINLVQGQLQTRQASSIYDDSYLGYSVAVGEFSGDDTEDFVAGVPKGNLTYGYVTILNGSDIRSLYNFSGEQMASYFGYAVAATDVNGDGLDDLLVGAPLLMDRTPDGRPQEVGRVYVYLQHPAGIEPTPTLTLTGHDEFGRFGSSLTPLGDLDQDGYNDVAIGAPFGGETQQGVVFVFPGGPGGLGSKPSQVLQPLWAASHTPDFFGSALRGGRDLDGNGYPDLIVGSFGVDKAVVYRGRPIVSASASLTIFPAMFNPEERSCSLEGNPVACINLSFCLNASGKHVADSIGFTVELQLDWQKQKGGVRRALFLASRQATLTQTLLIQNGAREDCREMKIYLRNESEFRDKLSPIHIALNFSLDPQAPVDSHGLRPALHYQSKSRIEDKAQILLDCGEDNICVPDLQLEVFGEQNHVYLGDKNALNLTFHAQNVGEGGAYEAELRVTAPPEAEYSGLVRHPGNFSSLSCDYFAVNQSRLLVCDLGNPMKAGASLWGGLRFTVPHLRDTKKTIQFDFQILSKNLNNSQSDVVSFRLSVEAQAQVTLNGVSKPEAVLFPVSDWHPRDQPQKEEDLGPAVHHVYELINQGPSSISQGVLELSCPQALEGQQLLYVTRVTGLNCTTNHPINPKGLELDPEGSLHHQQKREAPSRSSASSGPQILKCPEAECFRLRCELGPLHQQESQSLQLHFRVWAKTFLQREHQPFSLQCEAVYKALKMPYRILPRQLPQKERQVATAVQWTKAEGSYGVPLWIIILAILFGLLLLGLLIYILYKLGFFKRSLPYGTAMEKAQLKPPATSDA

SEQ ID NO: 3719 - protein, 1167 aa, Homo sapiens
RTRAALLLFTALATSLGFNLDTEELTAFRVDSAGFGDSVVQYANSWVVVGAPQKITAANQTGGLYQCGYSTGACEPIGLQVPPEAVNMSLGLSLASTTSPSQLLACGPTVHHECGRNMYLTGLCFLLGPTQLTQRLPVSRQECPRQEQDIVFLIDGSGSISSRNFATMMNFVRAVISQFQRPSTQFSLMQFSNKFQTHFTFEEFRRSSNPLSLLASVHQLQGFTYTATAIQNVVHRLFHASYGARRDAAKILIVITDGKKEGDSLDYKDVIPMADAAGIIRYAIGVGLAFQNRNSWKELNDIASKPSQEHIFKVEDFDALKDIQNQLKEKIFAIEGTETTSSSSFELEMAQEGFSAVFTPDGPVLGAVGSFTWSGGAFLYPPNMSPTFINMSQENVDMRDSYLGYSTELALWKGVQSLVLGAPRYQHTGKAVIFTQVSRQWRMKAEVTGTQIGSYFGASLCSVDVDSDGSTDLVLIGAPHYYEQTRGGQVSVCPLPRGWRRWWCDAVLYGEQGHPWGRFGAALTVLGDVNGDKLTDVVIGAPGEEENRGAVYLFHGVLGPSISPSHSQRIAGSQLSSRLQYFGQALSGGQDLTQDGLVDLAVGARGQVLLLRTRPVLWVGVSMQFIPAEIPRSAFECREQVVSEQTLVQSNICLYIDKRSKNLLGSRDLQSSVTLDLALDPGRLSPRATFQETKNRSLSRVRVLGLKAHCENFNLLLPSCVEDSVTPITLRLNFTLVGKPLLAFRNLRPMLAADAQRYFTASLPFEKNCGADHICQDNLGISFSFPGLKSLLVGSNLELNAEVMVWNDGEDSYGTTITFSHPAGLSYRYVAEGQKQGQLRSLHLTCDSAPVGSQGTWSTSCRINHLIFRGGAQITFLATFDVSPKAVLGDRLLLTANVSSENNTPRTSKTTFQLELPVKYAVYTVVSSHEQFTKYLNFSESEEKESHVAMHRYQVNNLGQRDLPVSINFWVPVELNQEAVWMDVEVSHPQNPSLRCSSEKIAPPASDFLAHIQKNPVLDCSIAGCLRFRCDVPSFSVQEELDFTLKGNLSFGWVRQILQKKVSVVSVAEITFDTSVYSQLPGQEAFMRAQTTTVLEKYKVHNPTPLIVGSSIGGLLLLALITAVLYKVGFFKRQYKEMMEEANGQIAPENGTQTPSPPTPHYPQDNV

SEQ ID NO: 3720 - protein, 118 aa, Homo sapiens
VESCIRFINLNGLQHEGIFRVSGAQLRVSEIRDAFERGEDPLVEGCTAHDLDSVAGVLKLYFRSLEPPLFPPDLFGELLASSELEATAERVEHVSRLLWRLPAPVLVVLRYLFTFLNQ

SEQ ID NO: 3721 - protein, 250 aa, Homo sapiens
LWSVLAAALGLLTAGVSALEVYTPKEIFVANGTQGKLTCKFKSTSTTGGLTSVSWSFQPEGADTTVSFFHYSQGQVYLGNYPPFKDRISWAGDLDKKDASINIENMQFIHNGTYICDVKNPPDIVVQPGHIRLYVVEKENLPVFPVWVVVGIVTAVVLGLTLLISMILAVLYRRKNSKRDYTGCSTSESLSPVKQAPRKSPSDTEGLVKSLPSGSHQGPVIYAQLDHSGGHHSDKINKSESVVYADIRKN

SEQ ID NO: 3722 - protein, 876 aa, Homo sapiens
LASRPLLLALLSLALCRGRVVRVPTATLVRVVGTELVIPCNVSDYDGPSEQNFDWSFSSLGSSFVELASTWEVGFPAQLYQERLQRGEILLRRTANDAVELHIKNVQPSDQGHYKCSTPSTDATVQGNYEDTVQVKVLADSLHVGPSARPPPSLSLREGEPFELRCTAASASPLHTHLALLWEVHRGPARRSVLALTHEGRFHPGLGYEQRYHSGDVRLDTVGSDAYRLSVSRALSADQGSYRCIVSEWIAEQGNWQEIQEKAVEVATVVIQPSVLRAAVPKNVSVAEGKELDLTCNITTDRADDVRPEVTWSFSRMPDSTLPGSRVLARLDRDSLVHSSPHVALSHVDARSYHLLVRDVSKENSGYYYCHVSLWAPGHNRSWHKVAEAVSSPAGVGVTWLEPDYQVYLNASKVPGFADDPTELACRVVDTKSGEANVRFTVSWYYRMNRRSDNVVTSELLAVMDGDWTLKYGERSKQRAQDGDFIFSKEHTDTFNFRIQRTTEEDRGNYYCVVSAWTKQRNNSWVKSKDVFSKPVNIFWALEDSVLVVKARQPKPFFAAGNTFEMTCKVSSKNIKSPRYSVLIMAEKPVGDLSSPNETKYIISLDQDSVVKLENWTDASRVDGVVLEKVQEDEFRYRMYQTQVSDAGLYRCMVTAWSPVRGSLWREAATSLSNPIEIDFQTSGPIFNASVHSDTPSVIRGDLIKLFCIITVEGAALDPDDMAFDVSWFAVHSFGLDKAPVLLSSLDRKGIVTTSRRDWKSDLSLERVSVLEFLLQVHGSEDQDFGNYYCSVTPWVKSPTGSWQKEAEIHSKPVFITVKMDVLNAFKYPLLIGVGLSTVIGLLSCLIGYCSSHWCCKKEVQETRRERRRLMSMEMD

SEQ ID NO: 3723 - protein, 173 aa, Homo sapiens
RGAAPQSSMDAPRRDMELLSNSLAAYAHIRANPESFGLYFVLGVCFGLLLTLCLLVISISWAPRPRPRGPAQRRDPRSSTLEPEDDDEDEEDTVTRLGPDDTLPGPELSAEPDGPLNVNVFTSAEELERAQRLEERERILREIWRTGQPDLLGTGTLGPSPTATGTLGRMHYY

SEQ ID NO: 3724 - protein, 378 aa, Homo sapiens
RPCSIEDRRNWSLIGRPGAPASGLNRSSGLWLGPDRCRPRSRCSCRVMENPSPAAALGKALCALLLATLGAAGQPLGGESICSARALAKYSITFTGKWSQTAFPKQYPLFRPPAQWSSLLGAAHSSDYSMWRKNQYVSNGLRDFAERGEAWALMKEIEAAGEALQSVHAVFSAPAVPSGTGQTSAELEVQRRHSLVSFVVRIVPSPDWFVGVDSLDLCDGDRWREQAALDLYPYDAGTDSGFTFSSPNFATIPQDTVTEITSSSPSHPANSFYYPRLKALPPIARVTLVRLRQSPRAFIPPAPVLPSRDNEIVDSASVPETPLDCEVSLWSSWGLCGGHCGRLGTKSRTRYVRVQPANNGSPCPELEEEAECVPDNCV

SEQ ID NO: 3725 - protein, 341 aa, Homo sapiens
REENTSHPASGKGPLLDMSPAAAAEPDGDQQDRHVSKLIFCFFVFGAVLLCVGVLLSIFGFQACQYKPLPDCPMVLKVAGPACAVVGLGAVILARSRAQLQLRAGLQRGQQMDPDRAFICGESRQFAQCLIFGFLFLTSGMLISVLGIWVPGCGSNWAQEPLNETDTGDSEPRMCGFLSLQIMGPLIVLVGLCFFVVAHVKKRNTLNAGQDASEREEGQIQIMEPVQVTVGDSVIIFPPPPPPYFPESSASAVAESPGTNSLLPNENPPSYYSIFNYGRTPTSEGAASERDCESIYTISGTNSSSEASHTPHLPSELPPRYEEKENAAATFLPLSSEPSPP

SEQ ID NO: 3726 - protein, 1300 aa, Homo sapiens
IMPKKKRLSAGRVPLILFLCQMISALEVPLDPKLLEDLVQPPTITQQSPKDYIIDPRENIVIQCEAKGKPPPSFSWTRNGTHFDIDKDPLVTMKPGTGTLIINIMSEGKAETYEGVYQCTARNERGAAVSNNIVVRPSRSPLWTKEKLEPITLQSGQSLVLPCRPPIGLPPPIIFWMDNSFQRLPQSERVSQGLNGDLYFSNVLPEDTREDYICYARFNHTQTIQQKQPISVKVISVDELNDTIAANLSDTEFYGAKSSRERPPTFLTPEGNASNKEELRGNVLSLECIAEGLPTPIIYWAKEDGMLPKNRTVYKNFEKTLQIIHVSEADSGNYQCIAKNALGAIHHTISVRVKAAPYWITAPQNLVLSPGEDGTLICRANGNPKPRISWLTNGVPIEIAPDDPSRKIDGDTIIFSNVQERSSAVYQCNASNEYGYLLANAFVNVLAEPPRILTPANTLYQVIANRPALLDCAFFGSPLPTIEWFKGAKGSALHEDIYVLHENGTLEIPVAQKDSTGTYTCVARNKLGMAKNEVHLEIKDPTWIVKQPEYAVVQRGSMVSFECKVKHDHTLSLTVLWLKDNRELPSDERFTVDKDHLVVADVSDDDSGTYTCVANTTLDSVSASAVLSVVAPTPTPAPVYDVPNPPFDLELTDQLDKSVQLSWTPGDDNNSPITKFIIEYEDAMHKPGLWHHQTEVSGTQTTAQLKLSPYVNYSFRVMAVNSIGKSLPSEASEQYLTKASEPDKNPTAVEGLGSEPDNLVITWKPLNGFESNGPGLQYKVSWRQKDGDDEWTSVVVANVSKYIVSGTPTFVPYLIKVQALNDMGFAPEPAVVMGHSGEDLPMVAPGNVRVNVVNSTLAEVHWDPVPLKSIRGHLQGYRIYYWKTQSSSKRNRRHIEKKILTFQGSKTHGMLPGLEPFSHYTLNVRVVNGKGEGPASPDRVFNTPEGVPSAPSSLKIVNPTLDSLTLEWDPPSHPNGILTEYTLKYQPINSTHELGPLVDLKIPANKTRWTLKNLNFSTRYKFYFYAQTSAGSGSQITEEAVTTVDEAGILPPDVGAGKVQAVNPRISNLTAAAAETYANISWEYEGPEHVNFYVEYGVAGSKEEWRKEIVNGSRSFFGLKGLMPGTAYKVRVGAVGDSGFVSSEDVFETGPAMASRQVDIATQGWFIGLMCAVALLILILLIVCFIRRNKGGKYPVKEKEDAHADPEIQPMKEDDGTFGEYSDAEDHKPLKKGSRTPSDRTVKKEDSDDSLVDYGEGVNGQFNEDGSFIGQYSGKKEKEPAEGNESSEAPSPVNAMNSFV

SEQ ID NO: 3727 - protein, 821 aa, Homo sapiens
RRRAPSAAGSRAPAAELLRPRQDPNRARGRRAGAGDAGTRPLAQATADSPEAEPPRRARVSLKRRIELTVEYPWRCGALSPTSNCRTGMWSWKCLLFWAVLVTATLCTARPSPTLPEQDALPSSEDDDDDDDSSSEEKETDNTKPNRMPVAPYWTSPEKMEKKLHAVPAAKTVKFKCPSSGTPNPTLRWLKNGKEFKPDHRIGGYKVRYATWSIIMDSVVPSDKGNYTCIVENEYGSINHTYQLDVVERSPHRPILQAGLPANKTVALGSNVEFMCKVYSDPQPHIQWLKHIEVNGSKIGPDNLPYVQILKTAGVNTTDKEMEVLHLRNVSFEDAGEYTCLAGNSIGLSHHSAWLTVLEALEERPAVMTSPLYLEIIIYCTGAFLISCMVGSVIVYKMKSGTKKSDFHSQMAVHKLAKSIPLRRQVTVSADSSASMNSGVLLVRPSRLSSSGTPMLAGVSEYELPEDPRWELPRDRLVLGKPLGEGCFGQVVLAEAIGLDKDKPNRVTKVAVKMLKSDATEKDLSDLISEMEMMKMIGKHKNIINLLGACTQDGPLYVIVEYASKGNLREYLQARRPPGLEYCYNPSHNPEEQLSSKDLVSCAYQVARGMEYLASKKCIHRDLAARNVLVTEDNVMKIADFGLARDIHHIDYYKKTTNGRLPVKWMAPEALFDRIYTHQSDVWSFGVLLWEIFTLGGSPYPGVPVEELFKLLKEGHRMDKPSNCTNELYMMMRDCWHAVPSQRPTFKQLVEDLDRIVALTSNQEYLDLSMPLDQYSPSFPDTRSSTCSSGEDSVFSHEPLPEEPCLPRHPAQLANGGLKRR

SEQ ID NO: 3728 - protein, 67 aa, Homo sapiens
LSPLFYKMWGFLKRPVVVTADINLSLVALTGMGLLSRLWRLTYPRAVVLFRRIRWQFFVEQNWSRIQ

SEQ ID NO: 3729 - protein, 495 aa, Homo sapiens
RPAGLPCGAENPARRRLALGARQQIHSWSPRTPSTRLTAPAGPARGVARPAMAPDPVAAETAAQGPTPRYFTWDEVAQRSGCEERWLVIDRKVYNISEFTRRHPGGSRVISHYAGQDATDPFVAFHINKGLVKKYMNSLLIGELSPEQPSFEPTKNKELTDEFRELRATVERMGLMKANHVFFLLYLLHILLLDGAAWLTLWVFGTSFLPFLLCAVLLSAVQAQAGWLQHDFGHLSVFSTSKWNHLLHHFVIGHLKGAPASWWNHMHFQHHAKPNCFRKDPDINMHPFFFALGKILSVELGKQKKKYMPYNHQHKYFFLIGPPALLPLYFQWYIFYFVIQRKKWVDLAWMITFYVRFFLTYVPLLGLKAFLGLFFIVRFLESNWFVWVTQMNHIPMHIDHDRNMDWVSTQLQATCNVHKSAFNDWFSGHLNFQIEHHLFPTMPRHNYHKVAPLVQSLCAKHGIEYQSKPLLSAFADIIHSLKESGQLWLDAYLHQ

SEQ ID NO: 3730 - protein, 41 aa, Homo sapiens
TEKTVFTVFMIAVSGICILLNVTELCYLLIRYCSGKSKKPV

SEQ ID NO: 3731 - protein, 540 aa, Homo sapiens
ILLRRMEEGARHRNNTEKKHPGGGESDASPEAGSGGGGVALKKEIGLVSACGIIVGNIIGSGIFVSPKGVLENAGSVGLALIVWIVTGFITVVGALCYAELGVTIPKSGGDYSYVKDIFGGLAGFLRLWIAVLVIYPTNQAVIALTFSNYVLQPLFPTCFPPESGLRLLAAICLLLLTWVNCSSVRWATRVQDIFTAGKLLALALIIIMGIVQICKGEYFWLEPKNAFENFQEPDIGLVALAFLQGSFAYGGWNFLNYVTEELVDPYKNLPRAIFISIPLVTFVYVFANVAYVTAMSPQELLASNAVAVTFGEKLLGVMAWIMPISVALSTFGGVNGSLFTSSRLFFAGAREGHLPSVLAMIHVKRCTPIPALLFTCISTLLMLVTSDMYTLINYVGFINYLFYGVTVAGQIVLRWKKPDIPRPIKINLLFPIIYLLFWAFLLVFSLWSEPVVCGIGLAIMLTGVPVYFLGVYWQHKPKCFSDFIELLTLVSQKMCVVVYPEVERGSGTEEANEDMEEQQQPMYQPTPTKDKDVAGQPQP

SEQ ID NO: 3732 - protein, 1507 aa, Homo sapiens
LEFGLLQLLALWGLGLALCCLPVSPRCLGTKAPGPLRPRAPTHRRRGAARPALSTMRGLGTCLATLAGLLLTAAGETFSGGCLFDEPYSTCGYSQSEGDDFNWEQVNTLTKPTSDPWMPSGSFMLVNASGRPEGQRAHLLLPQLKENDTHCIDFHYFVSSKSNSPPGLLNVYVKVNNGPLGNPIWNISGDPTRTWNRAELAISTFWPNFYQVIFEVITSGHQGYLAIDEVKVLGHPCTRTPHFLRIQNVEVNAGQFATFQCSAIGRTVAGDRLWLQGIDVRDAPLKEIKVTSSRRFIASFNVVNTTKRDAGKYRCMIRTEGGVGISNYAELVVKEPPVPIAPPQLASVGATYLWIQLNANSINGDGPIVAREVEYCTASGSWNDRQPVDSTSYKIGHLDPDTEYEISVLLTRPGEGGTGSPGPALRTRTKCADPMRGPRKLEVVEVKSRQITIRWEPFGYNVTRCHSYNLTVHYCYQVGGQEQVREEVSWDTENSHPQHTITNLSPYTNVSVKLILMNPEGRKESQELIVQTDEDLPGAVPTESIQGSTFEEKIFLQWREPTQTYGVITLYEITYKAVSSFDPEIDLSNQSGRVSKLGNETHFLFFGLYPGTTYSFTIRASTAKGFGPPATNQFTTKISAPSMPAYELETPLNQTDNTVTVMLKPAHSRGAPVSVYQIVVEEERPRRTKKTTEILKCYPVPIHFQNASLLNSQYYFAAEFPADSLQAAQPFTIGDNKTYNGYWNTPLLPYKSYRIYFQAASRANGETKIDCVQVATKGAATPKPVPEPEKQTDHTVKIAGVIAGILLFVIIFLGVVLVMKKRKLAKKRKETMSSTRQEMTVMVNSMDKSYAEQGTNCDEAFSFMDTHNLNGRSVSSPSSFTMKTNTLSTSVPNSYYPDETHTMASDTSSLVQSHTYKKREPADVPYQTGQLHPAIRVADLLQHITQMKCAEGYGFKEEYESFFEGQSAPWDSAKKDENRMKNRYGNIIAYDHSRVRLQTIEGDTNSDYINGNYIDGYHRPNHYIATQGPMQETIYDFWRMVWHENTASIIMVTNLVEVGRVKCCKYWPDDTEIYKDIKVTLIETELLAEYVIRTFAVEKRGVHEIREIRQFHFTGWPDHGVPYHATGLLGFVRQVKSKSPPSAGPLVVHCSAGAGRTGCFIVIDIMLDMAEREGVVDIYNCVRELRSRRVNMVQTEEQYVFIHDAILEACLCGDTSVPASQVRSLYYDMNKLDPQTNSSQIKEEFRTLNMVTPTLRVEDCSIALLPRNHEKNRCMDILPPDRCLPFLITIDGESSNYINAALMDSYKQPSAFIVTQHPLPNTVKDFWRLVLDYHCTSVVMLNDVDPAQLCPQYWPENGVHRHGPIQVEFVSADLEEDIISRIFRIYNAARPQDGYRMVQQFQFLGWPMYRDTPVSKRSFLKLIRQVDKWQEEYNGGEGRTVVHCLNGGGRSGTFCAISIVCEMLRHQRTVDVFHAVKTLRNNKPNMVDLLDQYKFCYEVALEYLNSG

SEQ ID NO: 3733 - protein, 360 aa, Homo sapiens
VLVRRDHHGANFSCRTELDLRPQGLELFENTSAPYQLQTFVLPATPPQLVSPRVLEVDTQGTVVCSLDGLFPVSEAQVHLALGDQRLNPTVTYGNDSFSAKASVSVTAEDEGTQRLTCAVILGNQSQETLQTVTIYSFPAPNVILTKPEVSEGTEVTVKCEAHPRAKVTLNGVPAQPLGPRAQLLLKATPEDNGRSFSCSATLEVAGQLIHKNQTRELRVLYGPRLDERDCPGNWTWPENSQQTPMCQAWGNPLPELKCLKDGTFPLPIGESVTVTRDLEGTYLCRARSTQGEVTRKVTVNVLSPRYEIVIITVVAAAVIMGTAGLSTYLYNRQRKIKKYRLQQAQKGTPMKPNTQATPP

SEQ ID NO: 3734 - protein, 404 aa, Homo sapiens
ISLAFLTFSVVLALFLKRPKRSLFFNRDDRGRCETSASELERMNPGPGGKLGHALRVACGDSVLARMLRELGDSLRRPQLRLWSLWWVFNSAGYYLVVYYVHILWNEVDPTTNSARVYNGAADAASTLLGAITSFAAGFVKIRWARWSKLLIAGVTATQAGLVFLLAHTRHPSSIWLCYAAFVLFRGSYQFLVPIATFQIASSLSKELCALVFGVNTFFATIVKTIITFIVSDVRGLGLPVRKQFQLYSVYFLILSIIYFLGAMLDGLRHCQRGHHPRQPPAQGLRSAAEEKAAQALSVQDKGLGGLQPAQSPPLSPEDSLGAVGPASLEQRQSDPYLAQAPAPQAAEFLSPVTTPSPCTLCSAQASGPEAADETCPQLAVHPPGVSKLGLQCLPSDGVQNVNQ

SEQ ID NO: 3735 - protein, 261 aa, Homo sapiens
MICYWDGSAHYLMYLVMVAAIAWEETYRTIGLYWVGSIIMSVVVFVPGNIVGKYGTRICPAFFLSIPYTCLPVWAGFRIYNQPSENYNYPSKVIQEAQAKDLLRRPFDLMLVVCLLLATGFCLFRGLIALDCPSELCRLYTQFQEPYLKDPAAYPKIQMLAYMFYSVPYFVTALYGLVVPGCSWMPDITLIHAGGLAQAQFSHIGASLHARTAYVYRVPEEAKILFLALNIAYGVLPQLLAYRCIYKPEFFIKTKAEEKVE

SEQ ID NO: 3736 - protein, 1074 aa, Homo sapiens
MSLGLTLAASTNGSRLLACGPTLHRVCGENSYSKGSCLLLGSRWEIIQTVPDATPECPHQEMDIVFLIDGSGSIDQNDFNQMKGFVQAVMGQFEGTDTLFALMQYSNLLKIHFTFTQFRTSPSQQSLVDPIVQLKGLTFTATGILTVVTQLFHHKNGARKSAKKILIVITDGQKYKDPLEYSDVIPQAEKAGIIRYAIGVGHAFQGPTARQELNTISSAPPQDHVFKVDNFAALGSIQKQLQEKIYAVEGTQSRASSSFQHEMSQEGFSTALTMDGLFLGAVGSFSWSGGAFLYPPNMSPTFINMSQENVDMRDSYLGYSTELALWKGVQNLVLGAPRYQHTGKAVIFTQVSRQWRKKAEVTGTQIGSYFGASLCSVDVDSDGSTDLILIGAPHYYEQTRGGQVSVCPLPRGRVQWQCDAVLRGEQGHPWGRFGAALTVLGDVNEDKLIDVAIGAPGEQENRGAVYLFHGASESGISPSHSQRIASSQLSPRLQYFGQALSGGQDLTQDGLMDLAVGARGQVLLLRSLPVLKVGVAMRFSPVEVAKAVYRCWEEKPSALEAGDATVCLTIQKSSLDQLGDIQSSVRFDLALDPGRLTSRAIFNETKNPTLTRRKTLGLGIHCETLKLLLPDCVEDVVSPIILHLNFSLVREPIPSPQNLRPVLAVGSQDLFTASLPFEKNCGQDGLCEGDLGVTLSFSGLQTLTVGSSLELNVIVTVWNAGEDSYGTVVSLYYPAGLSHRRVSGAQKQPHQSALRLACETVPTEDEGLRSSRCSVNHPIFHEGSNGTFIVTFDVSYKATLGDRMLMRASASSENNKASSSKATFQLELPVKYAVYTMISRQEESTKYFNFATSDEKKMKEAEHRYRVNNLSQRDLAISINFWVPVLLNGVAVWDVVMEAPSQSLPCVSERKPPQHSDFLTQISRSPMLDCSIADCLQFRCDVPSFSVQEELDFTLKGNLSFGWVRETLQKKVLVVSVAEITFDTSVYSQLPGQEAFMRAQMEMVLEEDEVYNAIPIIMGSSVGALLLLALITATLYKLGFFKRHYKEMLEDKPEDTATFSGDDFSCVAPNVPLS

SEQ ID NO: 3737 - protein, 148 aa, Homo sapiens
MLQKEENEVYVLGAFTGLHGRRRREYWQVCTLLKCKTTNLTTCGRPVETASTRFEMFSLSGTFGTEYVFPEVLLTEIHLSPGKFEVLKDGRLVNKNGSSGPILTVSLFGRWYTKDSLYSSCGTSNSAITYLLIFILLMIIALQNIVML

SEQ ID NO: 3738 - protein, 359 aa, Homo sapiens
LSTSRSRFIRNTNESGEEVTTFFDYDYGAPCHKFDVKQIGAQLLPPLYSLVFIFGFVGNMLVVLILINCKKLKCLTDIYLLNLAISDLLFLITLPLWAHSAANEWVFGNAMCKLFTGLYHIGYFGGIFFIILLTIDRYLAIVHAVFALKARTVTFGVVTSVITWLVAVFASVPGIIFTKCQKEDSVYVCGPYFPRGWNNFHTIMRNILGLVLPLLIMVICYSGILKTLLRCRNEKKRHRAVRVIFTIMIVYFLFWTPYNIVILLNTFQEFFGLSNCESTSQLDQATQVTETLGMTHCCINPIIYAFVGEKFRRYLSVFFRKHITKRFCKQCPVFYRETVDGVTSTNTPSTGEQEVSAGL

SEQ ID NO: 3739 - protein, 37 aa, Homo sapiens
LGDLLGTGLLALCFFTDWLLKSKAELGGISELASGPP

SEQ ID NO: 3740 - protein, 287 aa, Homo sapiens
KTSASLPRLVPRVRKMDSYLLMWGLLTFIMVPGCQAELCDDDPPEIPHATFKAMAYKEGTMLNCECKRGFRRIKSGSLYMLCTGNSSHSSWDNQCQCTSSATRNTTKQVTPQPEEQKERKTTEMQSPMQPVDQASLPGHCREPPPWENEATERIYHFVVGQMVYYQCVQGYRALHRGPAESVCKMTHGKTRWTQPQLICTGEMETSQFPGEEKPQASPEGRPESETSCLVTTTDFQIQTEMAATMETSIFTTEYQVAVAGCVFLLISVLLLSGLTWQRRQRKSRRTI

SEQ ID NO: 3741 - protein, 787 aa, Homo sapiens
ISSVCCVFAQTDENRCLKANAKSCGECIQAGPNCGWCTNSTFLQEGMPTSARCDDLEALKKKGCPPDDIENPRGSKDIKKNKNVTNRSKGTAEKLKPEDITQIQPQQLVLRLRSGEPQTFTLKFKRAEDYPIDLYYLMDLSYSMKDDLENVKSLGTDLMNEMRRITSDFRIGFGSFVEKTVMPYISTTPAKLRNPCTSEQNCTSPFSYKNVLSLTNKGEVFNELVGKQRISGNLDSPEGGFDAIMQVAVCGSLIGWRNVTRLLVFSTDAGFHFAGDGKLGGIVLPNDGQCHLENNMYTMSHYYDYPSIAHLVQKLSENNIQTIFAVTEEFQPVYKELKNLIPKSAVGTLSANSSNVIQLIIDAYNSLSSEVILENGKLSEGVTISYKSYCKNGVNGTGENGRKCSNISIGDEVQFEISITSNKCPKKDSDSFKIRPLGFTEEVEVILQYICECECQSEGIPESPKCHEGNGTFECGACRCNEGRVGRHCECSTDEVNSEDMDAYCRKENSSEICSNNGECVCGQCVCRKRDNTNEIYSGKFCECDNFNCDRSNGLICGGNGVCKCRVCECNPNYTGSACDCSLDTSTCEASNGQICNGRGICECGVCKCTDPKFQGQTCEMCQTCLGVCAEHKECVQCRAFNKGEKKDTCTQECSYFNITKVESRDKLPQPVQPDPVSHCKEKDVDDCWFYFTYSVNGNNEVMVHVVENPECPTGPDIIPIVAGVVAGIVLIGLALLLIWKLLMIIHDRREFAKFEKEKMNAKWDTGENPIYKSAVTTVVNPKYEGK

SEQ ID NO: 3742 - protein, 178 aa, Homo sapiens
KGLAVLILAIILLQGTLAQSIKGNHLVKVYDYQEDGSVLLTCDAEAKNITWFKDGKMIGFLTEDKKKWNLGSNAKDPRGMYQCKGSQNKSKPLQVYYRMCQNCIELNAATISGFLFAEIVSIFVLAVGVYFIAGQDGVRQSRASDKQTLLPNDQLYQPLKDREDDQYSHLQGNQLRRN

SEQ ID NO: 3743 - protein, 48 aa, Homo sapiens
LPYFYIIYMAILLTHRCLRDEHRCASKYGRDWERYTAAVPYRLLPGIF

SEQ ID NO: 3744 - protein, 494 aa, Homo sapiens
LFEKQRARKTQAQRPCHFCGLRSLLAQAPASLGKATMNRGVPFRHLLLVLQLALLPAATQGKKVVLGKKGDTVELTCTASQKKSIQFHWKNSNQIKILGNQGSFLTKGPSKLNDRADSRRSLWDQGNFPLIIKNLKIEDSDTYICEVEDQKEEVQLLVFGLTANSDTHLLQGQSLTLTLESPPGSSPSVQCRSPRGKNIQGGKTLSVSQLELQDSGTWTCTVLQNQKKVEFKIDIVVLAFQKASSIVYKKEGEQVEFSFPLAFTVEKLTGSGELWWQAERASSSKSWITFDLKNKEVSVKRVTQDPKLQMGKKLPLHLTLPQALPQYAGSGNLTLALEAKTGKLHQEVNLVVMRATQLQKNLTCEVWGPTSPKLMLSLKLENKEAKVSKREKAVWVLNPEAGMWQCLLSDSGQVLLESNIKVLPTWSTPVQPMALIVLGGVAGLLLFIGLGIFFCVRCRHRRRQAERMSQIKRLLSEKKTCQCPHRFQKTCSPI

SEQ ID NO: 3745 - protein, 228 aa, Homo sapiens
MGAFRALCGLALLCALSLGQRPTGGPGCGPGRLLLGTGTDARCCRVHTTRCCRDYPGEECCSEWDCMCVQPEFHCGDPCCTTCRHHPCPPGQGVQSQGKFSFGFQCIDCASGTFSGGHEGHCKPWTDCTQFGFLTVFPGNKTHNAVCVPGSPPAEPLGWLTVVLLAVAACVLLLTSAQLGLHIWQLRKTQLLLEVPPSTEDARSCQFPEEERGERSAEEKGRLGDLWV

SEQ ID NO: 3746 - protein, 272 aa, Homo sapiens
MIRHLQAVDYASRTKVFPGERVEHVTFNFTLENQIHRGGQYFNDKFIGLRLKSVSFEDSLFEECYFEDVTSSNTFFRNCTFINTVFYNTDLFEYKFVNSRLINSTFLHNKEGCPLDVTGTGEGAYMVYFVSFLGTLAVLPGNIVSALLMDKIGRLRMLAGSSVMSCVSCFFLSFGNSESAMIALLCLFGGVSIASWNALDVLTVELYPSDKRTTAFGFLNALCKLAAVLGISIFTSFVGITKAAPILFASAALALGSSLALKLPETRGQVLQ

SEQ ID NO: 3747 - protein, 135 aa, Homo sapiens
MSSENCFVAENSSLHPESGQENDATSPHFSTRHEGSFQVPVLCAVMNVVFITILIIALIALSVGQYNCPGQYTFSMPSDSHVSSCSEDWVGYQRKCYFISTVKRSWTSAQNACSEHGATLAVIDSEKDMVRIKKR

SEQ ID NO: 3748 - protein, 203 aa, Homo sapiens
MVVLLMGLVFASVYIYRYFFLAQLARDNFFRCGVLYEDSLSSQVRTQMELEEDVKIYLDENYERINVPVPQFGGGDPADIIHDFQRGLTAYHDISLDKCYVIELNTTIVLPPRNFWELLMNVKRGTYLPQTYIIQEEMVVTEHVSDKEALGSFIYHLCNGKDTYRLRRRATRRRINKRGAKNCNAIRHFENTFVVETLICGVV

SEQ ID NO: 3749 - protein, 33 aa, Homo sapiens
MEPVTYFITFANSMVFFAYFIVTRQVSSLLGKW

SEQ ID NO: 3750 - protein, 23 aa, Homo sapiens
ILGYFLTYWLLGLLLHCNFLPWT

SEQ ID NO: 3751 - protein, 43 aa, Homo sapiens
IPYLTGLGDLLGTGLLALCFFTDWLLKSKAELGGISELASGPP

SEQ ID NO: 3752 - protein, 194 aa, Homo sapiens
LLQRSLVLFSVGVVLALVLNLLQIQRNVTLFPEEVIATIFSSAWWVPPCCGTAAAVVGLLYPCIDSHLGEPHKFKREWASVMRCIAVFVGINHASAKLDFANNVQLSLTLAALSLGLWWTFDRSRSGLGLGITIAFLATLITQFLVYNGVYQYTSPDFLYIRSWLPCIFFSGGVTVGNIGRQLAMGVPEKPHSD

SEQ ID NO: 3753 - protein, 43 aa, Homo sapiens; identical to SEQ ID NO: 2102

SEQ ID NO: 3754 - protein, 199 aa, Homo sapiens
LPCGPCIPIMLVLATLAALFILTTAVLAERLFRRALRPDPSHRAPTLVWRPGGELWIEPMGTARERSEDWYGSAVPLLTDRAPEPPTQVGTLEARATAPPAPSAPNSAPSNLGPQTVLEVPARSTFWGPQPWEGRPPATGLVSWAEPEQRPEASVQFGSPQARRQRPGSPDPEWGLQPRVTLEQISAFWKREGRTSVGF

SEQ ID NO: 3755 - protein, 886 aa, Homo sapiens
MAEGRELILDLEKNEQLFAPSYTETHYTSSGNPQTTTRKLEDHCFYHGTVRETELSSVTLSTCRGIRGLITVSSNLSYVIEPLPDSKGQHLIYRSEHLKPPPGNCGFEHSKPTTRDWALQFTQQTKKRPRRMKREDLNSMKYVELYLVADYLEFQKNRRDQDATKHKLIEIANYVDKFYRSLNIRIALVGLEVWTHGNMCEVSENPYSTLWSFLSWRRKLLAQKYHDNAQLITGMSFHGTTIGLAPLMAMCSVYQSGGVNMDHSENAIGVAATMAHEMGHNFGMTHDSADCCSASAADGGCIMAAATGHPFPKVFNGCNRRELDRYLQSGGGMCLSNMPDTRMLYGGRRCGNGYLEDGEECDCGEEEECNNPCCNASNCTLRPGAECAHGSCCHQCKLLAPGTLCREQARQCDLPEFCTGKSPHCPTNFYQMDGTPCEGGQAYCYNGMCLTYQEQCQQLWGPGARPAPDLCFEKVNVAGDTFGNCGKDMNGEHRKCNMRDAKCGKIQCQSSEARPLESNAVPIDTTIIMNGRQIQCRGTHVYRGPEEEGDMLDPGLVMTGTKCGYNHICFEGQCRNTSFFETEGCGKKCNGHGVCNNNQNCHCLPGWAPPFCNTPGHGGSIDSGPMPPESVGPVVAGVLVAILVLAVLMLMYYCCRQNNKLGQLKPSALPSKLRQQFSCPFRVSQNSGTGHANPTFKLQTPQGKRKVINTPEILRKPSQPPPRPPPDYLRGGSPPAPLPAHLSRAARNSPGPGSQIERTESSRRPPPSRPIPPAPNCIVSQDFSRPRPPQKALPANPVPGRRSLPRPGGASPLRPPGAGPQQSRPLAALAPKVSPREALKVKAGTRGLQGGRCRVEKTKQFMLLVVWTELPEQKPRAKHSCFLVPA

SEQ ID NO: 3756 - protein, 351 aa, Homo sapiens
ILGNSKHKAPLSGPHINAITEEKGSILISWNSIPVQEQMGCLLHYRIYWKERDSNSQPQLCEIPYRVSQNSHPINSLQPRVTYVLWMTALTAAGESSHGNEREFCLQGKANWMAFVAPSICIAIIMVGIFSTHYFQQKVFVLLAALRPQWCSREIPDPANSTCAKKYPIAEEKTQLPLDRLLIDWPTPEDPEPLVISEVLHQVTPVFRHPPCSNWPQREKGIQGHQASEKDMMHSASSPPPPRALQAESRQLVDLYKVLESRGSDPKPENPACPWTVLPAGDLPTHDGYLPSNIDDLPSHEAPLADSLEELEPQHISLSVFPSSSLHPLTFSCGDKLTLDQLKMRCDSLML

SEQ ID NO: 3757 - protein, 36 aa, Homo sapiens
LEILPQELASSEQRILKVILLLAGFALLTGLLFIQI

SEQ ID NO: 3758 - protein, 211 aa, Homo sapiens
LNLATRTWPCTLLFFLLFIPVFCKAMHVAQPAVVLASSRGIASFVCEYASPGKATEVRVTVLRQADSQVTEVCAATYMMGNELTFLDDSICTGTSSGNQVNLTIQGLRAMDTGLYICKVELMYPPPYYLGIGNGTQIYVIDPEPCPDSDFLLWILAAVSSGLFFYSFLLTAVSLSKMLKKRSPLTTGVYVKMPPTEPECEKQFQPYFIPIN

SEQ ID NO: 3759 - protein, 58 aa, Homo sapiens
VQKWHLERGRKRRKNRSSASDLRWLKERMYLVSAISLHPSMTLLSMSLIFLARKPSAV

SEQ ID NO: 3760 - protein, 214 aa, Homo sapiens
VWYPLWGGIMYIISGSLLAATEKNSRKCLVKGKMIMNSLSLFAAISGMILSIMDILNIKISHFLKMESLNFIRAHTPYINIYNCEPANPSEKNSPSTQYCYSIQSLFLGILSVMLIFAFFQELVIAGIVENEWKRTCSRPKSNIVLLSAEEKKEQTIEIKEEVVGLTETSSQPKNEEDIEIIPIQEEEEEETETNFPEPPQDQESSPIENDSSP

SEQ ID NO: 3761 - protein, 253 aa, Homo sapiens
IRVFAIPPSFASIFLTKSTKLTCLVTDLTTYDSVTISWTRQNGEAVKTHTNISESHPNATFSAVGEASICEDDWNSGERFTCTVTHTDLPSPLKQTISRPKGVALHRPDVYLLPPAREQLNLRESATITCLVTGFSPADVFVQWMQRGQPLSPEKYVTSAPMPEPQAPGRYFAHSILTVSEEEWNTGETYTCVVAHEALPNRVTERTVDKSTEGEVSADEEGFENLWATASTFIVLFLLSLFYSTTVTLFKVK

SEQ ID NO: 3762 - protein, 88 aa, Homo sapiens
IRDAFERGEDPLVEGCTAHDLDSVAGVLKLYFRSLEPPLFPPDLFGELLASSELEATAERVEHVSRLLWRLPAPVLVVLRYLFTFLNQ

SEQ ID NO: 3763 - protein, 222 aa, Homo sapiens
MSVVVFVPGNIVGKYGTRICPAFFLSIPYTCLPVWAGFRIYNQPSENYNYPSKVIQEAQAKDLLRRPFDLMLVVCLLLATGFCLFRGLIALDCPSELCRLYTQFQEPYLKDPAAYPKIQMLAYMFYSVPYFVTALYGLVVPGCSWMPDITLIHAGGLAQAQFSHIGASLHARTAYVYRVPEEAKILFLALNIAYGVLPQLLAYRCIYKPEFFIKTKAEEKVE

SEQ ID NO: 3764 - protein, 1626 aa, Homo sapiens
MFSCDSSAMLWWKCEHHSLYGAARYRLALKDGHGTAISNASDVWKKGGSEESLCDQPYHEIYTRDGNSYGRPCEFPFLIDGTWHHDCILDEDHSGPWCATTLNYEYDRKWGICLKPENGCEDNWEKNEQFGSCYQFNTQTALSWKEAYVSCQNQGADLLSINSAAELTYLKEKEGIAKIFWIGLNQLYSARGWEWSDHKPLNFLNWDPDRPSAPTIGGSSCARMDAESGLWQSFSCEAQLPYVCRKPLNNTVELTDVWTYSDTRCDAGWLPNNGFCYLLVNESNSWDKAHAKCKAFSSDLISIHSLADVEVVVTKLHNEDIKEEVWIGLKNINIPTLFQWSDGTEVTLTYWDENEPNVPYNKTPNCVSYLGELGQWKVQSCEEKLKYVCKRKGEKLNDASSDKMCPPDEGWKRHGETCYKIYEDEVPFGTNCNLTITSRFEQEYLNDLMKKYDKSLRKYFWTGLRDVDSCGEYNWATVGGRRRAVTFSNWNFLEPASPGGCVAMSTGKSVGKWEVKDCRSFKALSICKKMSGPLGPEEASPKPDDPCPEGWQSFPASLSCYKVFHAERIVRKRNWEEAERFCQALGAHLSSFSHVDEIKEFLHFLTDQFSGQHWLWIGLNKRSPDLQGSWQWSDRTPVSTIIMPNEFQQDYDIRDCAAVKVFHRPWRRGWHFYDDREFIYLRPFACDTKLEWVCQIPKGRTPKTPDWYNPDRAGIHGPPLIIEGSEYWFVADLHLNYEEAVLYCASNHSFLATITSFVGLKAIKNKIANISGDGQKWWIRISEWPIDDHFTYSRYPWHRFPVTFGEECLYMSAKTWLIDLGKPTDCSTKLPFICEKYNVSSLEKYSPDSAAKVQCSEQWIPFQNKCFLKIKPVSLTFSQASDTCHSYGGTLPSVLSQIEQDFITSLLPDMEATLWIGLRWTAYEKINKWTDNRELTYSNFHPLLVSGRLRIPENFFEEESRYHCALILNLQKSPFTGTWNFTSCSERHFVSLCQKYSEVKSRQTLQNASETVKYLNNLYKIIPKTLTWHSAKRECLKSNMQLVSITDPYQQAFLSVQALLHNSSLWIGLFSQDDELNFGWSDGKRLHFSRWAETNGQLEDCVVLDTDGFWKTVDCNDNQPGAICYYSGNETEKEVKPVDSVKCPSPVLNTPWIPFQNCCYNFIITKNRHMATTQDEVHTKCQKLNPKSHILSIRDEKENNFVLEQLLYFNYMASWVMLGITYRNKSLMWFDKTPLSYTHWRAGRPTIKNEKFLAGLSTDGFWDIQTFKVIEEAVYFHQHSILACKIEMVDYKEEYNTTLPQFMPYEDGIYSVIQKKVTWYEALNMCSQSGGHLASVHNQNGQLFLEDIVKRDGFPLWVGLSSHDGSESSFEWSDGSTFDYIPWKGQTSPGNCVLLDPKGTWKHEKCNSVKDGAICYKPTKSKKLSRLTYSSRCPAAKENGSRWIQYKGHCYKSDQALHSFSEAKKLCSKHDHSATIVSIKDEDENKFVSRLMRENNNITMRVWLGLSQHSVDQSWSWLDGSEVTFVKWENKSKSGVGRCSMLIASNETWKKVECEHGFGRVVCKVPLGPDYTAIAIIVATLSILVLMGGLIWFLFQRHRLHLAGFSSVRYAQGVNEDEIMLPSFHD

SEQ ID NO: 3765 - protein, 77 aa, Homo sapiens
MKLAVDEEENADNNTKANVTKPKRCSGSICYGTIAVIVFFLIGSKCYARKYPQDTGGAAAQSHVSRGSFGKNYLCFE

SEQ ID NO: 3766 - protein, 99 aa, Homo sapiens [sequence omitted]

SEQ ID NO: 3767 - protein, 259 aa, Homo sapiens
LPLLLGLSLGCTGAGGFVAHVESTCLLDDAGTPKDFTYCISFNKDLLTCWDPEENKMAPCEFGVLNSLANVLSQHLNQKDTLMQRLRNGLQNCATHTQPFWGSLTNRTRPPSVQVAKTTPFNTREPVMLACYVWGFYPAEVTITWRKNGKLVMPHSSAHKTAQPNGDWTYQTLSHLALTPSYGDTYTCVVEHTGAPEPILRDWTPGLSPMQTLKVSVSAVTLGLGLIIFSLGVISWRRAGHSSYTPLPGSNYSEGWHIS

SEQ ID NO: 3768 - protein, 38 aa, Homo sapiens
MGLKMLMMMALLVPLVYTIKRHKWSVLKSRKLAYRPPK

SEQ ID NO: 3769 - protein, 1451 aa, Homo sapiens
MYWTDWGETPRIERAGMDGSTRKIIVDSDIYWPNGLTIDLEEQKLYWADAKLSFIHRANLDGSFRQKVVEGSLTHPFALTLSGDTLYWTDWQTRSIHACNKRTGGKRKEILSALYSPMDIQVLSQERQPFFHTRCEEDNGGCSHLCLLSPSEPFYTCACPTGVQLQDNGRTCKAGAEEVLLLARRTDLRRISLDTPDFTDIVLQVDDIRHAIAIDYDPLEGYVYWTDDEVRAIRRAYLDGSGAQTLVNTEINDPDGIAVDWVARNLYWTDTGTDRIEVTRLNGTSRKILVSEDLDEPRAIALHPVMGLMYWTDWGENPKIECANLDGQERRVLVNASLGWPNGLALDLQEGKLYWGDAKTDKIEVINVDGTKRRTLLEDKLPHIFGFTLLGDFIYWTDWQRRSIERVHKVKASRDVIIDQLPDLMGLKAVNVAKVVGTNPCADRNGGCSHLCFFTPHATRCGCPIGLELLSDMKTCIVPEAFLVFTSRAAIHRISLETNNNDVAIPLTGVKEASALDFDVSNNHIYWTDVSLKTISRAFMNGSSVEHVVEFGLDYPEGMAVDWMGKNLYWADTGTNRIEVARLDGQFRQVLVWRDLDNPRSLALDPTKGYIYWTEWGGKPRIVRAFMDGTNCMTLVDKVGRANDLTIDYADQRLYWTDLDTNMIESSNMLGQERVVIADDLPHPFGLTQYSDYIYWTDWNLHSIERADKTSGRNRTLIQGHLDFVMDILVFHSSRQDGLNDCMHNNGQCGQLCLAIPGGHRCGCASHYTLDPSSRNCSPPTTFLLFSQKSAISRMIPDDQHSPDLILPLHGLRNVKAIDYDPLDKFIYWVDGRQNIKRAKDDGTQPFVLTSLSQGQNPDRQPHDLSIDIYSRTLFWTCEATNTINVHRLSGEAMGVVLRGDRDKPRAIVVNAERGYLYFTNMQDRAAKIERAALDGTEREVLFTTGLIRPVALVVDNTLGKLFWVDADLKRIESCDLSGANRLTLEDANIVQPLGLTILGKHLYWIDRQQQMIERVEKTTGDKRTRIQGRVAHLTGIHAVEEVSLEEFSAHPCARDNGGCSHICIAKGDGTPRCSCPVHLVLLQNLLTCGEPPTCSPDQFACATGEIDCIPGAWRCDGFPECDDQSDEEGCPVCSAAQFPCARGQCVDLRLRCDGEADCQDRSDEADCDAICLPNQFRCASGQCVLIKQQCDSFPDCIDGSDELMCEITKPPSDDSPAHSSAIGPVIGIILSLFVMGGVYFVCQRVVCQRYAGANGPFPHEYVSGTPHVPLNFIAPGGSQHGPFTGIACGKSMMSSVSLMGGRGGVPLYDRNHVTGASSSSSSSTKATLYPPILNPPPSPATDPSLYNMDMFYSSNIPATARPYRPYIIRGMAPPTTPCSTDVCDSDYSASRWKASKYYLDLNSDSDPYPPPPTPHSQYLSAEDSCPPSPATERSYFHLFPPPPSPCTDSS

SEQ ID NO: 3770 - protein, 71 aa, Homo sapiens
ILGVLSLLLLVTGAFGFHLWRRQWRPRRFSALEQGIHPPQAQSKIEELEQEPEPEPEPEPEPEPEPEPEQL

SEQ ID NO: 3771 - protein, 1035 aa, Homo sapiens
LRWGPRRRPPLLPLLLLLLPPPPRVGGFNLDAEAPAVLSGPPGSFFGFSVEFYRPGTDGVSVLVGAPKANTSQPGVLQGGAVYLCPWGASPTQCTPIEFDSKGSRLLESSLSSSEGEEPVEYKSLQWFGATVRAHGSSILACAPLYSWRTEKEPLSDPVGTCYLSTDNFTRILEYAPCRSDFSWAAGQGYCQGGFSAEFTKTGRVVLGGPGSYFWQGQILSATQEQIAESYYPEYLINLVQGQLQTRQASSIYDDSYLGYSVAVGEFSGDDTEDFVAGVPKGNLTYGYVTILNGSDIRSLYNFSGEQMASYFGYAVAATDVNGDGLDDLLVGAPLLMDRTPDGRPQEVGRVYVYLQHPAGIEPTPTLTLTGHDEFGRFGSSLTPLGDLDQDGYNDVAIGAPFGGETQQGVVFVFPGGPGGLGSKPSQVLQPLWAASHTPDFFGSALRGGRDLDGNGYPDLIVGSFGVDKAVVYRGRPIVSASASLTIFPAMFNPEERSCSLEGNPVACINLSFCLNASGKHVADSIGFTVELQLDWQKQKGGVRRALFLASRQATLTQTLLIQNGAREDCREMKIYLRNESEFRDKLSPIHIALNFSLDPQAPVDSHGLRPALHYQSKSRIEDKAQILLDCGEDNICVPDLQLEVFGEQNHVYLGDKNALNLTFHAQNVGEGGAYEAELRVTAPPEAEYSGLVRHPGNFSSLSCDYFAVNQSRLLVCDLGNPMKAGASLWGGLRFTVPHLRDTKKTIQFDFQILSKNLNNSQSDVVSFRLSVEAQAQVTLNGVSKPEAVLFPVSDWHPRDQPQKEEDLGPAVHHVYELINQGPSSISQGVLELSCPQALEGQQLLYVTRVTGLNCTTNHPINPKGLELDPEGSLHHQQKREAPSRSSASSGPQILKCPEAECFRLRCELGPLHQQESQSLQLHFRVWAKTFLQREHQPFSLQCEAVYKALKMPYRILPRQLPQKERQVATAVQWTKAEGSYGVPLWIIILAILFGLLLLGLLIYILYKLGFFKRSLPYGTAMEKAQLKPPATSDA

SEQ ID NO: 3772 - protein, 587 aa, Homo sapiens
VMSRESDVEAQQSHGSSACSQPHGSVTQSQGSSSQSQGISSSSTSTMPNSSQSSHSSSGTLSSLETVSTQELYSIPEDQEPEDQEPEEPTPAPWARLWALQDGFANLETESGHVTQSDLELLLSSDPPASASQSAGIRGVRHHPRPVCSLKCVNDNYWFGRDKSCEYCFDEPLLKRTDKYRTYSKKHFRIFREVGPKNSYIAYIEDHSGNGTFVNTELVGKGKRRPLNNNSEIALSLSRNKVFVFFDLTVDDQSVYPKALRDEYIMSKTLGSGACGEVKLAFERKTCKKVAIKIISKRKFAIGSAREADPALNVETEIEILKKLNHPCIIKIKNFFDAEDYYIVLELMEGGELFDKVVGNKRLKEATCKLYFYQMLLAVQYLHENGIIHRDLKPENVLLSSQEEDCLIKITDFGHSKILGETSLMRTLCGTPTYLAPEVLVSVGTAGYNRAVDCWSLGVILFICLSGYPPFSEHRTQVSLKDQITSGKYNFIPEVWAEVSEKALDLVKKLLVVDPKARFTTEEALRHPWLQDEDMKRKFQDLLSEENESTALPQVLAQPSTSRKRPREGEAEGAETTKRPAVCAAVL

SEQ ID NO: 3773 - protein, 26 aa, Homo sapiens
MIDLMFLLFITMLNAIVLYLELSITH

SEQ ID NO: 3774 - protein, 292 aa, Homo sapiens
MAGQGLPLHVATLLTGLLECLGFAGVLFGWPSLVFVFKNEDYFKDLCGPDAGPIGNATGQADCKAQDERFSLIFTLGSFMNNFMTFPTGYIFDRFKTTVARLIAIFFYTTATLIIAFTSAGSAVLLFLAMPMLTIGGILFLITNLQIGNLFGQHRSTIITLYNGAFDSSSAVFLIIKLLYEKGISLRASFIFISVCSTWHVARTFLLMPRGHIPYPLPPNYSYGLCPGNGTTKEEKETAEHENRELQSKEFLSAKEDQEGITARSVIDQAVRDRSDFNREEHRGSSKVVGPA

SEQ ID NO: 3775 - protein, 1403 aa, Homo sapiens
MDAESGLWQSFSCEAQLPYVCRKPLNNTVELTDVWTYSDTRCDAGWLPNNGFCYLLVNESNSWDKAHAKCKAFSSDLISIHSLADVEVVVTKLHNEDIKEEVWIGLKNINIPTLFQWSDGTEVTLTYWDENEPNVPYNKTPNCVSYLGELGQWKVQSCEEKLKYVCKRKGEKLNDASSDKMCPPDEGWKRHGETCYKIYEDEVPFGTNCNLTITSRFEQEYLNDLMKKYDKSLRKYFWTGLRDVDSCGEYNWATVGGRRRAVTFSNWNFLEPASPGGCVAMSTGKSVGKWEVKDCRSFKALSICKKMSGPLGPEEASPKPDDPCPEGWQSFPASLSCYKVFHAERIVRKRNWEEAERFCQALGAHLSSFSHVDEIKEFLHFLTDQFSGQHWLWIGLNKRSPDLQGSWQWSDRTPVSTIIMPNEFQQDYDIRDCAAVKVFHRPWRRGWHFYDDREFIYLRPFACDTKLEWVCQIPKGRTPKTPDWYNPDRAGIHGPPLIIEGSEYWFVADLHLNYEEAVLYCASNHSFLATITSFVGLKAIKNKIANISGDGQKWWIRISEWPIDDHFTYSRYPWHRFPVTFGEECLYMSAKTWLIDLGKPTDCSTKLPFICEKYNVSSLEKYSPDSAAKVQCSEQWIPFQNKCFLKIKPVSLTFSQASDTCHSYGGTLPSVLSQIEQDFITSLLPDMEATLWIGLRWTAYEKINKWTDNRELTYSNFHPLLVSGRLRIPENFFEEESRYHCALILNLQKSPFTGTWNFTSCSERHFVSLCQKYSEVKSRQTLQNASETVKYLNNLYKIIPKTLTWHSAKRECLKSNMQLVSITDPYQQAFLSVQALLHNSSLWIGLFSQDDELNFGWSDGKRLHFSRWAETNGQLEDCVVLDTDGFWKTVDCNDNQPGAICYYSGNETEKEVKPVDSVKCPSPVLNTPWIPFQNCCYNFIITKNRHMATTQDEVHTKCQKLNPKSHILSIRDEKENNFVLEQLLYFNYMASWVMLGITYRNKSLMWFDKTPLSYTHWRAGRPTIKNEKFLAGLSTDGFWDIQTFKVIEEAVYFHQHSILACKIEMVDYKEEYNTTLPQFMPYEDGIYSVIQKKVTWYEALNMCSQSGGHLASVHNQNGQLFLEDIVKRDGFPLWVGLSSHDGSESSFEWSDGSTFDYIPWKGQTSPGNCVLLDPKGTWKHEKCNSVKDGAICYKPTKSKKLSRLTYSSRCPAAKENGSRWIQYKGHCYKSDQALHSFSEAKKLCSKHDHSATIVSIKDEDENKFVSRLMRENNNITMRVWLGLSQHSVDQSWSWLDGSEVTFVKWENKSKSGVGRCSMLIASNETWKKVECEHGFGRVVCKVPLGPDYTAIAIIVATLSILVLMGGLIWFLFQRHRLHLAGFSSVRYAQGVNEDEIMLPSFHD

SEQ ID NO: 3776 - protein, 124 aa, Homo sapiens
KKSGVLFLLGIILLVLIGVQGTPVVRKGRCSCISTNQGTIHLQSLKDLKQFAPSPSCEKIEIIATLKNGVQTCLNPDSADVKELIKKWEKQVSQKKKQKNGKKHQKKKVLKVRKSQRSRQKKTT

SEQ ID NO: 3777 - protein, 205 aa, Homo sapiens
KDYISLNEDLRSWTAADTVAQITQRFYEAEEYAEEFRTYLEGECLELLRRYLENGKETLQRADPPKAHVAHHPISDHEATLRCWALGFYPAEITLTWQRDGEEQTQDTELVETRPAGDGTFQKWAAVVVPPGEEQRYTCHVQHEGLPQPLILRWEQSPQPTIPIVGIVAGLVVLGAVVTGAVVAAVMWRKKSSDRNRGSYSQAAV

SEQ ID NO: 3778 - protein, 35 aa, Homo sapiens
VFKTTLWRLISGTLGIICLSLMSTLGILLKNCKFF

SEQ ID NO: 3779 - protein, 48 aa, Homo sapiens
IGFTIILSGLPVYFFGVWWKNKPKWLLQGIFSTTVLCQKLMQVVPQET

SEQ ID NO: 3780 - protein, 426 aa, Homo sapiens
MDKASDPKEQEVLIDEQLHSPEGLAVDWVHKHIYWTDSGNKTISVATVDGGRRRTLFSRNLSEPRAIAVDPLRGFMYWSDWGDQAKIEKSGLNGVDRQTLVSDNIEWPNGITLDLLSQRLYWVDSKLHQLSSIDFSGGNRKTLISSTDFLSHPFGIAVFEDKVFWTDLENEAIFSANRLNGLEISILAENLNNPHDIVIFHELKQPRAPDACELSVQPNGGCEYLCLPAPQISSHSPKYTCACPDTMWLGPDMKRCYRAPQSTSTTTLASTMTRTVPATTRAPGTTVHRSTYQNHSTETPSLTAAVPSSVSVPRAPSISPSTLSPATSNHSQHYANEDSKMGSTVTAAVIGIIVPIVVIALLCMSGYLIWRNWKRKNTKSMNFDNPVYRKTTEEEDEDELHIGRTAQIGHVYPARVALSLEDDGLP

SEQ ID NO: 3781 - protein, 673 aa, Homo sapiens
MVVILGASNILWIMFAASQAFKIETTPESRYLAQIGDSVSLTCSTTGSFPKDPEIHLSGPLEAGKPITVKCSVADVYPFDRLEIDLLKGDHLMKSQEFLEDADRKSLETKSLEVTFTPVIEDIGKVLVCRAKLHIDEMDSVPTVRQAVKELQVYISPKNTVISVNPSTKLQEGGSVTMTCSSEGLPAPEIFWSKKLDNGNLQHLSGNATLTLIAMRMEDSGIYVCEGVNLIGKNRKEVELIVQEKPFTVEISPGPRIAAQIGDSVMLTCSVMGCESPSFSWRTQIDSPLSGKVRSEGTNSTLTLSPVSFENEHSYLCTVTCGHKKLEKGIQVELYSFPRDPEIEMSGGLVNGSSVTVSCKVPSVYPLDRLEIELLKGETILENIEFLEDTDMKSLENKSLEMTFIPTIEDTGKALVCQAKLHIDDMEFEPKQRQSTQTLYVNVAPRDTTVLVSPSSILEEGSSVNMTCLSQGFPAPKILWSRQLPNGELQPLSENATLTLISTKMEDSGVYLCEGINQAGRSRKEVELIIQVTPKDIKLTAFPSESVKEGDTVIISCTCGNVPETWIILKKKAETGDTVLKSIDGAYTIRKAQLKDAGVYECESKNKVGSQLRSLTLDVQGRENNKDYFSPELLVLYFASSLIIPAIGMIIYFARKANMKGSYSLVEAQKSKV

SEQ ID NO: 3782 - protein, 195 aa, Homo sapiens
MYGKSSTRAVLLLLGIQLTALWPIAAVEIYTSRVLEAVNGTDARLKCTFSSFAPVGDALTVTWNFRPLDGGPEQFVFYYHIDPFQPMSGRFKDRVSWDGNPERYDASILLWKLQFDDNGTYTCQVKNPPDVDGVIGEIRLSVVHTVRFSEIHFLALAIGSACALMIIIVIVVVLFQHYRKKRWAERAHKVVEIKS

SEQ ID NO: 3783 - protein, 428 aa, Homo sapiens [sequence omitted]

SEQ ID NO: 3784 - protein, 817 aa, Homo sapiens
RERARPRGPSPPDPPPPRSRPLGDSSGCSGGSPGPGTRGPGAMRASLLLSVLRPAGPVAVGISLGFTLSLLSVTWVEEPCGPGPPQPGDSELPPRGNTNAARRPNSVQPGAEREKPGAGEGAGENWEPRVLPYHPAQPGQAAKKAVRTRYISTELGIRQRLLVAVLTSQTTLPTLGVAVNRTLGHRLERVVFLTGARGRRAPPGMAVVTLGEERPIGHLHLALRHLLEQHGDDFDWFFLVPDTTYTEAHGLARLTGHLSLASAAHLYLGRPQDFIGGEPTPGRYCHGGFGVLLSRMLLQQLRPHLEGCRNDIVSARPDEWLGRCILDATGVGCTGDHEGVHYSHLELSPGEPVQEGDPHFRSALTAHPVRDPVHMYQLHKAFARAELERTYQEIQELQWEIQNTSHLAVDGDQAAAWPVGIPAPSRPASRFEVLRWDYFTEQHAFSCADGSPRCPLRGADRADVADVLGTALEELNRRYHPALRLQKQQLVNGYRRFDPARGMEYTLDLQLEALTPQGGRRPLTRRVQLLRPLSRVEILPVPYVTEASRLTVLLPLAAAERDLAPGFLEAFATAALEPGDAAAALTLLLLYEPRQAQRVAHADVFAPVKAHVAELERRFPGARVPWLSVQTAAPSPLRLMDLLSKKHPLDTLFLLAGPDTVLTPDFLNRCRMHAISGWQAFFPMHFQAFHPAVAPPQGPGPPELGRDTGRFDRQAASEACFYNSDYVAARGRLAAASEQEEELLESLDVYELFLHFSSLHVLRAVEPALLQRYRAQTCSARLSEDLYHRCLQSVLEGLGSRTQLAMLLFEQEQGNST

SEQ ID NO: 3785 - protein, 358 aa, Homo sapiens
LAFGRYILEPFFIQCEIPELAIKLITAVGITVVMVLNSMSVSWSARIQIFLTFCKLTAILIIIVPGVMQLIKGQTQNFKDAFSGRDSSITRLPLAFYYGMYAYAGWFYLNFVTEEVENPEKTIPLAICISMAIVTIGYVLTNVAYFTTINAEELLLSNAVAVTFSERLLGNFSLAVPIFVALSCFGSMNGGVFAVSRLFYVASREGHLPEILSMIHVRKHTPLPAVIVLHPLTMIMLFSGDLDSLLNFLSFARWLFIGLAVAGLIYLRYKCPDMHRPFKVPLFIPALFSFTCLFMVALSLYSDPFSTGIGFVITLTGVPAYYLFIIWDKKPRWFRIMSEKITRTLQIILEVVPEEDKL

SEQ ID NO: 3786 - protein, 242 aa, Homo sapiens
IHQVRAVLTTTAFPFVSVMSWKKALRIPGDLRVATVTLMLAMLSSLLAEGRDSPEDFVFQFKGMCYFTNGTERVRLVTRYIYNREEYARFDSDVGVYRAVTPQGRPDAEYWNSQKEVLEGTRAELDTVCRHNYEVAFRGILQRRVEPTVTISPSRTEALNHHNLLVCSVTDFYPGQIKVRWFRNDQEETAGVVSTPLIRNGDWTFQILVMLEMTPQRGDVYTCHVEHPSLQSPITVEWRLLH

SEQ ID NO: 3787 - protein, 178 aa, Homo sapiens
IHRKSFLHKVSHQRNMTVKTLHGPAMVKYLLLSILGLAFLSEAAARKIPKVGHTFFQKPESCPPVPGGSMKLDIGIINENQRVSMSRNIESRSTSPWNYTVTWDPNRYPSEVVQAQCRNLGCINAQGKEDISMNSVPIQQETLVVRRKHQGCSVSFQLEKVLVTVGCTCVTPVIHHVQ

SEQ ID NO: 3788 - protein, 2408 aa, Homo sapiens
IFIPLVLFFILLGLRQKKPTISVKEVAFYTAAPLTSAGILPVMQSLCPDGQRDEFGFLQYANSTVTQLLERLDRVVEEGNLFDPARPSLGSELEALRQHLEALSAGPGTSGSHLDRSTVSSFSLDSVARNPQELWRFLTQNLSLPNSTAQALLAARVDPPEVYHLLFGPSSALDSQSGLHKGQEPWSRLGGNPLFRMEELLLAPALLEQLTCTPGSGELGRILTVPESQKGALQGYRDAVCSGQAAARARRFSGLSAELRNQLDVAKVSQQLGLDAPNGSDSSPQAPPPRRLQALLGDLLDAQKVLQDVDVLSALALLLPQGACTGRTPGPPASGAGGAANGTGAGAVMGPNATAEEGAPSAAALATPDTLQGQCSAFVQLWAGLQPILCGNNRTIEPEALRRGNMSSLGFTSKEQRNLGLLVHLMTSNPKILYAPAGSEVDRVILKANETFAFVGNVTHYAQVWLNISAEIRSFLEQGRLQQHLRWLQQYVAELRLHPEALNLSLDELPPALRQDNFSLPSGMALLQQLDTIDNAACGWIQFMSKVSVDIFKGFPDEESIVNYTLNQAYQDNVTVFASVIFQTRKDGSLPPHVHYKIRQNSSFTEKTNEIRRAYWRPGPNTGGRFYFLYGFVWIQDMMERAIIDTFVGHDVVEPGSYVQMFPYPCYTRDDFLFVIEHMMPLCMVISWVYSVAMTIQHIVAEKEHRLKEVMKTMGLNNAVHWVAWFITGFVQLSISVTALTAILKYGQVLMHSHVVIIWLFLAVYAVATIMFCFLVSVLYSKAKLASACGGIIYFLSYVPYMYVAIREEVAHDKITAFEKCIASLMSTTAFGLGSKYFALYEVAGVGIQWHTFSQSPVEGDDFNLLLAVTMLMVDAVVYGILTWYIEAVHPGMYGLPRPWYFPLQKSYWLGSGRTEAWEWSWPWARTPRLSVMEEDQACAMESRRFEETRGMEEEPTHLPLVVCVDKLTKVYKDDKKLALNKLSLNLYENQVVSFLGHNGAGKTTTMSILTGLFPPTSGSATIYGHDIRTEMDEIRKNLGMCPQHNVLFDRLTVEEHLWFYSRLKSMAQEEIRREMDKMIEDLELSNKRHSLVQTLSGGMKRKLSVAIAFVGGSRAIILDEPTAGVDPYARRAIWDLILKYKPGRTILLSTHHMDEADLLGDRIAIISHGKLKCCGSPLFLKGTYGDGYRLTLVKRPAEPGGPQEPGLASSPPGRAPLSSCSELQVSQFIRKHVASCLLVSDTSTELSYILPSEAAKKGAFERLFQHLERSLDALHLSSFGLMDTTLEEVFLKVSEEDQSLENSEADVKESRKDVLPGAEGPASGEGHAGNLARCSELTQSQASLQSASSVGSARGDEGAGYTDVYGDYRPLFDNPQDPDNVSLQEVEAEALSRVGQGSRKLDGGWLKVRQFHGLLVKRFHCARRNSKALFSQILLPAFFVCVAMTVALSVPEIGDLPPLVLSPSQYHNYTQPRGNFIPYANEERREYRLRLSPDASPQQLVSTFRLPSGVGATCVLKSPANGSLGPTLNLSSGESRLLAARFFDSMCLESFTQGLPLSNFVPPPPSPAPSDSPASPDEDLQAWNVSLPPTAGPEMWTSAPSLPRLVREPVRCTCSAQGTGFSCPSSVGGHPPQMRVVTGDILTDITGHNVSEYLLFTSDRFRLHRYGAITFGNVLKSIPASFGTRAPPMVRKIAVRRAAQVFYNNKGYHSMPTYLNSLNNAILRANLPKSKGNPAAYGITVTNHPMNKTSASLSLDYLLQGTDVVIAIFIIVAMSFVPASFVVFLVAEKSTKAKHLQFVSGCNPIIYWLANYVWDMLNYLVPATCCVIILFVFDLPAYTSPTNFPAVLSLFLLYGWSITPIMYPASFWFEVPSSAYVFLIVINLFIGITATVATFLLQLFEHDKDLKVVNSYLKSCFLIFPNYNLGHGLMEMAYNEYINEYYAKIGQFDKMKSPFEWDIVTRGLVAMAVEGVVGFLLTIMCQYNFLRRPQRMPVSTKPVEDDVDVASERQRVLRGDADNDMVKIENLTKVYKSRKIGRILAVDRLCLGVRPGECFGLLGVNGAGKTSTFKMLTGDESTTGGEAFVNGHSVLKELLQVQQSLGYCPQCDALFDELTAREHLQLYTRLRGISWKDEARVVKWALEKLELTKYADKPAGTYSGGNKRKLSTAIALIGYPAFIFLDEPTTGMDPKARRFLWNLILDLIKTGRSVVLTSHSMEECEALCTRLAIMVNGRLRCLGSIQHLKNRFGDGYMITVRTKSSQSVKDVVRFFNRNFPEAMLKERHHTKVQYQLKSEHISLAQVFSKMEQVSGVLGIEDYSVSQTTLDNVFVNFAKKQSDNLEQQETEPPSALQSPLGCLLSLLRPRSAPTELRALVADEPEDLDTEDEGLISFEEERAQLSFNTDTLC

SEQ ID NO: 3789 - protein, 697 aa, Homo sapiens
RSPALASAPAPGPQPSSQPRPPAAAMSKEERPGREEILECQVMWEPDSKKNTQMDRFRAAVGAACGLALESYDDLYHWSVESYSDFWAEFWKFSGIVFSRVYDEVVDTSKGIADVPEWFKGSRLNYAENLLRHKENDRVALYIAREGKEEIVKVTFEELRQEVALFAAAMRKMGVKKGDRVVGYLPNSEHAVEAMLAAASIGAIWSSTSPDFGVNGVLDRFSQIQPKLIFSVEAVVYNGKEHNHMEKLQQVVKGLPDLKKVVVIPYVSSRENIDLSKIPNSVFLDDFLATGTSEQAPQLEFEQLPFSHPLFIMFSSGTTGAPKCMVHSAGGTLIQHLKEHLLHGNMTSSDILLCYTTVGWMMWNWMVSLLATGAAMVLYDGSPLVPTPNVLWDLVDRIGITVLVTGAKWLSVLEEKAMKPVETHSLQMLHTILSTGSPLKAQSYEYVYRCIKSSILLGSISGGTDIISCFMGHNFSLPVYKGEIQARNLGMAVEAWNEEGKAVWGESGELVCTKPIPCQPTHFWNDENGNKYRKAYFSKFPGIWAHGDYCRINPKTGGIVMLGRSDGTLNPNGVRFGSSEIYNIVESFEEVEDSLCVPQYNKYREERVILFLKMASGHAFQPDLVKRIRDAIRMGLSARHVPSLILETKGIPYTLNGKKVEVAVKQIIAGKAVEQGGAFSNPETLDLYRDIPELQGF

SEQ ID NO: 3790 - protein, 518 aa, Homo sapiens
LQKEQSTLPTGLLVAELQVLTQIRLFEKQRARKTQAQRPCHFCGLRSLLAQAPASLGKATMNRGVPFRHLLLVLQLALLPAATQGKKVVLGKKGDTVELTCTASQKKSIQFHWKNSNQIKILGNQGSFLTKGPSKLNDRADSRRSLWDQGNFPLIIKNLKIEDSDTYICEVEDQKEEVQLLVFGLTANSDTHLLQGQSLTLTLESPPGSSPSVQCRSPRGKNIQGGKTLSVSQLELQDSGTWTCTVLQNQKKVEFKIDIVVLAFQKASSIVYKKEGEQVEFSFPLAFTVEKLTGSGELWWQAERASSSKSWITFDLKNKEVSVKRVTQDPKLQMGKKLPLHLTLPQALPQYAGSGNLTLALEAKTGKLHQEVNLVVMRATQLQKNLTCEVWGPTSPKLMLSLKLENKEAKVSKREKAVWVLNPEAGMWQCLLSDSGQVLLESNIKVLPTWSTPVQPMALIVLGGVAGLLLFIGLGIFFCVRCRHRRRQAERMSQIKRLLSEKKTCQCPHRFQKTCSPI

SEQ ID NO: 3791 - protein, 63 aa, Homo sapiens
KKRGWYPGSSRCNFREVLVCLVRELRGPGIVFKVVLLPTCPVVPAPVLTATLPFFHPRVGSTK

SEQ ID NO: 3792 - protein, 538 aa, Homo sapiens
VIPGSKSPPFPAQLSTSATSKIPTLIMLFPISMSATEFLLASVIFCLVFWVIRASRPQVPKGLKNPPGPWGWPLIGHMLTLGKNPHLALSRMSQQYGDVLQIRIGSTPVVVLSGLDTIRQALVRQGDDFKGRPDLYTFTLISNGQSMSFSPDSGPVWAARRRLAQNGLKSFSIASDPASSTSCYLEEHVSKEAEVLISTLQELMAGPGHFNPYRYVVVSVTNVICAICFGRRYDHNHQELLSLVNLNNNFGEVVGSGNPADFIPILRYLPNPSLNAFKDLNEKFYSFMQKMVKEHYKTFEKGHIRDITDSLIEHCQEKQLDENANVQLSDEKIINIVLDLFGAGFDTVTTAISWSLMYLVMNPRVQRKIQEELDTVIGRSRRPRLSDRSHLPYMEAFILETFRHSSFVPFTIPHSTTRDTSLKGFYIPKGRCVFVNQWQINHDQKLWVNPSEFLPERFLTPDGAIDKVLSEKVIIFGMGKRKCIGETIARWEVFLFLAILLQRVEFSVPLGVKVDMTPIYGLTMKHACCEHFQMQLRS

SEQ ID NO: 3793 - protein, 560 aa, Homo sapiens
LRLRLLALLLLLLAPPARAPKPSAQDVSLGVDWLTRYGYLPPPHPAQAQLQSPEKLRDAIKVMQRFAGLPETGRMDPGTVATMRKPRCSLPDVLGVAGLVRRRRRYALSGSVWKKRTLTWRVRSFPQSSQLSQETVRVLMSYALMAWGMESGLTFHEVDSPQGQEPDILIDFARAFHQDSYPFDGLGGTLAHAFFPGEHPISGDTHFDDEETWTFGSKDGEGTDLFAVAVHEFGHALGLGHSSAPNSIMRPFYQGPVGDPDKYRLSQDDRDGLQQLYGKAPQTPYDKPTRKPLAPPPQPPASPTHSPSFPIPDRCEGNFDAIANIRGETFFFKGPWFWRLQPSGQLVSPRPARLHRFWEGLPAQVRVVQAAYARHRDGRILLFSGPQFWVFQDRQLEGGARPLTELGLPPGEEVDAVFSWPQNGKTYLVRGRQYWRYDEAAARPDPGYPRDLSLWEGAPPSPDDVTVSNAGDTYFFKGAHYWRFPKNSIKTEPDAPQPMGPNWLDCPAPSSGPRAPRPPKATPVSETCDCQCELNQAAGRWPAPIPLLLLPLLVGGVASR

SEQ ID NO: 3794 - protein, 126 aa, Homo sapiens
LTSQLHITPGTAYQSFEQVVNELFRDGVNWGRIVAFFSFGGALCVESVDKEMQVLVSRIAAWMATYLNDHLEPWIQENGGWDTFVELYGNNAAAESRKGQERFNRWFLTGMTVAGVVLLGSLFSRK

SEQ ID NO: 3795 - protein, 975 aa, Homo sapiens
LFNQFKYFFNLYFLLLACSQFVPEMRLGALYTYWVPLGFVLAVTVIREAVEEIRCYVRDKEVNSQVYSRLTARGTVKVKSSNIQVGDLIIVEKNQRVPADMIFLRTSEKNGSCFLRTDQLDGETDWKLRLPVACTQRLPTAADLLQIRSYVYAEEPNIDIHNFVGTFTREDSDPPISESLSIENTLWAGTVVASGTVVGVVLYTGRELRSVMNTSNPRSKIGLFDLEVNCLTKILFGALVVVSLVMVALQHFAGRWYLQIIRFLLLFSNIIPISLRVNLDMGKIVYSWVIRRDSKIPGTVVRSSTIPEQLGRISYLLTDKTGTLTQNEMIFKRLHLGTVAYGLDSMDEVQSHIFSIYTQQSQDPPAQKGPTLTTKVRRTMSSRVHEAVKAIALCHNVTPVYESNGVTDQAEAEKQYEDSCRVYQASSPDEVALVQWTESVGLTLVGRDQSSMQLRTPGDQILNFTILQIFPFTYESKRMGIIVRDESTGEITFYMKGADVVMAGIVQYNDWLEEECGNMAREGLRVLVVAKKSLAEEQYQDFEARYVQAKLSVHDRSLKVATVIESLEMEMELLCLTGVEDQLQADVRPTLETLRNAGIKVWMLTGDKLETATCTAKNAHLVTRNQDIHVFRLVTNRGEAHLELNAFRRKHDCALVISGDSLEVCLKYYEYEFMELACQCPAVVCCRCAPTQKAQIVRLLQERTGKLTCAVGDGGNDVSMIQESDCGVGVEGKEGKQASLAADFSITQFKHLGRLLMVHGRNSYKRSAALSQFVIHRSLCISTMQAVFSSVFYFASVPLYQGFLIIGYSTIYTMFPVFSLVLDKDVKSEVAMLYPELYKDLLKGRPLSYKTFLIWVLISIYQGSTIMYGALLLFESEFVHIVAISFTSLILTELLMVALTIQTWHWLMTVAELLSLACYIASLVFLHEFIDVYFIATLSFLWKVSVITLVSCLPLYVLKYLRRRFSPPSYSKLTS

SEQ ID NO: 3796 - protein, 43 aa, Homo sapiens
RSTAEDSSTPRDMLGLRPPLLALVGLLSLGCGEFCVPRRGLHA

SEQ ID NO: 3797 - protein, 252 aa, Homo sapiens
LVPLGLRISLVTCPLQCGIMWQLLLPTALLLLVSAGMRTEDLPKAVVFLEPQWYSVLEKDSVTLKCQGAYSPEDNSTQWFHNENLISSQASSYFIDAATVNDSGEYRCQTNLSTLSDPVQLEVHIGWLLLQAPRWVFKEEDPIHLRCHSWKNTALHKVTYLQNGKDRKYFHHNSDFHIPKATLKDSGSYFCRGLVGSKNVSSETVNITITQGLAVSTISSFSPPGYQVSFCLVMVLLFAVDTGLYFSVKTNI

SEQ ID NO: 3798 - protein, 41 aa, Homo sapiens
LLPIISSALKNLSCPQFIMSRRFIFSLCFFLFQFILNAYFS

SEQ ID NO: 3799 - protein, 99 aa, Homo sapiens
TRVPARRAISSHLRSPPPPPPCPPGLPQLGAPAVASRRLRALSSRFAARAAAAAADCCGARTRTPGIRCRRRRPARRPASVRWFPPCVLWVALSWVFPA

SEQ ID NO: 3800 - protein, 113 aa, Homo sapiens
MDQARSAFSNLFGGEPLSYTRFSLARQVDGDNSHVEMKLAVDEEENADNNTKANVTKPKRCSGSICYGTIAVIVFFLIGSKCYARKYPQDTGGAAAQSHVSRGSFGKNYLCFE

SEQ ID NO: 3801 - protein, 465 aa, Homo sapiens
LRSACREDRLPDPQKSGERVKRSSPRRGSLPEQRRAEPGTMGPRRLLLVAACFSLCGPLLSARTRARRPESKATNATLDPRSFLLRNPNDKYEPFWEDEEKNESGLTEYRLVSINKSSPLQKQLPAFISEDASGYLTSSWLTLFVPSVYTGVFVVSLPLNIMAIVVFILKMKVKKPAVVYMLHLATADVLFVSVLPFKISYYFSGSDWQFGSELCRFVTAAFYCNMYASILLMTVISIDRFLAVVYPMQSLSWRTLGRASFTCLAIWALAIAGVVPLLLKEQTIQVPGLNITTCHDVLNETLLEGYYAYYFSAFSAVFFFVPLIISTVCYVSIIRCLSSSAVANRSKKSRALFLSAAVFCIFIICFGPTNVLLIAHYSFLSHTSTTEAAYFAYLLCVCVSSISCCIDPLIYYYASSECQRYVYSILCCKESSDPSSYNSSGQLMASKMDTCSSNLNNSIYKKLLT

SEQ ID NO: 3802 - protein, 25 aa, Homo sapiens
ILRVGFAAFSVLWACCSRICGAKQP

SEQ ID NO: 3803 - protein, 346 aa, Homo sapiens
LAFLLLNFRVCLLLLQLLMPHSAQFSVLGPSGPILAMVGEDADLPCHLFPTMSAETMELKWVSSSLRQVVNVYADGKEVEDRQSAPYRGRTSILRDGITAGKAALRIHNVTASDSGKYLCYFQDGDFYEKALVELKVAALGSDLHVDVKGYKDGGIHLECRSTGWYPQPQIQWSNNKGENIPTVEAPVVADGVGLYAVAASVIMRGSSGEGVSCTIRSSLLGLEKTASISIADPFFRSAQRWIAALAGTLPVLLLLLGGAGYFLWQQQEEKKTQFRKKKREQELREMAWSTMKQEQSTRVKLLEELRWRSIQYASRGERHSAYNEWKKALFKPGEEMLQMRLHFVK

SEQ ID NO: 3804 - protein, 39 aa, Homo sapiens
IAKDEFKKLHTNSLYYILYFVNTVYHVLCVYCSYLRGIL

SEQ ID NO: 3805 - protein, 38 aa, Homo sapiens
LGLWWTFDRSRSGLGLGITIAFLATLITQFLVYNGVYQ

SEQ ID NO: 3806 - protein, 123 aa, Homo sapiens
MVDFAMDVYKNLYSDDIPHALREKRTTVVAQLKQLQAETEPIVKMFEDPETTRQMQSTRDGRMLFDYLADKHGFRQEYLDTLYRYAKFQYECGNYSGAAEYLYFFRVLVSISTCFFFFFFCLL

SEQ ID NO: 3807 - protein, 28 aa, Homo sapiens
IIILILMMVMMMMIMTLMIFNRIKIEFF

SEQ ID NO: 3808 - protein, 1170 aa, Homo sapiens
VPATPGSPPSRFWLLPAMALRVLLLTALTLCHGFNLDTENAMTFQENARGFGQSVVQLQGSRVVVGAPQEIVAANQRGSLYQCDYSTGSCEPIRLQVPVEAVNMSLGLSLAATTSPPQLLACGPTVHQTCSENTYVKGLCFLFGSNLRQQPQKFPEALRGCPQEDSDIAFLIDGSGSIIPHDFRRMKEFVSTVMEQLKKSKTLFSLMQYSEEFRIHFTFKEFQNNPNPRSLVKPITQLLGRTHTATGIRKVVRELFNITNGARKNAFKILVVITDGEKFGDPLGYEDVIPEADREGVIRYVIGVGDAFRSEKSRQELNTIASKPPRDHVFQVNNFEALKTIQNQLREKIFAIEGTQTGSSSSFEHEMSQEGFSAAITSNGPLLSTVGSYDWAGGVFLYTSKEKSTFINMTRVDSDMNDAYLGYAAAIILRNRVQSLVLGAPRYQHIGLVAMFRQNTGMWESNANVKGTQIGAYFGASLCSVDVDSNGSTDLVLIGAPHYYEQTRGGQVSVCPLPRGQRARWQCDAVLYGEQGQPWGRFGAALTVLGDVNGDKLTDVAIGAPGEEDNRGAVYLFHGTSGSGISPSHSQRIAGSKLSPRLQYFGQSLSGGQDLTMDGLVDLTVGAQGHVLLLRSQPVLRVKAIMEFNPREVARNVFECNDQVVKGKEAGEVRVCLHVQKSTRDRLREGQIQSVVTYDLALDSGRPHSRAVFNETKNSTRRQTQVLGLTQTCETLKLQLPNCIEDPVSPIVLRLNFSLVGTPLSAFGNLRPVLAEDAQRLFTALFPFEKNCGNDNICQDDLSITFSFMSLDCLVVGGPREFNVTVTVRNDGEDSYRTQVTFFFPLDLSYRKVSTLQNQRSQRSWRLACESASSTEVSGALKSTSCSINHPIFPENSEVTFNITFDVDSKASLGNKLLLKANVTSENNMPRTNKTEFQLELPVKYAVYMVVTSHGVSTKYLNFTASENTSRVMQHQYQVSNLGQRSLPISLVFLVPVRLNQTVIWDRPQVTFSENLSSTCHTKERLPSHSDFLAELRKAPVVNCSIAVCQRIQCDIPFFGIQEEFNATLKGNLSFDWYIKTSHNHLLIVSTAEILFNDSVFTLLPGQGAFVRSQTETKVEPFEVPNPLPLIVGSSVGGLLLLALITAALYKLGFFKRQYKDMMSEGGPPGAEPQ

SEQ ID NO: 3809 - protein, 32 aa, Homo sapiens
LVLEQFEDLLVRILLLAALVSFVSRALPAILW

SEQ ID NO: 3810 - protein, 66 aa, Homo sapiens
RDDVVLTCQVKHDGQLAVSKRLALEVTVHQKDQSSDATPGPASSLTALLLIAVLLGPIYVPWKQKT

SEQ ID NO: 3811 - protein, 539 aa, Homo sapiens
LSKQPSVSGAVPSPVESPSEPFPSPGIPMLVDGPSERPALCFLLLAVAMSFFGSALSIDETRAHLLLKEKMMRLGGRLVLNTKEELANERLMTLKIAEMKEAMRTLIFPPSMHFFQAKHLIERSQVFNILRMMPKGAALHLHDIGIVTMDWLVRNVTYRPHCHICFTPRGIMQFRFAHPTPRPSEKCSKWILLEDYRKRVQNVTEFDDSLLRNFTLVTQHPEVIYTNQNVVWSKFETIFFTISGLIHYAPVFRDYVFRSMQEFYEDNVLYMEIRARLLPVYELSGEHHDEEWSVKTYQEVAQKFVETHPEFIGIKIIYSDHRSKDVAVIAESIRMAMGLRIKFPTVVAGFDLVGHEDTGHSLHDYKEALMIPAKDGVKLPYFFHAGETDWQGTSIDRNILDALMLNTTRIGHGFALSKHPAVRTYSWKKDIPIEVCPISNQVLKLVSDLRNHPVATLMATGHPMVISSDDPAMFGAKGLSYDFYEVFMGIGGMKADLRTLKQLAMNSIKYSTLLESEKNTFMEIWKKRWDKFIADVATK

SEQ ID NO: 3812 - protein, 106 aa, Homo sapiens
LQHEGIFRVSGAQLRVSEIRDAFERGEDPLVEGCTAHDLDSVAGVLKLYFRSLEPPLFPPDLFGELLASSELEATAERVEHVSRLLWRLPAPVLVVLRYLFTFLNQ

SEQ ID NO: 3813 - protein, 277 aa, Homo sapiens
MPESVTVQEGLCIFVHCSVFYLEYGWKDSTPAYGHWFREGVSVDQETPVATNNSTQKVQKETQGRFHLLGDPSRNNCSLSIRDARRRDNGSYFFWVARGRTKFSYKYSPLSVYVTALTHRPDILIPEFLKSGHPSNLTCSVPWVCEQGTPPIFSWMSAAPTSLGPRTLHSSVLTIIPRPQDHGTNLICQVTFPGAGVTTERTIQLSVSYPLMNPVIEASLEDGTGKSGTVEEVVVLAVGVVAVKILLLCLCLIILSFHKKKAVRAVEVEENVYAVMG

SEQ ID NO: 3814 - protein, 346 aa, Homo sapiens
MSPVTTAHAGNYTCRGSHPHSPTGWSAPSNPVVIMVTGNHRKPSLLAHPGPLVKSGERVILQCWSDIMFEHFFLHKEGISKDPSRLVGQIHDGVSKANFSIGPMMLALAGTYRCYGSVTHTPYQLSAPSDPLDIVVTGPYEKPSLSAQPGPKVQAGESVTLSCSSRSSYDMYHLSREGGAHERRLPAVRKVNRTFQADFPLGPATHGGTYRCFGSFRHSPYEWSDPSDPLLVSVTGNPRHLHILIGTSVVIILFILLLFFLLHLWCSNKKNAAVMDQEPAGNRTANSEDSDEQDPEEVTYAQLDHCVFTQRKITRPSQRPKTPPTDTILYTELPNAKPRSKVVSCP

SEQ ID NO: 3815 - protein, 322 aa, Homo sapiens
MRRPSLLLKDILKCTLLVFGVWILYILKLNYTTEECDMKKMHYVDPDHVKKAPKDSEAESKYDPPFGFRKFSSKVQTLLELLPEHDLPEHLKAKTCRRCVVIGSGGILHGLELGHTLNQFDVVIRLNSAPVEGYSEHVGNKTTIRMTYPEGAPLSDLEYYSNDLFVAVLFKSVDFNWLQAMVKKETLPFWVRLFFWKQVAEKIPLQPKHFRILNPVIIKETAFDILQYSEPQSRFWGRDKNVPTIGVIAVVLATHLCDEVSLAGFGYDLNQPRTPLHYFDSQCMAAMNFQTMHNVTTETKFLLKLVKEGVVKDLSGGIDREF

SEQ ID NO: 3816 - protein, 78 aa, Homo sapiens
IETMPCVKKKADWALRWIGDKEATYGERVVAFAAVEGIFFSGSFASIFWLKKRGLMPGLTFSNELISRDEVSLSQIIG

SEQ ID NO: 3817 - protein, 31 aa, Homo sapiens
LIPFIIQNLGLLTGFTIMVVLTMYSGQIQIG

SEQ ID NO: 3818 - protein, 172 aa, Homo sapiens
MAEYDLTTRIAHFLDRHLVFPLLEFLSVKEIYNEKELLQGKLDLLSDTNMVDFAMDVYKNLYSDDIPHALREKRTTVVAQLKQLQAETEPIVKMFEDPETTRQMQSTRDGRMLFDYLADKHGFRQEYLDTLYRYAKFQYECGNYSGAAEYLYFFRVLVSISTCFFFFFFCLL

SEQ ID NO: 3819 - protein, 32 aa, Homo sapiens
MIAVSGICILLNVTELCYLLIRYCSGKSKKPV

SEQ ID NO: 3820 - protein, 60 aa, Homo sapiens [sequence omitted]

SEQ ID NO: 3821 - protein, 397 aa, Homo sapiens [sequence omitted]

SEQ ID NO: 3822 - protein, 748 aa, Homo sapiens
IFSSRQQLKMPGKMVVILGASNILWIMFAASQAFKIETTPESRYLAQIGDSVSLTCSTTGCESPFFSWRTQIDSPLNGKVTNEGTTSTLTMNPVSFGNEHSYLCTATCESRKLEKGIQVEIYSFPKDPEIHLSGPLEAGKPITVKCSVADVYPFDRLEIDLLKGDHLMKSQEFLEDADRKSLETKSLEVTFTPVIEDIGKVLVCRAKLHIDEMDSVPTVRQAVKELQVYISPKNTVISVNPSTKLQEGGSVTMTCSSEGLPAPEIFWSKKLDNGNLQHLSGNATLTLIAMRMEDSGIYVCEGVNLIGKNRKEVELIVQEKPFTVEISPGPRIAAQIGDSVMLTCSVMGCESPSFSWRTQIDSPLSGKVRSEGTNSTLTLSPVSFENEHSYLCTVTCGHKKLEKGIQVELYSFPRDPEIEMSGGLVNGSSVTVSCKVPSVYPLDRLEIELLKGETILENIEFLEDTDMKSLENKSLEMTFIPTIEDTGKALVCQAKLHIDDMEFEPKQRQSTQTLYVNVAPRDTTVLVSPSSILEEGSSVNMTCLSQGFPAPKILWSRQLPNGELQPLSENATLTLISTKMEDSGVYLCEGINQAGRSRKEVELIIQVTPKDIKLTAFPSESVKEGDTVIISCTCGNVPETWIILKKKAETGDTVLKSIDGAYTIRKAQLKDAGVYECESKNKVGSQLRSLTLDVQGRENNKDYFSPELLVLYFASSLIIPAIGMIIYFARKANMKGSYSLVEAQKSKV

SEQ ID NO: 3823 - protein, 357 aa, Homo sapiens
VFLSGLGKVFIRTDTMAEHDYHEDYGFSSFNDSSQEEHQDFLQFSKVFLPCMYLVVFVCGLVGNSLVLVISIFYHKLQSLTDVFLVNLPLADLVFVCTLPFWAYAGIHEWVFGQVMCKSLLGIYTINFYTSMLILTCITVDRFIVVVKATKAYNQQAKRMTWGKVTSLLIWVISLLVSLPQIIYGNVFNLDKLICGYHDEAISTVVLATQMTLGFFLPLLTMIVCYSVIIKTLLHAGGFQKHRSLKIIFLVMAVFLLTQMPFNLMKFIRSTHWEYYAMTSFHYTIMVTEAIAYLRACLNPVLYAFVSLKFRKNFWKLVKDIGCLPYLGVSHQWKSSEDNSKTFSASHNVEATSMFQL

SEQ ID NO: 3824 - protein, 35 aa, Homo sapiens
LSTLDCLLQQFLGSKIVSCTSICLCLLLPTLSKTQ

SEQ ID NO: 3825 - protein, 38 aa, Homo sapiens
KKKMKMRRKRMKMKNKWLSFNDACGMCVCAQAIILLRM

SEQ ID NO: 3826 - protein, 65 aa, Homo sapiens
IPAIWFRYDLSPITVKYTERRQPLYRFITTICAIIGGTFTVAGILDSCIFTASEAWKKIQLGKMH

SEQ ID NO: 3827 - protein, 279 aa, Homo sapiens
IHQVRAVLTTTAFPFVSVMSWKKALRIPGDLRVATVTLMLAMLSSLLAEGRDSPEDFVFQFKGMCYFTNGTERVRLVTRYIYNREEYARFDSDVGVYRAVTPQGRPDAEYWNSQKEVLEGTRAELDTVCRHNYEVAFRGILQRRVEPTVTISPSRTEALNHHNLLVCSVTDFYPGQIKVRWFRNDQEETAGVVSTPLIRNGDWTFQILVMLEMTPQRGDVYTCHVEHPSLQSPITVEWRAQSESAQSKMLSGVGGFVLGLIFLGLGLIIRQRSQKGLLH

SEQ ID NO: 3828 - protein, 232 aa, Homo sapiens
KCCGNRQAMNQADPRLRAVCLWTLTSAAMSRGDNCTDLLALGIPSITQAWGLWVLLGAVTLLFLISLAAHLSQWTRGRSRSHPGQGRWVKDNRDGLTESSLLPRSPHSSPKLCVASGESVEEVPLYGNLHYLQTGRLSQDPEPDQQDPTLGGPARAAEEVMCYTSLQLRPPQGRIPGPGTPVKYSEVVLDSEPKSQASGPEPELYASVCAQTRRARASFPDQAYANSQPAAS

SEQ ID NO: 3829 - protein, 67 aa, Homo sapiens
MISASVICMLLNVAELCYLLLKVCFRRSKRAQTQKNHPNHALKESKQNEMNELISDSGQNAITGFPS

SEQ ID NO: 3830 - protein, 77 aa, Homo sapiens
IILLFCAVVPGTLLLFRKRWQNEKLGLDAGDEYEDENLYEGLNLDDCSMYEDISRGLQGTYQDVGSLNIGDVQLEKP

SEQ ID NO: 3831 - protein, 236 aa, Homo sapiens
KGHCPLTPGNPGAPSSQERSSPASSIAWRTPEPVPQQAWPNFLPLVVLVLLLTLAVIAILLFILLWHLCWPKEKADPYPYPGLVCGVPNTHTPSSSHLSSPGALETGDTWKEASLLPLLSRELSSLASQPLSRLLDELEVLEELIVLLDPEPGPGGGMAHGTTRHLAARYGLPAAWSTFAYSLRPSRSPLRALIEMVVAREPSASLGQLGTHLAQLGRADALRVLSKLGSSGVCWA

SEQ ID NO: 3832 - protein, 54 aa, Homo sapiens
IMGLLYKVLGVLFFAIACFLYKPLSESSDGLETCLPSQSSAPDSATDSQLQSSV

SEQ ID NO: 3833 - protein, 216 aa, Homo sapiens [sequence omitted]

SEQ ID NO: 3834 - protein, 479 aa, Homo sapiens
LEGPMAAKSQPNIPKAKSLDGVTNDRTASQGQWGRAWEVDWFSLASVIFLLLFAPFIVYYFIMACDQYSCALTGPVVDIVTGHARLSDIWAKTPPITRKAAQLYTLWVTFQVLLYTSLPDFCHKFLPGYVGGIQEGAVTPAGVVNKYQINGLQAWLLTHLLWFANAHLLSWFSPTIIFDNWIPLLWCANILGYAVSTFAMVKGYFFPTSARDCKFTGNFFYNYMMGIEFNPRIGKWFDFKLFFNGRPGIVAWTLINLSFAAKQRELHSHVTNAMVLVNVLQAIYVIDFFWNETWYLKTIDICHDHFGWYLGWGDCVWLPYLYTLQGLYLVYHPVQLSTPHAVGVLLLGLVGYYIFRVANHQKDLFRRTDGRCLIWGRKPKVIECSYTSADGQRHHSKLLVSGFWGVARHFNYVGDLMGSLAYCLACGGGHLLPYFYIIYMAILLTHRCLRDEHRCASKYGRDWERYTAAVPYRLLPGIF

SEQ ID NO: 3835 - protein, 132 aa, Homo sapiens
VSGSPVGSSGRLMASSSSLVPDRLRLPLCFLGVFVCYFYYGILQEKITRGKYGEGAKQETFTFALTLVFIQCVINAVFAKIWWIVPGAGSMLPVLSPIWVPWSPAIQHYSLSTTQLRSLVNPASQSQSCSLG

SEQ ID NO: 3836 - protein, 76 aa, Homo sapiens
LPVSWAPPALWVLGCCALLLSLWALCTACRRPEDAVAPRKRARRQRARLQGSATAAEAQVGHQTARAAPGPAQQQG

SEQ ID NO: 3837 - protein, 257 aa, Homo sapiens
VNKLRLRGSAVIKFCLFCTVVSLLGILVFSLHCPSVPMAGVTASYGGSLLPEGHLNLTAPCNAACSCQPEHYSPVCGSDGLMYFSLCHAGCPAATETNVDGQKVYRDCSCIPQNLSSGFGHATAGKCTSTCQRKPLLLVFIFVVIFFTFLSSIPALTATLRCVRDPQRSFALGIQWIVVRILGGIPGPIAFGWVIDKACLLWQDQCGQQGSCLVYQNSAMSRYILIMGLLYKFQLPEVHHSLNVLNRKFQKQTVHNL

SEQ ID NO: 3838 - protein, 107 aa, Homo sapiens
MGSACIKVTKYFLFLFNLIFFILGAVILGFGVWILADKSSFISVLQTSSSSLRMGAYVFIGVGAVTMLMGFLGCIGAVNEVRCLLGLVSTDPSAAACPFPLIQPSAA

SEQ ID NO: 3839 - protein, 260 aa, Homo sapiens
VPDFIMGNSCYNIVATLLLVLNFERTRSLQDPCSNCPAGTFCDNNRNQICSPCPPNSFSSAGGQRTCDICRQCKGVFRTRKECSSTSNAECDCTPGFHCLGAGCSMCEQDCKQGQELTKKGCKDCCFGTFNDQKRGICRPWTNCSLDGKSVLVNGTKERDVVCGPSPADLSPGASSVTPPAPAREPGHSPQIISFFLALTSTALLFLLFFLTLRFSVVKRGRKKLLYIFKQPFMRPVQTTQEEDGCSCRFPEEEEGGCEL

SEQ ID NO: 3840 - protein, 39 aa, Homo sapiens
KRISATSIFFESMPYKLNVSALGCGEGLLALVVVLPWRS

SEQ ID NO: 3841 - protein, 675 aa, Homo sapiens
MAILGPTFTLDALVECLVIGVGTMSGVRQLEIMCCFGCMSVLANYFVFMTFFPACVSLVLELSRESREGRPIWQLSHFARVLEEEENKPNPVTQRVKMIMSLGLVLVHAHSRWIADPSPQNSTADTSKVSLGLDENVSKRIEPSVSLWQFYLSKMISMDIEQVITLSLALLLAVKYIFFEQTETESTLSLKNPITSPVVTQKKVPDNCCRREPMLVRNNQKCDSVEEETGINRERKVEVIKPLVAETDTPNRATFVVGNSSLLDTSSVLVTQEPEIELPREPRPNEECLQILGNAEKGAKFLSDAEIIQLVNAKHIPAYKLETLMETHERGVSIRRQLLSKKLSEPSSLQYLPYRDYNYSLLGGGASSRVLADGMTRGPVVRLPRACDSAEVKAWLETSEGFAVIKEAFDSTSRFARLQKLHTSIAGRNLYIRFQSRSGDAMGMNMISKGTEKALSKLHEYFPEMQILAVSGNYCTDKKPAAINWIEGRGKSVVCEAVIPAKVVREVLKTTTEAMIEVNINKNLVGSAMAGSIGGYNAHAANIVTAIYIACGQDAAQNVGSSNCITLMEASGPTNEDLYISCTMPSIEIGTVGGGTNLLPQQACLQMLGVQGACKDNPGENARQLARIVCGTVMAGELSLMAALAAGHLVKSHMIHNRSKINLQDLQGACTKKTA

SEQ ID NO: 3842 - protein, 210 aa, Homo sapiens
VCYLSMGMVVLLMGLVFASVYIYRYFFLAQLARDNFFRCGVLYEDSLSSQVRTQMELEEDVKIYLDENYERINVPVPQFGGGDPADIIHDFQRGLTAYHDISLDKCYVIELNTTIVLPPRNFWELLMNVKRGTYLPQTYIIQEEMVVTEHVSDKEALGSFIYHLCNGKDTYRLRRRATRRRINKRGAKNCNAIRHFENTFVVETLICGVV

SEQ ID NO: 3843 - protein, 223 aa, Homo sapiens
MGPDGRLLRGYHQHAYDGKDYISLNEDLRSWTAADTVAQITQRFYEAEEYAEEFRTYLEGECLELLRRYLENGKETLQRADPPKAHVAHHPISDHEATLRCWALGFYPAEITLTWQRDGEEQTQDTELVETRPAGDGTFQKWAAVVVPPGEEQRYTCHVQHEGLPQPLILRWEQSPQPTIPIVGIVAGLVVLGAVVTGAVVAAVMWRKKSSDRNRGSYSQAAV

SEQ ID NO: 3844 - protein, 35 aa, Homo sapiens
IFAGLAFIVGLLILLSRRFRCGGNKKRRQINEDEP

SEQ ID NO: 3845 - protein, 197 aa, Homo sapiens
IAAAMPEEGSGCSVRRRPYGCVLRAALVPLVAGLVICLVVCIQRFAQAQQQLPLESLGWDVAELQLNHTGPQQDPRLYWQGGPALGRSFLHGPELDKGQLRIHRDGIYMVHIQVTLAICSSTTASRHHPTTLAVGICSPASRSISLLRLSFHQGCTIASQRLTPLARGDTLCTNLTGTLLPSRNTDETFFGVQWVRP

SEQ ID NO: 3846 - protein, 214 aa, Homo sapiens
MVDPTGFREIVAANPLLLTGAYILLAMGGLLFLLGFLGCCGAVRENKCLLLFFFLFILIIFLAELSAAILAFIFRENLTREFFTKELTKHYQGNNDTDVFSATWNSVMITFGCCGVNGPEDFKFASVFRLLTLDSEEVPEACCRREPQSRDGVLLSREECLLGRSLFLNKQGCYTVILNTFETYVYLAGALAIGVLAIELFAMIFAMCLFRGIQ

SEQ ID NO: 3847 - protein, 320 aa, Homo sapiens
MGSCLLVTSGFSLYLGNVFPAEMDYLRCAAGSCIPSAIVSFTVSRRNANVIPNFQILFVSTFAVTTTCLIWFGCKLVLNPSAININFNLILLLLLELLMAATVIIAARSSEEDCKKKKGSMSDSANILDEVPFPARVLKSYSVVEVIAGISAVLGGIIALNVDDSVSGPHLSVTFFWILVACFPSAIASHVAAECPSKCLVEVLIAISSLTSPLLFTASGYLSFSIMRIVEMFKDYPPAIKPSYDVLLLLLLLVLLLQAGLNTGTAIQCVRFKVSARLQGASWDTQNGPQERLAGEVARSPLKEFDKEKAWRAVVVQMAQ

SEQ ID NO: 3848 - protein, 153 aa, Homo sapiens
ISVALFSPSWYSPPNLGFLHARVASCSTSLSLILVSTSSPGKFPFSRLALPTRASDFHPSFSLLASDYPPPIPPRPAAQLPPPFTRTGTIIPTPLRPVWDSTCLLPNPTLISAWSLPLWPNLSSRLIGDGHSHSLVPNTSSWMDSRHPCPLFN

SEQ ID NO: 3849 - protein, 586 aa, Homo sapiens
LRSLVLGDNCLSENYEETAAALHALPGLRRLDLSGNALTEDMAALMLQNLSSLRSVSLAGNTIMRLDDSVFEGLERLRELDLQRNYIFEIEGGAFDGLAELRHLNLAFNNLPCIVDFGLTRLRVLNVSYNVLEWFLATGGEAAFELETLDLSHNQLLFFPLLPQYSKLRTLLLRDNNMGFYRDLYNTSSPREMVAQFLLVDGNVTNITTVSLWEEFSSSDLADLRFLDMSQNQFQYLPDGFLRKMPSLSHLNLHQNCLMTLHIREHEPPGALTELDLSHNQLSELHLAPGLASCLGSLRLFNLSSNQLLGVPPGLFANARNITTLDMSHNQISLCPLPAASDRVGPPSCVDFRNMASLRSLSLEGCGLGALPDCPFQGTSLTYLDLSSNWGVLNGSLAPLQDVAPMLQVLSLRNMGLHSSFMALDFSGFGNLRDLDLSGNCLTTFPRFGGSLALETLDLRRNSLTALPQKAVSEQLSRGLRTIYLSQNPYDCCGVDGWGALQHGQTVADWAMVTCNLSSKIIRVTELPGGVPRDCKWERLDLGLLYLVLILPSCLTLLVACTVIVLTFKKPLLQVIKSRCHWSSVY

SEQ ID NO: 3850 - protein, 912 aa, Homo sapiens
RLSVGAGVRWPLVRSGGSKDSVATMLSRLFRMHGLFVASHPWEVIVGTVTLTICMMSMNMFTGNNKICGWNYECPKFEEDVLSSDIIILTITRCIAILYIYFQFQNLRQLGSKYILGIAGLFTIFSSFVFSTVVIHFLDKELTGLNEALPFFLLLIDLSRASTLAKFALSSNSQDEVRENIARGMAILGPTFTLDALVECLVIGVGTMSGVRQLEIMCCFGCMSVLANYFVFMTFFPACVSLVLELSRESREGRPIWQLSHFARVLEEEENKPNPVTQRVKMIMSLGLVLVHAHSRWIADPSPQNSTADTSKVSLGLDENVSKRIEPSVSLWQFYLSKMISMDIEQVITLSLALLLAVKYIFFEQTETESTLSLKNPITSPVVTQKKVPDNCCRREPMLVRNNQKCDSVEEETGINRERKVEVIKPLVAETDTPNRATFVVGNSSLLDTSSVLVTQEPEIELPREPRPNEECLQILGNAEKGAKFLSDAEIIQLVNAKHIPAYKLETLMETHERGVSIRRQLLSKKLSEPSSLQYLPYRDYNYSLVMGACCENVIGYMPIPVGVAGPLCLDEKEFQVPMATTEGCLVASTNRGCRAIGLGGGASSRVLADGMTRGPVVRLPRACDSAEVKAWLETSEGFAVIKEAFDSTSRFARLQKLHTSIAGRNLYIRFQSRSGDAMGMNMISKGTEKALSKLHEYFPEMQILAVSGNYCTDKKPAAINWIEGRGKSVVCEAVIPAKVVREVLKTTTEAMIEVNINKNLVGSAMAGSIGGYNAHAANIVTAIYIACGQDAAQNVGSSNCITLMEASGPTNEDLYISCTMPSIEIGTVGGGTNLLPQQACLQMLGVQGACKDNPGENARQLARIVCGTVMAGELSLMAALAAGHLVKSHMIHNRSKINLQDLQGACTKKTA

SEQ ID NO: 3851 - protein, 75 aa, Homo sapiens
LSSFLVSEGPFCFQGGACEKWHLERGRKRRKNRSSASDLRWLKERMYLVSAISLHPSMTLLSMSLIFLARKPSAV

SEQ ID NO: 3852 - protein, 248 aa, Homo sapiens
LGCPCFVLWTTAQQCPALCLGLGPSCTCCLDPRPAWAWALVLPMTPPERLFLPRVCGTTLHLLLLGLLLVLLPGAQGLPGVGLTPSAAQTARQHPKMHLAHSTLKPAAHLIGDPSKQNSLLWRANTDRAFLQDGFSLSNNSLLVPTSGIYFVYSQVVFSGKAYSPKATSSPLYLAHEVQLFSSQYPFHVPLLSSQKMVYPGLQEPWLHSMYHGAAFQLTQGDQLSTHTDGIPHLVLSPSTVFFGAFAL

SEQ ID NO: 3853 - protein, 233 aa, Homo sapiens
LDDAGTPKDFTYCISFNKDLLTCWDPEENKMAPCEFGVLNSLANVLSQHLNQKDTLMQRLRNGLQNCATHTQPFWGSLTNRTRPPSVQVAKTTPFNTREPVMLACYVWGFYPAEVTITWRKNGKLVMPHSSAHKTAQPNGDWTYQTLSHLALTPSYGDTYTCVVEHTGAPEPILRDWTPGLSPMQTLKVSVSAVTLGLGLIIFSLGVISWRRAGHSSYTPLPGSNYSEGWHIS

SEQ ID NO: 3854 - protein, 94 aa, Homo sapiens
KDEPQRETLKAIHYALNCCGLAGGVEQFISDICPKKDVLETFTVKSCPDAIKEVFDNKFHIIGAVGIGIAVVMIFGMIFSMILCCAIRRNREMV

SEQ ID NO: 3855 - protein, 91 aa, Homo sapiens
LFLVALLARVLVKRKPPRDPLFYVYAVFGFTSVVNLIIGLEQDGIIDGFMTHYLREGEPYLNTAYGHMICYWDGSAHYLMYLVMVAAIAWE

SEQ ID NO: 3856 - protein, 461 aa, Homo sapiens
LRFLDVTQGRLVAKPPRPARSTAEDSSTPRDMLGLRPPLLALVGLLSLGCVLSQECTKFKVSSCRECIESGPGCTWCQKLNFTGPGDPDSIRCDTRPQLLMRGCAADDIMDPTSLAETQEDHNGGQKQLSPQKVTLYLRPGQAAAFNVTFRRAKGYPIDLYYLMDLSYSMLDDLRNVKKLGGDLLRALNEITESGRIGFGSFVDKTVLPFVNTHPDKLRNPCPNKEKECQPPFAFRHVLKLTNNSNQFQTEVGKQLISGNLDAPEGGLDAMMQVAACPEEIGWRNVTRLLVFATDDGFHFAGDGKLGAILTPNDGRCHLEDNLYKRSNEFDYPSVGQLAHKLAENNIQPIFAVTSRMVKTYEKLTEIIPKSAVGELSEDSSNVVHLIKNAYNVSLPHHSAGTHGVASNLPTAGQLLLQVSRRVVWEESPCPVGQLQPPDLPSGLQDTLARHFHGELWVLSR

SEQ ID NO: 3857 - protein, 475 aa, Homo sapiens
RSRMELQDPKMNGALPSDAVGYRQEREGFLPSRGPAPGSKPVQFMDFEGKTSFGMSVFNLSNAIMGSGILGLAYAMAHTGVIFFLALLLCIALLSSYSIHLLLTCAGIAGIRAYEQLGQRAFGPAGKVVVATVICLHNVGAMSSYLFIIKSELPLVIGTFLYMDPEGDWFLKGNLLIIIVSVLIILPLALMKHLGYLGYTSGLSLTCMLFFLVSVIYKKFQLGCAIGHNETAMESEALVGLPSQGLNSSCEAQMFTVDSQMSYTVPIMAFAFVCHPEVLPIYTELCRPSKRRMQAVANVSIGAMFCMYGLTATFGYLTFYSSVKAEMLHMYSQKDPLILCVRLAVLLAVTLTVPVVLFPIRRALQQLLFPGKAFSWPRHVAIALILLVLVNVLVICVPTIRDIFGVIGSTSAPSLIFILPSIFYLRIVPSEVEPFLSWPKIQALCFGVLGVLFMAVSLGFMFANWATGQSRMSGH

SEQ ID NO: 3858 - protein, 111 aa, Homo sapiens
INLNGLQHEGIFRVSGAQLRVSEIRDAFERGEDPLVEGCTAHDLDSVAGVLKLYFRSLEPPLFPPDLFGELLASSELEATAERVEHVSRLLWRLPAPVLVVLRYLFTFLNQ

SEQ ID NO: 3859 - protein, 615 aa, Homo sapiens
MKIMEKIRNVFHCEAHRILYICESQFLRNFIRKEFLRGNGLAAGKMNISIDLDTNYAELVLNVGRVTLGENNRKKMKDCQLRKQQNENVSRAVCALLNSGGGVIKAEVENKGYSYKKDGIGLDLENSFSNMLPFVPNFLDFMQNGNYFHIFVKSWSLETSGPQIATLSSSLYKRDVTSAKVMNASAALEFLKDMEKTGGRAYLRPEFPAKRACVDVQEESNMEALAADFFNRTELGYKEKLTFTESTHVEIKNFSTEKLLQRITEILPQYVSAFANTDGGYLFVGLNEDKEVIGFKAEKSYLTKLEEVTKNSIGKLPVHHFCVEKGTINYLCKFLGVYDKGRLCGYVYALRVERFCCAVFAKKPDSWHVKDNRVKQLTEKEWIQFMVDSEPVCEELPSPASTSSPVSQSYPLREYINFKIQPLRYHLPGLSEKITCAPKTFCRNLFSQHEGLKQLICEEMGSVNKGSLIFSRSWSLDLGLQENHKVLCDALLISQDKPPVLYTFHMVQDEEFKDYSTQTAQTLKQKLAKIGGYTKKVCVMTKIFYLSPEGKTSCQYDLNSQVIYPESYYWTTAQTMKDLEKALSNILPKENQIFLFVCLFRFCLFVCWFVCFFLR

SEQ ID NO: 3860 - protein, 49 aa, Homo sapiens
RSWYLVDKICLCTVSQWSSVCRRPLPVAFNSVTFLTFWRLSTISVGLLS

SEQ ID NO: 3861 - protein, 363 aa, Homo sapiens
IHNMLSTSRSRFIRNTNESGEEVTTFFDYDYGAPCHKFDVKQIGAQLLPPLYSLVFIFGFVGNMLVVLILINCKKLKCLTDIYLLNLAISDLLFLITLPLWAHSAANEWVFGNAMCKLFTGLYHIGYFGGIFFIILLTIDRYLAIVHAVFALKARTVTFGVVTSVITWLVAVFASVPGIIFTKCQKEDSVYVCGPYFPRGWNNFHTIMRNILGLVLPLLIMVICYSGILKTLLRCRNEKKRHRAVRVIFTIMIVYFLFWTPYNIVILLNTFQEFFGLSNCESTSQLDQATQVTETLGMTHCCINPIIYAFVGEKFRRYLSVFFRKHITKRFCKQCPVFYRETVDGVTSTNTPSTGEQEVSAGL

SEQ ID NO: 3862 - protein, 210 aa, Homo sapiens
ILLIIVKLGELFHDLPKAVLAAIIIVNLKGMLRQLSDMRSLWKANRADLLIWLVTFTATILLNLDLGLVVAVIFSLLLVVVRTQMPHYSVLGQVPDTDIYRDVAEYSECGVDVDFLISQKKKLLKKQEQLKLKQLQKEEKLRKQAGPLLSGDPHLLPPVPCPSLSPGPRLLPRPHSSSLPLSPSCSQGPCFTPLAGPGSRQHFLSHHLNQ

SEQ ID NO: 3863 - protein, 59 aa, Homo sapiens
VGISVGELWPFARCCSHSYVRSLRGLSVSTHLLCFTIYIMNPSMKQKQEEIKENIKVCD

SEQ ID NO: 3864 - protein, 164 aa, Homo sapiens
KLLMLGLELLFGFFIPLMFMIFCYTFIVKTLVQAQNSKRHKAIRVIIAVVLVFLACQIPHNMVLLVTAANLGKMNRSCQSEKLIGYTKTVTEVLAFLHCCLNPVLYAFIGQKFRNYFLKILKDLWCVRRKYKSSGFSCAGRYSENISRQTSETADNDNASSFTM

SEQ ID NO: 3865 - protein, 953 aa, Homo sapiens
IGQVLTVFFSVLIGAFSVGQASPSIEAFANARGAAYEIFKIIDNKPSIDSYSKSGHKPDNIKGNLEFRNVHFSYPSRKEVKILKGLNLKVQSGQTVALVGNSGCGKSTTVQLMQRLYDPTEGMVSVDGQDIRTINVRFLREIIGVVSQEPVLFATTIAENIRYGRENVTMDEIEKAVKEANAYDFIMKLPHKFDTLVGERGAQLSGGQKQRIAIARALVRNPKILLLDEATSALDTESEAVVQVALDKARKGRTTIVIAHRLSTVRNADVIAGFDDGVIVEKGNHDELMKEKGIYFKLVTMQTAGNEVELENAADESKSEIDALEMSSNDSRSSLIRKRSTRRSVRGSQAQDRKLSTKEALDESIPPVSFWRIMKLNLTEWPYFVVGVFCAIINGGLQPAFAIIFSKIIGVFTRIDDPETKRQNSNLFSLLFLALGIISFITFFLQGFTFGKAGEILTKRLRYMVFRSMLRQDVSWFDDPKNTTGALTTRLANDAAQVKGAIGSRLAVITQNIANLGTGIIISFIYGWQLTLLLLAIVPIIAIAGVVEMKMLSGQALKDKKELEGSGKIATEAIENFRTVVSLTQEQKFEHMYAQSLQVPYRNSLRKAHIFGITFSFTQAMMYFSYAGCFRFGAYLVAHKLMSFEDVLLVFSAVVFGAMAVGQVSSFAPDYAKAKISAAHIIMIIEKTPLIDSYSTEGLMPNTLEGNVTFGEVVFNYPTRPDIPVLQGLSLEVKKGQTLALVGSSGCGKSTVVQLLERFYDPLAGKVLLDGKEIKRLNVQWLRAHLGIVSQEPILFDCSIAENIAYGDNSRVVSQEEIVRAAKEANIHAFIESLPNKYSTKVGDKGTQLSGGQKQRIAIARALVRQPHILLLDEATSALDTESEKVVQEALDKAREGRTCIVIAHRLSTIQNADLIVVFQNGRVKEHGTHQQLLAQKGIYFSMVSVQAGTKRQ

SEQ ID NO: 3866 - protein, 63 aa, Homo sapiens
RGPMSFLAGLGLAVGLALLLYCYPPDPKGLPGTRRVLGFSPVIIDRHVSRYLLAFLADDLGGL

SEQ ID NO: 3867 - protein, 167 aa, Homo sapiens
VSLRLQHRGRRRPGRFVRLVAAVVAAFALCWGPYHVFSLLEARAHANPGLRPLVWRGLPFVTSLAFFNSVANPVLYVLTCPDMLRKLRRSLRTVLESVLVDDSELGGAGSSRRRRTSSTARSASPLALCSRPEEPRGPARLLGWLLGSCAASPQTGPLNRALSSTSS

SEQ ID NO: 3868 - protein, 55 aa, Homo sapiens
LQPEGHHWETQQIPSLSPSQPWQRLLLRFKILRSLQAFVAVAARVFAHGAATLSP

SEQ ID NO: 3869 - protein, 343 aa, Homo sapiens
KPRAIVVDPVHGFMYWTDWGTPAKIKKGGLNGVDIYSLVTENIQWPNGITLDLLSGRLYWVDSKLHSISSIDVNGGNRKTILEDEKRLAHPFSLAVFEDKVFWTDIINEAIFSANRLTGSDVNLLAENLLSPEDMVLFHNLTQPRGVNWCERTTLSNGGCQYLCLPAPQINPHSPKFTCACPDGMLLARDMRSCLTEAEAAVATQETSTVRLKVSSTAVRTQHTTTRPVPDTSRLPGATPGLTTVEIVTMSHQALGDVAGRGNEKKPSSVRALSIVLPIVLLVFLCLGVFLLWKNWRLKNINSINFDNPVYQKTTEDEVHICHNQDGYSYPSRQMVSLEDDVA

SEQ ID NO: 3870 - protein, 570 aa, Homo sapiens
MRKVPGFVPASPWGLRLPQKFLFLLFLSGLVTLCFGALFLLPHSSRLKRLFLAPRTQQPGLEVVAEIAGHAPAREQEPPPNPAPAAPAPGEDDPSSWASPRRRKGGLRRTRPTGPREEATAARGNSIPASRPGDEGVPFRFDFNAFRSRLRHPVLGTRADESQEPQSQVRAQREKIKEMMQFAWQSYKRYAMGKNELRPLTKDGYEGNMFGGLSGATVIDSLDTLYLMELKEEFQEAKAWVGESFHLNVSGEASLFEVNIRYIGGLLSAFYLTGEEVFRIKAIRLGEKLLPAFNTPTGIPKGVVSFKSGNWGWATAGSSSILAEFGSLHLEFLHLTELSGNQVFAEKATVRNIRKVLRKIEKPFGLYPNFLSPVSGNWVQHHVSVGGLGDSFYEYLIKSWLMSGKTDMEAKNMYYEALEAIETYLLNVSPGGLTYIAEWRGGILDHKMGHLACFSGGMIALGAEDAKEEKRAHYRELAAQITKTCHESYARSDTKLGPEAFWFNSGREAVATQLSESYYILRPEVVESYMYLWRQTHNPIYREWGWEGQGGLGEILSDRSRFLWDPRRVQ

SEQ ID NO: 3871 - protein, 62 aa, Homo sapiens
MFLKLMATYSAAFLPVVIGLDRQAAVLNPLGSRSGVRKLLGAAWGLSFLLAFPQGSRTRNTI

SEQ ID NO: 3872 - protein, 261 aa, Homo sapiens
MKLFDASPTFFAFLLGHILAMEVLAWLLIYLLGPGWVPSALAAFILAISQAQSWCLQHDLGHASIFKKSWWNHVAQKFVMGQLKGFSAHWWNFRHFQHHAKPNIFHKDPDVTVAPVFLLGESSVEYGKKKRRYLPYNQQHLYFFLIGPPLLTLVNFEVENLAYMLVCMQWADLLWAASFYARFFLSYLPFYGVPGVLLFFVAVRYGREWRGHTQATGDPHCSPPPELPFSRLQNGASGTASLACWWNHINTSVAGAQGRWV

SEQ ID NO: 3873 - protein, 140 aa, Homo sapiens
MDGGGSPKGDVDPFYYGKPGPLRTLPEPSGPLPPSSGLSQPQVHALCPLSPLVTTGCCGQAAERDSCWERPPIPLLLPSLSGDYETVRNGGLIFAGLAFIVGLLILLSKWGGLQGRGADQGTSLLKAAEQAGFRELPREG

SEQ ID NO: 3874 - protein, 255 aa, Homo sapiens
MVYTCHRDKNCIINKVTRNRCQYCRLQKCFEVGMSKEAVRNDRNKKKKEVKEEGSPDSYELSPQLEELITKVSKAHQETFPSLCQLGKYTTNSSADHRVQLDLGLWDKFSELATKCIIKIVEFAKRLPGFTGLSIADQITLLKAACLDILMLRICTRYTPEQDTMTFSDGLTLNRTQMHNAGFGPLTDLVFAFAGQLLPLEMDDTETGLLSAICLICGGAGAPPGVCSVLSLLSHHSMRNLSGRGRGGPSGLFCW

SEQ ID NO: 3875 - protein, 275 aa, Homo sapiens
MSAETMELKWVSSSLRQVVNVYADGKEVEDRQSAPYRGRTSILRDGITAGKAALRIHNVTASDSGKYLCYFQDGDFYEKALVELKVAALGSDLHVDVKGYKDGGIHLECRSTGWYPQPQIQWSNNKGENIPTVEAPVVADGVGLYAVAASVIMRGSSGEGVSCTIRSSLLGLEKTASISIADPFFRSAQRWIAALAGTLPVLLLLLGGAGYFLWQQQEEKKTQFRKKKREQELREMAWSTMKQEQSTRVKLLEELSKFPFPQRPRHVFLSLLYAP

SEQ ID NO: 3876 - protein, 511 aa, Homo sapiens
ILQSTERPAQVKKEPKKKKQQLSVCNKLCYALGGAPYQVTGCALGFFLQIYLLDVAQVGPFSASIILFVGRAWDAITDPLVGLCISKSPWTCLGRLMPWIIFSTPLAVIAYFLIWFVPDFPHGQTYWYLLFYCLFETMVTCFHVPYSALTMFISTEQTERDSATAYRMTVEVLGTVLGTAIQGQIVGQADTPCFQDLNSSTVASQSANHTHGTTSHRETQKAYLLAAGVIVCIYIICAVILILGVREQREPYEAQQSEPIAYFRGLRLVMSHGPYIKLITGFLFTSLAFMLVEGNFVLFCTYTLGFRNEFQNLLLAIMLSATLTIPIWQWFLTRFGKKTAVYVGISSAVPFLILVALMESNLIITYAVAVAAGISVAAAFLLPWSMLPDVIDDFHLKQPHFHGTEPIFFSFYVFFTKFASGVSLGISTLSLDFAGYQTRGCSQPERVKFTLNMLVTMAPIVLILLGLLLFKMYPIDEERRRQNKKALQALRDEASSSGCSETDSTELASIL

SEQ ID NO: 3877 - protein, 606 aa, Homo sapiens
VKVCLGPLGARAALRIPGQRCGPRPGRPLRSSQRASERARAADAPGRDPAARMTAPGAAGRCPPTTWLGSLLLLVCLLASRSITEEVSEYCSHMIGSGHLQSLQRLIDSQMETSCQITFEFVDQEQLKDPVCYLKKAFLLVQDIMEDTMRFRDNTPNAIAIVQLQELSLRLKSCFTKDYEEHDKACVRTFYETPLQLLEKVKNVFNETKNLLDKDWNIFSKNCNNSFAECSSQDVVTKPDCNCLYPKAIPSSDPASVSPHQPLAPSMAPVAGLTWEDSEGTEGSSLLPGEQPLHTVDPGSAKQRPPRSTCQSFEPPETPVVKDSTIGGSPQPRPSVGAFNPGMEDILDSAMGTNWVPEEASGEASEIPVPQGTELSPSRPGGGSMQTEPARPSNFLSASSPLPASAKGQQPADVTGTALPRVGPVRPTGQDWNHTPQKTDHPSALLRDPPEPGSPRISSLRPQGLSNPSTLSAQPQLSRSHSSGSVLPLGELEGRRSTRDRRSPAEPEGGPASEGAARPLPRFNSVPLTDTGHERQSEGSFSPQLQESVFHLLVPSVILVLLAVGGLLFYRWRRRSHQEPQRADSPLEQPEGSPLTQDDRQVELPV

SEQ ID NO: 3878 - protein, 1034 aa, Homo sapiens
VTLLGRKRTVLAQMAGISYVASFFLLLTKLSIGQREVTVQKGPLFRAEGYPVSIGCNVTGHQGPSEQHFQWSVYLPTNPTQEVQIISTKDAAFSYAVYTQRVRSGDVYVERVQGNSVLLHISKLQMKDAGEYECHTPNTDEKYYGSYSAKTNLIVIPDTLSATMSSQTLGKEEGEPLALTCEASKATAQHTHLSVTWYLTQDGGGSQATEIISLSKDFILVPGPLYTERFAASDVQLNKLGPTTFRLSIERLQSSDQGQLFCEATEWIQDPDETWMFITKKQTDQTTLRIQPAVKDFQVNITADSLFAEGKPLELVCLVVSSGRDPQLQGIWFFNGTEIAHIDAGGVLGLKNDYKERASQGELQVSKLGPKAFSLKIFSLGPEDEGAYRCVVAEVMKTRTGSWQVLQRKQSPDSHVHLRKPAARSVVMSTKNKQQVVWEGETLAFLCKAGGAESPLSVSWWHIPRDQTQPEFVAGMGQDGIVQLGASYGVPSYHGNTRLEKMDWATFQLEITFTAITDSGTYECRVSEKSRNQARDLSWTQKISVTVKSLESSLQVSLMSRQPQVMLTNTFDLSCVVRAGYSDLKVPLTVTWQFQPASSHIFHQLIRITHNGTIEWGNFLSRFQKKTKVSQSLFRSQLLVHDATEEETGVYQCEVEVYDRNSLYNNRPPRASAISHPLRIAVTLPESKLKVNSRSQVQELSINSNTDIECSILSRSNGNLQLAIIWYFSPVSTNASWLKILEMDQTNVIKTGDEFHTPQRKQKFHTEKVSQDLFQLHILNVEDSDRGKYHCAVEEWLLSTNGTWHKLGEKKSGLTELKLKPTGSKVRVSKVYWTENVTEHREVAIRCSLESVGSSATLYSVMWYWNRENSGSKLLVHLQHDGLLEYGEEGLRRHLHCYRSSSTDFVLKLHQVEMEDAGMYWCRVAEWQLHGHPSKWINQASDESQRMVLTVLPSEPTLPSRICSSAPLLYFLFICPFVLLLLLLISLLCLYWKARKLSTLRSNTRKEKALWVDLKEAGGVTTNRREDEEEDEGN

SEQ ID NO: 3879 - protein, 637 aa, Homo sapiens
KPQRSQLQIFSSVLQTSLLFLLMGLRASGKDSAPTVVSGILGGSVTLPLNISVDTEIENVIWIGPKNALAFARPKENVTIMVKSYLGRLDITKWSYSLCISNLTLNDAGSYKAQINQRNFEVTTEEEFTLFVYEQLQEPQVTMKSVKVSENFSCNITLMCSVKGAEKSVLYSWTPREPHASESNGGSILTVSRTPCDPDLPYICTAQNPVSQRSSLPVHVGQFCTDPGASRGGTTGETVVGVLGEPVTLPLALPACRDTEKVVWLFNTSIISKEREEAATADPLIKSRDPYKNRVWVSSQDCSLKISQLKIEDAGPYHAYVCSEASSVTSMTHVTLLIYRRLRKPKITWSLRHSEDGICRISLTCSVEDGGNTVMYTWTPLQKEAVVSQGESHLNVSWRSSENHPNLTCTASNPVSRSSHQFLSENICSGPERNTKLWIGLFLMVCLLCVGIFSWCIWKRKGRCSVPAFCSSQAEAPADTPEPTAGHTLYSVLSQGYEKLDTPLRPARQQPTPTSDSSSDSNLTTEEDEDRPEVHKPISGRYEVFDQVTQEGAGHDPAPEGQADYDPVTPYVTEVESVVGENTMYAQVFNLQGKTPVSQKEESSATIYCSIRKPQVVPPPQQNDLEIPESPTYENFT

SEQ ID NO: 3880 - protein, 577 aa, Homo sapiens
VGRESGVGEWGGGARWRRGAWDMARPDDEEGAAVAPGHPLAKGYLPLPRGAPVGKESVELQNGPKAGTFPVNGAPRDSLAAASGVLGGPQTPLAPEEETQARLLPAGAGAETPGAESSPLPLTALSPRRFVVLLIFSLYSLVNAFQWIQYSIISNVFEGFYGVTLLHIDWLSMVYMLAYVPLIFPATWLLDTRGLRLTALLGSGLNCLGAWIKCGSVQQHLFWVTMLGQCLCSVAQVFILGLPSRIASVWFGPKEVSTACATAVLGNQLGTAVGFLLPPVLVPNTQNDTNLLACNISTMFYGTSAVATLLFILTAIAFKEKPRYPPSQAQAALQDSPPEEYSYKKSIRNLFKNIPFVLLLITYGIMTGAFYSVSTLLNQMILTYYEGEEVNAGRIGLTLVVAGMVGSILCGLWLDYTKTYKQTTLIVYILSFIGMVIFTFTLDLRYIIIVFVTGGVLGFFMTGYLPLGFEFAVEITYPESEGTSSGLLNASAQIFGILFTLAQGKLTSDYGPKAGNIFLCVWMFIGIILTALIKSDLRRHNINIGITNVDVKAIPADSPTDQEPKTVMLSKQSESAI

SEQ ID NO: 3881 - protein, 1118 aa, Homo sapiens
ISSLSWFTTIVPLVLVLTITAVKDATDDYFRHKSDNQVNNRQSQVLINGILQQEQWMNVCVGDIIKLENNQFVAADLLLLSSSEPHGLCYIETAELDGETNMKVRQAIPVTSELGDISKLAKFDGEVICEPPNNKLDKFSGTLYWKENKFPLSNQNMLLRGCVLRNTEWCFGLVIFAGPDTKLMQNSGRTKFKRTSIDRLMNTLVLWIFGFLVCMGVILAIGNAIWEHEVGMRFQVYLPWDEAVDSAFFSGFLSFWSYIIILNTVVPISLYVSVEVIRLGHSYFINWDKKMFCMKKRTPAEARTTTLNEELGQVEYIFSDKTGTLTQNIMVFNKCSINGHSYGDVFDVLGHKAELGERPEPVDFSFNPLADKKFLFWDPSLLEAVKIGDPHTHEFFRLLSLCHTVMSEEKNEGELYYKAQSPDEGALVTAARNFGFVFRSRTPKTITVHEMGTAITYQLLAILDFNNIRKRMSVIVRNPEGKIRLYCKGADTILLDRLHHSTQELLNTTMDHLNEYAGEGLRTLVLAYKDLDEEYYEEWAERRLQASLAQDSREDRLASIYEEVENNMMLLGATAIEDKLQQGVPETIALLTLANIKIWVLTGDKQETAVNIGYSCKMLTDDMTEVFIVTGHTVLEVREELRKAREKMMDSSRSVGNGFTYQDKLSSSKLTSVLEAVAGEYALVINGHSLAHALEADMELEFLETACACKAVICCRVTPLQKAQVVELVKKYKKAVTLAIGDGANDVSMIKTAHIGVGISGQEGIQAVLASDYSFSQFKFLQRLLLVHGRWSYLRMCKFLCYFFYKNFAFTMVHFWFGFFCGFSAQTVYDQYFITLYNIVYTSLPVLAMGVFDQDVPEQRSMEYPKLYEPGQLNLLFNKREFFICIAQGIYTSVLMFFIPYGVFADATRDDGTQLADYQSFAVTVATSLVIVVSVQIGLDTGYWTAINHFFIWGSLAVYFAILFAMHSNGLFDMFPNQFRFVGNAQNTLAQPTVWLTIVLTTVVCIMPVVAFRFLRLNLKPDLSDTVRYTQLVRKKQKAQHRCMRRVGRTGSRRSGYAFSHQEGFGELIMSGKNMRLSSLALSSFTTRSSSSWIESLRRKKSDSASSPSGGADKPLKG

SEQ ID NO: 3882 - protein, 368 aa, Homo sapiens
LTPKFYVALTGTSSLISGLIFIFEWWYFHKHGTSFIEQVSVSHLQPLMGGTESSISEPGSPSRNRENETSRQNLSECKVWRNPLNLFRGAEYRRYTWVTGKEPLTYYDMNLSAQDHQTFFTCDTDFLRPSDTVMQKAWRERNPPARIKAAYQALELNNDCATAYVLLAEEEATTIVDAERLFKQALKAGETIYRQSQQCQHQSPQHEAQLRRDTNVLVYIKRRLAMCARKLGRIREAVKIMRDLMKEFPPLTMLNIHENLLESLLELQAYPDVQAVLAKYDDISLPKSAAICYTAALLKTRTVSEKFSPETASRRGLSTAEINAVEAIHRAVEFNPHVPKVEIYPFSPQLNIKAVDNSAISKYPANIY

SEQ ID NO: 3883 - protein, 366 aa, Homo sapiens
VVTLILLLLLKVYQGKGCQGSADHVVSISGVPLQLQPNSIQTKVDSIAWKKLLPSQNGFHHILKWENGSLPSNTSNDRFSFIVKNLSLLIKAAQQQDSGLYCLEVTSISGKVQTATFQVFVFESLLPDKVEKPRLQGQGKILDRGRCQVALSCLVSRDGNVSYAWYRGSKLIQTAGNLTYLDEEVDINGTHTYTCNVSNPVSWESHTLNLTQDCQNAHQEFRFWPFLVIIVILSALFLGTLACFCVWRRKRKEKQSETSPKEFLTIYEDVKDLKTRRNHEQEQTFPGGGSTIYSMIQSQSSAPTSQEPAYTLYSLIQPSRKSGSRKRNHSPSFNSTIYEVIGKSQPKAQNPARLSRKELENFDVYS

SEQ ID NO: 3884 - protein, 26 aa, Homo sapiens
IGEGVSFFLFFFLEPVLIALNKYSLK

SEQ ID NO: 3885 - protein, 75 aa, Homo sapiens
VTVFPSKTVAQYSGVPWWIILVAILAGILMLALLVFILWKCGFFKRNKKDHYDATYHKAEIHAQPSDKERLTSDA

SEQ ID NO: 3886 - protein, 206 aa, Homo sapiens
RTWPCTLLFFLLFIPVFCKAMHVAQPAVVLASSRGIASFVCEYASPGKATEVRVTVLRQADSQVTEVCAATYMMGNELTFLDDSICTGTSSGNQVNLTIQGLRAMDTGLYICKVELMYPPPYYLGIGNGTQIYVIDPEPCPDSDFLLWILAAVSSGLFFYSFLLTAVSLSKMLKKRSPLTTGVYVKMPPTEPECEKQFQPYFIPIN

SEQ ID NO: 3887 - protein, 91 aa, Homo sapiens
LVGGSRTATGSRASPRPCGLYTPYSCRFCCCLWLEGPPGAESLGLDPVPSPFPHSPAGREHLFPRLIPLLGGGGCVCVCVCVCVLGEASLK

SEQ ID NO: 3888 - protein, 825 aa, Homo sapiens
LLGVLLLGAARLPRGAEAFEIALPRESNITVLIKLGTPTLLAKPCYIVISKRHITMLSIKSGERIVFTFSCQSPENHFVIEIQKNIDCMSGPCPFGEVQLQPSTSLLPTLNRTFIWDVKAHKSIGLELQFSIPRLRQIGPGESCPDGVTHSISGRIDATVVRIGTFCSNGTVSRIKMQEGVKMALHLPWFHPRNVSGFSIANRSSIKRLCIIESVFEGEGSATLMSANYPEGFPEDELMTWQFVVPAHLRASVSFLNFNLSNCERKEERVEYYIPGSTTNPEVFKLEDKQPGNMAGNFNLSLQGCDQDAQSPGILRLQFQVLVQHPQNESNKIYVVDLSNERAMSLTIEPRPVKQSRKFVPGCFVCLESRTCSSNLTLTSGSKHKISFLCDDLTRLWMNVEKTISCTDHRYCQRKSYSLQVPSDILHLPVELHDFSWKLLVPKDRLSLVLVPAQKLQQHTHEKPCNTSFSYLVASAIPSQDLYFGSFCPGGSIKQIQVKQNISVTLRTFAPSFQQEASRQGLTVSFIPYFKEEGVFTVTPDTKSKVYLRTPNWDRGLPSLTSVSWNISVPRDQVACLTFFKERSGVVCQTGRAFMIIQEQRTRAEEIFSLDEDVLPKPSFHHHSFWVNISNCSPTSGKQLDLLFSVTLTPRTVDLTVILIAAVGGGVLLLSALGLIICCVKKKKKKTNKGPAVGIYNDNINTEMPRQPKKFQKGRKDNDSHVYAVIEDTMVYGHLLQDSSGSFLQPEVDTYRPFQGTMGVCPPSPPTICSRAPTAKLATEEPPPRSPPESESEPYTFSHPNNGDVSSKDTDIPLLNTQEPMEPAE

SEQ ID NO: 3889 - protein, 1115 aa, Homo sapiens
RMACRRRYFVEGEAPSSETGTSLDSPSAYPQGPLVPGSSLSPDHYEHTSVGAYGLYSGPPGQQQRTRRPKLQHSTSILRKQAEEEAIKRSRSLSESYELSSDLQDKQVEMLERKYGGRLVTRHAARTIQTAFRQYQMNKNFERLRSSMSENRMSRRIVLSNMRMQFSFEGPEKVHSSYFEGKQVSVTNDGSQLGALVSPECGDLSEPTTLKSPAPSSDFADAITELEDAFSRQVKSLAESIDDALNCRSLHTEEAPALDAARARDTEPQTALHGMDHRKLDEMTASYSDVTLYIDEEELSPPLPLSQAGDRPSSTESDLRLRAGGAAPDYWALAHKEDKADTDTSCRSTPSLERQEQRLRVEHLPLLTIEPPSDSSVDLSDRSERGSLKRQSAYERSLGGQQGSPKHGPHSGAPKSLPREEPELRPRPPRPLDSHLAINGSANRQSKSESDYSDGDNDSINSTSNSNDTINCSSESSSRDSLREQTLSKQTYHKEARNSWDSPAFSNDVIRKRHYRIGLNLFNKKPEKGVQYLIERGFVPDTPVGVAHFLLQRKGLSRQMIGEFLGNRQKQFNRDVLDCVVDEMDFSTMELDEALRKFQAHIRVQGEAQKVERLIEAFSQRYCICNPGVVRQFRNPDTIFILAFAIILLNTDMYSPNVKPERKMKLEDFIKNLRGVDDGEDIPREMLMGIYERIRKRELKTNEDHVSQVQKVEKLIVGKKPIGSLHPGLGCVLSLPHRRLVCYCRLFEVPDPNKPQKLGLHQREIFLFNDLLVVTKIFQKKKNSVTYSFRQSFSLYGMQVLLFENQYYPNGIRLTSSVPGADIKVLINFNAPNPQDRKKFTDDLRESIAEVQEMEKHRIESELEKQKGVVRPSMSQCSSLKKESGNGTLSRACLDDSYASGEGLKRSALSSSLRDLSEAGKRGRRSSAGSLESNVEGSIISSPHMRRRATSTRECPSRPHQTMPNSSSLLGSLFGSKRGKPPPQAHLPSAPALPPPHPPVVLPHLQHSVAGHHLGPPEGLPQAAMHGHHTQYCHMQNPPPYHHHHHHHPPQHIQHAHQYHHGPHGGHPAYGAHAHGHPPLPSAHVGHTVHHHGQPPAPPPPTSSKAKPSGISTIV

SEQ ID NO: 3890 - protein, 26 aa, Homo sapiens
VSGLPWLTFNLLFFVLIKMIILPCSY

SEQ ID NO: 3891 - protein, 41 aa, Homo sapiens
IQFIVFFLVRSETTVPATYMSFLVILIDLFGFQKDTVIMCV

SEQ ID NO: 3892 - protein, 526 aa, Homo sapiens
KGSALDAGRDPKRPALPETLCESGWASNTAPTAPPQPGWCLCGKDFKSSCQTPGREKERRLATMHGSCSFLMLLLPLLLLLVATTGPVGALTDEEKRLMVELHNLYRAQVSPTASDMLHMRWDEELAAFAKAYARQCVWGHNKERGRRGENLFAITDEGMDVPLAMEEWHHEREHYNLSAATCSPGQMCGHYTQVVWAKTERIGCGSHFCEKLQGVEETNIELLVCNYEPPGNVKGKRPYQEGTPCSQCPSGYHCKNSLCEPIGSPEDAQDLPYLVTEAPSFRATEASDSRKMGTPSSLATGIPAFLVTEVSGSLATKALPAVETQAPTSLATKDPPSMATEAPPCVTTEVPSILAAHSLPSLDEEPVTFPKSTHVPIPKSADKVTDKTKVPSRSPENSLDPKMSLTGARELLPHAQEEAEAEAELPPSSEVLASVFPAQDKPGELQATLDHTGHTSSKSLPNFPNTSATANATGGRALALQSSLPGAEGPDKPSVVSGLNSGPGHVWGPLLGLLLLPPLVLAGIF

SEQ ID NO: 3893 - protein, 236 aa, Homo sapiens
KDTMSTESMIRDVELAEEALPKKTGGPQGSRRCLFLSLFSFLIVAGATTLFCLLHFGVIGPQREEFPRDLSLISPLAQAVRSSSRTPSDKPVAHVVANPQAEGQLQWLNRRANALLANGVELRDNQLVVPSEGLYLIYSQVLFKGQGCPSTHVLLTHTISRIAVSYQTKVNLLSAIKSPCQRETPEGAEAKPWYEPIYLGGVFQLEKGDRLSAEINRPDYLDFAESGQVYFGIIAL

SEQ ID NO: 3894 - protein, 331 aa, Homo sapiens
RPDTAQLDGTMAPAFLLLLLLWPQGCVSGPSADSVYTKVRLLEGETLSVQCSYKGYKNRVEGKVWCKIRKKKCEPGFARVWVKGPRYLLQDDAQAKVVNITMVALKLQDSGRYWCMRNTSGILYPLMGFQLDVSPAPQTERNIPFTHLDNILKSGTVTTGQAPTSGPDAPFTTGVMVFTPGLITLPRLLASTRPASKTGYSFTATSTTSQGPRRTMGSQTVTASPSNARDSSAGPESISTKSGDLSTRSPTTGLCLTSRSLLNRLPSMPSIRHQDVYSTVLGVVLTLLVLMLIMVYGFWKKRHMASYSMCSDPSTRDPPGRPEPYVEVYLI

SEQ ID NO: 3895 - protein, 240 aa, Homo sapiens
KAYACSIHHIRTMSYVFVNDSSQTNVPLLQACIDGDFNYSKRLLESGFDPNIRDSRGRTGLHLAAARGNVDICQLLHKFGADLLATDYQGNTALHLCGHVDTIQFLVSNGLKIDICNHQGATPLVLAKRRGVNKDVIRLLESLEEQEVKGFNRGTHSKLETMQTAESESAMESHSLLNPNLQQGEGVLSSFRTTWQEFVEDLGFWRVLLLIFVIALLSLGIAYYVSGVLPFVENQPELVH

SEQ ID NO: 3896 - protein, 410 aa, Homo sapiens
IDNELEYENFYADFGPLNLAMVYRYCCKINKKLKSITMLRKKIVHFTGSDQRKQANAAFLVGCYMVIYLGRTPEEAYRILIFGETSYIPFRDAAYGSCNFYITLLDCFHAVKKAMQYGFLNFNSFNLDEYEHYEKAENGDLNWIIPDRFIAFCGPHSRARLESGYHQHSPETYIQYFKNHNVTTIIRLNKRMYDAKRFTDAGFDHHDLFFADGSTPTDAIVKEFLDICENAEGAIAVHCKAGLGRTGTLIACYIMKHYRMTAAETIAWVRICRPGSVIGPQQQFLVMKQTNLWLEGDYFRQKLKGQENGQHRAAFSKLLSGVDDISINGVENQDQQEPEPYSDDDEINGVTQGDRLRALKSRRQSKTNAIPLTCPLAVLTSALCSVVIWWIVCDYILPILLFCLDGFRTQ

SEQ ID NO: 3897 - protein, 179 aa, Homo sapiens
LYFLATLLMITYKSQVFSYPHRYLVLDLALLFLMGILEAVRLYLGTRGNLTEAERPLAASLALTAGTALLSAHFLLWQALVLWADWALSATLLALHGLEAVLQVVAIAAFTSHTSPFRGFGGEVRAKAGDETAGERAAEGHIRSLRPLQFYQLLPFARSAKQILALCFFPIPRFTISSP

SEQ ID NO: 3898 - protein, 37 aa, Homo sapiens
LREGNNQMASLKPAFVNYFFLLLLEVSHLLLIINADV

SEQ ID NO: 3899 - protein, 756 aa, Homo sapiens
LLRLLLAWAAAGPTLGQDPWAAEPRAACGPSSCYALFPRRRTFLEAWRACRELGGDLATPRTPEEAQRVDSLVGAGPASRLLWIGLQRQARQCQLQRPLRGFTWTTGDQDTAFTNWAQPASGGPCPAQRCVALEASGEHRWLEGSCTLAVDGYLCQFGFEGACPALQDEAGQAGPAVYTTPFHLVSTEFEWLPFGSVAAVQCQAGRGASLLCVKQPEGGVGWSRAGPLCLGTGCSPDNGGCEHECVEEVDGHVSCRCTEGFRLAADGRSCEDPCAQAPCEQQCEPGGPQGYSCHCRLGFRPAEDDPHRCVDTDECQIAGVCQQMCVNYVGGFECYCSEGHELEADGISCSPAGAMGAQASQDLGDELLDDGEDEEDEDEAWKAFNGGWTEMPGILWMEPTQPPDFALAYRPSFPEDREPQIPYPEPTWPPPLSAPRVPYHSSVLSVTRPVVVSATHPTLPSAHQPPVIPATHPALSRDHQIPVIAANYPDLPSAYQPGILSVSHSAQPPAHQPPMISTKYPELFPAHQSPMFPDTRVAGTQTTTHLPGIPPNHAPLVTTLGAQLPPQAPDALVLRTQATQLPIIPTAQPSLTTTSRSPVSPAHQISVPAATQPAALPTLLPSQSPTNQTSPISPTHPHSKAPQIPREDGPSPKLALWLPSPAPTAAPTALGEAGLAEHSQRDDRWLLVALLVPTCVFLVVLLALGIVYCTRCGPHAPNKRITDCYRWVIHAGSKSPTEPMPPRGSLTGVQTCRTSV

SEQ ID NO: 3900 - protein, 256 aa, Homo sapiens
KLALTMPVKGGTKCIKYLLFGFNFIFWLAGIAVLAIGLWLRFDSQTKSIFEQETNNNNSSFYTGVYILIGAGALMMLVGFLGCCGAVQESQCMLGLATKRTMFPPFLEDHVCFFSLNPQFFGFLLVIFAIEIAAAIWGYSHKDEVIKEVQEFYKDTYNKLKTKDEPQRETLKAIHYALNCCGLAGGVEQFISDICPKKDVLETFTVKSCPDAIKEVFDNKFHIIGAVGIGIAVVMIFGMIFSMILCCAIRRNREMV

SEQ ID NO: 3901 - protein, 35 aa, Homo sapiens
ILLLKTWGEIISLSRPCYAVYLGVLYVLLPMPSLK

SEQ ID NO: 3902 - protein, 190 aa, Homo sapiens
LRFLPAPHHRTREEEAGEKQNFFPLSCPFLRTCSEAEEPVLEEMVMGLGVLLLVFVLGLGLTPPTLAQDNSRYTHFLTQHYDAKPQGRDDRYCESIMRRRGLTSPCKDINTFIHGNKRSIKAICENKNGNPHRENLRISKSSFQVTTCKLHGGSPWPPCQYRATAGFRNVVVACENGLPVHLDQSIFRRP

SEQ ID NO: 3903 - protein, 850 aa, Homo sapiens
KCCLRKQNTAVKKQTKSAQIQLQLIMFSGFNVFRVGISFVIMCIFYMPTVNSLPELSPQKYFSTLQPGKASLAYFCQADSPRTSVFLEELNEAVRPLQDYGISVAKVNCVKEEISRYCGKEKDLMKAYLFKGNILLREFPTDTLFDVNAIVAHVLFALLFSEVKYITNLEDLQNIENALKGKANIIFSYVRAIGIPEHRAVMEAAFVYGTTYQFVLTTEIALLESIGSEDVEYAHLYFFHCKLVLDLTQQCRRTLMEQPLTTLNIHLFIKTMKAPLLTEVAEDPQQVSTVHLQLGLPLVFIVSQQATYEADRRTAEWVAWRLLGKAGVLLLLRDSLEVNIPQDANVVFKRAEEGVPVEFLVLHDVDLIISHVENNMHIEEIQEDEDNDMEGPDIDVQDDEVAETVFRDRKRKLPLELTVELTEETFNATVMASDSIVLFYAGWQAVSMAFLQSYIDVAVKLKGTSTMLLTRINCADWSDVCTKQNVTEFPIIKMYKKGENPVSYAGMLGTEDLLKFIQLNRISYPVNITSIQEAEEYLSGELYKDLILYSSVSVLGLFSPTMKTAKEDFSEAGNYLKGYVITGIYSEEDVLLLSTKYAASLPALLLARHTEGKIESIPLASTHAQDIVQIITDALLEMFPEITVENLPSYFRLQKPLLILFSDGTVNPQYKKAILTLVKQKYLDSFTPCWLNLKNTPVGRGILRAYFDPLPPLPLLVLVNLHSGGQVFAFPSDQAIIEENLVLWLKKLEAGLENHITILPAQEWKPPLPAYDFLSMIDAATSQRGTRKVPKCMKETDVQENDKEQHEDKSAVRKEPIETLRIKHWNRSNWFKEAEKSFRRDKELGCSKVN

SEQ ID NO: 3904 - protein, 42 aa, Homo sapiens
METIRRLSIHLNKYLALTPPRRNSLMLWLIPWSMTSFMAKMV

SEQ ID NO: 3905 - protein, 1194 aa, Homo sapiens
IIMFCSEKKLREVERIVKANDREYNEKFQYADNRIHTSKYNILTFLPINLFEQFQRVANAYFLCLLILQLIPEISSLTWFTTIVPLVLVITMTAVKDATDDYFRHKSDNQVNNRQSEVLINSKLQNEKWMNVKVGDIIKLENNQFVAADLLLLSSSEPHGLCYVETAELDGETNLKVRHALSVTSELGADISRLAGFDGIVVCEVPNNKLDKFMGILSWKDSKHSLNNEKIILRGCILRNTSWCFGMVIFAGPDTKLMQNSGKTKFKRTSIDRLMNTLVLWIFGFLICLGIILAIGNSIWESQTGDQFRTFLFWNEGEKSSVFSGFLTFWSYIIILNTVVPISLYVSVEVIRLGHSYFINWDRKMYYSRKAIPAVARTTTLNEELGQIEYIFSDKTGTLTQNIMTFKRCSINGRIYGEVHDDLDQKTEITQEKEPVDFSVKSQADREFQFFDHHLMESIKMGDPKVHEFLRLLALCHTVMSEENSAGELIYQVQSPDEGALVTAARNFGFIFKSRTPETITIEELGTLVTYQLLAFLDFNNTRKRMSVIVRNPEGQIKLYSKGADTILFEKLHPSNEVLLSLTSDHLSEFAGEGLRTLAIAYRDLDDKYFKEWHKMLEDANAATEERDERIAGLYEEIERDLMLLGATAVEDKLQEGVIETVTSLSLANIKIWVLTGDKQETAINIGYACNMLTDDMNDVFVIAGNNAVEVREELRKAKQNLFGQNRNFSNGHVVCEKKQQLELDSIVEETITGDYALIINGHSLAHALESDVKNDLLELACMCKTVICCRVTPLQKAQVVELVKKYRNAVTLAIGDGANDVSMIKSAHIGVGISGQEGLQAVLASDYSFAQFRYLQRLLLVHGRWSYFRMCKFLCYFFYKNFAFTLVHFWFGFFCGFSAQTVYDQWFITLFNIVYTSLPVLAMGIFDQDVSDQNSVDCPQLYKPGQLNLLFNKRKFFICVLHGIYTSLVLFFIPYGAFYNVAGEDGQHIADYQSFAVTMATSLVIVVSVQIALDTSYWTFINHVFIWGSIAIYFSILFTMHSNGIFGIFPNQFPFVGNARHSLTQKCIWLVILLTTVASVMPVVAFRFLKVDLYPTLSDQIRRWQKAQKKARPPSSRRPRTRRSSSRRSGYAFAHQEGYGELITSGKNMRAKNPPPTSGLEKTHYNSTSWIENLCKKTTDTVSSFSQDKTVKL

SEQ ID NO: 3906 - protein, 534 aa, Homo sapiens
KSPPFPAQLSTSAATSKIPTLIMLFPISMSATEFLLASVIFCLVFWVIRASRPQVPKGLKNPPGPWGWPLIGHMLTLGKNPHLALSRMSQQYGDVLQIRIGSTPVVVLSGLDTIRQALVRQGDDFKGRPDLYTFTLISNGQSMSFSPDSGPVWAARRRLAQNGLKSFSIASDPASSTSCYLEEHVSKEAEVLISTLQELMAGPGHFNPYRYVVVSVTNVICAICFGRRYDHNHQELLSLVNLNNNFGEVVGSGNPADFIPILRYLPNPSLNAFKDLNEKFYSFMQKMVKEHYKTFEKGHIRDITDSLIEHCQEKQLDENANVQLSDEKIINIVLDLFGAGFDTVTTAISWSLMYLVMNPRVQRKIQEELDTVIGRSRRPRLSDRSHLPYMEAFILETFRHSSFVPFTIPHSTTRDTSLKGFYIPKGRCVFVNQWQINHDQKLWVNPSEFLPERFLTPDGAIDKVLSEKVIIFGMGKRKCIGETIARWEVFLFLAILLQRVEFSVPLGVKVDMTPIYGLTMKHACCEHFQMQLRS

SEQ ID NO: 3907 - protein, 61 aa, Homo sapiens
LGPMAFHLSGSCPLPHDLQEHPILFPKISWTDKDQNAKISADSIICLLMFLLWLCLFSVLL

SEQ ID NO: 3908 - protein, 23 aa, Homo sapiens
IFFMCRVIVLGVISIIYISLAKG

SEQ ID NO: 3909 - protein, 29 aa, Homo sapiens
MGMVHCHCFSAVANTWITHLILCVFIIKL

SEQ ID NO: 3910 - protein, 127 aa, Homo sapiens
LGPRGAANHTGLRPSYPAPSPSTSTFTSPPFHFFLYVFFLLETDSIHIEYNIFVYLTGRGRGGDRGGAGPAAWYSSPRGHWEGDPRPLPSPLCTVLWKRNTHLVSKEFILRRVCVCVCLFFLLNLFK

SEQ ID NO: 3911 - protein, 289 aa, Homo sapiens
RALAQDARFRLEMPESVTVQEGLCIFVHCSVFYLEYGWKDSTPAYGHWFREGVSVDQETPVATNNSTQKVQKETQGRFHLLGDPSRNNCSLSIRDARRRDNGSYFFWVARGRTKFSYKYSPLSVYVTALTHRPDILIPEFLKSGHPSNLTCSVPWVCEQGTPPIFSWMSAAPTSLGPRTLHSSVLTIIPRPQDHGTNLICQVTFPGAGVTTERTIQLSVSYPLMNPVIEASLEDGTGKSGTVEEVVVLAVGVVAVKILLLCLCLIILSFHKKKAVRAVEVEENVYAVMG

SEQ ID NO: 3912 - protein, 130 aa, Homo sapiens
LCWQRKKYKTNVIRTAKYNFYSFLPLNLYEQFHRVSNLFFLIIIILQSIPDISTLPWFSLSTPMVCLLFIRATRDLVDDMGRHKSDRAINNRPCQILMGKSPTGTGPAFIRRLAGTRTEAEALMANPCRA

SEQ ID NO: 3913 - protein, 45 aa, Homo sapiens
RGNGIFRVNGMHINYFFFLKLFLSLQNLILALDLRRESLTRDETQ

SEQ ID NO: 3914 - protein, 290 aa, Homo sapiens
TPAAAASRPGAGGAAGARRWSIRSMLLLTRSPTAWHRLSQLKPRVLPGTLGGQALHLRSWLLSRQGPAETGGQGQPQGPGLRTRLLITGLFGAGLGGAWLALRAEKERLQQQKRTEALRQAAVGQGDFHLLDHRGRARCKADFRGQWVLMYFGFTHCPDICPDELEKLVQVVRQLEAEPGLPPVQPVFITVDPERDDVEAMARYVQDFHPRLLGLTGSTKQVAQASHSYRVYYNAGPKDEDQDYIVDHSIAIYLLNPDGLFTDYYGRSRSAEQISDSVRRHMAAFRSVLS

SEQ ID NO: 3915 - protein, 473 aa, Homo sapiens
RMELQDPKMNGALPSDAVGYRQEREGFLPSRGPAPGSKPVQFMDFEGKTSFGMSVFNLSNAIMGSGILGLAYAMAHTGVIFFLALLLCIALLSSYSIHLLLTCAGIAGIRAYEQLGQRAFGPAGKVVVATVICLHNVGAMSSYLFIIKSELPLVIGTFLYMDPEGDWFLKGNLLIIIVSVLIILPLALMKHLGYLGYTSGLSLTCMLFFLVSVIYKKFQLGCAIGHNETAMESEALVGLPSQGLNSSCEAQMFTVDSQMSYTVPIMAFAFVCHPEVLPIYTELCRPSKRRMQAVANVSIGAMFCMYGLTATFGYLTFYSSVKAEMLHMYSQKDPLILCVRLAVLLAVTLTVPVVLFPIRRALQQLLFPGKAFSWPRHVAIALILLVLVNVLVICVPTIRDIFGVIGSTSAPSLIFILPSIFYLRIVPSEVEPFLSWPKIQALCFGVLGVLFMAVSLGFMFANWATGQSRMSGH

SEQ ID NO: 3916 - protein, 383 aa, Homo sapiens
VTLAIGDGANDVSMIKTAHIGVGISGQEGIQAVLASDYSFSQFKFLQRLLLVHGRWSYLRMCKFLCYFFYKNFAFTMVHFWFGFFCGFSAQTVYDQYFITLYNIVYTSLPVLAMGVFDQDVPEQRSMEYPKLYEPGQLNLLFNKREFFICIAQGIYTSVLMFFIPYGVFADATRDDGTQLADYQSFAVTVATSLVIVVSVQIGLDTGYWTAINHFFIWGSLAVYFAILFAMHSNGLFDMFPNQFRFVGNAQNTLAQPTVWLTIVLTTVVCIMPVVAFRFLRLNLKPDLSDTVRYTQLVRKKQKAQHRCMRRVGRTGSRRSGYAFSHQEGFGELIMSGKNMRLSSLALSSFTTRSSSSWIESLRRKKSDSASSPSGGADKPLKG

SEQ ID NO: 3917 - protein, 362 aa, Homo sapiens
VALTGTSSLISGLIFIFEWWYFHKHGTSFIEQVSVSHLQPLMGGTESSISEPGSPSRNRENETSRQNLSECKVWRNPLNLFRGAEYRRYTWVTGKEPLTYYDMNLSAQDHQTFFTCDTDFLRPSDTVMQKAWRERNPPARIKAAYQALELNNDCATAYVLLAEEEATTIVDAERLFKQALKAGETIYRQSQQCQHQSPQHEAQLRRDTNVLVYIKRRLAMCARKLGRIREAVKIMRDLMKEFPPLTMLNIHENLLESLLELQAYPDVQAVLAKYDDISLPKSAAICYTAALLKTRTVSEKFSPETASRRGLSTAEINAVEAIHRAVEFNPHVPKVEIYPFSPQLNIKAVDNSAISKYPANIY

SEQ ID NO: 3918 - protein, 853 aa, Homo sapiens
LQHSTSILRKQAEEEAIKRSRSLSESYELSSDLQDKQVEMLERKYGGRLVTRHAARTIQTAFRQYQMNKNFERLRSSMSENRMSRRIVLSNMRMQFSFEGPEKVHSSYFEGKQVSVTNDGSQLGALVSPECGDLSEPTTLKSPAPSSDFADAITELEDAFSRQVKSLAESIDDALNCRSLHTEEAPALDAARARDTEPQTALHGMDHRKLDEMTASYSDVTLYIDEEELSPPLPLSQAGDRPSSTESDLRLRAGGAAPDYWALAHKEDKADTDTSCRSTPSLERQEQRLRVEHLPLLTIEPPSDSSVDLSDRSERGSLKRQSAYERSLGGQQGSPKHGPHSGAPKSLPREEPELRPRPPRPLDSHLAINGSANRQSKSESDYSDGDNDSINSTSNSNDTINCSSESSSRDSLREQTLSKQTYHKEARNSWDSPAFSNDVIRKRHYRIGLNLFNKKPEKGVQYLIERGFVPDTPVGVAHFLLQRKGLSRQMIGEFLGNRQKQFNRDVLDCVVDEMDFSTMELDEALRKFQAHIRVQGEAQKVERLIEAFSQRYCICNPGVVRQFRNPDTIFILAFAIILLNTDMYSPNVKPERKMKLEDFIKNLRGVDDGEDIPREMLMGIYERIRKRELKTNEDHVSQVQKVEKLIVGKKPIGSLHPGLGCVLSLPHRRLVCYCRLFEVPDPNKPQKLGLHQREIFLFNDLLVVTKIFQKKKNSVTYSFRQSFSLYGMQVLLFENQYYPNGIRLTSSVPGADIKVLINFNAPNPQDRKKFTDDLRESIAEVQEMEKHRIESELEKQKGVVRPSMSQCSSLKKESGNGTLSRACLDDSYASGEGLKRSALSSSLRDLSEAGVHH

SEQ ID NO: 3919 - protein, 723 aa, Homo sapiens
LAYVHTTGQVVSFGHGPSDTSKPTHPEALTENFDISCLISAEDFVDVQVKHIFAGTYANFVTTHQDTSSTRAPGKTLPEISRISQSMAEKWIAVKRRSTEHEMAKSEIRMIFSSPACLTASFLKKRGTGETTSIDVDLEMARDTFKKLTKKEWISSMITTCLEDDLLRALPCHSPHQEALSVFLLLPECPVMHDSKNWKNLVVPFAKAVCEMSKQSLQVLKKCWAFLQESSLNPLIQMLKAAIISQLLHQTKTEQDHCNVKALLGMMKELHKVNKANCRLPENTFNINELSNLLNFYIDRGRQLFRDNHLIPAETPSPVIFSDFPFIFNSLSKIKLLQADSHIKMQMSEKKAYMLMHETILQKKDEFPPSPRFILRVRRSRLVKDALRQLSQAEATDFCKVLVVEFINEICPESGGVSSEFFHCMFEEMTKPEYGMFMYPEMGSCMWFPAKPKPEKKRYFLFGMLCGLSLFNLNVANLPFPLALYKKLLDQKPSLEDLKELSPRLGKSLQEVLDDAADDIGDALCIRFSIHWDQNDVDLIPNGISIPVDQTNKRDYVSKYIDYIFNVSVKAVYEEFQRGFYRVCEKEILRHFYPEELMTAIIGNTDYDWKQFEQNSKYEQGYQKSHPTIQLFWKAFHKLTLDEKKKFLFFLTGRDRLHARGIQKMEIVFRCPETFSERDHPTSITCHNILSLPKYSTMERMEEALQVAINNNRGFVSPMLTQS

SEQ ID NO: 3920 - protein, 91 aa, Homo sapiens
LLKYSPDPVVVRGSGHVTVFGLSNKFESEFPSSLTGKVAPEEFKASINRVNSCLKKNLPVNVRWLLCGCLCCCCTLGCSMWPVICLSKRVS

SEQ ID NO: 3921 - protein, 1200 aa, Homo sapiens
ILCKPLQTQRNYGPPVRPRMGPERTGAAPLPLLLVLALSQGILNCCLAYNVGLPEAKIFSGPSSEQFGYAVQQFINPKGNWLLVGSPWSGFPENRMGDVYKCPVDLSTATCEKLNLQTSTSIPNVTEMKTNMSLGLILTRNMGTGGFLTCGPLWAQQCGNQYYTTGVCSDISPDFQLSASFSPATQPCPSLIDVVVVCDESNSIYPWDAVKNFLEKFVQGLDIGPTKTQVGLIQYANNPRVVFNLNTYKTKEEMIVATSQTSQYGGDLTNTFGAIQYARKYAYSAASGGRRSATKVMVVVTDGESHDGSMLKAVIDQCNHDNILRFGIAVLGYLNRNALDTKNLIKEIKAIASIPTERYFFNVSDEAALLEKAGTLGEQIFSIEGTVQGGDNFQMEMSQVGFSADYSSQNDILMLGAVGAFGWSGTIVQKTSHGHLIFPKQAFDQILQDRNHSSYLGYSVAAISTGESTHFVAGAPRANYTGQIVLYSVNENGNITVIQAHRGDQIGSYFGSVLCSVDVDKDTITDVLLVGAPMYMSDLKKEEGRVYLFTIKEGILGQHQFLEGPEGIENTRFGSAIAALSDINMDGFNDVIVGSPLENQNSGAVYIYNGHQGTIRTKYSQKILGSDGAFRSHLQYFGRSLDGYGDLNGDSITDVSIGAFGQVVQLWSQSIADVAIEASFTPEKITLVNKNAQIILKLCFSAKFRPTKQNNQVAIVYNITLDADGFSSRVTSRGLFKENNERCLQKNMVVNQAQSCPEHIIYIQEPSDVVNSLDLRVDISLENPGTSPALEAYSETAKVFSIPFHKDCGEDGLCISDLVLDVRQIPAAQEQPFIVSNQNKRLTFSVTLKNKRESAYNTGIVVDFSENLFFASFSLPVDGTEVTCQVAASQKSVACDVGYPALKREQQVTFTINFDFNLQNLQNQASLSFQALSESQEENKADNLVNLKIPLLYDAEIHLTRSTNINFYEISSDGNVPSIVHSFEDVGPKFIFSLKVTTGSVPVSMATVIIHIPQYTKEKNPLMYLTGVQTDKAGDISCNADINPLKIGQTSSSVSFKSENFRHTKELNCRTASCSNVTCWLKDVHMKGEYFVNVTTRIWNGTFASSTFQTVQLTAAAEINTYNPEIYVIEDNTVTIPLMIMKPDEKAEVPTGVIIGSIIAGILLLLALVAILWKLGFFKRKYEKMTKNPDEIDETTELSS

SEQ ID NO: 3922 - protein, 60 aa, Homo sapiens
KAIQTVTELLWSVKNHGSKHLRNLLKIISFVLLLLMLLLLYLTWVFYNVVFNFNCQSLNM

SEQ ID NO: 3923 - protein, 110 aa, Homo sapiens
KTNDTYMKFSWLTVPEKSLDKEHRCIVRHENNKNGVDQEIIFPPIKTDVITMDPKDNCSKDANDTLLLQLTNTSAYYMYLLLLLKSVVYFAIITCCLLRRTAFCCNGEKS

SEQ ID NO: 3924 - protein, 341 aa, Homo sapiens
IPSPPASSPAIHPATTIAMAALIAENFRFLSLFFKSKDVMIFNGLVALGTVGSQELFSVVAFHCPCSPARNYLYGLAAIGVPALVLFIIGIILNNHTWNLVAECQHRRTKNCSAAPTFLLLSSILGRAAVAPVTWSVISLLRGEAYVCALSEFVDPSSLTAREEHFPSAHATEILARFPCKENPDNLSDFREEVSRRLRYESQLFGWLLIGVVAILVFLTKCLKHYCSPLSYRQEAYWAQYRANEDQLFQRTAEVHSRVLAANNVRRFFGFVALNKDDEELIANFPVEGTQPRPQWNAITGVYLYRENQGLPLYSRLHKWAQGLAGNGAAPDNVEMALLPS

SEQ ID NO: 3925 - protein, 52 aa, Homo sapiens
ICMCTAYCLSPVFKLYKLCFLIFPSALFWGGGYSSFGITFPPPMCFPSFEIF

SEQ ID NO: 3926 - protein, 27 aa, Homo sapiens
LKPAFVNYFFLLLLEVSHLLLIINADV

SEQ ID NO: 3927 - protein, 29 aa, Homo sapiens
VTQRKETSFQVPGLILMKVFCLMHLILYL

SEQ ID NO: 3928 - protein, 160 aa, Homo sapiens
IVAVYCPVIAAVFIVLKMVNYRLHRALDAGEVVDRTANEFTDQRTKAEQGNCSTRRKDSNGPSDPGGGIEMSEFIREATPPVGCSSRNSYAGLDPSNQIGSGSSRLGTAATIKGDTDTAKTSDDISLSLGQSSSLCKEGSEEQGKNVILYHDVIYCGDQS

SEQ ID NO: 3929 - protein, 1202 aa, Homo sapiens
LRPGERSGIIMFCSEKKLREVERIVKANDREYNEKFQYADNRIHTSKYNILTFLPINLFEQFQRVANAYFLCLLILQLIPEISSLTWFTTIVPLVLVITMTAVKDATDDYFRHKSDNQVNNRQSEVLINSKLQNEKWMNVKVGDIIKLENNQFVAADLLLLSSSEPHGLCYVETAELDGETNLKVRHALSVTSELGADISRLAGFDGIVVCEVPNNKLDKFMGILSWKDSKHSLNNEKIILRGCILRNTSWCFGMVIFAGPDTKLMQNSGKTKFKRTSIDRLMNTLVLWIFGFLICLGIILAIGNSIWESQTGDQFRTFLFWNEGEKSSVFSGFLTFWSYIIILNTVVPISLYVSVEVIRLGHSYFINWDRKMYYSRKAIPAVARTTTLNEELGQIEYIFSDKTGTLTQNIMTFKRCSINGRIYGEVHDDLDQKTEITQEKEPVDFSVKSQADREFQFFDHHLMESIKMGDPKVHEFLRLLALCHTVMSEENSAGELIYQVQSPDEGALVTAARNFGFIFKSRTPETITIEELGTLVTYQLLAFLDFNNTRKRMSVIVRNPEGQIKLYSKGADTILFEKLHPSNEVLLSLTSDHLSEFAGEGLRTLAIAYRDLDDKYFKEWHKMLEDANAATEERDERIAGLYEEIERDLMLLGATAVEDKLQEGVIETVTSLSLANIKIWVLTGDKQETAINIGYACNMLTDDMNDVFVIAGNNAVEVREELRKAKQNLFGQNRNFSNGHVVCEKKQQLELDSIVEETITGDYALIINGHSLAHALESDVKNDLLELACMCKTVICCRVTPLQKAQVVELVKKYRNAVTLAIGDGANDVSMIKSAHIGVGISGQEGLQAVLASDYSFAQFRYLQRLLLVHGRWSYFRMCKFLCYFFYKNFAFTLVHFWFGFFCGFSAQTVYDQWFITLFNIVYTSLPVLAMGIFDQDVSDQNSVDCPQLYKPGQLNLLFNKRKFFICVLHGIYTSLVLFFIPYGAFYNVAGEDGQHIADYQSFAVTMATSLVIVVSVQIALDTSYWTFINHVFIWGSIAIYFSILFTMHSNGIFGIFPNQFPFVGNARHSLTQKCIWLVILLTTVASVMPVVAFRFLKVDLYPTLSDQIRRWQKAQKKARPPSSRRPRTRRSSSRRSGYAFAHQEGYGELITSGKNMRAKNPPPTSGLEKTHYNSTSWIENLCKKTTDTVSSFSQDKTVKL

SEQ ID NO: 3930 - protein, 745 aa, Homo sapiens
VRRVMEPLTASRLQVRKKNSLKDCVAVAGPLGVTHFLILSKTETNVYFKLMRLPGGPTLTFQVKKYSLVRDVVSSLRRHRMHEQQFAHPPLLVLNSFGPHGMHVKLMATMFQNLFPSINVHKVNLNTIKRCLLIDYNPDSQELDFRHYSIKVVPVGASRGMKKLLQEKFPNMSRLQDISELLATGAGLSESEAEPDGDHNITELPQAVAGRGNMRAQQSAVRLTEIGPRMTLQLIKVQEGVGEGKVMFHSFVSKTEEELQAILEAKEKKLRLKAQRQAQQAQNVQRKQEQREAHRKKSLEGMKKARVGGSDEEASGIPSRTASLELGEDDDEQEDDDIEYFCQAVGEAPSEDLFPEAKQKRLAKSPGRKRKRWEMDRGAKSCPANFLAAADDKLSGFQGDFLWPILVVEFLVAVASNGLALYRFSIRKQRPWHPAVVFSVQLAVSDLLCALTLPPLAAYLYPPKHWRYGEAACRLERFLFTCNLLGSVIFITCISLNRYLGIVHPFFARSHLRPKHAWAVSAAGWVLAALLAMPTLSFSHLKRPQQGAGNCSVARPEACIKCLGTADHGLAAYRAYSLVLAGLGCGLPLLLTLAAYGALGRAVLRSPGMTVAEKLRVAALVASGVALYASSYVPYHIMRVLNVDARRRWSTRCPSFADIAQATAALELGPYVGYQVMRGLMPLAFCVHPLLYMAAVPSLGCCCRHCPGYRDSWNPEDAKSTGQALPLNATAAPKPSEPQSRELSQ

SEQ ID NO: 3931 - protein, 76 aa, Homo sapiens
LTVVLLAVAACVLLLTSAQLGLHIWQLRSQCMWPRETQLLLEVPPSTEDARSCQFPEEERGERSAEEKGRLGDLWV

SEQ ID NO: 3932 - protein, 37 aa, Homo sapiens
IFYYSTGMTVGIVASLLIIIFILSKFMPKVMSSQLDS

SEQ ID NO: 3933 - protein, 48 aa, Homo sapiens
RGRGEGVRDKSPSFLCFFFSFAFSSFIFLFVCIFFPLLVEVRFPPTRP

SEQ ID NO: 3934 - protein, 985 aa, Homo sapiens
MKEFVSTVMEQLKKSKTLFSLMQYSEEFRIHFTFKEFQNNPNPRSLVKPITQLLGRTHTATGIRKVVRELFNITNGARKNAFKILVVITDGEKFGDPLGYEDVIPEADREGVIRYVIGVGDAFRSEKSRQELNTIASKPPRDHVFQVNNFEALKTIQNQLREKIFAIEGTQTGSSSSFEHEMSQEGFSAAITSNGPLLSTVGSYDWAGGVFLYTSKEKSTFINMTRVDSDMNDAYLGYAAAIILRNRVQSLVLGAPRYQHIGLVAMFRQNTGMWESNANVKGTQIGAYFGASLCSVDVDSNGSTDLVLIGAPHYYEQTRGGQVSVCPLPRGQRARWQCDAVLYGEQGQPWGRFGAALTVLGDVNGDKLTDVAIGAPGEEDNRGAVYLFHGTSGSGISPSHSQRIAGSKLSPRLQYFGQSLSGGQDLTMDGLVDLTVGAQGHVLLLRSQPVLRVKAIMEFNPREVARNVFECNDQVVKGKEAGEVRVCLHVQKSTRDRLREGQIQSVVTYDLALDSGRPHSRAVFNETKNSTRRQTQVLGLTQTCETLKLQLPNCIEDPVSPIVLRLNFSLVGTPLSAFGNLRPVLAEDAQRLFTALFPFEKNCGNDNICQDDLSITFSFMSLDCLVVGGPREFNVTVTVRNDGEDSYRTQVTFFFPLDLSYRKVSTLQNQRSQRSWRLACESASSTEVSGALKSTSCSINHPIFPENSEVTFNITFDVDSKASLGNKLLLKANVTSENNMPRTNKTEFQLELPVKYAVYMVVTSHGVSTKYLNFTASENTSRVMQHQYQVSNLGQRSLPISLVFLVPVRLNQTVIWDRPQVTFSENLSSTCHTKERLPSHSDFLAELRKAPVVNCSIAVCQRIQCDIPFFGIQEEFNATLKGNLSFDWYIKTSHNHLLIVSTAEILFNDSVFTLLPGQGAFVRSQTETKVEPFEVPNPLPLIVGSSVGGLLLLALITAALYKLGFFKRQYKDMMSEGGPPGAEPQ

SEQ ID NO: 3935 - protein, 863 aa, Homo sapiens
LMAHTFRGCSLAFMFIITWLLIKAKIDACKRGDVTVKPSHVILLGSTVNITCSLKPRQGCFHYSRRNKLILYKFDRRINFHHGHSLNSQVTGLPLGTTLFVCKLACINSDEIQICGAEIFVGVAPEQPQNLSCIQKGEQGTVACTWERGRDTHLYTEYTLQLSGPKNLTWQKQCKDIYCDYLDFGINLTPESPESNFTAKVTAVNSLGSSSSLPSTFTFLDIVRPLPPWDIRIKFQKASVSRCTLYWRDEGLVLLNRLRYRPSNSRLWNMVNVTKAKGRHDLLDLKPFTEYEFQISSKLHLYKGSWSDWSESLRAQTPEEEPTGMLDVWYMKRHIDYSRQQISLFWKNLSVSEARGKILHYQVTLQELTGGKAMTQNITGHTSWTTVIPRTGNWAVAVSAANSKGSSLPTRINIMNLCEAGLLAPRQVSANSEGMDNILVTWQPPRKDPSAVQEYVVEWRELHPGGDTQVPLNWLRSRPYNVSALISENIKSYICYEIRVYALSGDQGGCSSILGNSKHKAPLSGPHINAITEEKGSILISWNSIPVQEQMGCLLHYRIYWKERDSNSQPQLCEIPYRVSQNSHPINSLQPRVTYVLWMTALTAAGESSHGNEREFCLQGKANWMAFVAPSICIAIIMVGIFSTHYFQQKVFVLLAALRPQWCSREIPDPANSTCAKKYPIAEEKTQLPLDRLLIDWPTPEDPEPLVISEVLHQVTPVFRHPPCSNWPQREKGIQGHQASEKDMMHSASSPPPPRALQAESRQLVDLYKVLESRGSDPKPENPACPWTVLPAGDLPTHDGYLPSNIDDLPSHEAPLADSLEELEPQHISLSVFPSSSLHPLTFSCGDKLTLDQLKMRCDSLML

SEQ ID NO: 3936 - protein, 361 aa, Homo sapiens
VVTLILLLLLKVYQGKGCQGSADHVVSISGVPLQLQPNSIQTKVDSIAWKKLLPSQNGFHHILKWENGSLPSNTSNDRFSFIVKNLSLLIKAAQQQDSGLYCLEVTSISGKVQTATFQVFVFDKVEKPRLQGQGKILDRGRCQVALSCLVSRDGNVSYAWYRGSKLIQTAGNLTYLDEEVDINGTHTYTCNVSNPVSWESHTLNLTQDCQNAHQEFRFWPFLVIIVILSALFLGTLACFCVWRRKRKEKQSETSPKEFLTIYEDVKDLKTRRNHEQEQTFPGGGSTIYSMIQSQSSAPTSQEPAYTLYSLIQPSRKSGSRKRNHSPSFNSTIYEVIGKSQPKAQNPARLSRKELENFDVYS

SEQ ID NO: 3937 - protein, 841 aa, Homo sapiens
VFGIPSCSFDGRIAFYRFCNLTQVPQVLNTTERLLLSFNYIRTVTASSFPFLEQLQLLELGSQYTPLTIDKEAFRNLPNLRILDLGSSKIYFLHPDAFQGLFHLFELRLYFCGLSDAVLKDGYFRNLKALTRLDLSKNQIRSLYLHPSFGKLNSLKSIDFSSNQIFLVCEHELEPLQGKTLSFFSLAANSLYSRVSVDWGKCMNPFRNMVLEILDVSGNGWTVDITGNFSNAISKSQAFSLILAHHIMGAGFGFHNIKDPDQNTFAGLARSSVRHLDLSHGFVFSLNSRVFETLKDLKVLNLAYNKINKIADEAFYGLDNLQVLNLSYNLLGELYSSNFYGLPKVAYIDLQKNHIAIIQDQTFKFLEKLQTLDLRDNALTTIHFIPSIPDIFLSGNKLVTLPKINLTANLIHLSENRLENLDILYFLLRVPHLQILILNQNRFSSCSGDQTPSENPSLEQLFLGENMLQLAWETELCWDVFEGLSHLQVLYLNHNYLNSLPPGVFSHLTALRGLSLNSNRLTVLSHNDLPANLEILDISRNQLLAPNPDVFVSLSVLDITHNKFICECELSTFINWLNHTNVTIAGPPADIYCVYPDSFSGVSLFSLSTEGCDEEEVLKSLKFSLFIVCTVTLTLFLMTILTVTKFRGFCFICYKTAQRLVFKDHPQGTEPDMYKYDAYLCFSSKDFTWVQNALLKHLDTQYSDQNRFNLCFEERDFVPGENRIANIQDAIWNSRKIVCLVSRHFLRDGWCLEAFSYAQGRCLSDLNSALIMVVVGSLSQYQLMKHQSIRGFVQKQQYLRWPEDLQDVGWFLHKLSQQILKKEKEKKKDNNIPLQTVATIS

SEQ ID NO: 3938 - protein, 60 aa, Homo sapiens
KKNCVVWQEVDYLPREWELLVQRPKQPNATAALWVASVSLSFAFLLFHICKEKNYISVVL

SEQ ID NO: 3939 - protein, 486 aa, Homo sapiens
LCGKDFKSSCQTPGREKERRLATMHGSCSFLMLLLPLLLLLVATTGPVGALTDEEKRLMVELHNLYRAQVSPTASDMLHMRWDEELAAFAKAYARQCVWGHNKERGRRGENLFAITDEGMDVPLAMEEWHHEREHYNLSAATCSPGQMCGHYTQVVWAKTERIGCGSHFCEKLQGVEETNIELLVCNYEPPGNVKGKRPYQEGTPCSQCPSGYHCKNSLCEPIGSPEDAQDLPYLVTEAPSFRATEASDSRKMGTPSSLATGIPAFLVTEVSGSLATKALPAVETQAPTSLATKDPPSMATEAPPCVTTEVPSILAAHSLPSLDEEPVTFPKSTHVPIPKSADKVTDKTKVPSRSPENSLDPKMSLTGARELLPHAQEEAEAEAELPPSSEVLASVFPAQDKPGELQATLDHTGHTSSKSLPNFPNTSATANATGGRALALQSSLPGAEGPDKPSVVSGLNSGPGHVWGPLLGLLLLPPLVLAGIF

SEQ ID NO: 3940 - protein, 75 aa, Homo sapiens
LHSWTQPAAPAMDRWYLGGSPKGDVDPFYYDYETVRNGGLIFAGLAFIVGLLILLSRRFRCGGNKKRRQINEDEP

SEQ ID NO: 3941 - protein, 491 aa, Homo sapiens
KFPSAVKLFGKRLEGPMAAKSQPNIPKAKSLDGVTNDRTASQGQWGRAWEVDWFSLASVIFLLLFAPFIVYYFIMACDQYSCALTGPVVDIVTGHARLSDIWAKTPPITRKAAQLYTLWVTFQVLLYTSLPDFCHKFLPGYVGGIQEGAVTPAGVVNKYQINGLQAWLLTHLLWFANAHLLSWFSPTIIFDNWIPLLWCANILGYAVSTFAMVKGYFFPTSARDCKFTGNFFYNYMMGIEFNPRIGKWFDFKLFFNGRPGIVAWTLINLSFAAKQRELHSHVTNAMVLVNVLQAIYVIDFFWNETWYLKTIDICHDHFGWYLGWGDCVWLPYLYTLQGLYLVYHPVQLSTPHAVGVLLLGLVGYYIFRVANHQKDLFRRTDGRCLIWGRKPKVIECSYTSADGQRHHSKLLVSGFWGVARHFNYVGDLMGSLAYCLACGGGHLLPYFYIIYMAILLTHRCLRDEHRCASKYGRDWERYTAAVPYRLLPGIF

SEQ ID NO: 3942 - protein, 155 aa, Homo sapiens
ICLILMASVVTIVVIPSTLIQRHNNSSLNTRTQKARHCGHCPEEWITYSNSCYYIGKERRTWEESLLACTSKNSSLLSIDNEEEMKFLSIISPSSWIGVFRNSSHHPWVTMNGLAFKHEIKDSDNAELNCAVLQVNRLKSAQCGSSIIYHCKHKL

SEQ ID NO: 3943 - protein, 188 aa, Homo sapiens
KLTAEVLGIICIVLMATVLKTIVLIPFLEQNNSSPNARTQKARHCGHCPEEWITYSNSCYYIGKERRTWEESLQACASKNSSSLLCIDNEEEMKFLASILPSSWIGVFRNSSHHPWVTINGLAFKHEIKDSDHAERNCAMLHVRGLISDQCGSSRIIVSISFRIKALELAVHQIKFYICSNRNDIMIA

SEQ ID NO: 3944 - protein, 1193 aa, Homo sapiens
IMFCSEKKLREVERIVKANDREYNEKFQYADNRIHTSKYNILTFLPINLFEQFQRVANAYFLCLLILQLIPEISSLTWFTTIVPLVLVITMTAVKDATDDYFRHKSDNQVNNRQSEVLINSKLQNEKWMNVKVGDIIKLENNQFVAADLLLLSSSEPHGLCYVETAELDGETNLKVRHALSVTSELGADISRLAGFDGIVVCEVPNNKLDKFMGILSWKDSKHSLNNEKIILRGCILRNTSWCFGMVIFAGPDTKLMQNSGKTKFKRTSIDRLMNTLVLWIFGFLICLGIILAIGNSIWESQTGDQFRTFLFWNEGEKSSVFSGFLTFWSYIIILNTVVPISLYVSVEVIRLGHSYFINWDRKMYYSRKAIPAVARTTTLNEELGQIEYIFSDKTGTLTQNIMTFKRCSINGRIYGEVHDDLDQKTEITQEKEPVDFSVKSQADREFQFFDHHLMESIKMGDPKVHEFLRLLALCHTVMSEENSAGELIYQVQSPDEGALVTAARNFGFIFKSRTPETITIEELGTLVTYQLLAFLDFNNTRKRMSVIVRNPEGQIKLYSKGADTILFEKLHPSNEVLLSLTSDHLSEFAGEGLRTLAIAYRDLDDKYFKEWHKMLEDANAATEERDERIAGLYEEIERDLMLLGATAVEDKLQEGVIETVTSLSLANIKIWVLTGDKQETAINIGYACNMLTDDMNDVFVIAGNNAVEVREELRKAKQNLFGQNRNFSNGHVVCEKKQQLELDSIVEETITGDYALIINGHSLAHALESDVKNDLLELACMCKTVICCRVTPLQKAQVVELVKKYRNAVTLAIGDGANDVSMIKSAHIGVGISGQEGLQAVLASDYSFAQFRYLQRLLLVHGRWSYFRMCKFLCYFFYKNFAFTLVHFWFGFFCGFSAQTVYDQWFITLFNIVYTSLPVLAMGIFDQDVSDQNSVDCPQLYKPGQLNLLFNKRKFFICVLHGIYTSLVLFFIPYGAFYNVAGEDGQHIADYQSFAVTMATSLVIVVSVQIALDTSYWTFINHVFIWGSIAIYFSILFTMHSNGIFGIFPNQFPFVGNARHSLTQKCIWLVILLTTVASVMPVVAFRFLKVDLYPTLSDQIRRWQKAQKKARPPSSRRPRTRRSSSRRSGYAFAHQEGYGELITSGKNMRAKNPPPTSGLEKTHYNSTSWIENLCKKTTDTVSSFSQDKTVKL

SEQ ID NO: 3945 - protein, 34 aa, Homo sapiens
ISWTDKDQNAKISADSIICLLMFLLWLCLFSVLL

SEQ ID NO: 3946 - protein, 263 aa, Homo sapiens
VHCSVFYLEYGWKDSTPAYGHWFREGVSVDQETPVATNNSTQKVQKETQGRFHLLGDPSRNNCSLSIRDARRRDNGSYFFWVARGRTKFSYKYSPLSVYVTALTHRPDILIPEFLKSGHPSNLTCSVPWVCEQGTPPIFSWMSAAPTSLGPRTLHSSVLTIIPRPQDHGTNLICQVTFPGAGVTTERTIQLSVSYPLMNPVIEASLEDGTGKSGTVEEVVVLAVGVVAVKILLLCLCLIILSFHKKKAVRAVEVEENVYAVMG

SEQ ID NO: 3947 - protein, 474 aa, Homo sapiens
RQPRDTAVPTPSEHPKPDAATPRRGPQGHGRGHPVVQVEPPCVCMTLTSRRQDSQEARPECQAWTGTLLLGTCLLYCARSSMPICTVSMSQDFGWNKKEAGIVLSSFFWGYCLTQVVGGHLGDRIGGEKVILLSASAWGSITAVTPLLAHLSSAHLAFMTFSRILMGLLQGVYFPALTSLLSQKVRESERAFTYSIVGAGSQFGTLLTGAVGSLLLEWYGWQSIFYFSGGLTLLWVWYVYRYLLSEKDLILALGVLAQSRPVSRHNRVPWRRLFRKPAVWAAVVSQLSAACSFFILLSWLPTFFEETFPDAKGWIFNVVPWLVAIPASLFSGFLSDHLINQGYRAITVRKLMQGMGLGLSSVFALCLGHTSSFCESVVFASASIGLQTFNHSGISVNIQDLAPSCAGFLFGVANTAGALAGVVGVCLGGYLMETTGSWTCLFNLVAIISNLGLCTFLVFGQAQRVDLSSTHEDL

SEQ ID NO: 3948 - protein, 211 aa, Homo sapiens
ISELEEEEEEEAATSSSSPSSSSSVSGPDDDEEDEEEEEEEEEEEEEEEEEEEEEAPPPPRVVSEEHLRRYAPDPVLVRGAGHITVFGLSNKFDTEFPSVLTGKVAPEEFKTSIGRVNACLKKALPVNVKWLLCGCLCCCCTLGCSLWPVICLNKRTRRSIQKLIEWENNRLYHKLALHWKLTKRKCETSNMMEYVILIEFLPKYPIFRPD

SEQ ID NO: 3949 - protein, 60 aa, Homo sapiens
MLRALVAANFNTVYIYTAEVLMSASILGALCLFSSVCVVCAISAFTLPIETKGRALQQIK

SEQ ID NO: 3950 - protein, 662 aa, Homo sapiens
IVATHPPLPYPRALEQQLAADHRHSEDMSVGVSTSAPLSPTSGTSVGMSTFSIMDYVVFVLLLVLSLAIGLYHACRGWGRHTVGELLMADRKMGCLPVALSLLATFQSAVAILGVPSEIYRFGTQYWFLGCCYFLGLLIPAHIFIPVFYRLHLTSAYEYLELRFNKTVRVCGTVTFIFQMVIYMGVVLYAPSLALNAVTGFDLWLSVLALGIVCTVYTALGGLKAVIWTDVFQTLVMFLGQLAVIIVGSAKVGGLGRVWAVASQHGRISGFELDPDPFVRHTFWTLAFGGVFMMLSLYGVNQAQVQRYLSSRTEKAAVLSCYAVFPFQQVSLCVGCLIGLVMFAYYQEYPMSIQQAQAAPDQFVLYFVMDLLKGLPGLPGLFIACLFSGSLSTISSAFNSLATVTMEDLIRPWFPEFSEARAIMLSRGLAFGYGLLCLGMAYISSQMGPVLQAAISIFGMVGGPLLGLFCLGMFFPCANPPGAVVGLLAGLVMAFWIGIGSIVTSMGSSMPPSPSNGSSFSLPTNLTVATVTTLMPLTTFSKPTGLQRFYSLSYLWYSAHNSTTVIVVGLIVSLLTGRMRGRSLNPATIYPVLPKLLSLLPLSCQKRLHCRSYGQDHLDTGLFPEKPRNGVLGDSRDKEAMALDGTAYQGSSSTCILQETSL

SEQ ID NO: 3951 - protein, 570 aa, Homo sapiens
TSCPRQRSQFLLGAGCPAPLETAPPRSMGTSLSPNDPWPLNPLSIQQTTLLLLLSVLATVHVGQRLLRQRRRQLRSAPPGPFAWPLIGNAAAVGQAAHLSFARLARRYGDVFQIRLGSCPIVVLNGERAIHQALVQQGSAFADRPAFASFRVVSGGRSMAFGHYSEHWKVQRRAAHSMMRNFFTRQPRSRQVLEGHVLSEARELVALLVRGSADGAFLDPRPLTVVAVANVMSAVCFGCRYSHDDPEFRELLSHNEEFGRTVGAGSLVDVMPWLQYFPNPVRTVFREFEQLNRNFSNFILDKFLRHCESLRPGAAPRDMMDAFILSAEKKAAGDSHGGGARLDLENVPATITDIFGASQDTLSTALQWLLLLFTRYPDVQTRVQAELDQVVGRDRLPCMGDQPNLPYVLAFLYEAMRFSSFVPVTIPHATTANTSVLGYHIPKDTVVFVNQWSVNHDPLKWPNPENFDPARFLDKDGLINKDLTSRVMIFSVGKRRCIGEELSKMQLFLFISILAHQCDFRANPNEPAKMNFSYGLTIKPKSFKVNVTLRESMELLDSAVQNLQAKETCQ

SEQ ID NO: 3952 - protein, 32 aa, Homo sapiens
RLRLQFLAYLCSLILSCLFVVLKGRSFVLWVC

SEQ ID NO: 3953 - protein, 62 aa, Homo sapiens
LPPCRLTWPSPVNTPPEGLCFLFASNHIFSIEKSFLSPVHYESEVYFFFVFFFVPVYFKCIF

SEQ ID NO: 3954 - protein, 283 aa, Homo sapiens
RQGTSPSKCPYLNFFQLLVLAGLSHFCSGVIHVTKEVKEVATLSCGHNVSVEELAQTRIYWQKEKKMVLTMMSGDMNIWPEYKNRTIFDITNNLSIVILALRPSDEGTYECVVLKYEKDAFKREHLAEVTLSVKADFPTPSISDFEIPTSNIRRIICSTSGGFPEPHLSWLENGEELNAINTTVSQDPETELYAVSSKLDFNMTTNHSFMCLIKYGHLRVNQTFNWNTTKQEHFPDNLLPSWAITLISVNGIFVICCLTYCFAPRCRERRRNERLRRESVRPV

SEQ ID NO: 3955 - protein, 752 aa, Homo sapiens
LCPVLGTRDGRHAPRSIVSLIWVPGRCGRRAGSARVTPAAGAPGPAGAGRGVPGRAAAMKHLKRWWSAGGGLLHLTLLLSLAGLRVDLDLYLLLPPPTLLQDELLFLGGPASSAYALSPFSASGGWGRAGHLHPKGRELDPAAPPEGQLLREVRALGVPFVPRTSVDAWLVHSVAAGSADEAHGLLGAAAASSTGGAGASVDGGSQAVQGGGGDPRAARSGPLDAGEEEKAPAEPTAQVPDAGGCASEENGVLREKHEAVDHSSQHEENEERVSAQKENSLQQNDDDENKIAEKPDWEAEKTTESRNERHLNGTDTSFSLEDLFQLLSSQPENSLEGISLGDIPLPGSISDGMNSSAHYHVNFSQAISQDVNLHEAILLCPNNTFRRDPTARTSQSQEPFLQLNSHTTNPEQTLPGTNLTGFLSPVDNHMRNLTSQDLLYDLDINIFDEINLMSLATEDNFDPIDVSQLFDEPDSDSGLSLDSSHNNTSVIKSNSSHSVCDEGAIGYCTDHESSSHHDLEGAVGGYYPEPSKLCHLDQSDSDFHGDLTFQHVFHNHTYHLQPTAPESTSEPFPWPGKSQKIRSRYLEDTDRNLSRDEQRAKALHIPFSVDEIVGMPVDSFNSMLSRYYLTDLQVSLIRDIRRRGKNKVAAQNCRKRKLDIILNLEDDVCNLQAKKETLKREQAQCNKAINIMKQKLHDLYHDIFSRLRDDQGRPVNPNHYALQCTHDGSILIVPKELVASGHKKETQKGKRK

SEQ ID NO: 3956 - protein, 269 aa, Homo sapiens
VRAQDGAAVVRNPGLSASQEATPGANMSSGTELLWPGAALLVLLGVAASLCVRCSRPGAKRSEKIYQQRSLREDQQSFTGSRTYSLVGQAWPGPLADMAPTRKDKLLQFYPSLEDPASSRYQNFSKGSRHGSEEAYIDPIAMEYYNWGRFSKPPEDDDANSYENVLICKQKTTETGAQQEGIGGLCRGDLSLSLALKTGPTSGLCPSASPEEDEESEDYQNSASIHQWRESRKVMGQLQREASPGPVGSPDEEDGEPDYVNGEVAATEA

SEQ ID NO: 3957 - protein, 66 aa, Homo sapiens
MRALGMGTSGSLCRIGAMVAPFISQVLMSASILGALCLFSSVCVVCAISAFTLPIETKGRALQQIK

SEQ ID NO: 3958 - protein, 913 aa, Homo sapiens
LGWQLRLVAMEWGSESAAVRRHRVGVERREGAAAAPPPEREARAQEPLVDGCSGGGRTRKRSPGGSGGASRGAGTGLSEVRAALGLALYLIALRTLVQLSLQQLVLRGAAGHRGEFDALQARDYLEHITSIGPRTTGSPENEILTVHYLLEQIKLIEVQSNSLHKISVDVQRPTGSFSIDFLGGFTSYYDNITNVVVKLEPRDGAQHAVLANCHFDSVANSPGASDDAVSCSVMLEVLRVLSTSSEALHHAVIFLFNGAEENVLQASHGFITQHPWASLIRAFINLEAAGVGGKELVFQTGPENPWLVQAYVSAAKHPFASVVAQEVFQSGIIPSDTDFRIYRDFGNIPGIDLAFIENGYIYHTKYDTADRILTDSIQRAGDNILAVLKHLATSDMLAAASKYRHGNMVFFDVLGLFVIAYPSRIGSIINYMVVMGVVLYLGKKFLQPKHKTGNYKKDFLCGLGITLISWFTSLVTVLIIAVFISLIGQSLSWYNHFYVSVCLYGTATVAKIILIHTLAKRFYYMNASAQYLGEVFFDISLFVHCCFLVTLTYQGLCSAFISAVWVAFPLLTKLCVHKDFKQHGAQGKFIAFYLLGMFIPYLYALYLIWAVFEMFTPILGRSGSEIPPDVVLASILAGCTMILSSYFINFIYLAKSTKKTMLTLTLVCAITFLLVCSGTFFPYSSNPANPKPKRVFLQHMTRTFHDLEGNAVKRDSGIWINGFDYTGISHITPHIPEINDSIRAHCEENAPLCGFPWYLPVHFLIRKNWYLPAPEVSPRNPPHFRLISKEQTPWDSIKLTFEATGPSHMSFYVRAHKGSTLSQWSLGNGTPVTSKGGDYFVFYSHGLQASAWQFWIEVQVSEEHPEGMVTVAIAAHYLSGEDKRSPQLDALKEKFPDWTFPSAWVCTYDLFVF

SEQ ID NO: 3959 - protein, 34 aa, Homo sapiens
VTPGPCRLQVGNCAVLLCYGLWLDCLLLPNWLAR

SEQ ID NO: 3960 - protein, 35 aa, Homo sapiens
KGNNQMASLKPAFVNYFFLLLLEVSHLLLIINADV

SEQ ID NO: 3961 - protein, 170 aa, Homo sapiens
LLFLRLYPVLTKAATSGILSALGNFLAQMIEKKRKKENSRSLDVGGPLRYAVYGFFFTGPLSHFFYFFMEHWIPPEVPLAGLRRLLLDRLVFAPAFLMLFFLIMNFLEGKDASAFAAKMRGGFWPALRMNWRVWTPLQFININYVPLKFRVLFANLAALFWYAYLASLGK

SEQ ID NO: 3962 - protein, 135 aa, Homo sapiens
IDLQPGSSDPRSQPINLNHYATKKSVAESMLDVALFMSNAMRLKAVLEQGPSSHYYTTLVTLISLSLLLQVVIGVLLVVIARLNLNEVEKQWRLNQLNNAATILVFFTVVINVFITAFGAHKTGFLAARASRNPL

SEQ ID NO: 3963 - protein, 163 aa, Homo sapiens
IICIVLMATVLKTIVLIPFLEQNNFSPNTRTQKARHCGHCPEEWITYSNSCYYIGKERRTWEESLQACASKNSSSLLCIDNEEEMKFLASILPSSWIGVFRNSSHHPWVTINGLAFKHEIKDSDHAERNCAMLHVRGLISDQCGSSRIIRRGFIMLTRLVLNS

SEQ ID NO: 3964 - protein, 180 aa, Homo sapiens
IICIVLMATVLKTIVLIPFLEQNNSSPNARTQKARHCGHCPEEWITYSNSCYYIGKERRTWEESLQACASKNSSSLLCIDNEEEMKFLASILPSSWIGVFRNSSHHPWVTINGLAFKHEIKDSDHAERNCAMLHVRGLISDQCGSSRIIVSISFRIKALELAVHQIKFYICSNRNDIMIA

SEQ ID NO: 3965 - protein, 769 aa, Homo sapiens
TEGPAPSPACTEAIAKALRLIQPGTHIPPTGSPAPQPLPVPAEMLLPRSVSSERAPGVPEPEELWEAEMERLRGSGTPVRGLPYAMMDKRLIWQLREPAGVQTLRWQRWQRRRQTVERRLREAAQRLARGLGLWEGALYEIGGLFGTGIRSYFTFLRFLLLLNLLSLLLTASFVLLPLVWLRPPDPGPTLNLTLQCPGSRQSPPGVLRFHNQLWHVLTGRAFTNTYLFYGAYRVGPESSSVYSIRLAYLLSPLACLLLCFCGTLRRMVKGLPQKTLLGQGYQAPLSAKVFSSWDFCIRVQEAATIKKHEISNEFKVELEEGRRFQLMQQQTRAQTACRLLSYLRVNVLNGLLVVGAISAIFWATKYSQDNKEESLFLLLQYLPPGVIALVNFLGPLLFTFLVQLENYPPNTEVNLTLIWCVVLKLASLGMFSVSLGQTILCIGRDKSSCESYGYNVCDYQCWENSVGEELYKLSIFNFLLTVAFAFLVTLPRRLLVDRFSGRFWAWLEREEFLVPKNVLDIVAGQTVTWMGLFYCPLLPLLNSVFLFLTFYIKKYTLLKNSRASSRPFRASSSTFFFQLVLLLGLLLAAVPLGYVVSSIHSSWDCGLFTNYSAPWQVVPELVALGLPPIGQRALHYLGSHAFSFPLLIMLSLVLTVCVSQTQANARAIHRLRKQLVWQVQEKWHLVEDLSRLLPEPGPSDSPGPKYPASQASRPQSFCPGCPCPGSPGHQAPRPGPSVVDAAGLRSPCPGQHGAPASARRFRFPSGAEL

SEQ ID NO: 3966 - protein, 67 aa, Homo sapiens
RKSSYLQELHHNLEGSSWSCEFSLYSVTIPDHLIKMLPPSIGFIELVTSYCCIAFFSFFSCTLNNLT

SEQ ID NO: 3967 - protein, 135 aa, Homo sapiens
VPVVSGSPVGSSGRLMASSSSLVPDRLRLPLCFLGVFVCYFYYGILQEKITRGKYGEGAKQETFTFALTLVFIQCVINAVFAKIWWIVPGAGSMLPVLSPIWVPWSPAIQHYSLSTTQLRSLVNPASQSQSCSLG

SEQ ID NO: 3968 - protein, 267 aa, Homo sapiens
LCIFVHCSVFYLEYGWKDSTPAYGHWFREGVSVDQETPVATNNSTQKVQKETQGRFHLLGDPSRNNCSLSIRDARRRDNGSYFFWVARGRTKFSYKYSPLSVYVTALTHRPDILIPEFLKSGHPSNLTCSVPWVCEQGTPPIFSWMSAAPTSLGPRTLHSSVLTIIPRPQDHGTNLICQVTFPGAGVTTERTIQLSVSYPLMNPVIEASLEDGTGKSGTVEEVVVLAVGVVAVKILLLCLCLIILSFHKKKAVRAVEVEENVYAVMG

SEQ ID NO: 3969 - protein, 442 aa, Homo sapiens
LSTPSPMQPPPDEARRDMAGDTQWSRPECQAWTGTLLLGTCLLYCARSSMPICTVSMSQDFGWNKKEAGIVLSSFFWGYCLTQVVGGHLGDRIGGEKVILLSASAWGSITAVTPLLAHLSSAHLAFMTFSRILMGLLQGVYFPALTSLLSQKVRESERAFTYSIVGAGSQFGTLLTGAVGSLLLEWYGWQSIFYFSGGLTLLWVWYVYRYLLSEKDLILALGVLAQSRPVSRHNRVPWRRLFRKPAVWAAVVSQLSAACSFFILLSWLPTFFEETFPDAKGWIFNVVPWLVAIPASLFSGFLSDHLINQGYRAITVRKLMQGMGLGLSSVFALCLGHTSSFCESVVFASASIGLQTFNHSGISVNIQDLAPSCAGFLFGVANTAGALAGVVGVCLGGYLMETTGSWTCLFNLVAIISNLGLCTFLVFGQAQRVDLSSTHEDL

SEQ ID NO: 3970 - protein, 393 aa, Homo sapiens
VTRGCTFSTAVVSPSAMTQEPFREELAYDRMPTLERGRQDPASYAPDAKPSDLQLSKRLPPCFSHKTWVFSVLMGSCLLVTSGFSLYLGNVFPAEMDYLRCAAGSCIPSAIVSFTVSRRNANVIPNFQILFVSTFAVTTTCLIWFGCKLVLNPSAININFNLILLLLLELLMAATVIIAARSSEEDCKKKKGSMSDSANILDEVPFPARVLKSYSVVEVIAGISAVLGGIIALNVDDSVSGPHLSVTFFWILVACFPSAIASHVAAECPSKCLVEVLIAISSLTSPLLFTASGYLSFSIMRIVEMFKDYPPAIKPSYDVLLLLLLLVLLLQAGLNTGTAIQCVRFKVSARLQGASWDTQNGPQERLAGEVARSPLKEFDKEKAWRAVVVQMAQ

SEQ ID NO: 3971 - protein, 131 aa, Homo sapiens
KFIQSSGQPVPLVVESCIRFINLNGLQHEGIFRVSGAQLRVSEIRDAFERGEDPLVEGCTAHDLDSVAGVLKLYFRSLEPPLFPPDLFGELLASSELEATAERVEHVSRLLWRLPAPVLVVLRYLFTFLNQ

SEQ ID NO: 3972 - protein, 457 aa, Homo sapiens
MLKNVVALDVEVATNRIYWCDLSYRKIYSAYMDKASDPKEQEVLIDEQLHSPEGLAVDWVHKHIYWTDSGNKTISVATVDGGRRRTLFSRNLSEPRAIAVDPLRGFMYWSDWGDQAKIEKSGLNGVDRQTLVSDNIEWPNGITLDLLSQRLYWVDSKLHQLSSIDFSGGNRKTLISSTDFLSHPFGIAVFEDKVFWTDLENEAIFSANRLNGLEISILAENLNNPHDIVIFHELKQPRAPDACELSVQPNGGCEYLCLPAPQISSHSPKYTCACPDTMWLGPDMKRCYRAPQSTSTTTLASTMTRTVPATTRAPGTTVHRSTYQNHSTETPSLTAAVPSSVSVPRAPSISPSTLSPATSNHSQHYANEDSKMGSTVTAAVIGIIVPIVVIALLCMSGYLIWRNWKRKNTKSMNFDNPVYRKTTEEEDEDELHIGRTAQIGHVYPARVALSLEDDGLP

SEQ ID NO: 3973 - protein, 536 aa, Homo sapiens
MVVILGASNILWIMFAASQAFKIETTPESRYLAQIGDSVSLTCSTTGCESPFFSWRTQIDSPLNGKVTNEGTTSTLTMNPVSFGNEHSYLCTATCESRKLEKGIQVEIYSFPKDPEIHLSGPLEAGKPITVKCSVADVYPFDRLEIDLLKGDHLMKSQEFLEDADRKSLETKSLEVTFTPVIEDIGKVLVCRAKLHIDEMDSVPTVRQAVKELQVYISPKNTVISVNPSTKLQEGGSVTMTCSSEGLPAPEIFWSKKLDNGNLQHLSGNATLTLIAMRMEDSGIYVCEGVNLIGKNRKEVELIVQVAPRDTTVLVSPSSILEEGSSVNMTCLSQGFPAPKILWSRQLPNGELQPLSENATLTLISTKMEDSGVYLCEGINQAGRSRKEVELIIQVTPKDIKLTAFPSESVKEGDTVIISCTCGNVPETWIILKKKAETGDTVLKSIDGAYTIRKAQLKDAGVYECESKNKVGSQLRSLTLDVQGRENNKDYFSPELLVLYFASSLIIPAIGMIIYFARKANMKGSYSLVEAQKSKV

SEQ ID NO: 3974 - protein, 104 aa, Homo sapiens
MNLYFAQVVFKAKVKRRPEMSRGLLAVRGAFVGASLLFLLVNVLCAVLSHRRRAQPWALLLVRVLVSDSLFVICALSLAACLCLVARRAPSTSIYLEAKVGLQH

SEQ ID NO: 3975 - protein, 275 aa, Homo sapiens
MGGVLFSTGLLGNLLALGLLARSGLGWCSRRPLRPLPSVFYMLVCGLTVTDLLGKCLLSPVVLAAYAQNRSLRVLAPALDNSLCQAFAFFMSFFGLSSTLQLLAMALECWLSLGHPFFYRRHITLRLGALVAPVVSAFSLAFCALPFMGFGKFVQYCPGTWCFIQMVHEEGSLSVLGYSVLYSSLMALLVLATVLCNLGAMRNLYAMHRRLQRHPRSCTRDCAEPRADGREASPQPLEELDHLLLLALMTVLFTMCSLPVIAFVPGVPAKTPGSR

SEQ ID NO: 3976 - protein, 304 aa, Homo sapiens
MPCLEAVALILLILLVPDPPRGAAETQGEGAVGGFRSSWCEDVRYLGKNWSFVWSTLGVTAMAFVTGALGFWAPKFLLEARVVHGLQPPCFQEPCSNPDSLIFGALTIMTGVIGVILGAEAARRYKKVIPGAEPLICASSLLATAPCLYLALVLAPTTLLASYVFLGLGELLLSCNWAVVADILLSVVVPRCRGTAEALQITVGHILGDAGSPYLTGLISSVLRARRPDSYLQRFRSLQQSFLCCAFVIALGGGCFLLTALYLERDETRAWQPVTGTPDSNDVDSNDLERQGLLSGAGASTEEP

SEQ ID NO: 3977 - protein, 1167 aa, Homo sapiens
MISALEVPLDPKLLEDLVQPPTITQQSPKDYIIDPRENIVIQCEAKGKPPPSFSWTRNGTHFDIDKDPLVTMKPGTGTLIINIMSEGKAETYEGVYQCTARNERGAAVSNNIVVRPSRSPLWTKEKLEPITLQSGQSLVLPCRPPIGLPPPIIFWMDNSFQRLPQSERVSQGLNGDLYFSNVLPEDTREDYICYARFNHTQTIQQKQPISVKVISAKSSRERPPTFLTPEGNASNKEELRGNVLSLECIAEGLPTPIIYWAKEDGMLPKNRTVYKNFEKTLQIIHVSEADSGNYQCIAKNALGAIHHTISVRVKAAPYWITAPQNLVLSPGEDGTLICRANGNPKPRISWLTNGVPIEIAPDDPSRKIDGDTIIFSNVQERSSAVYQCNASNEYGYLLANAFVNVLAEPPRILTPANTLYQVIANRPALLDCAFFGSPLPTIEWFKGAKGSALHEDIYVLHENGTLEIPVAQKDSTGTYTCVARNKLGMAKNEVHLEIKDPTWIVKQPEYAVVQRGSMVSFECKVKHDHTLSLTVLWLKDNRELPSDERFTVDKDHLVVADVSDDDSGTYTCVANTTLDSVSASAVLSVVAPTPTPAPVYDVPNPPFDLELTDQLDKSVQLSWTPGDDNNSPITKFIIEYEDAMHKPGLWHHQTEVSGTQTTAQLKLSPYVNYSFRVMAVNSIGKSLPSEASEQYLTKASEPDKNPTAVEGLGSEPDNLVITWKPLNGFESNGPGLQYKVSWRQKDGDDEWTSVVVANVSKYIVSGTPTFVPYLIKVQALNDMGFAPEPAVVMGHSGEDLPMVAPGNVRVNVVNSTLAEVHWDPVPLKSIRGHLQGYRIYYWKTQSSSKRNRRHIEKKILTFQGSKTHGMLPGLEPFSHYTLNVRVVNGKGEGPASPDRVFNTPEGVPSAPSSLKIVNPTLDSLTLEWDPPSHPNGILTEYTLKYQPINSTHELGPLVDLKIPANKTRWTLKNLNFSTRYKFYFYAQTSAGSGSQITEEAVTTVDEAGILPPDVGAGKAMASRQVDIATQGWFIGLMCAVALLILILLIVCFIRRNKGGKYPVKEKEDAHADPEIQPMKEDDGTFGEYSDAEDHKPLKKGSRTPSDRTVKKEDSDDSLVDYGEGVNGQFNEDGSFIGQYSGKKEKEPAEGNESSEAPSPVNAMNSFV

SEQ ID NO: 3978 - protein, 56 aa, Homo sapiens
KELLGHKNCIDEIETIISVKLQLIGIVGIGIAGLTIFGMIFSMVLCCAIRNSRDVI

SEQ ID NO: 3979 - protein, 48 aa, Homo sapiens [sequence omitted]

SEQ ID NO: 3980 - protein, 61 aa, Homo sapiens
MSGDDTQHIQQFYDLLTGSMEIIRGWAEKIPGFADLPKADQDLLFESAFLELFVLRLAYRI

SEQ ID NO: 3981 - protein, 40 aa, Homo sapiens
INNFFLSYTFFRYKRLTNIVQFLLLVGFLSCVSLVFVKFN

SEQ ID NO: 3982 - protein, 388 aa, Homo sapiens
IPGLPETSHKLNRESGLNKDAFPQYIHNMLSTSRSRFIRNTNESGEEVTTFFDYDYGAPCHKFDVKQIGAQLLPPLYSLVFIFGFVGNMLVVLILINCKKLKCLTDIYLLNLAISDLLFLITLPLWAHSAANEWVFGNAMCKLFTGLYHIGYFGGIFFIILLTIDRYLAIVHAVFALKARTVTFGVVTSVITWLVAVFASVPGIIFTKCQKEDSVYVCGPYFPRGWNNFHTIMRNILGLVLPLLIMVICYSGILKTLLRCRNEKKRHRAVRVIFTIMIVYFLFWTPYNIVILLNTFQEFFGLSNCESTSQLDQATQVTETLGMTHCCINPIIYAFVGEKFRRYLSVFFRKHITKRFCKQCPVFYRETVDGVTSTNTPSTGEQEVSAGL

SEQ ID NO: 3983 - protein, 604 aa, Homo sapiens
TLGANGYVFAIDLNGYVLLHPNLKPQTTNFREPVTLDFLDAELEDENKEEIRRSMIDGNKGHKQIRTLVKSLDERYIDEVTRNYTWVPIRSTNYSLGLVLPPYSTFYLQANLSDQILQVKYFEFLLPSSFESEGHVFIAPREYCKDLNASDNNTEFLKNFIELMEKVTPDSKQCNNFLLHNLILDTGITQQLVERVWRDQDLNTYSLLAVFAATDGGITRVFPNKAAEDWTENPEPFNASFYRRSLDNHGYVFKPPHQDALLRPLELENDTVGILVSTAVELSLGRRTLRPAVVGVKLDLEAWAEKFKVLASNRTHQDQPQKCGPNSHCEMDCEVNNEDLLCVLIDDGGFLVLSNQNHQWDQVGRFFSEVDANLMLALYNNSFYTRKESYDYQAACAPQPPGNLGAAPRGVFVPTVADFLNLAWWTSAAAWSLFQQLLYGLIYHSWFQADPAEAEGSPETRESSCVMKQTQYYFGSVNASYNAIIDCGNCSRLFHAQRLTNTNLLFVVAEKPLCSQCEAGRLLQKETHCPADGPEQCELVQRPRYRRGPHICFDYNATEDTSDCGRGASFPPSLGVLVSLQLLLLLGLPPRPQPQVLVHASRRL

SEQ ID NO: 3984 - protein, 70 aa, Homo sapiens
LSNKFESEFPSSLTGKVAPEEFKASINRVNSCLKKNLPVNVRWLLCGCLCCCCTLGCSMWPVICLSKRVS

SEQ ID NO: 3985 - protein, 49 aa, Homo sapiens
LERRHPPALQPWRHLPGFSDCLEWILRVGFAAFSVLWACCSRICGAKQP

SEQ ID NO: 3986 - protein, 59 aa, Homo sapiens
MKIVFYKEKFLPDNPEEDFGKLTIKESAKPLLMMWRLTAIFLFQLILPRCISQKTLIHR

SEQ ID NO: 3987 - protein, 52 aa, Homo sapiens
LVQKWKFALLQHTIAKDEFKKLHTNSLYYILYFVNTVYHVLCVYCSYLRGIL

SEQ ID NO: 3988 - protein, 94 aa, Homo sapiens
TDVVIAIFIIVAMSFVPASFVVFLVAEKSTKAKHLQFVSGCNPIIYWLANYVWDMLNYLVPATCCVIILFVFDLPAYTSPTNFPAVLSLFLLYG

SEQ ID NO: 3989 - protein, 190 aa, Homo sapiens
KMTDSVIYSMLELPTATQAQNDYGPQQKSSSSRPSCSCLVAIALGLLTAVLLSVLLYQWILCQGSNYSTCASCPSCPDRWMKYGNHCYYFSVEEKDWNSSLEFCLARDSHLLVITDNQEMSLLQVFLSEAFCWIGLRNNSGWRWEDGSPLNFSRISSNSFVQTCGAINKNGLQASSCEVPLHWVCKKVRL

SEQ ID NO: 3990 - protein, 233 aa, Homo sapiens
LKMQDEERYMTLNVQSKKRSSAQTSQLTFKDYSVTLHWYKILLGISGTVNGILTLTLISLILLVSQGVLLKCQKGSCSNATQYEDTGDLKVNNGTRRNISNKDLCASRSADQTVLCQSEWLKYQGKCYWFSNEMKSWSDSYVYCLERKSHLLIIHDQLEMAFIQKNLRQLNYVWIGLNFTSLKMTWTWVDGSPIDSKIFFIKGPAKENSCAAIKESKIFSETCSSVFKWICQY

SEQ ID NO: 3991 - protein, 410 aa, Homo sapiens
LQLLLLLILLGPGNSLQLWDTWADEAEKALGPLLARDRRQATEYEYLDYDFLPETEPPEMLRNSTDTTPLTGPGTPESTTVEPAARRSTGLDAGGAVTELTTELANMGNLSTDSAAMEIQTTQPAATEAQTTQPVPTEAQTTPLAATEAQTTRLTATEAQTTPLAATEAQTTPPAATEAQTTQPTGLEAQTTAPAAMEAQTTAPAAMEAQTTPPAAMEAQTTQTTAMEAQTTAPEATEAQTTQPTATEAQTTPLAAMEALSTEPSATEALSMEPTTKRGLFIPFSVSSVTHKGIPMAASNLSVNYPVGAPDHISVKQCLLAILILALVATIFFVCTVVLAVRLSRKGHMYPVRNYSPTEMVCISSLLPDGGEGPSATANGGLSKAKSPGLTPEPREDREGDDLTLHSFLP

SEQ ID NO: 3992 - protein, 56 aa, Homo sapiens
RSPTLSLPLFYPCQVPKDQVLDTVYLFHMPRKRMISLRFLAWYFLDAAVFSSVLAL

SEQ ID NO: 3993 - protein, 44 aa, Homo sapiens
IGALQGRSCHCLQLWGPRNHTREMHSLIWPALPLWVLYLFKVIH

SEQ ID NO: 3994 - protein, 42 aa, Homo sapiens
IVFIKKYIVFFFSRRGGKLSHYRGPAMLCIWACCMSCCRCLH

SEQ ID NO: 3995 - protein, 38 aa, Homo sapiens
IHSILLLKTWGEIISLSRPCYAVYLGVLYVLLPMPSLK

SEQ ID NO: 3996 - protein, 65 aa, Homo sapiens
IPILSTFLFEDFSKASGFKGQRPETLHERLTLVSVYAPYLLIPFILLIFMLRSPYYKYEEKRKKK

SEQ ID NO: 3997 - protein, 123 aa, Homo sapiens
IRGKYFPGQESQMKLIYQGRLLQDPARTLRSLNITDNCVIHCHRSPPGSAVPGPSASLAPSATEPPSLGVNVGSLMVPVFVVLLGVVWYFRINYRQFFTAPATVSLVGVTVFFSFLVFGMYGR

SEQ ID NO: 3998 - protein, 53 aa, Homo sapiens
RPPPPWSQKGPGDSTRPSKPGPVSWKSLAITFAIGGALLAGMKHVKKEKAESK

SEQ ID NO: 3999 - protein, 124 aa, Homo sapiens
RGAANHTGLRPSYPAPSPSTSTFTSPPFHFFLYVFFLLETDSIHIEYNIFVYLTGRGRGGDRGGAGPAAWYSSPRGHWEGDPRPLPSPLCTVLWKRNTHLVSKEFILRRVCVCVCLFFLLNLFK

SEQ ID NO: 4000 - protein, 44 aa, Homo sapiens
IYFCIHFLALAALGLGLALGGGSPSRRKAASQPTSLAPEKLREE

SEQ ID NO: 4001 - protein, 57 aa, Homo sapiens
VTQGRLVAKPPRPARSTAEDSSTPRDMLGLRPPLLALVGLLSLGCGEFCVPRRGLHA

SEQ ID NO: 4002 - protein, 54 aa, Homo sapiens
LEPPLFPPDLFGELLASSELEATAERVEHVSRLLWRLPAPVLVVLRYLFTFLNQ

SEQ ID NO: 4003 - protein, 2044 aa, Homo sapiens; identical to SEQ ID NO: 2292

SEQ ID NO: 4004 - protein, 210 aa, Homo sapiens
MATLSVIGSSSLIAYAVFHNIQKSPEIRPLFYLSFCDLLLGLCWLTETLLYGASVANKDIICYNLQAVGQIFYISSFLYTVNYIWYLYTELRMKHTQSGQSTSPLVIDYTCRVCQMAFVFSSLIPLLLMTPVFCLGNTSECFQNFSQSHKCILMHSPPSAMAELPPSANTSVCSTLYFYGIAIFLGSFVLSLLTIMVWYHPTFLCGEMRK

SEQ ID NO: 4005 - protein, 128 aa, Homo sapiens [sequence omitted]

SEQ ID NO: 4006 - protein, 308 aa, Homo sapiens
MPHSAQFSVLGPSGPILAMVGEDADLPCHLFPTMSAETMELKWVSSSLRQVVNVYADGKEVEDRQSAPYRGRTSILRDGITAGKAALRIHNVTASDSGKYLCYFQDGDFYEKALVELKVAALGSDLHVDVKGYKDGGIHLECRSTGWYPQPQIQWSNNKGENIPTVEAPVVADGVGLYAVAASVIMRGSSGEGVSCTIRSSLLGLEKTASISIADPFFRSAQRWIAALAGTLPVLLLLLGGAGYFLWQQQEEKKTQFRKKKREQELREMAWSTMKQEQSTRVKLLEELSKFPFPQRPRHVFLSLLYAP

SEQ ID NO: 4007 - protein, 71 aa, Homo sapiens
KYCCDDPHSFFPYEHSYMWWLSIGALIGLSVAAVVLLAFIVTACVLCYLFISSKPHTKLDLGLSLQTAGGS

SEQ ID NO: 4008 - protein, 86 aa, Homo sapiens
IQLKHYILALAALHCSSVLLVEIWILRREHSTALSSQENSRCKKLQCINCREESTVLQAERATTALLFNEREKMKERENFRRLGPI

SEQ ID NO: 4009 - protein, 24 aa, Homo sapiens
IRTDIIASHLFIFLGIFIALNKKY

SEQ ID NO: 4010 - protein, 404 aa, Homo sapiens
KFLPLDLFGSVAEKPDIPGLPETSHKLNRESGLNKDAFPQYIHNMLSTSRSRFIRNTNESGEEVTTFFDYDYGAPCHKFDVKQIGAQLLPPLYSLVFIFGFVGNMLVVLILINCKKLKCLTDIYLLNLAISDLLFLITLPLWAHSAANEWVFGNAMCKLFTGLYHIGYFGGIFFIILLTIDRYLAIVHAVFALKARTVTFGVVTSVITWLVAVFASVPGIIFTKCQKEDSVYVCGPYFPRGWNNFHTIMRNILGLVLPLLIMVICYSGILKTLLRCRNEKKRHRAVRVIFTIMIVYFLFWTPYNIVILLNTFQEFFGLSNCESTSQLDQATQVTETLGMTHCCINPIIYAFVGEKFRRYLSVFFRKHITKRFCKQCPVFYRETVDGVTSTNTPSTGEQEVSAGL

SEQ ID NO: 4011 - protein, 32 aa, Homo sapiens
IIYIQIVSGLPWLTFNLLFFVLIKMIILPCSY

SEQ ID NO: 4012 - protein, 28 aa, Homo sapiens
LEWILRVGFAAFSVLWACCSRICGAKQP

SEQ ID NO: 4013 - protein, 749 aa, Homo sapiens
VLGTRDGRHAPRSIVSLIWVPGRCGRRAGSARVTPAAGAPGPAGAGRGVPGRAAAMKHLKRWWSAGGGLLHLTLLLSLAGLRVDLDLYLLLPPPTLLQDELLFLGGPASSAYALSPFSASGGWGRAGHLHPKGRELDPAAPPEGQLLREVRALGVPFVPRTSVDAWLVHSVAAGSADEAHGLLGAAAASSTGGAGASVDGGSQAVQGGGGDPRAARSGPLDAGEEEKAPAEPTAQVPDAGGCASEENGVLREKHEAVDHSSQHEENEERVSAQKENSLQQNDDDENKIAEKPDWEAEKTTESRNERHLNGTDTSFSLEDLFQLLSSQPENSLEGISLGDIPLPGSISDGMNSSAHYHVNFSQAISQDVNLHEAILLCPNNTFRRDPTARTSQSQEPFLQLNSHTTNPEQTLPGTNLTGFLSPVDNHMRNLTSQDLLYDLDINIFDEINLMSLATEDNFDPIDVSQLFDEPDSDSGLSLDSSHNNTSVIKSNSSHSVCDEGAIGYCTDHESSSHHDLEGAVGGYYPEPSKLCHLDQSDSDFHGDLTFQHVFHNHTYHLQPTAPESTSEPFPWPGKSQKIRSRYLEDTDRNLSRDEQRAKALHIPFSVDEIVGMPVDSFNSMLSRYYLTDLQVSLIRDIRRRGKNKVAAQNCRKRKLDIILNLEDDVCNLQAKKETLKREQAQCNKAINIMKQKLHDLYHDIFSRLRDDQGRPVNPNHYALQCTHDGSILIVPKELVASGHKKETQKGKRK

SEQ ID NO: 4014 - protein, 837 aa, Homo sapiens
LSEVRAALGLALYLIALRTLVQLSLQQLVLRGAAGHRGEFDALQARDYLEHITSIGPRTTGSPENEILTVHYLLEQIKLIEVQSNSLHKISVDVQRPTGSFSIDFLGGFTSYYDNITNVVVKLEPRDGAQHAVLANCHFDSVANSPGASDDAVSCSVMLEVLRVLSTSSEALHHAVIFLFNGAEENVLQASHGFITQHPWASLIRAFINLEAAGVGGKELVFQTGPENPWLVQAYVSAAKHPFASVVAQEVFQSGIIPSDTDFRIYRDFGNIPGIDLAFIENGYIYHTKYDTADRILTDSIQRAGDNILAVLKHLATSDMLAAASKYRHGNMVFFDVLGLFVIAYPSRIGSIINYMVVMGVVLYLGKKFLQPKHKTGNYKKDFLCGLGITLISWFTSLVTVLIIAVFISLIGQSLSWYNHFYVSVCLYGTATVAKIILIHTLAKRFYYMNASAQYLGEVFFDISLFVHCCFLVTLTYQGLCSAFISAVWVAFPLLTKLCVHKDFKQHGAQGKFIAFYLLGMFIPYLYALYLIWAVFEMFTPILGRSGSEIPPDVVLASILAGCTMILSSYFINFIYLAKSTKKTMLTLTLVCAITFLLVCSGTFFPYSSNPANPKPKRVFLQHMTRTFHDLEGNAVKRDSGIWINGFDYTGISHITPHIPEINDSIRAHCEENAPLCGFPWYLPVHFLIRKNWYLPAPEVSPRNPPHFRLISKEQTPWDSIKLTFEATGPSHMSFYVRAHKGSTLSQWSLGNGTPVTSKGGDYFVFYSHGLQASAWQFWIEVQVSEEHPEGMVTVAIAAHYLSGEDKRSPQLDALKEKFPDWTFPSAWVCTYDLFVF

SEQ ID NO: 4015 - protein, 67 aa, Homo sapiens
ITFYLPNILKMLEDPYAAWRLLFLGTQVSSLYCYNFFSRTAVFFACTNGTSSSAGYFSTAGVWREEG

SEQ ID NO: 4016 - protein, 28 aa, Homo sapiens
LSRGRHVAFRGAFMGLSGMGFLFLIVNR

SEQ ID NO: 4017 - protein, 29 aa, Homo sapiens
LSRGRHVAFRGAFMGLSGMGFLFLIVNSR

SEQ ID NO: 4018 - protein, 50 aa, Homo sapiens
MRKFTILKGSMLFSISLYLISDLKLLMQFMNLRKKNVNGNQMKKMRFRRN

SEQ ID NO: 4019 - protein, 764 aa, Homo sapiens
LGAPLFKAWLLISVWGLGVDPSLQIDVLTELELGESTTGVRQVPGLHNGTKAFLFQDTPRSIKASTATAEQFFQKLRNKHEFTILVTLKQTHLNSGVILSIHHLDHRYLELESSGHRNEVRLHYRSGSHRPHTEVFPYILADDKWHKLSLAISASHLILHIDCNKIYERVVEKPSTDLPLGTTFWLGQRNNAHGYFKGIMQDVQLLVMPQGFIAQCPDLNRTCPTCNDFHGLVQKIMELQDILAKTSAKLSRAEQRMNRLDQCYCERTCTMKGTTYREFESWIDGCKNCTCLNGTIQCETLICPNPDCPLKSALAYVDGKCCKECKSICQFQGRTYFEGERNTVYSSSGVCVLYECKDQTMKLVESSGCPALDCPESHQITLSHSCCKVCKGYDFCSERHNCMENSICRNLNDRAVCSCRDGFRALREDNAYCEDIDECAEGRHYCRENTMCVNTPGSFMCICKTGYIRIDDYSCTEHDECITNQHNCDENALCFNTVGGHNCVCKPGYTGNGTTCKAFCKDGCRNGGACIAANVCACPQGFTGPSCETDIDECGTGRHSCANDTICFNLDGGYDCRCPHGKNCTGDCIHDGKVKHNGQIWVLENDRCSVCSCQNGFVMCRRMVCDCENPTVDLFCCPECDPRLSSQCLHQNGETLYNSGDTWVQNCQQCRCLQGEVDCWPLPCPDVECEFSILPENECCPRCVTDPCQADTIRNDITKTCLDEMNVVRFTGSSWIKHGTECTLCQCKNGHICCSVDPQCLQEL

SEQ ID NO: 4020 - protein, 438 aa, Homo sapiens
KPAIEEICQSHKPCEIDPVKLKDGENLENNMENLRQYVDRVFHAITESGVSCPTVMCDIFFSLREAAAKRFQDDPDVRYTAVSSFIFLRFFAPAILSPNLFQLTPHHTDPQTSRTLTLISKTVQTLGSLSKSKSASFKESYMATFYEFFNEQKYADAVKNFLDLISSSGRRDPKSVEQPIVLKEGFMIKRAQGRKRFGMKNFKKRWFRLTNHEFTYHKSKGDQPLYSIPIENILAVEKLEEESFKMKNMFQVIQPERALYIQANNCVEAKDWIDILTKVSQCNQKRLTVYHPSAYLSGHWLCCRAPSDSAPGCSPCTGGLPANIQLDIDGDRETERIYSLFNLYMSKLEKMQEACGSKSVYDGPEQEEYSTFVIDDPQETYKTLKQVIAGVGALEQEHAQYKRDKFKKTKYGSQEHPIGDKSFQNYIRQQSETSTHSI

SEQ ID NO: 4021 - protein, 39 aa, Homo sapiens
ILFPKISWTDKDQNAKISADSIICLLMFLLWLCLFSVLL

SEQ ID NO: 4022 - protein, 34 aa, Homo sapiens
LAKVSHMTSDRRQWCAIAVLVGVLLLVLILLFSL

SEQ ID NO: 4023 - protein, 471 aa, Homo sapiens
LDENVKSSCSPVYIAIFYTAAILGPAAGYLIGGALLNIYTEMGRRTELTTESPLWVGAWWVGFLGSGAAAFFTAVPILGYPRQLPGSQRYAVMRAAEMHQLKDSSRGEASNPDFGKTIRDLPLSIWLLLKNPTFILLCLAGATEATLITGMSTFSPKFLESQFSLSASEAATLFGYLVVPAGGGGTFLGGFFVNKLRLRGSAVIKFCLFCTVVSLLGILVFSLHCPSVPMAGVTASYGGSLLPEGHLNLTAPCNAACSCQPEHYSPVCGSDGLMYFSLCHAGCPAATETNVDGQKVYRDCSCIPQNLSSGFGHATAGKCTSTCQRKPLLLVFIFVVIFFTFLSSIPALTATLRCVRDPQRSFALGIQWIVVRILGGIPGPIAFGWVIDKACLLWQDQCGQQGSCLVYQNSAMSRYILIMGLLYKVLGVLFFAIACFLYKPLSESSDGLETCLPSQSSAPDSATDSQLQSSV

SEQ ID NO: 4024 - protein, 272 aa, Homo sapiens
ITCKTKEARMLLAWVQAFLVSNMLLAEAYGSGGCFWDNGHLYREDQTSPAPGLRCLNWLDAQSGLASAPVSGAGNHSYCRNPDEDPRGPWCYVSGEAGVPEKRPCEDLRCPETTSQALPAFTTEIQEASEGPGADEVQVFAPANALPARSEAAAVQPVIGISQRVRMNSKEKKDLGTLGYVLGITMMVIIIAIGAGIILGYSYKRGKDLKEQHDQKVCEREMQRITLPLSAFTNPTCEIVDEKTVVVHTSQTPVDPQEGTTPLMGQAGTPGA

SEQ ID NO: 4025 - protein, 74 aa, Homo sapiens
MQTSSEWGMMAFSCWHFSFSDYFTGYFNGQYWLWWIFLVLGLLLFFRGFVNYLKVRNMSESMAAAHRTRYFFLL

SEQ ID NO: 4026 - protein, 1059 aa, Homo sapiens
MINPSRQWQTLKQNTGVAHFEYQIRVTCDDYYYGFGCNKFCRPRDDFFGHYACDQNGNKTCMEGWMGPECNRAICRQGCSPKHGSCKLPGDCRCQYGWQGLYCDKCIPHPGCVHGICNEPWQCLCETNWGGQLCDKDLNYCGTHQPCLNGGTCSNTGPDKYQCSCPEGYSGPNCEIAEHACLSDPCHNRGSCKETSLGFECECSPGWTGPTCSTNIDDCSPNNCSHGGTCQDLVNGFKCVCPPQWTGKTCQLDANECEAKPCVNAKSCKNLIASYYCDCLPGWMGQNCDININDCLGQCQNDASCRDLVNGYRCICPPGYAGDHCERDIDECASNPCLNGGHCQNEINRFQCLCPTGFSGNLCQLDIDYCEPNPCQNGAQCYNRASDYFCKCPEDYEGKNCSHLKDHCRTTPCEVIDSCTVAMASNDTPEGVRYISSNVCGPHGKCKSQSGGKFTCDCNKGFTGTYCHENINDCESNPCRNGGTCIDGVNSYKCICSDGWEGAYCETNINDCSQNPCHNGGTCRDLVNDFYCDCKNGWKGKTCHSRDSQCDEATCNNGGTCYDEGDAFKCMCPGGWEGTTCNIARNSSCLPNPCHNGGTCVVNGESFTCVCKEGWEGPICAQNTNDCSPHPCYNSGTCVDGDNWYRCECAPGFAGPDCRININECQSSPCAFGATCVDEINGYRCVCPPGHSGAKCQEVSGRPCITMGSVIPDGAKWDDDCNTCQCLNGRIACSKVWCGPRPCLLHKGHSECPSGQSCIPILDDQCFVHPCTGVGECRSSSLQPVKTKCTSDSYYQDNCANITFTFNKEMMSPGLTTEHICSELRNLNILKNVSAEYSIYIACEPSPSANNEIHVAISAEDIRDDGNPIKEITDKIIDLVSKRDGNSSLIAAVAEVRVQRRPLKNRTDFLVPLLSSVLTVAWICCLVTAFYWCLRKRRKPGSHTHSASEDNTTNNVREQLNQIKNPIEKHGANTVPIKDYENKNSKMSKIRTHNSEVEEDDMDKHQQKARFAKQPAYTLVDREEKPPNGTPTKHPNWTNKQDNRDLESAQSLNRMEYIV

SEQ ID NO: 4027 - protein, 1060 aa, Homo sapiens
MFETFTESRIVEWTKKIQDIVRRRQLLTVFREGKDGQQDVDVAILQALLKASRSQDHFGHENWDHQLKLAVAWNRVDIARSEIFMDEWQWKPSDLHPTMTAALISNKPEFVKLFLENGVQLKEFVTWDTLLYLYENLDPSCLFHSKLQMHHVAQVLRELLGDFTQPLYPRPRHNDRLRLLLPVPHVKLNVQGVSLRSLYKRSSGHVTFTMDPIRDLLIWAIVQNRRELAGIIWAQSQDCIAAALACSKILKELSKEEEDTDSSEEMLALAEEYEHRAIGVFTECYRKDEERAQKLLTRVSEAWGKTTCLQLALEAKDMKFVSHGGIQAFLTKVWWGQLSVDNGLWRVTLCMLAFPLLLTGLISFREKRLQDVGTPAARARAFFTAPVVVFHLNILSYFAFLCLFAYVLMVDFQPVPSWCECAIYLWLFSLVCEEMRQLFYDPDECGLMKKAALYFSDFWNKLDVGAILLFVAGLTCRLIPATLYPGRVILSLDFILFCLRLMHIFTISKTLGPKIIIVKRMMKDVFFFLFLLAVWVVSFGVAKQAILIHNERRVDWLFRGAVYHSYLTIFGQIPGYIDGVNFNPEHCSPNGTDPYKPKCPESDATQQRPAFPEWLTVLLLCLYLLFTNILLLNLLIAMFNYTFQQVQEHTDQIWKFQRHDLIEEYHGRPAAPPPFILLSHLQLFIKRVVLKTPAKRHKQLKNKLEKNEEAALLSWEIYLKENYLQNRQFQQKQRPEQKIEDISNKVDAMVDLLDLDPLKRSGSMEQRLASLEEQVAQTAQALHWIVRTLRASGFSSEADVPTLASQKAAEEPDAEPGGRKKTEEPGDSYHVNARHLLYPNCPVTRFPVPNEKVPWETEFLIYDPPFYTAERKDAAAMDPMGENPMGRTGLRGRGSLSCFGPNHTLYPMVTRWRRNEDGAICRKSIKKMLEVLVVKLPLSEHWALPGGSREPGEMLPRKLKRILRQEHWPSFENLLKCGMEVYKGYMDDPRNTDNAWIETVAVSVHFQDQNDVELNRLNSNLHACDSGASIRWQVVDRRIPLYANHKTLLQKAAAEFGAHY

SEQ ID NO: 4028 - protein, 654 aa, Homo sapiens
VAPKSHTDDWAPGPFSSKPQRSQLQIFSSVLQTSLLFLLMGLRASGKDSAPTVVSGILGGSVTLPLNISVDTEIENVIWIGPKNALAFARPKENVTIMVKSYLGRLDITKWSYSLCISNLTLNDAGSYKAQINQRNFEVTTEEEFTLFVYEQLQEPQVTMKSVKVSENFSCNITLMCSVKGAEKSVLYSWTPREPHASESNGGSILTVSRTPCDPDLPYICTAQNPVSQRSSLPVHVGQFCTDPGASRGGTTGETVVGVLGEPVTLPLALPACRDTEKVVWLFNTSIISKEREEAATADPLIKSRDPYKNRVWVSSQDCSLKISQLKIEDAGPYHAYVCSEASSVTSMTHVTLLIYRRLRKPKITWSLRHSEDGICRISLTCSVEDGGNTVMYTWTPLQKEAVVSQGESHLNVSWRSSENHPNLTCTASNPVSRSSHQFLSENICSGPERNTKLWIGLFLMVCLLCVGIFSWCIWKRKGRCSVPAFCSSQAEAPADTPEPTAGHTLYSVLSQGYEKLDTPLRPARQQPTPTSDSSSDSNLTTEEDEDRPEVHKPISGRYEVFDQVTQEGAGHDPAPEGQADYDPVTPYVTEVESVVGENTMYAQVFNLQGKTPVSQKEESSATIYCSIRKPQVVPPPQQNDLEIPESPTYENFT

SEQ ID NO: 4029 - protein, 2100 aa, Homo sapiens
LWLFLLLLPLALHLAFPPNAIIVFFYCSAVTIFFTIIKLVSYRLHLMFDKGEVIQQKPSRKEEKPNKDKEAKGEHITNHRNPSNNRQIHNGKKEEASRNLSTPPLRCSSRGQSITSHHSSGPLELSAQETVEDLKGVILLEDHPIAPVSSTSPGIKVESLPASQAHMLETTTKSVIPVKPVATETLINGKGKERGGKGQPPLRHRSEGGLVDKGPLKKLPHLSLSQYDLLETDVSFQPWGSENSVLIPEPVSCPRGSIRERVQSKSPQDSLSSSCPQCDTIVAKPVEEPADTSCQVDTSCQGDLPLHQEVDSSDSEVAVTLIDTSQPGDPLSLHEPIKIVITMSSTPNSMTDLESSLHLRVVGTEKTSVKSDAEPTNPGAAGSPNAEQISIPVITLDLPEGGGGGVPCPEGNGSERTPERLKTRVSTNQCSGYGSGEGGNAIKDHSSSSREPWESVSRLTPDTGSESKVGKEGQTNLDPSSCKSSHEKRHARVLSVDSGTDVFLSKSSAEIVNDTEKTMPTSKSDLEAKEGQMPNESNFLEFVSLLESINTSKMTASSQLNGSAEQNEESGLLRDNCSQEKKEEILENEKPSGHSSKQGKPDLQSQDHTSTGPACTQPAKTTAFFQGNRQRQIIYRVTSQQDSSVLQVISGPETSVQEEISVDAMHVFIDEHGEIRSCYLKSGNQKEGPLQPLPSNNDCLSQAREMQVSSSSTTTSESQDPSSGDPAVSALQQQLLLMVARRTQSETPRHVSQDLEASSCSSTQGKFNREQFYKFIIFPGKWIKVWYDRLTLLALLDRTEDIKENVLAILLIVLVSLLGFLTLSQGFCKDMWVLLFCLVMASCQYSLLKSVQPDPASPIHGHNQIITYSRPIYFCVLCGLILLLDTGAKARHPPSYVVYGLKLFSPVFLQSARDYLIVFLYCFPAISLLGLFPQINTFCTYLLEQIDMLFFGGSAVSGITSAVYSVARSVLAAALLHAVCFSAVKEPWSMQHIPALFSAFCGLLVALSYHLSRQSSDPSVLMSFIQCRLFPKFLHQNLAESAADPLPKKMKDSVTDVLKWDLIVCAVVAVLSFAVSASTVFLSLRPFLSIVLFALAGAVGFVTHYVLPQLRKHHPWMWISHPILKNKEYHQREVRDVAHLMWFERLYVWLQCFEKYILYPALILNALTIDAFLISNHRRLGTHWDIFLMIIAGMKLLRTSFCNPVYQFINLSFTVIFFHFDYKDISESFLLDFFMVSILFSKLGDLLHKLQFVLTYVAPWQMAWGSSFHVFAQLFAIPHSAMLFFQTIATSIFSTPLSPFLGSVIFITSYVRPVKFWEKNYNTRRVDNSNTRLAVQIERDPGNDDNNLNSIFYEHLTRTLQESLCGDLVLGRWGNYSSGDCFILASDDLNAFVHLIEIGNGLVTFQLRGLEFRGTYCQQREVEAIMEGDEEDRGCCCCKPGHLPHLLSCNAAFHLRWLTWEITQTQYILEGYSILDNNAATMLQVFDLRRILIRYYIKSIIYYMVTSPKLLSWIKNESLLKSLQPFAKWHYIERDLAMFNINIDDDYVPCLQGITRASFCNVYLEWIQHCARKRQEPSTTLDSDEDSPLVTLSFALCTLGRRALGTAAHNMAISLDSFLYGLHVLFKGDFRITARDEWVFADMDLLHKVVAPAIRMSLKLHQDQFTCPDEYEDPAVLYEAIQSFEKKVVICHEGDPAWRGAVLSNKEELLTLRHVVDEGADEYKVIMLHRSFLSFKVIKVNKECVRGLWAGQQQELIFLRNRNPERGSIQNNKQVLRNLINSSCDQPLGYPMYVSPLTTSYLGTHRQLKNIWGGPITLDRIRTWFWTKWVRMRKDCNARQHSGGNIEDVDGGGAPTTGGNNAPSGGSQESSAEQPRKGGAQHGVSSCEGTQRTGRRKGRSQSVQAHSALSQRPPMLSSSGPILESRQTFLQTSTSVHELAQRLSGSRLSLHASATSLHSQPPPVTTTGHLSVRERAEALIRSSLGSSTSSTLSFLFGKRSFSSALVISGLSAAEGGNTSDTQSSSSVNIVMGPSARAASQATRHLSEPCEPPDATEQGQLHDRCLAEAVADTLGVVCRRASQEDMGLDDTASQQSVSDEQ

SEQ ID NO: 4030 - protein, 199 aa, Homo sapiens
LFFLLFIPVFCKAMHVAQPAVVLASSRGIASFVCEYASPGKATEVRVTVLRQADSQVTEVCAATYMMGNELTFLDDSICTGTSSGNQVNLTIQGLRAMDTGLYICKVELMYPPPYYLGIGNGTQIYVIDPEPCPDSDFLLWILAAVSSGLFFYSFLLTAVSLSKMLKKRSPLTTGVYVKMPPTEPECEKQFQPYFIPIN

SEQ ID NO: 4031 - protein, 364 aa, Homo sapiens
VLQLDQTIAETEEDMSNITDPQMWDFDDLNFTGMPPADEDYSPCMLETETLNKYVVIIAYALVFLLSLLGNSLVMLVILYSRVGRSVTDVYLLNLALADLLFALTLPIWAASKVNGWIFGTFLCKVVSLLKEVNFYSGILLLACISVDRYLAIVHATRTLTQKRHLVKFVCLGCWGLSMNLSLPFFLFRQAYHPNNSSPVCYEVLGNDTAKWRMVLRILPHTFGFIVPLFVMLFCYGFTLRTLFKAHMGQKHRAMRVIFAVVLIFLLCWLPYNLVLLADTLMRTQVIQESCERRNNIGRALDATEILGFLHSCLNPIIYAFIGQNFRHGFLKILAMHGLVSKEFLARHRVTSYTSSSVNVSSNL

SEQ ID NO: 4032 - protein, 43 aa, Homo sapiens
LLYLVLILPSCLTLLVACTVIVLTFKKPLLQVIKSRCHWSSVY

SEQ ID NO: 4033 - protein, 625 aa, Homo sapiens
LFGTSRHISVGTFAVMSVMVGSVTESLAPQALNDSMINETARDAARVQVASTLSVLVGLFQVGLGLIHFGFVVTYLSEPLVRGYTTAAAVQVFVSQLKYVFGLHLSSHSGPLSLIYTVLEVCWKLPQSKVGTVVTAAVAGVVLVVVKLLNDKLQQQLPMPIPGELLTLIGATGISYGMGLKHRFEVDVVGNIPAGLVPPVAPNTQLFSKLVGSAFTIAVVGFAIAISLGKIFALRHGYRVDSNQELVALGLSNLIGGIFQCFPVSCSMSRSLVQESTGGNSQVAGAISSLFILLIIVKLGELFHDLPKAVLAAIIIVNLKGMLRQLSDMRSLWKANRADLLIWLVTFTATILLNLDLGLVVAVIFSLLLVVVRTQMPHYSVLGQVPDTDIYRDVAEYSEAKEVRGVKVFRSSATVYFANAEFYSDALKQRCGVDVDFLISQKKKLLKKQEQLKLKQLQKEEKLRKQAASPKGASVSINVNTSLEDMRSNNVEDCKMMQVSSGDKMEDATANGQEDSKAPDGSTLKALGLPQPDFHSLILDLGALSFVDTVCLKSLKNIFHDFREIEVEVYMAACHSPVVSQLEAGHFFDASITKKHLFASVHDAVTFALQHPRPVPDSPVSVTRL

SEQ ID NO: 4034 - protein, 65 aa, Homo sapiens
LYLAEVMVRLTWHQALDPDNHCIPYLTGLGDLLGTGLLALCFFTDWLLKSKAELGGISELASGPP

SEQ ID NO: 4035 - protein, 897 aa, Homo sapiens
IYFWGGLLPFGMLCASSTTKCTVSHEVADCSHLKLTQVPDDLPTNITVLNLTHNQLRRLPAANFTRYSQLTSLDVGFNTISKLEPELCQKLPMLKVLNLQHNELSQLSDKTFAFCTNLTELHLMSNSIQKIKNNPFVKQKNLITLDLSHNGLSSTKLGTQVQLENLQELLLSNNKIQALKSEELDIFANSSLKKLELSSNQIKEFSPGCFHAIGRLFGLFLNNVQLGPSLTEKLCLELANTSIRNLSLSNSQLSTTSNTTFLGLKWTNLTMLDLSYNNLNVVGNDSFAWLPQLEYFFLEYNNIQHLFSHSLHGLFNVRYLNLKRSFTKQSISLASLPKIDDFSFQWLKCLEHLNMEDNDIPGIKSNMFTGLINLKYLSLSNSFTSLRTLTNETFVSLAHSPLHILNLTKNKISKIESDAFSWLGHLEVLDLGLNEIGQELTGQEWRGLENIFEIYLSYNKYLQLTRNSFALVPSLQRLMLRRVALKNVDSSPSPFQPLRNLTILDLSNNNIANINDDMLEGLEKLEILDLQHNNLARLWKHANPGGPIYFLKGLSHLHILNLESNGFDEIPVEVFKDLFELKIIDLGLNNLNTLPASVFNNQVSLKSLNLQKNLITSVEKKVFGPAFRNLTELDMRFNPFDCTCESIAWFVNWINETHTNIPELSSHYLCNTPPHYHGFPVRLFDTSSCKDSAPFELFFMINTSILLIFIFIVLLIHFEGWRISFYWNVSVHRVLGFKEIDRQTEQFEYAAYIIHAYKDKDWVWEHFSSMEKEDQSLKFCLEERDFEAGVFELEAIVNSIKRSRKIIFVITHHLLKDPLCKRFKVHHAVQQAIEQNLDSIILVFLEEIPDYKLNHALCLRRGMFKSHCILNWPVQKERIGAFRHKLQVALGSKNSVH

SEQ ID NO: 4036 - protein, 287 aa, Homo sapiens
LLSIFGFQACQYKPLPDCPMVLKVAGPACAVVGLGAVILARSRAQLQLRAGLQRGQQMDPDRAFICGESRQFAQCLIFGFLFLTSGMLISVLGIWVPGCGSNWAQEPLNETDTGDSEPRMCGFLSLQIMGPLIVLVGLCFFVVAHVKKRNTLNAGQDASEREEGQIQIMEPVQVTVGDSVIIFPPPPPPYFPESSASAVAESPGTNSLLPNENPPSYYSIFNYGRTPTSEGAASERDCESIYTISGTNSSSEASHTPHLPSELPPRYEEKENAAATFLPLSSEPSPP

SEQ ID NO: 4037 - protein, 997 aa, Homo sapiens
VPALQCLKTNVFLVFTFLRQEGSFEDGLAALEIWRSDATMRTHTRGAPSVFFIYLLCFVSAYITDENPEVMIPFTNANYDSHPMLYFSRAEVAELQLRAASSHEHIAARLTEAVHTMLSSPLEYLPPWDPKDYSARWNEIFGNNLGALAMFCVLYPENIEARDMAKDYMERMAAQPSWLVKDAPWDEVPLAHSLVGFATAYDFLYNYLSKTQQEKFLEVIANASGYMYETSYRRGWGFQYLHNHQPTNCMALLTGSLVLMNQGYLQEAYLWTKQVLTIMEKSLVLLREVTDGSLYEGVAYGSYTTRSLFQYMFLVQRHFNINHFGHPWLKQHFAFMYRTILPGFQRTVAIADSNYNWFYGPESQLVFLDKFVMRNGSGNWLADQIRRNRVVEGPGTPSKGQRWCTLHTEFLWYDGSLKSVPPPDFGTPTLHYFEDWGVVTYGSALPAEINRSFLSFKSGKLGGRAIYDIVHRNKYKDWIKGWRNFNAGHEHPDQNSFTFAPNGVPFITEALYGPKYTFFNNVLMFSPAVSKSCFSPWVGQVTEDCSSKWSKYKHDLAASCQGRVVAAEEKNGVVFIRGEGVGAYNPQLNLKNVQRNLILLHPQLLLLVDQIHLGEESPLETAASFFHNVDVPFEETVVDGVHGAFIRQRDGLYKMYWMDDTGYSEKATFASVTYPRGYPYNGTNYVNVTMHLRSPITRAAYLFIGPSIDVQSFTVHGDSQQLDVFIATSKHAYATYLWTGEATGQSAFAQVIADRHKILFDRNSAIKSSIVPEVKDYAAIVEQNLQHFKPVFQLLEKQILSRVRNTASFRKTAERLLRFSDKRQTEEAIDRIFAISQQQQQQSKSKKNRRAGKRYKFVDAVPDIFAQIEVNEKKIRQKAQILAQKELPIDEDEEMKDLLDFADVTYEKHKNGGLIKGRFGQARMVTTTHSRAPSLSASYTRLFLILNIAIFFVMLAMQLTYFQRAQSLHGQRCLYAVLLIDSCILLWLYSSCSQSQC

SEQ ID NO: 4038 - protein, 270 aa, Homo sapiens
KGQEALWSRPHSRHSAERAGGSHSDPGRLSAPLGLGLPSGRGRLTAMPGRAPLRTVPGALGAWLLGGLWAWTLCGLCSLGAVGAPRPCQAPQQWEGRQVMYQQSSGRNSRALLSYDGLNQRVRVLDERKALIPCKRLFEYILLYKDGVMFQIDQATKQCSKMTLTQPWDPLDIPQNSTFEDQYSIGGPQEQITVQEWSDRKSARSYETWIGIYTVKDCYPVQETFTINYSVILSTRFFDIQLGIKDPSVFTPPSTCQMAQLEKMSEDCSW

SEQ ID NO: 4039 - protein, 124 aa, Homo sapiens
LLHASRKTFSNVKVSISEQWTPSAFNTSVELPVEIWSSNHLFPSAEKATLFLGTLDTIFLFSYAVGLFISGIVGDRLNLRWVLSFGMCSSALVTRSCFWSLECLCFGGQHFGSVPSFFCSSVWL

SEQ ID NO: 4040 - protein, 843 aa, Homo sapiens
IELTVEYPWRCGALSPTSNCRTGMWSWKCLLFWAVLVTATLCTARPSPTLPEQAQPWGAPVEVESFLVHPGDLLQLRCRLRDDVQSINWLRDGVQLAESNRTRITGEEVEVQDSVPADSGLYACVTSSPSGSDTTYFSVNVSDALPSSEDDDDDDDSSSEEKETDNTKPNPVAPYWTSPEKMEKKLHAVPAAKTVKFKCPSSGTPNPTLRWLKNGKEFKPDHRIGGYKVRYATWSIIMDSVVPSDKGNYTCIVENEYGSINHTYQLDVVERSPHRPILQAGLPANKTVALGSNVEFMCKVYSDPQPHIQWLKHIEVNGSKIGPDNLPYVQILKTAGVNTTDKEMEVLHLRNVSFEDAGEYTCLAGNSIGLSHHSAWLTVLEALEERPAVMTSPLYLEIIIYCTGAFLISCMVGSVIVYKMKSGTKKSDFHSQMAVHKLAKSIPLRRQVTVSADSSASMNSGVLLVRPSRLSSSGTPMLAGVSEYELPEDPRWELPRDRLVLGKPLGEGCFGQVVLAEAIGLDKDKPNRVTKVAVKMLKSDATEKDLSDLISEMEMMKMIGKHKNIINLLGACTQDGPLYVIVEYASKGNLREYLQARRPPGLEYCYNPSHNPEEQLSSKDLVSCAYQVARGMEYLASKKCIHRDLAARNVLVTEDNVMKIADFGLARDIHHIDYYKKTTNGRLPVKWMAPEALFDRIYTHQSDVWSFGVLLWEIFTLGGSPYPGVPVEELFKLLKEGHRMDKPSNCTNELYMMMRDCWHAVPSQRPTFKQLVEDLDRIVALTSNQEYLDLSMPLDQYSPSFPDTRSSTCSSGEDSVFSHEPLPEEPCLPRHPAQLANGGLKRR

SEQ ID NO: 4041 - protein, 857 aa, Homo sapiens
LQTKDLIWTLFFLGTAVSLQVDIVPSQGEISVGESKFFLCQVAGDAKDKDISWFSPNGEKLTPNQQRISVVWNDDSSSTLTIYNANIDDAGIYKCVVTGEDGSESEATVNVKIFQKLMFKNAPTPQEFREGEDAVIVCDVVSSLPPTIIWKHKGRDVILKKDVRFIVLSNNYLQIRGIKKTDEGTYRCEGRILARGEINFKDIQVIVNVPPTIQARQNIVNATANLGQSVTLVCDAEGFPEPTMSWTKDGEQIEQEEDDEKYIFSDDSSQLTIKKVDKNDEAEYICIAENKAGEQDATIHLKVFAKPKITYVENQTAMELEEQVTLTCEASGDPIPSITWRTSTRNISSEEKASWTRPEKQETLDGHMVVRSHARVSSLTLKSIQYTDAGEYICTASNTIGQDSQSMYLEVQYAPKLQGPVAVYTWEGNQVNITCEVFAYPSATISWFRDGQLLPSSNYSNIKIYNTPSASYLEVTPDSENDFGNYNCTAVNRIGQESLEFILVQADTPSSPSIDQVEPYSSTAQVQFDEPEATGGVPILKYKAEWRAVGEEVWHSKWYDAKEASMEGIVTIVGLKPETTYAVRLAALNGKGLGEISAASEFKTQPVPGEPSAPKLEGQMGEDGNSIKVNLIKQDDGGSPIRHYLVRYRALSSEWKPEIRLPSGSDHVMLKSLDWNAEYEVYVVAENQQGKSKAAHFVFRTSAQPTAIPANGSPTSGLSTGAIVGILIVIFVLLLVVVDITCYFLNKCGLFMCIAVNLCGKAGPGAKGKDMEEGKAAFSKDESKEPIVEVRTEEERTPNHDGGKHTEPNETTPLTEPEKGPVEAKPECQETETKPAPAEVKTVPNDATQTKENESKA

SEQ ID NO: 4042 - protein, 46 aa, Homo sapiens
RPNCFKMRYPSLTFSFLSTCHLTQDCALTLLLQLPLPGLLVLALWQ

SEQ ID NO: 4043 - protein, 167 aa, Homo sapiens
VTLGILCLLLLMIVTVLVTNIFQCIQEKHQRQEILRNCSEKYIMQNDNYLKEQILTNKTLKFDVLKNSFQQKKELDSRLIQKNRCHRENEIVFKVLQNTGKFSEDHGSCCGVNCYYFTMQKKDWKGCKQTCQHCRSSLLKIDDKDELVFYIHFYSLGLCFSMLDLRY

SEQ ID NO: 4044 - protein, 25 aa, Homo sapiens
IIVKELIVTFFLGITVLLLLMQRSL

SEQ ID NO: 4045 - protein, 112 aa, Homo sapiens
RPCKCEHHCPCDPKTGNCSVSRVKQCLQPPEATLRAGELSFFTRTAWLALTLALAFLLLISTAANLSLLLSRAERNRRLHGDYAYHPLQEMNGEPLAAEKEQPGGAHNPFKD

SEQ ID NO: 4046 - protein, 606 aa, Homo sapiens
VFHCEAHRILYICESQFLRNFIRKEFLRGNGLAAGKMNISIDLDTNYAELVLNVGRVTLGENNRKKMKDCQLRKQQNENVSRAVCALLNSGGGVIKAEVENKGYSYKKDGIGLDLENSFSNMLPFVPNFLDFMQNGNYFHIFVKSWSLETSGPQIATLSSSLYKRDVTSAKVMNASAALEFLKDMEKTGGRAYLRPEFPAKRACVDVQEESNMEALAADFFNRTELGYKEKLTFTESTHVEIKNFSTEKLLQRITEILPQYVSAFANTDGGYLFVGLNEDKEVIGFKAEKSYLTKLEEVTKNSIGKLPVHHFCVEKGTINYLCKFLGVYDKGRLCGYVYALRVERFCCAVFAKKPDSWHVKDNRVKQLTEKEWIQFMVDSEPVCEELPSPASTSSPVSQSYPLREYINFKIQPLRYHLPGLSEKITCAPKTFCRNLFSQHEGLKQLICEEMGSVNKGSLIFSRSWSLDLGLQENHKVLCDALLISQDKPPVLYTFHMVQDEEFKDYSTQTAQTLKQKLAKIGGYTKKVCVMTKIFYLSPEGKTSCQYDLNSQVIYPESYYWTTAQTMKDLEKALSNILPKENQIFLFVCLFRFCLFVCWFVCFFLR

SEQ ID NO: 4047 - protein, 58 aa, Homo sapiens
ILKLAILGTLCYHWLGRRVGVLQGQCWEDFVGQELYRFLVMDFVLMLLDTLFGELVWR

SEQ ID NO: 4048 - protein, 69 aa, Homo sapiens
LQGQCWEDFVGQELYRFLVMDFVLMLLDTLFGELVWRIISEKKLKRRRKPEFDIARNVLELIYGQTLTW

SEQ ID NO: 4049 - protein, 827 aa, Homo sapiens
KQLLFSLLVLTLLCDACQKVYLRVPSHLQAETLVGKVNLEECLKSASLIRSSDPAFRILEDGSIYTTHDLILSSERKSFSIFLSDGQRREQQEIKVVLSARENKSPKKRHTKDTALKRSKRRWAPIPASLMENSLGPFPQHVQQIQSDAAQNYTIFYSISGPGVDKEPFNLFYIEKDTGDIFCTRSIDREKYEQFALYGYATTADGYAPEYPLPLIIKIEDDNDNAPYFEHRVTIFTVPENCRSGTSVGKVTATDLDEPDTLHTRLKYKILQQIPDHPKHFSIHPDTGVITTTTPFLDREKCDTYQLIMEVRDMGGQPFGLFNTGTITISLEDENDNPPSFTETSYVTEVEENRIDVEILRMKVQDQDLPNTPHSKAVYKILQGNENGNFIISTDPNTNEGVLCVVKPLNYEVNRQVILQVGVINEAQFSKAASSQTPTMCTTTVTVKIIDSDEGPECHPPVKVIQSQDGFPAGQELLGYKALDPEISSGEGLRYQKLGDEDNWFEINQHTGDLRTLKVLDRESKFVKNNQYNISVVAVDAVGRSCTGTLVVHLDDYNDHAPQIDKEVTICQNNEDFAVLKPVDPDGPENGPPFQFFLDNSASKNWNIEEKDGKTAILRQRQNLDYNYYSVPIQIKDRHGLVATHMLTVRVCDCSTPSECRMKDKSTRDVRPNVILGRWAILAMVLGSVLLLCILFTCFCVTAKRTVKKCFPEDIAQQNLIVSNTEGPGEEVTEANIRLPMQTSNICDTSMSVGTVGGQGIKTQQSFEMVKGGYTLDSNKGGGHQTLESVKGVGQGDTGRYAYTDWQSFTQPRLGEESIRGHTLIKN

SEQ ID NO: 4050 - protein, 71 aa, Homo sapiens
RIDAFCTCLWALLLGLHLAEQHLQAASPSWLDTLKFSTTSLCCLVGFTAAVATRKATGPRRFRPRRSEKQP

SEQ ID NO: 4051 - protein, 41 aa, Homo sapiens
LDLLRIPSNSYLVSKSANCFLLISSLSMISVMEIGLKRLLF

SEQ ID NO: 4052 - protein, 65 aa, Homo sapiens
TILSAGNWLLLVSLLLKFEMLYLIGLGLGDAKDITVKGLEVVRRCSRVYLEAYTSVLTVGKEALG

SEQ ID NO: 4053 - protein, 571 aa, Homo sapiens
LTSCPRQRSQFLLGAGCPAPLETAPPRSMGTSLSPNDPWPLNPLSIQQTTLLLLLSVLATVHVGQRLLRQRRRQLRSAPPGPFAWPLIGNAAAVGQAAHLSFARLARRYGDVFQIRLGSCPIVVLNGERAIHQALVQQGSAFADRPAFASFRVVSGGRSMAFGHYSEHWKVQRRAAHSMMRNFFTRQPRSRQVLEGHVLSEARELVALLVRGSADGAFLDPRPLTVVAVANVMSAVCFGCRYSHDDPEFRELLSHNEEFGRTVGAGSLVDVMPWLQYFPNPVRTVFREFEQLNRNFSNFILDKFLRHCESLRPGAAPRDMMDAFILSAEKKAAGDSHGGGARLDLENVPATITDIFGASQDTLSTALQWLLLLFTRYPDVQTRVQAELDQVVGRDRLPCMGDQPNLPYVLAFLYEAMRFSSFVPVTIPHATTANTSVLGYHIPKDTVVFVNQWSVNHDPLKWPNPENFDPARFLDKDGLINKDLTSRVMIFSVGKRRCIGEELSKMQLFLFISILAHQCDFRANPNEPAKMNFSYGLTIKPKSFKVNVTLRESMELLDSAVQNLQAKETCQ

SEQ ID NO: 4054 - protein, 334 aa, Homo sapiens
LLWMASALWTVLPSRMSLRSLKWSLLLLSLLSFFVMWYLSLPHYNVIERVNWMYFYEYEPIYRQDFHFTLREHSNCSHQNPFLVILVTSHPSDVKARQAIRVTWGEKKSWWGYEVLTFFLLGQEAEKEDKMLALSLEDEHLLYGDIIRQDFLDTYNNLTLKTIMAFRWVTEFCPNAKYVMKTDTDVFINTGNLVKYLLNLNHSEKFFTGYPLIDNYSYRGFYQKTHISYQEYPFKVFPPYCSGLGYIMSRDLVPRIYEMMGHVKPIKFEDVYVGICLNLLKVNIHIPEDTNLFFLYRIHLDVCQLRRVIAAHGFSSKEIITFWQVMLRNTTCHY

SEQ ID NO: 4055 - protein, 457 aa, Homo sapiens
LGTGTAVALGPPLRTSPEWVRRVMEGAELAGKILSTWLTLVLGFILLPSVFGVSLGISEIYMKILVKTLEWATIRIEKGTPKESILKNSASVGIIQRDESPMEKGLSGLRGRDFELSDVFYFSKKGLEAIVEDEVTQRFSSEELVSWNLLTRTNVNFQYISLRLTMVWVLGVIVRYCVLLPLRVTLAFIGISLLVIGTTLVGQLPDSSLKNWLSELVHLTCCRICVRALSGTIHYHNKQYRPQKGGICVANHTSPIDVLILTTDGCYAMVGQVHGGLMGIIQRAMVKACPHVWFERSEMKDRHLVTKRLKEHIADKKKLPILIFPEGTCINNTSVMMFKKGSFEIGGTIHPVAIKYNPQFGDAFWNSSKYNMVSYLLRMMTSWAIVCDVWYMPPMTREEGEDAVQFANRVKSAIAIQGGLTELPWDGGLKRAKVKDIFKEEQQKNYSKMIVGNGSLS

SEQ ID NO: 4056 - protein, 29 aa, Homo sapiens
IQIVSGLPWLTFNLLFFVLIKMIILPCSY

SEQ ID NO: 4057 - protein, 172 aa, Homo sapiens
LHKVSHQRNMTVKTLHGPAMVKYLLLSILGLAFLSEAAARKIPKVGHTFFQKPESCPPVPGGSMKLDIGIINENQRVSMSRNIESRSTSPWNYTVTWDPNRYPSEVVQAQCRNLGCINAQGKEDISMNSVPIQQETLVVRRKHQGCSVSFQLEKVLVTVGCTCVTPVIHHVQ

SEQ ID NO: 4058 - protein, 91 aa, Homo sapiens
VSSVLGVNVTSTEVYGAFTCSIQNISFSSFTLQRAGPTSHVAAVLASLLVLLALLLAALLYVKCRLNVLLWYQDAYGEVEINATAPRTASS

SEQ ID NO: 4059 - protein, 69 aa, Homo sapiens
IWHDLQYDLVLCYPQEPRDGLESAYIPEQESLPMKIGGIFCLFVLFCLLFVVCFFATNFSIHSALLDKS

SEQ ID NO: 4060 - protein, 1024 aa, Homo sapiens
KSTASATQIGICPGPLYGLVWAAGSFPSLPCCTPLLGDPLYPSRKVESAGWRLPGEANAWPCPAPRRTMTLLLLPLLLASLLASCSCNKANKHKPWIEAEYQGIVMENDNTVLLNPPLFALDKDAPLRYAGEICGFRLHGSGVPFEAVILDKATGEGLIRAKEPVDCEAQKEHTFTIQAYDCGEGPDGANTKKSHKATVHVRVNDVNEFAPVFVERLYRAAVTEGKLYDRILRVEAIDGDCSPQYSQICYYEILTPNTPFLIDNDGNIENTEKLQYSGERLYKFTVTAYDCGKKRAADDAEVEIQVKPTCKPSWQGWNKRIEYAPGAGSLALFPGIRLETCDEPLWNIQATIELQTSHVAKGCDRDNYSERALRKLCGAATGEVDLLPMPGPNANWTAGLSVHYSQDSSLIYWFNGTQAVQVPLGGPSGLGSGPQDSLSDHFTLSFWMKHGVTPNKGKKEEETIVCNTVQNEDGFSHYSLTVHGCRIAFLYWPLLESARPVKFLWKLEQVCDDEWHHYALNLEFPTVTLYTDGISFDPALIHDNGLIHPPRREPALMIGACWTEEKNKEKEKGDNSTDTTQGDPLSIHHYFHGYLAGFSVRSGRLESREVIECLYACREGLDYRDFESLGKGMKVHVNPSQSLLTLEGDDVETFNHALQHVAYMNTLRFATPGVRPLRLTTAVKCFSEESCVSIPEVEGYVVVLQPDAPQILLSGTAHFARPAVDFEGTNGVPLFPDLQITCSISHQVEAKKDESWQGTVTDTRMSDEIVHNLDGCEISLVGDDLDPERESLLLDTTSLQQRGLELTNTSAYLTIAGVESITVYEEILRQARYRLRHGAALYTRKFRLSCSEMNGRYSSNEFIVEVNVLHSMNRVAHPSHVLSSQQFLHRGHQPPPEMAGHSLASSHRNSMIPSAATLIIVVCVGFLVLMVVLGLVRIHSLHRRVSGAGGPPGASSDPKDPDLFWDDSALTIIVNPMESYQNRQSCVTGAVGGQQEDEDSSDSEVADSPSSDERRIIETPPHRY

SEQ ID NO: 4061 - protein, 29 aa, Homo sapiens
LKIDDKDELVFYIHFYSLGLCFSMLDLRY

SEQ ID NO: 4062 - protein, 55 aa, Homo sapiens
RATDSTEMETIRRLSIHLNKYLALTPPRRNSLMLWLIPWSMTSFMAKMVFFLHMV

SEQ ID NO: 4063 - protein, 50 aa, Homo sapiens
LLRAPLQMEEAILVPCVLGLLLLPILAMLMALCVHCHRLPGSYDSTSSDR

SEQ ID NO: 4064 - protein, 219 aa, Homo sapiens
LPLPVHVRADPLRTWRWHNLLVSFAHSIVSGIWALLCVWQTPDMLVEIETAWSLSGYLLVCFSAGYFIHDTVDIVASGQTRASWEYLVHHVMAMGAFFSGIFWSSFVGGGVLTLLVEVSNIFLTIRMMMKISNAQDHLLYRVNKYVNLVMYFLFRLAPQAYLTHFFLRYVNQRTLGTFLLGILLMLDVMIIIYFSRLLRSDFCPEHVPKKQHKDKFLTE

SEQ ID NO: 4065 - protein, 69 aa, Homo sapiens
TQRPSDNSHNEHAPASQGLKAEHLYILIGVSVVFLFCLLLLVLFCLHRQNQIKQGPPRSKDEEQKPQQR

SEQ ID NO: 4066 - protein, 382 aa, Homo sapiens
VSPSAMTQEPFREELAYDRMPTLERGRQDPASYAPDAKPSDLQLSKRLPPCFSHKTWVFSVLMGSCLLVTSGFSLYLGNVFPAEMDYLRCAAGSCIPSAIVSFTVSRRNANVIPNFQILFVSTFAVTTTCLIWFGCKLVLNPSAININFNLILLLLLELLMAATVIIAARSSEEDCKKKKGSMSDSANILDEVPFPARVLKSYSVVEVIAGISAVLGGIIALNVDDSVSGPHLSVTFFWILVACFPSAIASHVAAECPSKCLVEVLIAISSLTSPLLFTASGYLSFSIMRIVEMFKDYPPAIKPSYDVLLLLLLLVLLLQAGLNTGTAIQCVRFKVSARLQGASWDTQNGPQERLAGEVARSPLKEFDKEKAWRAVVVQMAQ

SEQ ID NO: 4067 - protein, 294 aa, Homo sapiens
KSRRTPAAAASRPGAGGAAGARRWSIRSMLLLTRSPTAWHRLSQLKPRVLPGTLGGQALHLRSWLLSRQGPAETGGQGQPQGPGLRTRLLITGLFGAGLGGAWLALRAEKERLQQQKRTEALRQAAVGQGDFHLLDHRGRARCKADFRGQWVLMYFGFTHCPDICPDELEKLVQVVRQLEAEPGLPPVQPVFITVDPERDDVEAMARYVQDFHPRLLGLTGSTKQVAQASHSYRVYYNAGPKDEDQDYIVDHSIAIYLLNPDGLFTDYYGRSRSAEQISDSVRRHMAAFRSVLS

SEQ ID NO: 4068 - protein, 341 aa, Homo sapiens
KIVSLERIMPANYTCTRPDGDNTDFRYFIYAVTYTVILVPGLIGNILALWVFYGYMKETKRAVIFMINLAIADLLQVLSLPLRIFYYLNHDWPFGPGLCMFCFYLKYVNMYASIYFLVCISVRRFWFLMYPFRFHDCKQKYDLYISIAGWLIICLACVLFPLLRTSDDTSGNRTKCFVDLPTRNVNLAQSVVMMTIGELIGFVTPLLIVLYCTWKTVLSLQDKYPMAQDLGEKQKALKMILTCAGVFLICFAPYHFSFPLDFLVKSNEIKSCLARRVILIFHSVALCLASLNSCLDPVIYYFSTNEFRRRLSRQDLHDSIQLHAKSFVSNHTASTMTPELC

SEQ ID NO: 4069 - protein, 230 aa, Homo sapiens
MGPDGRLLRGYHQHAYDGKDYISLNEDLRSWTAADTVAQITQRFYEAEEYAEEFRTYLEGECLELLRRYLENGKETLQRADPPKAHVAHHPISDHEATLRCWALGFYPAEITLTWQRDGEEQTQDTELVETRPAGDGTFQKWAAVVVPPGEEQRYTCHVQHEGLPQPLILRWEQSPQPTIPIVGIVAGLVVLGAVVTGAVVAAVMWRKKSSDRNRGSYSQAAGKMKEADP

SEQ ID NO: 4070 - protein, 535 aa, Homo sapiens
MRRERTRGPQAWEFPSPTKSGCSLQSLSRDLRELREGEKPEDQAETEESWQGLARKTPGKACAPEGGSCQPGKTENTITMTTSHQPQDRYKAVWLIFFMLGLGTLLPWNFFMTATQYFTNRLDMSQNVSLVTAELSKDAQASAAPAAPLPERNSLSAIFNNVMTLCAMLPLLLFTYLNSFLHQRIPQSVRILGSLVAILLVFLITAILVKVQLDALPFFVITMIKIVLINSFGAILQGSLFGLAGLLPASYTAPIMSGQGLAGFFASVAMICAIASGSELSESAFGYFITACAVIILTIICYLGLPRLEFYRYYQQLKLEGPGEQETKLDLISKGEEPRAGKEESGVSVSNSQPTNESHSIKAILKNISVLAFSVCFIFTITIGMFPAVTVEVKSSIAGSSTWERYFIPVSCFLTFNIFDWLGRSLTAVFMWPGKDSRWLPSLVLARLVFVPLLLLCNIKPRRYLTVVFEHDAWFIFFMAAFAFSNGYLASLCMCFGPKKVKPAEAETAGAIMAFFLCLGLALGAVFSFLFRAIV

SEQ ID NO: 4071 - protein, 482 aa, Homo sapiens
MLTPKSQQQAPEGGSCQPGKTENTITMTTSHQPQDRYKAVWLIFFMLGLGTLLPWNFFMTATQYFTNRLDMSQNVSLVTAELSKDAQASAAPAAPLPERNSLSAIFNNVMTLCAMLPLLLFTYLNSFLHQRIPQSVRILGSLVAILLVFLITAILVKVQLDALPFFVITMIKIVLINSFGAILQGSLFGLAGLLPASYTAPIMSGQGLAGFFASVAMICAIASGSELSESAFGYFITACAVIILTIICYLGLPRLEFYRYYQQLKLEGPGEQETKLDLISKGEEPRAGKEESGVSVSNSQPTNESHSIKAILKNISVLAFSVCFIFTITIGMFPAVTVEVKSSIAGSSTWERYFIPVSCFLTFNIFDWLGRSLTAVFMWPGKDSRWLPSLVLARLVFVPLLLLCNIKPRRYLTVVFEHDAWFIFFMAAFAFSNGYLASLCMCFGPKKVKPAEAETAGAIMAFFLCLGLALGAVFSFLFRAIV

SEQ ID NO: 4072 - protein, 362 aa, Homo sapiens [sequence omitted]

SEQ ID NO: 4073 - protein, 38 aa, Homo sapiens
LSIYFYYSLPNAVGPPFTWMLALLGLSQALNILLGLKV

SEQ ID NO: 4074 - protein, 732 aa, Homo sapiens
IWVPGRCGRRAGSARVTPAAGAPGPAGAGRGVPGRAAAMKHLKRWWSAGGGLLHLTLLLSLAGLRVDLDLYLLLPPPTLLQDELLFLGGPASSAYALSPFSASGGWGRAGHLHPKGRELDPAAPPEGQLLREVRALGVPFVPRTSVDAWLVHSVAAGSADEAHGLLGAAAASSTGGAGASVDGGSQAVQGGGGDPRAARSGPLDAGEEEKAPAEPTAQVPDAGGCASEENGVLREKHEAVDHSSQHEENEERVSAQKENSLQQNDDDENKIAEKPDWEAEKTTESRNERHLNGTDTSFSLEDLFQLLSSQPENSLEGISLGDIPLPGSISDGMNSSAHYHVNFSQAISQDVNLHEAILLCPNNTFRRDPTARTSQSQEPFLQLNSHTTNPEQTLPGTNLTGFLSPVDNHMRNLTSQDLLYDLDINIFDEINLMSLATEDNFDPIDVSQLFDEPDSDSGLSLDSSHNNTSVIKSNSSHSVCDEGAIGYCTDHESSSHHDLEGAVGGYYPEPSKLCHLDQSDSDFHGDLTFQHVFHNHTYHLQPTAPESTSEPFPWPGKSQKIRSRYLEDTDRNLSRDEQRAKALHIPFSVDEIVGMPVDSFNSMLSRYYLTDLQVSLIRDIRRRGKNKVAAQNCRKRKLDIILNLEDDVCNLQAKKETLKREQAQCNKAINIMKQKLHDLYHDIFSRLRDDQGRPVNPNHYALQCTHDGSILIVPKELVASGHKKETQKGKRK

SEQ ID NO: 4075 - protein, 73 aa, Homo sapiens
IKLLFFDNNDAMTWTKCPLPLGPAFFTQCCLIGLLVPLLGWGNQNTQWYPTSKMPDLKDSKTTDLCQHVKHMV

SEQ ID NO: 4076 - protein, 60 aa, Homo sapiens
ILKMLEDPYAAWRLLFLGTQVSSLYCYNFFSRTAVFFACTNGTSSSAGYFSTAGVWREEG

SEQ ID NO: 4077 - protein, 49 aa, Homo sapiens
IFTLIKGSLQNDPFYVNVMFMLAILLTFFHPFLVYRECRTWKESPSAIA

SEQ ID NO: 4078 - protein, 29 aa, Homo sapiens
ISWPFVLLIMPLVIWVYSTDTNFSDMFWS

SEQ ID NO: 4079 - protein, 406 aa, Homo sapiens
MLLWTAVLLFVPCVGKTVWLYLQAWPNPVFEGDALTLRCQGWKNTPLSQVKFYRDGKFLHFSKENQTLSMGAATVQSRGQYSCSGQVMYIPQTFTQTSETAMVQVQELFPPPVLSAIPSPEPREGSLVTLRCQTKLHPLRSALRLLFSFHKDGHTLQDRGPHPELCIPGAKEGDSGLYWCEVAPEGGQVQKQSPQLEVRVQAPVSRPVLTLHHGPADPAVGDMVQLLCEAQRGSPPILYSFYLDEKIVGNHSAPCGGTTSLLFPVKSEQDAGNYSCEAENSVSRERSEPKKLSLKGSQVLFTPASNWLVPWLPASLLGLMVIAAALLVYVRSWRKAGPLPSQIPPTAPGGEQCPLYANVHHQKGKDEGVVYSVVHRTSKRSEARSAEFTVGRKFYHLCGGEMPAAQ

SEQ ID NO: 4080 - protein, 409 aa, Homo sapiens
MVTNASAVPSDCPSEDKDLLNENVQVGLLFASKATVQLITNPFIGLLTNRIGYPIPIFAGFCIMFVSTIMFAFSSSYAFLLIARSLQGIGSSCSSVAGMGMLASVYTDDEERGNVMGIALGGLAMGVLVGPPFGSVLYEFVGKTAPFLVLAALVLLDGAIQLFVLQPSRVQPESQKGTPLTTLLKDPYILIAAGSICFANMGIAMLEPALPIWMMETMCSRKWQLGVAFLPASISYLIGTNIFGILAHKMGRWLCALLGMIIVGVSILCIPFAKNIYGLIAPNFGVGFAIGMVDSSMMPIMGYLVDLRHVSVYGSVYAIADVAFCMGYAIGPSAGGAIAKAIGFPWLMTIIGIIDILFAPLCFFLRSPPAKEEKMAILMDHNCPIKTKMYTQNNIQSYPIGEDEESESD

SEQ ID NO: 4081 - protein, 165 aa, Homo sapiens
MLVTCFFILLLGLSVATMVTLTYFGAHFAVIRRASLEKNPYQAVHQWGTQQRLIQHPESGSEGQSLLGPLRAFSAGLSLVGLLTLGAVLSAAATVREAQGLMAGGFLCFSLAFCAQVQVVFWRLHSPTQVEDAMLDTYDLVYEQAMKVSVLWEEVSFQPSGEHRG

SEQ ID NO: 4082 - protein, 300 aa, Homo sapiens
MGASEQDLGLSLFEALGYVDDQLFVFYDHESRRVEPRTPWVSSRISSQMWLQLSQSLKGWDHMFTVDFWTIMENHNHSKESHTLQVILGCEMQEDNSTEGYWKYGYDGQDHLEFCPDTLDWRAAEPRAWPTKLEWERHKIRARQNRAYLERDCPAQLQQLLELGRGVLDQQVTTLRCRALNYYPQNITMKWLKDKQPMDAKEFEPKDVLPNGDGTYQGWITLAVPPGEEQRYTCQVEHPGLDQPLIVIWEPSPSGTLVIGVISGIAVFVVILFIGILFIILRKRQGSRGAMGHYVLAERE

SEQ ID NO: 4083 - protein, 50 aa, Homo sapiens
KTSNSVFLCGFRCCKWSVSYASTFIHYLCWILCLCGILWICLRVAQLRIV

SEQ ID NO: 4084 - protein, 37 aa, Homo sapiens
ISSALKNLSCPQFIMSRRFIFSLCFFLFQFILNAYFS

SEQ ID NO: 4085 - protein, 407 aa, Homo sapiens
LHAKFLPLDLFGSVAEKPDIPGLPETSHKLNRESGLNKDAFPQYIHNMLSTSRSRFIRNTNESGEEVTTFFDYDYGAPCHKFDVKQIGAQLLPPLYSLVFIFGFVGNMLVVLILINCKKLKCLTDIYLLNLAISDLLFLITLPLWAHSAANEWVFGNAMCKLFTGLYHIGYFGGIFFIILLTIDRYLAIVHAVFALKARTVTFGVVTSVITWLVAVFASVPGIIFTKCQKEDSVYVCGPYFPRGWNNFHTIMRNILGLVLPLLIMVICYSGILKTLLRCRNEKKRHRAVRVIFTIMIVYFLFWTPYNIVILLNTFQEFFGLSNCESTSQLDQATQVTETLGMTHCCINPIIYAFVGEKFRRYLSVFFRKHITKRFCKQCPVFYRETVDGVTSTNTPSTGEQEVSAGL

SEQ ID NO: 4086 - protein, 748 aa, Homo sapiens
LGTRDGRHAPRSIVSLIWVPGRCGRRAGSARVTPAAGAPGPAGAGRGVPGRAAAMKHLKRWWSAGGGLLHLTLLLSLAGLRVDLDLYLLLPPPTLLQDELLFLGGPASSAYALSPFSASGGWGRAGHLHPKGRELDPAAPPEGQLLREVRALGVPFVPRTSVDAWLVHSVAAGSADEAHGLLGAAAASSTGGAGASVDGGSQAVQGGGGDPRAARSGPLDAGEEEKAPAEPTAQVPDAGGCASEENGVLREKHEAVDHSSQHEENEERVSAQKENSLQQNDDDENKIAEKPDWEAEKTTESRNERHLNGTDTSFSLEDLFQLLSSQPENSLEGISLGDIPLPGSISDGMNSSAHYHVNFSQAISQDVNLHEAILLCPNNTFRRDPTARTSQSQEPFLQLNSHTTNPEQTLPGTNLTGFLSPVDNHMRNLTSQDLLYDLDINIFDEINLMSLATEDNFDPIDVSQLFDEPDSDSGLSLDSSHNNTSVIKSNSSHSVCDEGAIGYCTDHESSSHHDLEGAVGGYYPEPSKLCHLDQSDSDFHGDLTFQHVFHNHTYHLQPTAPESTSEPFPWPGKSQKIRSRYLEDTDRNLSRDEQRAKALHIPFSVDEIVGMPVDSFNSMLSRYYLTDLQVSLIRDIRRRGKNKVAAQNCRKRKLDIILNLEDDVCNLQAKKETLKREQAQCNKAINIMKQKLHDLYHDIFSRLRDDQGRPVNPNHYALQCTHDGSILIVPKELVASGHKKETQKGKRK

SEQ ID NO: 4087 - protein, 48 aa, Homo sapiens
METIRRLSIHLNKYLALTPPRRNSLMLWLIPWSMTSFMAKMVFFLHMV

SEQ ID NO: 4088 - protein, 341 aa, Homo sapiens
LQLSKRLPPCFSHKTWVFSVLMGSCLLVTSGFSLYLGNVFPAEMDYLRCAAGSCIPSAIVSFTVSRRNANVIPNFQILFVSTFAVTTTCLIWFGCKLVLNPSAININFNLILLLLLELLMAATVIIAARSSEEDCKKKKGSMSDSANILDEVPFPARVLKSYSVVEVIAGISAVLGGIIALNVDDSVSGPHLSVTFFWILVACFPSAIASHVAAECPSKCLVEVLIAISSLTSPLLFTASGYLSFSIMRIVEMFKDYPPAIKPSYDVLLLLLLLVLLLQAGLNTGTAIQCVRFKVSARLQGASWDTQNGPQERLAGEVARSPLKEFDKEKAWRAVVVQMAQ

SEQ ID NO: 4089 - protein, 229 aa, Homo sapiens
MDPDRAFICGESRQFAQCLIFGFLFLTSGMLISVLGIWVPGCGSNWAQEPLNETDTGDSEPRMCGFLSLQIMGPLIVLVGLCFFVVAHVKKRNTLNAGQDASEREEGQIQIMEPVQVTVGDSVIIFPPPPPPYFPESSASAVAESPGTNSLLPNENPPSYYSIFNYGTPTSEGAASERDCESIYTISGTNSSSEASHTPHLPSELPPRYEEKENAAATFLPLSSEPSPP

SEQ ID NO: 4090 - protein, 1087 aa, Homo sapiens
LLGVFLALVAPGVLGISCGSPPPILNGRISYYSTPIAVGTVIRYSCSGTFRLIGEKSLLCITKDKVDGTWDKPAPKCEYFNKYSSCPEPIVPGGYKIRGSTPYRHGDSVTFACKTNFSMNGNKSVWCQANNMWGPTRLPTCVSVFPLECPALPMIHNGHHTSENVGSIAPGLSVTYSCESGYLLVGEKIINCLSSGKWSAVPPTCEEARCKSLGRFPNGKVKEPPILRVGVTANFFCDEGYRLQGPPSSRCVIAGQGVAWTKMPVCEEIFCPSPPPILNGRHIGNSLANVSYGSIVTYTCDPDPEEGVNFILIGESTLRCTVDSQKTGTWSGPAPRCELSTSAVQCPHPQILRGRMVSGQKDRYTYNDTVIFACMFGFTLKGSKQIRCNAQGTWEPSAPVCEKECQAPPNILNGQKEDRHMVRFDPGTSIKYSCNPGYVLVGEESIQCTSEGVWTPPVPQCKVAACEATGRQLLTKPQHQFVRPDVNSSCGEGYKLSGSVYQECQGTIPWFMEIRLCKEITCPPPPVIYNGAHTGSSLEDFPYGTTVTYTCNPGPERGVEFSLIGESTIRCTSNDQERGTWSGPAPLCKLSLLAVQCSHVHIANGYKISGKEAPYFYNDTVTFKCYSGFTLKGSSQIRCKADNTWDPEIPVCEKGCQSPPGLHHGRHTGGNTVFFVSGMTVDYTCDPGYLLVGNKSIHCMPSGNWSPSAPRCEETCQHVRQSLQELPAGSRVELVNTSCQDGYQLTGHAYQMCQDAENGIWFKKIPLCKVIHCHPPPVIVNGKHTGMMAENFLYGNEVSYECDQGFYLLGEKKLQCRSDSKGHGSWSGPSPQCLRSPPVTRCPNPEVKHGYKLNKTHSAYSHNDIVYVDCNPGFIMNGSRVIRCHTDNTWVPGVPTCIKKAFIGCPPPPKTPNGNHTGGNIARFSPGMSILYSCDQGYLLVGEALLLCTHEGTWSQPAPHCKEVNCSSPADMDGIQKGLEPRKMYQYGAVVTLECEDGYMLEGSPQSQCQSDHQWNPPLAVCRSRSLAPVLCGIAAGLILLTFLIVITLYVISKHRARNYYTDTSQKEAFHLEAREVYSVDPYNPAS

SEQ ID NO: 4091 - protein, 268 aa, Homo sapiens
ISFASIIPVPDFIMGNSCYNIVATLLLVLNFERTRSLQDPCSNCPAGTFCDNNRNQICSPCPPNSFSSAGGQRTCDICRQCKGVFRTRKECSSTSNAECDCTPGFHCLGAGCSMCEQDCKQGQELTKKGCKDCCFGTFNDQKRGICRPWTNCSLDGKSVLVNGTKERDVVCGPSPADLSPGASSVTPPAPAREPGHSPQIISFFLALTSTALLFLLFFLTLRFSVVKRGRKKLLYIFKQPFMRPVQTTQEEDGCSCRFPEEEEGGCEL

SEQ ID NO: 4092 - protein, 254 aa, Homo sapiens
LLPVGPLGRSMRWCLLLIWAQGLRQAPLASGMMTGTIETTGNISAEKGGSIILQCHLSSTTAQVTQVNWEQQDQLLAICNADLGWHISPSFKDRVAPGPGLGLTLQSLTVNDTGEYFCIYHTYPDGTYTGRIFLEVLESSVAEHGARFQIPLLGAMAATLVVICTAVIVVVALTRKKKALRIHSVEGDLRRKSAGQEEWSPSAPSPPGSCVQAEAAPAGLCGEQRGEDCAELHDYFNVLSYRSLGNCSFFTETG

SEQ ID NO: 4093 - protein, 472 aa, Homo sapiens
IACAFTLSLVYLIRLAAGHLVQLPAGVKSPPYIFSPIPFLGHAIAFGKSPIEFLENAYEKYGPVFSFTMVGKTFTYLLGSDAAALLFNSKNEDLNAEDVYSRLTTPVFGKGVAYDVPNPVFLEQKKMLKSGLNIAHFKQHVSIIEKETKEYFESWGESGEKNVFEALSELIILTASHCLHGKEIRSQLNEKVAQLYADLDGGFSHAAWLLPGWLPLPSFRRRDRAHREIKDIFYKAIQKRRQSQEKIDDILQTLLDATYKDGRPLTDDEVAGMLIGLLLAGQHTSSTTSAWMGFFLARDKTLQKKCYLEQKTVCGENLPPLTYDQLKDLNLLDRCIKETLRLRPPIMIMMRMARTPQTVAGYTIPPGHQVCVSPTVNQRLKDSWVERLDFNPDRYLQDNPASGEKFAYVPFGAGRHRCIGENFAYVQIKTIWSTMLRLYEFDLIDGYFPTVNYTTMIHTPENPVIRYKRRSK

SEQ ID NO: 4094 - protein, 1023 aa, Homo sapiens
LGPQRPGSEPDIPARGQPHPPRPVGVSTSAQAQVQPPAMHRRRLALGLGFCLLAGTSLSVLWVYLENWLPVSYVPYYLPCPEILPMMMALSCLCHQQHEAALQEGEATPARGMVTVPSAQAAGAQAHTAADTHTLVGAHRLRGNLQPRASAAHLPATEPDHWGHGVCRGESSTQEIGEELINGVIYSISLRKVQLHHGGNKGQRWLGYENESALNLYETCKVRTVKAGTLEKLVEHLVPAFQGSDLSYVTIFLCTYRAFTTTQQVLDLLFKRYGRCDALTASSRYGCILPYSDEDGGPQDQLKNAISSILGTWLDQYSEDFCQPPDFPCLKQLVAYVQLNMPGSDLERRAHLLLAQLEHSEPIEAEPEALSPVPALKPTPELELALTPARAPSPVPAPAPEPEPAPTPAPGSELEVAPAPAPELQQAPEPAVGLESAPAPALELEPAPEQDPAPSQTLELEPAPAPVPSLQPSWPSPVVAENGLSEEKPHLLVFPPDLVAEQFTLMDAELFKKVVPYHCLGSIWSQRDKKGKEHLAPTIRATVTQFNSVANCVITTCLGNRSTKAPDRARVVEHWIEVARECRILKNFSSLYAILSALQSNSIHRLKKTWEDVSRDSFRIFQKLSEIFSDENNYSLSRELLIKEGTSKFATLEMNPKRAQKRPKETGIIQGTVPYLGTFLTDLVMLDTAMKDYLYGRLINFEKRRKEFEVIAQIKLLQSACNNYSIAPDEQFGAWFRAVERLSETESYNLSCELEPPSESASNTLRTKKNTAIVKRWSDRQAPSTELSTSGSSHSKSCDQLRCGPYLSSGDIADALSVHSAGSSSSDVEEINISFVPESPDGQEKKFWESASQSSPETSGISSASSSTSSSSASTTPVAATRTHKRSVSGLCNSSSALPLYNQQVGDCCIIRVSLDVDNGNMYKSILVTSQDKAPAVIRKAMDKHNLEEEEPEDYELLQILSDDRKLKIPENANVFYAMNSTANYDFVLKKRTFTKGVKVKHGASSTLPRMKQKGLKIAKGIF

SEQ ID NO: 4095 - protein, 153 aa, Homo sapiens
LWVLLGAVTLLFLISLAAHLSQWTRGRSRSHPGQGRSGESVEEVPLYGNLHYLQTGRLSQDPEPDQQDPTLGGPARAAEEVMCYTSLQLRPPQGRIPGPGTPVKYSEVVLDSEPKSQASGPEPELYASVCAQTRRARASFPDQAYANSQPAAS

SEQ ID NO: 4096 - protein, 421 aa, Homo sapiens
VLCAKPWPRGPGHGPGARGEAASRGAVTGRASAMKTLIAAYSGVLRGERQAEADRSQRSHGGPALSREGSGRWGTGSSILSALQDLFSVTWLNRSKVEKQLQVISVLQWVLSFLVLGVACSAILMYIFCTDCWLIAVLYFTWLVFDWNTPKKGGRRSQWVRNWAVWRYFRDYFPIQLVKTHNLLTTRNYIFGYHPHGIMGLGAFCNFSTEATEVSKKFPGIRPYLATLAGNFRMPVLREYLMSGGICPVSRDTIDYLLSKNGSGNAIIIVVGGAAESLSSMPGKNAVTLRNRKGFVKLALRHGADLVPIYSFGENEVYKQVIFEEGSWGRWVQKKFQKYIGFAPCIFHGRGLFSSDTWGLVPYSKPITTVVGEPITIPKLEHPTQQDIDLYHTMYMEALVKLFDKHKTKFGLPETEVLEVN

SEQ ID NO: 4097 - protein, 1328 aa, Homo sapiens
LCALLSCLLLTGSSSGSKLKDPELSLKGTQHIMQAGQTLHLQCRGEAAHKWSLPEMVSKESERLSITKSACGRNGKQFCSTLTLNTAQANHTGFYSCKYLAVPTSKKKETESAIYIFISDTGRPFVEMYSEIPEIIHMTEGRELVIPCRVTSPNITVTLKKFPLDTLIPDGKRIIWDSRKGFIISNATYKEIGLLTCEATVNGHLYKTNYLTHRQTNTIIDVQISTPRPVKLLRGHTLVLNCTATTPLNTRVQMTWSYPDEKNKRASVRRRIDQSNSHANIFYSVLTIDKMQNKDKGLYTCRVRSGPSFKSVNTSVHIYDKAFITVKHRKQQVLETVAGKRSYRLSMKVKAFPSPEVVWLKDGLPATEKSARYLTRGYSLIIKDVTEEDAGNYTILLSIKQSNVFKNLTATLIVNVKPQIYEKAVSSFPDPALYPLGSRQILTCTAYGIPQPTIKWFWHPCNHNHSEARCDFCSNNEESFILDADSNMGNRIESITQRMAIIEGKNKMASTLVVADSRISGIYICIASNKVGTVGRNISFYITDVPNGFHVNLEKMPTEGEDLKLSCTVNKFLYRDVTWILLRTVNNRTMHYSISKQKMAITKEHSITLNLTIMNVSLQDSGTYACRARNVYTGEEILQKKEITIRDQEAPYLLRNLSDHTVAISSSTTLDCHANGVPEPQITWFKNNHKIQQEPGIILGPGSSTLFIERVTEEDEGVYHCKATNQKGSVESSAYLTVQGTSDKSNLELITLTCTCVAATLFWLLLTLFIRKMKRSSSEIKTDYLSIIMDPDEVPLDEQCERLPYDASKWEFARERLKLGKSLGRGAFGKVVQASAFGIKKSPTCRTVAVKMLKEGATASEYKALMTELKILTHIGHHLNVVNLLGACTKQGGPLMVIVEYCKYGNLSNYLKSKRDLFFLNKDAALHMEPKKEKMEPGLEQGKKPRLDSVTSSESFASSGFQEDKSLSDVEEEEDSDGFYKEPITMEDLISYSFQVARGMEFLSSRKCIHRDLAARNILLSENNVVKICDFGLARDIYKNPDYVRKGDTRLPLKWMAPESIFDKIYSTKSDVWSYGVLLWEIFSLGGSPYPGVQMDEDFCSRLREGMRMRAPEYSTPEIYQIMLDCWHRDPKERPRFAELVEKLGDLLQANVQQDGKDYIPINAILTGNSGFTYSTPAFSEDFFKESISAPKFNSGSSDDVRYVNAFKFMSLERIKTFEELLPNATSMFDDYQGDSSTLLASPMLKRFTWTDSKPKASLKIDLRVTSKSKESGLSDVSRPSFCHSSCGHVSEGKRRFTYDHAELERKIACCSPPPDYNSVVLYSTPPI

SEQ ID NO: 4098 - protein, 1073 aa, Homo sapiens
LGFQFDKKRLPVEESEGKEEELAHSCLGGCGRRKMARALCPLQALWLLEWVLLLLGPCAAPPAWALNLDPVQLTFYAGPNGSQFGFSLDFHKDSHGRVAIVVGAPRTLGPSQEETGGVFLCPWRAEGGQCPSLLFDLRDETRNVGSQTLQTFKARQGLGASVVSWSDVIVACAPWQHWNVLEKTEEAEKTPVGSCFLAQPESGRRAEYSPCRGNTLSRIYVENDFSWDKRYCEAGFSSVVTQAGELVLGAPGGYYFLGLLAQAPVADIFSSYRPGILLWHVSSQSLSFDSSNPEYFDGYWGYSVAVGEFDGDLNTTEYVVGAPTWSWTLGAVEILDSYYQRLHRLRGEQMASYFGHSVAVTDVNGDGRHDLLVGAPLYMESRADRKLAEVGRVYLFLQPRGPHALGAPSLLLTGTQLYGRFGSAIAPLGDLDRDGYNDIAVAAPYGGPSGRGQVLVFLGQSEGLRSRPSQVLDSPFPTGSAFGFSLRGAVDIDDNGYPDLIVGAYGANQVAVYRAQPVVKASVQLLVQDSLNPAVKSCVLPQTKTPVSCFNIQMCVGATGHNIPQKLSLNAELQLDRQKPRQGRRVLLLGSQQAGTTLNLDLGGKHSPICHTTMAFLRDEADFRDKLSPIVLSLNVSLPPTEAGMAPAVVLHGDTHVQEQTRIVLDCGEDDVCVPQLQLTASVTGSPLLVGADNVLELQMDAANEGEGAYEAELAVHLPQGAHYMRALSNVEGFERLICNQKKENETRVVLCELGNPMKKNAQIGIAMLVSVGNLEEAGESVSFQLQIRSKNSQNPNSKIVLLDVPVRAEAQVELRGNSFPASLVVAAEEGEREQNSLDSWGPKVEHTYELHNNGPGTVNGLHLSIHLPGQSQPSDLLYILDIQPQGGLQCFPQPPVNPLKVDWGLPIPSPSPIHPAHHKRDRRQIFLPEPEQPSRLQDPVLVSCDSAPCTVVQCDLQEMARGQRAMVTVLAFLWLPSLYQRPLDQFVLQSHAWFNVSSLPYAVPPLSLPRGEAQVWTQLLRALEERAIPIWWVLVGVLGGLLLLTILVLAMWKVGFFKRNRPPLEEDDEEGE

SEQ ID NO: 4099 - protein, 537 aa, Homo sapiens
MLGLIVYLGMMVGAFLWGGLADRLGRRQCLLISLSVNSVFAFFSSFVQGYGTFLFCRLLSGVGIGGSIPIVFSYFSEFLAQEKRGEHLSWLCMFWMIGGVYAAAMAWAIIPHYGWSFQMGSAYQFHSWRVFVLVCAFPSVFAIGALTTQPESPRFFLENGKHDEAWMVLKQVHDTNMRAKGHPERVFSVTHIKTIHQEDELIEIQSDTGTWYQRWGVRALSLGGQVWGNFLSCFGPEYRRITLMMMGVWFTMSFSYYGLTVWFPDMIRHLQAVDYASRTKVFPGERVEHVTFNFTLENQIHRGGQYFNDKFIGLRLKSVSFEDSLFEECYFEDVTSSNTFFRNCTFINTVFYNTDLFEYKFVNSRLINSTFLHNKEGCPLDVTGTGEGAYMVYFVSFLGTLAVLPGNIVSALLMDKIGRLRMLAGSSVMSCVSCFFLSFGNSESAMIALLCLFGGVSIASWNALDVLTVELYPSDKRTTAFGFLNALCKLAAVLGISIFTSFVGITKAAPILFASAALALGSSLALKLPETRGQVLQ

SEQ ID NO: 4100 - protein, 1925 aa, Homo sapiens
MQSLCPDGQRDEFGFLQYANSTVTQLLERLDRVVEEGNLFDPARPSLGSELEALRQHLEALSAGPGTSGSHLDRSTVSSFSLDSVARNPQELWRFLTQNLSLPNSTAQALLAARVDPPEVYHLLFGPSSALDSQSGLHKGQEPWSRLGGNPLFRMEELLLAPALLEQLTCTPGSGELGRILTVPESQKGALQGYRDAVCSGQAAARARRFSGLSAELRNQLDVAKVSQQLGLDAPNGSDSSPQAPPPRRLQALLGDLLDAQKVLQDVDVLSALALLLPQGACTGRTPGPPASGAGGAANGTGAGAVMGPNATAEEGAPSAAALATPDTLQGQCSAFVQLWAGLQPILCGNNRTIEPEALRRGNMSSLGFTSKEQRNLGLLVHLMTSNPKILYAPAGSEVDRVILKANETFAFVGNVTHYAQVWLNISAEIRSFLEQGRLQQHLRWLQQYVAELRLHPEALNLSLDELPPALRQDNFSLPSGMALLQQLDTIDNAACGWIQFMSKVSVDIFKGFPDEESIVNYTLNQAYQDNVTVFASVIFQTRKDGSLPPHVHYKIRQNSSFTEKTNEIRRAYWRPGPNTGGRFYFLYGFVWIQDMMERAIIDTFVGHDVVEPGSYVQMFPYPCYTRDDFLFVIEHMMPLCMVISWVYSVAMTIQHIVAEKEHRLKEVMKTMGLNNAVHWVAWFITGFVQLSISVTALTAILKYGQVLMHSHVVIIWLFLAVYAVATIMFCFLVSVLYSKAKLASACGGIIYFLSYVPYMYVAIREEVAHDKITAFEKCIASLMSTTAFGLGSKYFALYEVAGVGIQWHTFSQSPVEGDDFNLLLAVTMLMVDAVVYGILTWYIEAVHPGMYGLPRPWYFPLQKSYWLGSGRTEAWEWSWPWARTPRLSVMEEDQACAMESRRFEETRGMEEEPTHLPLVVCVDKLTKVYKDDKKLALNKLSLNLYENQVVSFLGHNGAGKTTTMSILTGLFPPTSGSATIYGHDIRTEMDEIRKNLGMCPQHNVLFDRLTVEEHLWFYSRLKSMAQEEIRREMDKMIEDLELSNKRHSLVQTLSGGMKRKLSVAIAFVGGSRAIILDEPTAGVDPYARRAIWDLILKYKPGRTILLSTHHMDEADLLGDRIAIISHGKLKCCGSPLFLKGTYGDGYRLTLVKRPAEPGGPQEPGLASSPPGRAPLSSCSELQVSQFIRKHVASCLLVSDTSTELSYILPSEAAKKGAFERLFQHLERSLDALHLSSFGLMDTTLEEVFLKVSEEDQSLENSEADVKESRKDVLPGAEGPASGEGHAGNLARCSELTQSQASLQSASSVGSARGDEGAGYTDVYGDYRPLFDNPQDPDNVSLQEVEAEALSRVGQGSRKLDGGWLKVRQFHGLLVKRFHCARRNSKALFSQILLPAFFVCVAMTVALSVPEIGDLPPLVLSPSQYHNYTQPRGNFIPYANEERREYRLRLSPDASPQQLVSTFRLPSGVGATCVLKSPANGSLGPTLNLSSGESRLLAARFFDSMCLESFTQGLPLSNFVPPPPSPAPSDSPASPDEDLQAWNVSLPPTAGPEMWTSAPSLPRLVREPVRCTCSAQGTGFSCPSSVGGHPPQMRVVTGDILTDITGHNVSEYLLFTSDRFRLHRYGAITFGNVLKSIPASFGTRAPPMVRKIAVRRAAQVFYNNKGYHSMPTYLNSLNNAILRANLPKSKGNPAAYGITVTNHPMNKTSASLSLDYLLQGTDVVIAIFIIVAMSFVPASFVVFLVAEKSTKAKHLQFVSGCNPIIYWLANYVWDMLNYLVPATCCVIILFVFDLPAYTSPTNFPAVLSLFLLYGWSITPIMYPASFWFEVPSSAYVFLIVINLFIGITATVATFLLQLFEHDKDLKVVNSYLKSCFLIFPNYNLGHGLMEMAYNEYINEYYAKIGEGARGAGKAVGAPQGPEHRP

SEQ ID NO: 4101 - protein, 52 aa, Homo sapiens
LSAPCIYSEVMEALKLQPGLSFLNLGSGTGYLSTMVGLILGNFIFVKFYFKK

SEQ ID NO: 4102 - protein, 150 aa, Homo sapiens
KVSCWYKYLLFSYNIIFWLAGVVFLGVGLWAWSEKGVLSDLTKVTRMHGIDPVVLVLMVGVVMFTLGFAGCVGALRENICLLNFFCGTIVLIFFLELAVAVLAFLFQDWVRDRFREFFESNIKSYRDDIDLQNLIDSLQKAVSTSPAGPR

SEQ ID NO: 4103 - protein, 220 aa, Homo sapiens
MESPTLLCVALLFFAPDGVLAVSSTKWFHNGSLSEETNSSLNIVNAKFEDSGEYKCQHQQVNESEPVYLEVFSDWLLLQASAEVVMEGQPLFLRCHGWRNWDVYKVIYYKDGEALKYWYENHNISITNATVEDSGTYYCTGKVWQLDYESEPLNITVIKAPREKYWLQFFIPLLVVILFAVDTGLFISTQQQVTFLLKIKRTRKGFRLLNPHPKPNPKNN

SEQ ID NO: 4104 - protein, 257 aa, Homo sapiens
MWGLLTFIMVPGCQAELCDDDPPEIPHATFKAMAYKEGTMLNCECKRGFRRIKSGSLYMLCTGNSSHSSWDNQCQCTSSATRNTTKQVTPQPEEQKERKTTEMQSPMQPVDQASLPGHCREPPPWENEATERIYHFVVGQMVYYQCVQGYRALHRGPAESVCKMTHGKTRWTQPQLICTGEEKPQASPEGRPESETSCLVTTTDFQIQTEMAATMETSIFTTEYQVAVAGCVFLLISVLLLSGLTWQRRQRKSRRTI

SEQ ID NO: 4105 - protein, 439 aa, Homo sapiens
MLHVDRQGGTWRLLGSVVFIHRQELITTLYIGFLGLIFSSYFVYLAEKDAVNESGRVEFGSYADALWWGVVTVTTIGYGDKVPQTWVGKTIASCFSVFAISFFALPAGILGSGFALKVQQKQRQKHFNRQIPAAASLIQTAWRCYAAENPDSSTWKIYIRKAPRSHTLLSPSPKPKKSVVVKKKKFKLDKDNGVTPGEKMLTVPHITCDPPEERRLDHFSVDGYDSSVRKSPTLLEVSMPHFMRTNSFAEDLDLEGETLLTPITHISQLREHHRATIKVIRRMQYFVAKKKFQQARKPYDVRDVIEQYSQGHLNLMVRIKELQRRLDQSIGKPSLFISVSEKSKDRGSNTIGARLNRVEDKVTQLDQRLALITDMLHQLLSLHGGSTPGSGGPPREGGAHITQPCGSGGSVDPELFLPSNTLPTYEQLTVPRRGPDEGS

SEQ ID NO: 4106 - protein, 478 aa, Homo sapiens
MRKPRCSLPDVLGVAGLVRRRRRYALSGSVWKKRTLTWRVRSFPQSSQLSQETVRVLMSYALMAWGMESGLTFHEVDSPQGQEPDILIDFARAFHQDSYPFDGLGGTLAHAFFPGEHPISGDTHFDDEETWTFGSKDGEGTDLFAVAVHEFGHALGLGHSSAPNSIMRPFYQGPVGDPDKYRLSQDDRDGLQQLYGKAPQTPYDKPTRKPLAPPPQPPASPTHSPSFPIPDRCEGNFDAIANIRGETFFFKGPWFWRLQPSGQLVSPRPARLHRFWEGLPAQVRVVQAAYARHRDGRILLFSGPQFWVFQDRQLEGGARPLTELGLPPGEEVDAVFSWPQNGKTYLVRGRQYWRYDEAAARPDPGYPRDLSLWEGAPPSPDDVTVSNAGDTYFFKGAHYWRFPKNSIKTEPDAPQPMGPNWLDCPAPSSGPRAPRPPKATPVSETCDCQCELNQAAGRWPAPIPLLLLPLLVGGVASR

SEQ ID NO: 4107 - protein, 70 aa, Homo sapiens
LMAGGFPLSNDLLWLHTIFAVIYLFLTVGFMRHHTQSIKYKEENLSPAMQRRLIELLWKWILCTAWKKTL

SEQ ID NO: 4108 - protein, 49 aa, Homo sapiens
LHPQQQCAVSMWKKRSSFTYLFLFVSLPGHSLFQRLNSLCNGVWVHLSL

SEQ ID NO: 4109 - protein, 369 aa, Homo sapiens
IKKPVQQPAKQAPHQTLAARFMDGHITFQTAATVKIPTTTPATTKNTATTSPITYTLVTTQATPNNSHTAPPVTEVTVGPSLAPYSLPPTITPPAHTTGTSSSTVSHTTGNTTQPSNQTTLPATLSIALHKSTTGQKPVQPTHAPGTTAAAHNTTRTAAPASTVPGPTLAPQPSSVKTGIYQVLNGSRLCIKAEMGIQLIVQDKESVFSPRRYFNIDPNATQASGNCGTRKSNLLLNFQGGFVNLTFTKDEESYYISEVGAYLTVSDPETIYQGIKHAVVMFQTAVGHSFKCVSEQSLQLSAHLQVKTTDVQLQAFDFEDDHFGNVDECSSDYTIVLPVIGAIVVGLCLMGMGVYKIRLRCQSSGYQRI

SEQ ID NO: 4110 - protein, 39 aa, Homo sapiens
LLSIYFYYSLPNAVGPPFTWMLALLGLSQALNILLGLKV

SEQ ID NO: 4111 - protein, 203 aa, Homo sapiens
LRSWTAADTVAQITQRFYEAEEYAEEFRTYLEGECLELLRRYLENGKETLQRADPPKAHVAHHPISDHEATLRCWALGFYPAEITLTWQRDGEEQTQDTELVETRPAGDGTFQKWAAVVVPPGEEQRYTCHVQHEGLPQPLILRWEQSPQPTIPIVGIVAGLVVLGAVVTGAVVAAVMWRKKSSDRNRGSYSQAAGKMKEADP

SEQ ID NO: 4112 - protein, 43 aa, Homo sapiens
KMINMEVMKMLFTLEPLMIDLMFLLFITMLNAIVLYLELSITH

SEQ ID NO: 4113 - protein, 72 aa, Homo sapiens
IGTASLIVCVLAIVDPYNNPVPRGLEAFTVGLVVLVIGTSMGFNSGYAVNPARDFGPRLFTALAGWGSAVFT

SEQ ID NO: 4114 - protein, 48 aa, Homo sapiens
LPQALQPLLLVLPLLQQRRRKMRRRRSLKSQMMTWDLAFLIKFLLPCK

SEQ ID NO: 4115 - protein, 37 aa, Homo sapiens
ILGVGVGVAIIELLGMVLSICLCRHVHSEDYSKVPKY

SEQ ID NO: 4116 - protein, 185 aa, Homo sapiens
RPGKTDDKEFSVPWHLIAVTLGILCLLLLMIVTVLVTNIFQCIQEKHQRQEILRNCSEKYIMQNDNYLKEQILTNKTLKFDVLKNSFQQKKELDSRLIQKNRCHRENEIVFKVLQNTGKFSEDHGSCCGVNCYYFTMQKKDWKGCKQTCQHCRSSLLKIDDKDELVFYIHFYSLGLCFSMLDLRY

SEQ ID NO: 4117 - protein, 31 aa, Homo sapiens
LWGPRNHTREMHSLIWPALPLWVLYLFKVIH

SEQ ID NO: 4118 - protein, 105 aa, Homo sapiens
VGATHSASIQEETEEVVNSQLPLLLSLLALLLLLLVGASLLAWRMFQKWIKAGDHSELSQNPKQASPREELHYASVVFDSNTNRIAAQRPREEEPDSDYSVIRKT

SEQ ID NO: 4119 - protein, 50 aa, Homo sapiens
IFFRLFWKDFAASRRSWTSALALWEGFGLSGSDFAISPWGLPWSRIHCGL

SEQ ID NO: 4120 - protein, 49 aa, Homo sapiens
KPPRPARSTAEDSSTPRDMLGLRPPLLALVGLLSLGCGEFCVPRRGLHA

SEQ ID NO: 4121 - protein, 97 aa, Homo sapiens
MKHTQSGQSTSPLVIDYTCRVCQMAFVFSSLIPLLLMTPVFCLGNTSECFQNFSQSHKCILMHSPPSAMAELPPSANTSVCSTLYFYGLTYPSPDIV

SEQ ID NO: 4122 - protein, 409 aa, Homo sapiens
MAFLCSPPTPSARFGRRGIVLLTLGLVGPCGVGGAAAGSSTGVMALRFLLGFLLAGVDLGVYLMRLELCDPTQRLRVALAGELVGVGGHFLFLGLALVSKDWRFLQRMITAPCILFLFYGWPGLFLESARWLIVKRQIEEAQSVLRILAERNRPHGQMLGEEAQEALQDLENTCPLPATSSFSFASLLNYRNIWKNLLILGFTNFIAHAIRHCYQPVGGGGSPSDFYLCSLLASGTAALACVFLGVTVDRFGRRGILLLSMTLTGIASLVLLGLWDYLNEAAITTFSVLGLFSSQAAAILSTLLAAEVIPTTVRGRGLGLIMALGALGGLSGPAQRLHMGHGAFLQHVVLAACALLCILSIMLLPETKRKLLPEVLRDGELCRRPSLLRQPPPTRCDHVPLLATPNPAL

SEQ ID NO: 4123 - protein, 638 aa, Homo sapiens
MCEVSENPYSTLWSFLSWRRKLLAQKYHDNAQLITGMSFHGTTIGLAPLMAMCSVYQSGGVNMDHSENAIGVAATMAHEMGHNFGMTHDSADCCSASAADGGCIMAAATGHPFPKVFNGCNRRELDRYLQSGGGMCLSNMPDTRMLYGGRRCGNGYLEDGEECDCGEEEECNNPCCNASNCTLRPGAECAHGSCCHQCKLLAPGTLCREQARQCDLPEFCTGKSPHCPTNFYQMDGTPCEGGQAYCYNGMCLTYQEQCQQLWGPGARPAPDLCFEKVNVAGDTFGNCGKDMNGEHRKCNMRDAKCGKIQCQSSEARPLESNAVPIDTTIIMNGRQIQCRGTHVYRGPEEEGDMLDPGLVMTGTKCGYNHICFEGQCRNTSFFETEGCGKKCNGHGVCNNNQNCHCLPGWAPPFCNTPGHGGSIDSGPMPPESVGPVVAGVLVAILVLAVLMLMYYCCRQNNKLGQLKPSALPSKLRQQFSCPFRVSQNSGTGHANPTFKLQTPQGKRKVINTPEILRKPSQPPPRPPPDYLRGGSPPAPLPAHLSRAARNSPGPGSQIERTESSRRPPPSRPIPPAPNCIVSQKCLLPPAMILRAPQPSGTVVCLVISFNMAFYRSMRIRIEPGIKTKLLVLLVWKQF

SEQ ID NO: 4124 - protein, 61 aa, Homo sapiens
IFLCVWMFIGIILTALIKSDLRRHNINIGITNVDVKAIPADSPTDQEPKTVMLSKQSESAI

SEQ ID NO: 4125 - protein, 73 aa, Homo sapiens
ICSSAPLLYFLFICPFVLLLLLLISLLCLYWKARKLSTLRSNTRKEKALWVDLKEAGGVTTNRREDEEEDEGN

SEQ ID NO: 4126 - protein, 69 aa, Homo sapiens
VAACVLLLTSAQLGLHIWQLRSQCMWPRETQLLLEVPPSTEDARSCQFPEEERGERSAEEKGRLGDLWV

SEQ ID NO: 4127 - protein, 35 aa, Homo sapiens
IPYLTALGDLLGTGLLALSFHVLWLIGDRDTDVGD

SEQ ID NO: 4128 - protein, 43 aa, Homo sapiens
ITGFRLSLGILALLTLLGALGIANSFLDEYLDLNIAKKLRRQF

SEQ ID NO: 4129 - protein, 40 aa, Homo sapiens
LLLSIYFYYSLPNAVGPPFTWMLALLGLSQALNILLGLKV

SEQ ID NO: 4130 - protein, 71 aa, Homo sapiens
LVSEGPFCFQGGACEKWHLERGRKRRKNRSSASDLRWLKERMYLVSAISLHPSMTLLSMSLIFLARKPSAV

SEQ ID NO: 4131 - protein, 484 aa, Homo sapiens
LPNKTETPVSQEDALNLMNENIDILETAIKQAAEQGARIIVTPEDALYGWKFTRETVFPYLEDIPDPQVNWIPCQDPHRFGHTPVQARLSCLAKDNSIYVLANLGDKKPCNSRDSTCPPNGYFQYNTNVVYNTEGKLVARYHKYHLYSEPQFNVPEKPELVTFNTAFGRFGIFTCFDIFFYDPGVTLVKDFHVDTILFPTAWMNVLPLLTAIEFHSAWAMGMGVNLLVANTHHVSLNMTGSGIYAPNGPKVYHYDMKTELGKLLLSEVDSHPLSSLAYPTAVNWNAYATTIKPFPVQKNTFRGFISRDGFNFTELFENAGNLTVCQKELCCHLSYRMLQKEENEVYVLGAFTGLHGRRRREYWQVCTLLKCKTTNLTTCGRPVETASTRFEMFSLSGTFGTEYVFPEVLLTEIHLSPGKFEVLKDGRLVNKNGSSGPILTVSLFGRWYTKDSLYSSCGTSNSAITYLLIFILLMIIALQNIVML

SEQ ID NO: 4132 - protein, 170 aa, Homo sapiens
IPMYFQYQIIMTMIVHKNWVDLAWAVSYYIRFFITYIPFYGILGALLFLNFIRFLESHWFVWVTQMNHIVMEIDQEAYRDWFSSQLTATCNVEQSFFNDWFSGHLNFQIEHHLFPTMPRHNLHKIAPLVKSLCAKHGIEYQEKPLLRALLDIIRSLKKSGKLWLDAYLHK

SEQ ID NO: 4133 - protein, 212 aa, Homo sapiens
ICALSLAACLCLVARRAPSTSIYLEAKGTSVCQAAAMGGAMVLLYASRACYNLTALALAPQSRLDTFDYDWYNVSDQADLVNDLGNKGYLVFGLILFVWELLPTTLLVGFFRVHRPPQDLSTSHILNGQVFASRSYFFDRAGHCEDEGCSWEHSRGESTSMSGSLGSGSWYGAIGREPGWYGGSQTKTTPLLFSQVPGPGGHHHSLYSTPQT

SEQ ID NO: 4134 - protein, 1548 aa, Homo sapiens
VDFQFSKGAVYWTDVSEEAIKQTYLNQTGAAVQNVVISGLVSPDGLACDWVGKKLYWTDSETNRIEVANLNGTSRKVLFWQDLDQPRAIALDPAHGYMYWTDWGETPRIERAGMDGSTRKIIVDSDIYWPNGLTIDLEEQKLYWADAKLSFIHRANLDGSFRQKVVEGSLTHPFALTLSGDTLYWTDWQTRSIHACNKRTGGKRKEILSALYSPMDIQVLSQERQPFFHTRCEEDNGGCSHLCLLSPSEPFYTCACPTGVQLQDNGRTCKAGAEEVLLLARRTDLRRISLDTPDFTDIVLQVDDIRHAIAIDYDPLEGYVYWTDDEVRAIRRAYLDGSGAQTLVNTEINDPDGIAVDWVARNLYWTDTGTDRIEVTRLNGTSRKILVSEDLDEPRAIALHPVMGLMYWTDWGENPKIECANLDGQERRVLVNASLGWPNGLALDLQEGKLYWGDAKTDKIEVINVDGTKRRTLLEDKLPHIFGFTLLGDFIYWTDWQRRSIERVHKVKASRDVIIDQLPDLMGLKAVNVAKVVGTNPCADRNGGCSHLCFFTPHATRCGCPIGLELLSDMKTCIVPEAFLVFTSRAAIHRISLETNNNDVAIPLTGVKEASALDFDVSNNHIYWTDVSLKTISRAFMNGSSVEHVVEFGLDYPEGMAVDWMGKNLYWADTGTNRIEVARLDGQFRQVLVWRDLDNPRSLALDPTKGYIYWTEWGGKPRIVRAFMDGTNCMTLVDKVGRANDLTIDYADQRLYWTDLDTNMIESSNMLGQERVVIADDLPHPFGLTQYSDYIYWTDWNLHSIERADKTSGRNRTLIQGHLDFVMDILVFHSSRQDGLNDCMHNNGQCGQLCLAIPGGHRCGCASHYTLDPSSRNCSPPTTFLLFSQKSAISRMIPDDQHSPDLILPLHGLRNVKAIDYDPLDKFIYWVDGRQNIKRAKDDGTQPFVLTSLSQGQNPDRQPHDLSIDIYSRTLFWTCEATNTINVHRLSGEAMGVVLRGDRDKPRAIVVNAERGYLYFTNMQDRAAKIERAALDGTEREVLFTTGLIRPVALVVDNTLGKLFWVDADLKRIESCDLSGANRLTLEDANIVQPLGLTILGKHLYWIDRQQQMIERVEKTTGDKRTRIQGRVAHLTGIHAVEEVSLEEFSAHPCARDNGGCSHICIAKGDGTPRCSCPVHLVLLQNLLTCGEPPTCSPDQFACATGEIDCIPGAWRCDGFPECDDQSDEEGCPVCSAAQFPCARGQCVDLRLRCDGEADCQDRSDEADCDAICLPNQFRCASGQCVLIKQQCDSFPDCIDGSDELMCEITKPPSDDSPAHSSAIGPVIGIILSLFVMGGVYFVCQRVVCQRYAGANGPFPHEYVSGTPHVPLNFIAPGGSQHGPFTGIACGKSMMSSVSLMGGRGGVPLYDRNHVTGASSSSSSSTKATLYPPILNPPPSPATDPSLYNMDMFYSSNIPATARPYRPYIIRGMAPPTTPCSTDVCDSDYSASRWKASKYYLDLNSDSDPYPPPPTPHSQYLSAEDSCPPSPATERSYFHLFPPPPSPCTDSS

SEQ ID NO: 4135 - protein, 753 aa, Homo sapiens
LLLAWAAAGPTLGQDPWAAEPRAACGPSSCYALFPRRRTFLEAWRACRELGGDLATPRTPEEAQRVDSLVGAGPASRLLWIGLQRQARQCQLQRPLRGFTWTTGDQDTAFTNWAQPASGGPCPAQRCVALEASGEHRWLEGSCTLAVDGYLCQFGFEGACPALQDEAGQAGPAVYTTPFHLVSTEFEWLPFGSVAAVQCQAGRGASLLCVKQPEGGVGWSRAGPLCLGTGCSPDNGGCEHECVEEVDGHVSCRCTEGFRLAADGRSCEDPCAQAPCEQQCEPGGPQGYSCHCRLGFRPAEDDPHRCVDTDECQIAGVCQQMCVNYVGGFECYCSEGHELEADGISCSPAGAMGAQASQDLGDELLDDGEDEEDEDEAWKAFNGGWTEMPGILWMEPTQPPDFALAYRPSFPEDREPQIPYPEPTWPPPLSAPRVPYHSSVLSVTRPVVVSATHPTLPSAHQPPVIPATHPALSRDHQIPVIAANYPDLPSAYQPGILSVSHSAQPPAHQPPMISTKYPELFPAHQSPMFPDTRVAGTQTTTHLPGIPPNHAPLVTTLGAQLPPQAPDALVLRTQATQLPIIPTAQPSLTTTSRSPVSPAHQISVPAATQPAALPTLLPSQSPTNQTSPISPTHPHSKAPQIPREDGPSPKLALWLPSPAPTAAPTALGEAGLAEHSQRDDRWLLVALLVPTCVFLVVLLALGIVYCTRCGPHAPNKRITDCYRWVIHAGSKSPTEPMPPRGSLTGVQTCRTSV

(The sequence listing continues in the following parts.)